United States Patent Application Publication US 2005/0228172 A9 - sequence listing, part 129

SEQ ID NO: 604712 - DNA, 593 bp, Homo sapiens
gatgcattttaggtaagaacaattggtttattgatgagtctatggtaaatgtgaaagaactagtaagaaattaggaaactcaagtgtattgctctgaaataattacttcataaaatatttgtaatgatggaaacatcaagattgaggaaacatgaggttatttatctcccattcaatttctggtcagaccaaattatttaagagtgtattagatacttgcactatcagagagtgttgtgtgtattaccaggcattgctgtgcaatgagaatgccttgtgctgtgggattctgktctggaaagacataagaacagagatgacttcccaaagatttttgatgctctactgtaattctcctaaattatttgaaatattttcatttctttcccaactgtaagatccttagtgaaagagattctacactcttgccagttgaagagccaatttctcttatcaggaagttcctgataaactggatatctcctgcttctacttacttcagcttcttcttgctcagccttgagagggagtacagaaccgaagggaaagtttattgttcttttggtagtaatccctcacaaaataaagcaatc

SEQ ID NO: 604713 - DNA, 593 bp, Homo sapiens
gatgcattttaggtaagaacaattggtttattgatgagtctatggtaaatgtgaaagaactagtaagaaattaggaaactcaagtgtattgctctgaaataattacttcataaaatatttgtaatgatggaaacatcaagattgaggaaacatgaggttatttatctcccattcaatttctggtcagaccaaattatttaagagtgtattagatacttgcactatcagagagtgttgtgtgtattaccaggcattgctgtgcaatgagaatgccttgtgctgtgggattctgttctggaaagacataagaacagagatgacttcccaaagatttttgatgctctactgtaattctcctaaattatttgaaatattttcatttctttcccaactgtaagatccttagtgaaagagattctacactcttgccagttgaagagccaatttctcttatcaggaagttcctgataaactggatatctcctgcttctacttacttcagcttcttcttgctcagccttgagwgggagtacagaaccgaagggaaagtttattgttcttttggtagtaatccctcacaaaataaagcaatc

SEQ ID NO: 604714 - DNA, 593 bp, Homo sapiens
gatgcattttaggtaagaacaattggtttattgatgagtctatggtaaatgtgaaagaactagtaagaaattaggaaactcaagtgtattgctctgaaataattacttcataaaatatttgtaatgatggaaacatcaagattgaggaaacatgaggttatttatctcccattcaatttctggtcagaccaaattatttaagagtgtattagatacttgcactatcagagagtgttgtgtgtattaccaggcattgctgtgcaatgagaatgccttgtgctgtgggattctgttctggaaagacataagaacagagatgacttcccaaagatttttgatgctctactgtaattctcctaaattatttgaaatattttcatttctttcccaactgtaagatccttagtgaaagagattctacactcttgccagttgaagagccaatttctcttatcaggaagttcctgataaactggatatctcctgcttctacttacttcagcttcttcttgctcagccttgagagggagtacagaaccgaagggaaagtttattgttctttyggtagtaatccctcacaaaataaagcaatc

SEQ ID NO: 604715 - DNA, 597 bp, Homo sapiens
atagcaaagacttggaaccaacccaaatgcccatcaatgatagactggataaagaaaatgtggcacatatacatcatggaatactatgcagccataaaaaaggatgagtttatgtcctttgcagggacatggatgaagctgtaagccatcattctctgcaaactaacacaggaagagaaaaccaaacaccacatgttctcactcataagtgggagttgaacaacaagaacatgtggacacagggaggggagcgtcacacactggagcctgtyggggagttgggggggctaggtgagggagagcattaggagaaatacctaatgtagatgacgggttgatggtgcagtaaaccaccatggcatgtgtatacctatgtaacatgctgcacatgtatcccagaacttagcgtataataaaaaaatgggcaaaagacgtaaacagacacttctcaaaataagacatacgagtggtcaagaaacatgtgaaaagatgctcaatgtcactaatcataagagaaatgcaaataaaaaccacagtgagataccatcttacaccagtcagaatgactactattaaaaagtcaaaaaaacaacagat

SEQ ID NO: 604716 - DNA, 462 bp, Homo sapiens
gaaaactataaaatacccatcaaaggaatgcaaacactaaaaaaatgggaagatattccatgttcatgaattgtaagaatcaatgttgtaaaaatgtccacactacccaaagcaatctacagattcaatgcaatccttatcaaagtaccaatgacatttctcacaaatagagaaaaaataatcctaaaacttatatggaaccacaaaagacccataataacaaaagctatcctaagtgaaaagaacraaactggaggaatcacgttacctggcttcaaattatactacggagctatagtaaccacaatagcgtggtactggcataaaaacatacatgtagaccaatgaaacagaatagggaacccagaaacaaatccacacacctacagtgaactcatttttgacaaaggtgtcaaaaacgtacactggggaaaagacagtctcttcaataaatgatgctgg

SEQ ID NO: 604717 - DNA, 641 bp, Homo sapiens
tcactgaggcttcctgagagtgatgcctattttatttaccttgcaatattattgtgaaaattataagaaagtttgcataaaaagtaatttgcatagtgtccaataaagagtagaattaaggaaaatgtaactactactattattgatgttgttgttactattattatcactactgaggctggaagaatatctacttctgctgtgccatcagtacaatacatcatgacaatggattatagcaattattgctctaaggcactgacattttctaaacagataaaacattgtatcaactgctgttttkataatttggaactgacatcatcatatatttgtaggcacaccataaaaatctcttcattaacacactgatagcatcttttattttccttcactcagagtttttttttctgccaacaattagtcttgatttcatcaaaagcaatgattacctaaaggaatattgacattctacagaactatgtccttcttgcatttttgtagttgtcatgggaaattaagatcagatcagagtcatagcttatagtataggaaatatatggttcaaaaacagcacaaggtatttgatgtggtcaccagataaccttgaattgtagacccttgccaaacactgcagaaat

SEQ ID NO: 604718 - DNA, 589 bp, Homo sapiens
tgatggaattatgtgtgggggcgggtctttaatgcactgttcttgtgatagtaaatgagtctcatgaggtctgatggctttaaaaatgggagtttcgctgcataagctttcttctcttgtctgccaccatgtgaaacacgcctttcaccttccaccatgattgtgaggcctcctcagccaygtggaactgtaagttcaataaacctctttcttttgtaaattgcccagtctcgggtctgtctttatcagcagcatgaaaatgggctaatacacaaacaaaattcaaaatgtaaggaagactaatggattttaatgtaatggttttagattccacgttgcagcccatctttaagaaactaccacttgttcaggtttggtgcactatcagagaagaatatcccgatgatctgaaatggctattatactgcttaccctcctttcaattgcatatctgtgtgaggctgaattttcttcatatacttcaaccaaaagcataccttgtaacagattgaatgcacaagtggatttgagagtccagctgtcctctagtaagccagatattaaggaaatttgcaaaaatataaaacaa

SEQ ID NO: 604719 - DNA, 589 bp, Homo sapiens
tgatggaattatgtgtgggggcgggtctttaatgcactgttcttgtgatagtaaatgagtctcatgaggtctgatggctttaaaaatgggagtttcgctgcataagctttcttctcttgtctgccaccatgtgaaacacgcctttcaccttccaccatgattgtgaggcctcctcagccacgtggaactgtaagttcrataaacctctttcttttgtaaattgcccagtctcgggtctgtctttatcagcagcatgaaaatgggctaatacacaaacaaaattcaaaatgtaaggaagactaatggattttaatgtaatggttttagattccacgttgcagcccatctttaagaaactaccacttgttcaggtttggtgcactatcagagaagaatatcccgatgatctgaaatggctattatactgcttaccctcctttcaattgcatatctgtgtgaggctgaattttcttcatatacttcaaccaaaagcataccttgtaacagattgaatgcacaagtggatttgagagtccagctgtcctctagtaagccagatattaaggaaatttgcaaaaatataaaacaa

SEQ ID NO: 604720 - DNA, 589 bp, Homo sapiens
tgatggaattatgtgtgggggcgggtctttaatgcactgttcttgtgatagtaaatgagtctcatgaggtctgatggctttaaaaatgggagtttcgctgcataagctttcttctcttgtctgccaccatgtgaaacacgcctttcaccttccaccatgattgtgaggcctcctcagccacgtggaactgtaagttcaataaacctctttcttttgtaaattgcccagtctcrggtctgtctttatcagcagcatgaaaatgggctaatacacaaacaaaattcaaaatgtaaggaagactaatggattttaatgtaatggttttagattccacgttgcagcccatctttaagaaactaccacttgttcaggtttggtgcactatcagagaagaatatcccgatgatctgaaatggctattatactgcttaccctcctttcaattgcatatctgtgtgaggctgaattttcttcatatacttcaaccaaaagcataccttgtaacagattgaatgcacaagtggatttgagagtccagctgtcctctagtaagccagatattaaggaaatttgcaaaaatataaaacaa

SEQ ID NO: 604721 - DNA, 601 bp, Homo sapiens
tttattatgatttggtaggtgagacctgtaaaagaggtgacagagttaacgctacacttaggaatggcctcaagagcagtacagcaccgtgggcaacagagagtaccagatcacaactcaaactcattgtctccagccccatcaagtcatggcaggggccaccaagctagttcattctatcaatgggcaaatctcctacttcattatgtcagggttggattctgttcctgtcttcatgggactcataatttcaagtttttgtgttctctctgctatcttcccttccaacttgtttttcctagctcttgatgcttctattctcaaactcttccagaaacacattctccaccccsctgaatgttgaatgaatattggttctccctaaaggataccccttctgctgggaatcctctagagagatgctgaaattttctcaacagtgggcctataatattggttgaatgagtgaatgaatgaataaatgagtgaataagagccagtccatcagtgtggctctgcaatattttgtggcctctgataagccataactcccacccttctcagaagttaaagtcttaatcacttctcaccattcctttat

SEQ ID NO: 604722 - DNA, 601 bp, Homo sapiens
tttattatgatttggtaggtgagacctgtaaaagaggtgacagagttaacgctacacttaggaatggcctcaagagcagtacagcaccgtgggcaacagagagtaccagatcacaactcaaactcattgtctccagccccatcaagtcatggcaggggccaccaagctagttcattctatcaatgggcaaatctcctacttcattatgtcagggttggattctgttcctgtcttcatgggactcataatttcaagtttttgtgttctctctgctatcttcccttccaacttgtttttcctagctcttgatgcttctattctcaaactcttccagaaacacattctccaccccgctgaatgttgaatraatattggttctccctaaaggataccccttctgctgggaatcctctagagagatgctgaaattttctcaacagtgggcctataatattggttgaatgagtgaatgaatgaataaatgagtgaataagagccagtccatcagtgtggctctgcaatattttgtggcctctgataagccataactcccacccttctcagaagttaaagtcttaatcacttctcaccattcctttat

SEQ ID NO: 604723 - DNA, 534 bp, Homo sapiens
ggagattcaggataagcaccagaaggagcctcacccagactatcccgccaggccaaaaacatctattccagggtcttgcaactgcatgtggggctggacagtcctctgctgtggtggcctgtcccatgcattgcaggatgttcagcagcatccctggcctctgcccagtagatgccggtaacacccacccctttagttgtaaaaactaaaaacatcttcagatattgccaaatgtcttctggaggcaaaatcctccttggctaagaaccactgatctagggcaatcccaaacacaggagtcttctggaaggtaaatccaagaaatctttgaatgaaatagatacactcccatcctacttgaaacaaatcaggtgtgcatttaatyggcattcttatcaccctggctggtcggtgacaagggttctcttggctgcatttgtctaatttcccttcagtgggccactacagaatgcacatttttcaaaggatggtctcattcatataaatagataagaaaaaagtgcagatgctgcc

SEQ ID NO: 604724 - DNA, 501 bp, Homo sapiens
agagtgttgcatggacttgtgtccaaaagccttttcttatccaaaggtgatggggctcatccaatccaatctaccatgcagtattaaaagattacagacagactgcccaaggagagaagaggtctgagacacagaaacacaagaaagcacacacacagaaactatggaaccacttgagaaagaccaaggctgcctgattatgaaaggacttagctgagttatactgtctttgtcactcgccctcctaagaggcaggcattaggggctctatcaggacgcattatctcagaactcccatggtgcaaatttcatattgagataccaagtcttcattaacatactgattccaaggacttagcctgtgcaggggaggaagagacaaaagcaagccttcacagctgccaactgaattttataaaatatatcagatttaggcacatttgtacttataaasttatagcacagtaccttttacagtactgtatagatacaagaaagcat

SEQ ID NO: 604725 - DNA, 509 bp, Homo sapiens
gaattcctgaccccagatgatccgcccctctcagtctcccaaagtgctaggactgtaagcgtgagccactgcgcccagcccaaatacttcagatttatatcaccacatacaagaattgtgcactttcatgaactattggaacaggtctgtaagtagcaaaaaaccaaaaagaacgaaaagaatatcagcagtgataytcagtggggatggtgaaatgtttcctttcagattgtgtgtcctaagaactgggaaagcttgtttgtgtgtgggtggctgtggggggtgggctgaagcagtagctagtgttttagggcagttcatttactttttgtcaatcaataatttgaatgggtgatccacagggaatttaagtaaactgttatgagttgtggcccctcaagtaaattagtcccagaaccagacccttgtgacctcagtaccagtaggagagaacagcctgggattttcagcagaggcaacctttgaacatttgaccacggtgccaaaaa

SEQ ID NO: 604726 - DNA, 538 bp, Homo sapiens
gctgggctgtaacactggtgccataactcctgcaggaataaacctgagcggccttctaccctcaggaggtctgctaccaaatgcactgcccagtgcaatgcaggcagcttctcaagcaggtcagaatgttggaaataataacctctaaaaaaaattaaagtatatgctaaagtaaaaatgtaattttaagagtaatgctaaaggcatttaatgtcattatttcatgaagtgttgtatcacatatatttcacttaaaaagcctttaaaagttctggcatttgaattaaaagtcttctagcagtcaacttctgtggaaaacttggtaagcctgtgagtctgtgcaaatctttcttctgctttccaaataacaaaattaattttggtagccttattgtcatygtagttatattccagggaaaataagtgtattttgaaaatatacattgtgtacaagaggcaactgcatcgcagttaagagcctggattctggagccagactacctcagcttgaatcccagttgtacagcttaccatttgt

SEQ ID NO: 604727 - DNA, 543 bp, Homo sapiens
cactgttggtgagaatgtaaattagtatagtgattatgggaaagtgtatggaggtccctcaaaaaactaaaaacagaattaccatatggtccagaaatctcacttttgagtatttatccaaaagatttgaaatcagtatgttgaggagataactgcactctcatgttcactgcagcgctgttcacaacagccaagttatccaatcaacctaagggtctgtcaacagaaaaactgggaaggaaaatgtggtatatgtacacaatgaaatattattcagccttgggcaacctcctttgggtcccctccccttgtatgggarctctgttttcactctaatacatcttgcaactgcacactcctctggtccgtgtttgttacggctcgagctgagctttaagaggtggcagtcttacactgctgggatcatcagaaaggaaagaaaagagaaatagaagggaaccgcccagcagatattgaagccaaaaaagccaaaagagctacaaggcgggaccctccattagaaatgcttatagaaggacccct

SEQ ID NO: 604728 - DNA, 543 bp, Homo sapiens
cactgttggtgagaatgtaaattagtatagtgattatgggaaagtgtatggaggtccctcaaaaaactaaaaacagaattaccatatggtccagaaatctcacttttgagtatttatccaaaagatttgaaatcagtatgttgaggagataactgcactctcatgttcactgcagcgctgttcacaacagccaagttatccaatcaacctaagggtctgtcaacagaaaaactgggaaggaaaatgtggtatatgtacacaatgaaatattattcagccttgggcaacctcctttgggtcccctccccttgtatgggaactctgttttcactctawtacatcttgcaactgcacactcctctggtccgtgtttgttacggctcgagctgagctttaagaggtggcagtcttacactgctgggatcatcagaaaggaaagaaaagagaaatagaagggaaccgcccagcagatattgaagccaaaaaagccaaaagagctacaaggcgggaccctccattagaaatgcttatagaaggacccct

SEQ ID NO: 604729 - DNA, 485 bp, Homo sapiens
atatatcgcctgagagcacagggggagggacaatgatcgggattataaacccaggcattcgagcaggaagtggcaaccccctttgggtcccctcccattgtatgggagctctgttttcactctattaaatcttgcaactgcaaacaaaataaaataaaaaaaaaaagaaatattattcagccttaaaaaagaaattctgtcatttgtgacatggatggaattggagaatattatgctaagttatgccaagtgaaataagcatcagatccagaaagacaaatgttgcatatcctctcacttttatgtggaatctaaaaccatcaaacacatagaggcagagagtagaatggtggtttcctgaggctgggtggggagatggkgagatgatggtcaaagggtacaaagcctcagacagggggaataaggtttttttttggagatctattatacaatgtagtgattatagttaataataatgtgttgta

SEQ ID NO: 604730 - DNA, 407 bp, Homo sapiens
atgagcttcaccaacaaagtatattaaagaaacagcaagaatgcctactgcttggagcagagtagaggcactaggaagcagttactcatttcctggaggttgagtcagacaagcggccagggctttagcctaccaggagaaacaggtttggggctgctgctgtgagcaaggagaacgtcttgtttacttacatattttatgctgctttgccccacatrtatttcagtttcaaaaaagctgtcagtttccaggatgtattgacaaaacaaagcacagatataagcctgcagttgatacttaactaatgagaatattgacagaagatgtatagcagagtatcatgaaggttatggactagaaaggagtttgaaacaaacacctggtctttctaagcatgccagagatct

SEQ ID NO: 604731 - DNA, 530 bp, Homo sapiens
gatgcattctaatattcttcctaacataccttcaaaatgtctcctgttggagtaaacctaaaagccattgtttagaaacaggttgaaatcattcattgatgttgactcttaatggagacagttactttatgtttatttatattctgtctccatagtggctttgaggcmacttacgagaaaccattgcagtgaaatgataaatgaaaaatagaaaatcagaaacgggtcgaggggaggggagaagaatccagatatgtcatccataagggttagcattgttaaccaaactaagcagggtcgggcctggttagtacttggatgagagaatgcctgacctcctgggaatgcagccctgtaggtctcaaccttattttacctaacccctattcaagatggagttgctctggttcaaacgtctctgacacagagagctggagaagatggtggtgattttactctaggtttcctgacaaggagggaagaaatgaaaaactcactctggaatgtaatttttatcccaaagggggaaa

SEQ ID NO: 604732 - DNA, 530 bp, Homo sapiens
gatgcattctaatattcttcctaacataccttcaaaatgtctcctgttggagtaaacctaaaagccattgtttagaaacaggttgaaatcattcattgatgttgactcttaatggagacagttactttatgtttatttatattctgtctccatagtggctttgaggccacttacgagaaaccattgcagtgaaatgataaatgaaaaatagaaaatcagaaacgggtcgaggggaggggagaagaatccagatatgtcatccataarggttagcattgttaaccaaactaagcagggtcgggcctggttagtacttggatgagagaatgcctgacctcctgggaatgcagccctgtaggtctcaaccttattttacctaacccctattcaagatggagttgctctggttcaaacgtctctgacacagagagctggagaagatggtggtgattttactctaggtttcctgacaaggagggaagaaatgaaaaactcactctggaatgtaatttttatcccaaagggggaaa

SEQ ID NO: 604733 - DNA, 530 bp, Homo sapiens
gatgcattctaatattcttcctaacataccttcaaaatgtctcctgttggagtaaacctaaaagccattgtttagaaacaggttgaaatcattcattgatgttgactcttaatggagacagttactttatgtttatttatattctgtctccatagtggctttgaggccacttacgagaaaccattgcagtgaaatgataaatgaaaaatagaaaatcagaaacgggtcgaggggaggggagaagaatccagatatgtcatccataagggttagcattgttaaccaaactaagcagggtcgggcctggttagtacttggatgagagaatgcctgacctcctgggaatgcagccctgtargtctcaaccttattttacctaacccctattcaagatggagttgctctggttcaaacgtctctgacacagagagctggagaagatggtggtgattttactctaggtttcctgacaaggagggaagaaatgaaaaactcactctggaatgtaatttttatcccaaagggggaaa

SEQ ID NO: 604734 - DNA, 530 bp, Homo sapiens
gatgcattctaatattcttcctaacataccttcaaaatgtctcctgttggagtaaacctaaaagccattgtttagaaacaggttgaaatcattcattgatgttgactcttaatggagacagttactttatgtttatttatattctgtctccatagtggctttgaggccacttacgagaaaccattgcagtgaaatgataaatgaaaaatagaaaatcagaaacgggtcgaggggaggggagaagaatccagatatgtcatccataagggttagcattgttaaccaaactaagcagggtcgggcctggttagtacttggatgagagaatgcctgacctcctgggaatgcagccctgtaggtctcaaccttattttacctaacccctattcaagatggagttgctctggttcaaacgtctctgacacagagagctggagaagatggtggtgattttactctargtttcctgacaaggagggaagaaatgaaaaactcactctggaatgtaatttttatcccaaagggggaaa

SEQ ID NO: 604735 - DNA, 538 bp, Homo sapiens
gtctctactaaaaatacaaaaattagctgggcatggtggcagttgcctgtaatcccagctactcgggaggcttaggccgagtagcaattcaagaattgcttgaacccaggaggtgaaggttgcagtgagcctrgatcacgccattgcactctagcctgggcgacagagggagactctgactcaaaaaaaaaaaaaacactgtatatggtcatccataagaagcaactcatccattcaagtttgatcatgagattatagtggttcagtcacatcttcaggctctctacttctaattgtagttctcttgctatcaccacatctgcagtgatttcttgtcctgaagtcttgaaccccttggagtcatccatgaaggttggaatcaacttctcccaaactcatattaatgtttctattttgacctcctcccatgaatcatgcatgttcttagtgtcatctacaatggcacatcctttccagaaagtttttaatttactttgcccagatccatcagaggaatcactatctatggcagctaaag

SEQ ID NO: 604736 - DNA, 588 bp, Homo sapiens
gaaatgtttagtatgtggtgaaaaatattcggaaagtaattagaagacagatgtggctttgccattctaaagggagcgattgctatgcagctccagccagctgtggccgtgtgagaataagaatatcctttcaagagataacagacatccagaattttatggaaaatcttacaacttaaaatagtttttttctgttgcccaggctggagtgcagtggtgtgatctagattcactgcaacctccgyctcgtgggtccaagcaattctcctgcctcagcctcccgagtagctgggactacaggtgcatgcccccatgcccagctaatttttgtatttttagtggagatggggtttcactgtgttgatcaggctggtctcgaactccttatctccaggtgatccgcccgtctcggcctcccgaagtgctgggattacaggcaggagccactgtgcccaaccacaacttaaaatattttgcaacccacctgggttttatggtgaaccaagtttggctaacaatttgcagcctctgggtttcacttctcttaagtccatttggcatctctctttttgttctatgagagagaaa

SEQ ID NO: 604737 - DNA, 588 bp, Homo sapiens
gaaatgtttagtatgtggtgaaaaatattcggaaagtaattagaagacagatgtggctttgccattctaaagggagcgattgctatgcagctccagccagctgtggccgtgtgagaataagaatatcctttcaagagataacagacatccagaattttatggaaaatcttacaacttaaaatagtttttttctgttgcccaggctggagtgcagtggtgtgatctagattcactgcaacctccgtctcgtgggtccaagcaattctcctgcctcagcctcccgagtagctgggactacaggtgcatgcccccatgcccagctaatttttgtatttttagtggagatggggtttcactgtgttgatcaggctggtctcgaactccttatctccaggtgatccgcccgtctcggcctcccraagtgctgggattacaggcaggagccactgtgcccaaccacaacttaaaatattttgcaacccacctgggttttatggtgaaccaagtttggctaacaatttgcagcctctgggtttcacttctcttaagtccatttggcatctctctttttgttctatgagagagaaa

SEQ ID NO: 604738 - DNA, 506 bp, Homo sapiens
ctctgcatcccagtttaagtgtcacatcctagagaagccttcttggtcttctctgacttagatcctctgttttgtcatctcatgtggcctatatctttctcattcataatcaacactgttgttccacattgatatataatttaactatttgattaatatcagtcccctttaattaattataacatcaaaaagaatgaagagtgtgtctgattttgctctcatttctcacagctaaaactgtgtctggcacatagtaaatgctcattaaatacttatgaaatgtaggaagatttactatgagtagaagaagagaataggataatggatcctgggcttgggcttgagtttttgatatcccargtgcagagcaatgaaggagaaaacaatgcctgcccctggactcttttttggaagactaacagtagtgtgtgtgtgtatgtgtgtgtgtgtgtgtgtgtagtgagggtggactgggtggtgatgcatgttcatagagaagtggcagg

SEQ ID NO: 604739 - DNA, 559 bp, Homo sapiens
aatgtctcaaagagtcctcttgtcttctgccaccatgttaatagccacacctttatggccaaactgtccacctcgaccgattctgtggatatagttttccctgttcgtgggarggtcgtagttgatgactaaagaaagctgctgcacatcaatgcctctgggcagcaggtcagtggtaatcaaaactctgctagagccagaacgatactccctcatgaccacatctcgttccttttggtccatatctccatgcatggcagagacagtaaaatcttgggcatgcatcttctgggttagccagtcctccttccttcaggtgttgatgaagatgactgcctgggtgatggtcagggtttcattcaagtcacacagttgtgtccagcttccactccttttgttccacgttgatgtataattggtggatacccttcagggttaactcttccttcttgacaagaatccgaatggggtccctcatgaacttcttggtcacctcaagtacatcagaaggaattgtagctgacagcaaaactacctgggtgttgctattgagcatttg

SEQ ID NO: 604740 - DNA, 560 bp, Homo sapiens
cttgtcttctgccaccatgttaatagccacacctttatggccaaactgtccacctcgaccgattctgtggatatagttttccctgttcgtgggagggtcgtagttgatgactaaagaaagctgctgcacatcaatgcctctgggcagcaggtcagtggtaatcaaaactctgctagagccagaacgatactccctcatgaccacrtctcgttccttttggtccatatctccatgcatggcagagacagtaaaatcttgggcatgcatcttctgggttagccagtcctccttccttcaggtgttgatgaagatgactgcctgggtgatggtcagggtttcattcaagtcacacagttgtgtccagcttccactccttttgttccacgttgatgtataattggtggatacccttcagggttaactcttccttcttgacaagaatccgaatggggtccctcatgaacttcttggtcacctcaagtacatcagaaggaattgtagctgacagcaaaactacctgggtgttgctattgagcatttggaatatgtcacagatctgg

SEQ ID NO: 604741 - DNA, 610 bp, Homo sapiens
aagggacatgttggagaaatggcaagttatattttatcgaatatccttgaatatattgtttaacatatgtaggataccaacagtcaccttgtttacacattttaaaaatgggtttcacccgcattctaattggtattagagatatttacactccccaaagcttgtacgctccttaggaacaagataccattttaaatttacttctatagtacattctagggagtagaaatagaactctttgtaaataaatgaattagaactcagcacracttggtcattgcgctgtgaaactacaaagaacagacgggaagctctttttggagactcagaaggttcttcacgattgtgcaaacctggcatcattgccctacagttgtgcattaagggccagttaacacagagaaggatgagcggctgcttgaagggtgagtattttgaatctcatggctgaggcactgaatcaaacctcctaaaagcaaggacttgttcttctggacagcagttcccatgcactctttgctgttattaagagagaagcagcatcaactaaaaatgagcacaggtaaatccagcagccctgtggatcctctcctaggtgcgtgcctgcaag

SEQ ID NO: 604742 - DNA, 530 bp, Homo sapiens
ggagcttttgccacagagattgcctgtggaagcgttccacgctgcccgggaaatggcaagcctttgtatcattgtgctccgtcattggctgaggattatccaggaagcatgtgacctccactcaaaagctgagggagaaacaaccaaatgtccatcaacagatgagtggatggacaaaacgtagtatgcacattcagtggaatattatccagccatgaaaaggmatgaagtactgacacacactaccacatggatgaacattgaaaacactgtgctcagtgaaataaaacagtcacaaaaggacaaatattgtatgcttctacttatggtaaatatttagaacaggtaaatccatagagacagaatatagattagaaggtccaaggcttgcagaaggaagaaatgaggagttatcatttaacgggtacagtttctgtttgaggtgttaacaatttttgaaactggatagtggtggtgatagttgcacagaattgtgaatataattaacaccactttaaaatcttaaaaat

SEQ ID NO: 604743 - DNA, 530 bp, Homo sapiens
ggagcttttgccacagagattgcctgtggaagcgttccacgctgcccgggaaatggcaagcctttgtatcattgtgctccgtcattggctgaggattatccaggaagcatgtgacctccactcaaaagctgagggagaaacaaccaaatgtccatcaacagatgagtggatggacaaaacgtagtatgcacattcagtggaatattatccagccatgaaaaggcatgaagtaytgacacacactaccacatggatgaacattgaaaacactgtgctcagtgaaataaaacagtcacaaaaggacaaatattgtatgcttctacttatggtaaatatttagaacaggtaaatccatagagacagaatatagattagaaggtccaaggcttgcagaaggaagaaatgaggagttatcatttaacgggtacagtttctgtttgaggtgttaacaatttttgaaactggatagtggtggtgatagttgcacagaattgtgaatataattaacaccactttaaaatcttaaaaat

SEQ ID NO: 604744 - DNA, 617 bp, Homo sapiens
caccactgcacgccctgctgaaggagacaccactcttcctgggacatcttgtcctgggtaacccccactgcttcgttcccctccatgcctgagaatgtcattgtttcccttcatatcttcgctggcaaaccagggggtaaggaaggggaactgcaggaaggaaggtggggcagtggggacsggctgggcgggggcagtctactgtcaccagcctggagatccacacttagagcttcagggaaagagttctctgcaggcaaagctgtatgatgggccctggtggaggatggagctgataacaatctaagctacagtgaaagaaagagagatgccaagacttcccacacatttcacctgttctcaggttcacctgtcacctctccctttcctaacaaaagccttggtcttcacatctctttagtatccttttttttttttttttgtcacctctttctttcttaggctttttcatctaaaaacagagggctctgaaatcatcactttccccaacctcattagccctgtctcactgtctgtcctgacttcagcctgcctccctctcccatgcgagacattgccaaccatcttcagggtgaccagtggcaaggccactgcag

SEQ ID NO: 604745 - DNA, 530 bp, Homo sapiens
ggagcttttgccacagagattgcctgtggaagcgttccacgctgcccgggaaatggcaagcctttgtatcattgtgctccgtcattggctgaggattatccaggaagcatgtgacctccactcaaaagctgagggagaaacaaccaaatgtccatcaacagatgagtggatggacaaaacgtagtatgcacattcagtggaatattatccagccatgaaaaggcatgaagtactgacacacactaccacatggatgaacattgaaaacactgtgctcagtgaaataaaacagtcacaaaaggacaaatattgtatgcttctacttatggtaaatatttagaacaggtaaatccatagagacaraatatagattagaaggtccaaggcttgcagaaggaagaaatgaggagttatcatttaacgggtacagtttctgtttgaggtgttaacaatttttgaaactggatagtggtggtgatagttgcacagaattgtgaatataattaacaccactttaaaatcttaaaaat

SEQ ID NO: 604746 - DNA, 486 bp, Homo sapiens
cagtagaattttcacttgaaaaaatattactttactaaataatgtaataggctagttttttcttccagctttcattttttgtgtccctgatttaagaatcaaacatatatctgagtgtgaaacattttcagtgaggaaagtaaaccattttgttgctttattaggaaaaygattaggttgattactataaaataattagattgatattccctgacatagatgatttcaatgaaatctatcctgcatttaacccacaatcaacagtctgagcaattccatagttttagagtaacttaaacacaagtagcttaataaacttagttgaacgcataaatgatgtgtaaatgaatggatgaatgaataaatggcacaggcttaaaggtcctggaagggaagatgcaaagaccccagggctaagtgttgtgcaaacaccagcacagccagattcagctttgcaagccaggcttccattcctattgcacaatg

SEQ ID NO: 604747 - DNA, 605 bp, Homo sapiens
gatgctccgggtgaaaacacagagaaaagcagtgaacaagcatctttcagtcaccaaaagagccagagcactgcactacagagccacaaaatccaatgccagccctttgcatgctcctttgctggtttctcttcaatttcctaatgtctaaatgttacagagctccagtacttgacctcagatcttttcttatatctcaatactcactacctgcttgatctcatccattgtaatgccttcacatcccttgtatgttctgatgacttccacagttatatttccagccccacctccagaatcaactccacatttttacttggacagatgttagataacaggaatctcaagtatttgatgtstcatatgaaactcctcatgccccactttcaaacctgttctttctgcactccttcccagccaagaaaatggcaaatctattcttcaagttattcaggccaatgaccctgaagacatctttggttcatctcatttcctcacatcctacatccaatctttcaggaaatcctgctaaatccaaccttagtccttgcttccagttctgcatttgtccctgatcttccttgatattacttccaaaacagata

SEQ ID NO: 604748 - DNA, 628 bp, Homo sapiens
catcccttgtatgttctgatgacttccacagttatatttccagccccacctccagaatcaactccacatttttacttggacagatgttagataacaggaatctcaagtatttgatgtgtcatatgaaactcctcatgccccactttcaaacctgttctttctgcactccttcccagccaagaaaatggcaaatctattcttcaagttattcaggccaatgaccctgaagacatctttggttcatctcatttcctcacatcctacatccaatctttcaggaaatcctgctaaatccaaccttagtccttgcttccagttctgcatttgtccctgatcttccttgatattacttccaaaacagataacatttttcccctaaatgccctcacrctttggtgctgtattttccggttataagttgagattaagagcgtcggataaaaataagaccaccaaagagggaagaaagggggataagcaaaagtttccacagcttctcttttgttcctagcaccccttaaacatcaacataggtgggctaggccatgttgcctacactaggcttcccacagggccactgaggacccatgccatagggtcatggcagagccagatcatcaatagcaga

SEQ ID NO: 604749 - DNA, 628 bp, Homo sapiens
catcccttgtatgttctgatgacttccacagttatatttccagccccacctccagaatcaactccacatttttacttggacagatgttagataacaggaatctcaagtatttgatgtgtcatatgaaactcctcatgccccactttcaaacctgttctttctgcactccttcccagccaagaaaatggcaaatctattcttcaagttattcaggccaatgaccctgaagacatctttggttcatctcatttcctcacatcctacatccaatctttcaggaaatcctgctaaatccaaccttagtccttgcttccagttctgcatttgtccctgatcttccttgatattacttccaaaacagataacatttttcccctaaatgccctcacgctttggtgctgtattttccggttataagttgagattaagagcgtcggataaaaataagaccaccaaagagggaagaaagggggataagcaaaagtttccayagcttctcttttgttcctagcaccccttaaacatcaacataggtgggctaggccatgttgcctacactaggcttcccacagggccactgaggacccatgccatagggtcatggcagagccagatcatcaatagcaga

SEQ ID NO: 604750 - DNA, 482 bp, Homo sapiens
aacaaaacaaaacaaaaaaacagaccgaggcagatcctgaaagcaccagcagctagaagctgtcagcaaatagcaccttttgtgggaagcacatctccatggctgccatgctcactgcctcgggtctctgccgaaatggcaactgagcagtgagtcccttaatgactaaattacatccaagaggaaggcctatccttctcagtcaagttaatttttctccattacacttaaagccttctgacttatatatttacctgtttattttctgcttccccaatagaccataaacaccatgagatcagagcatccatctgtagactcacagagcaagaagcgtgactgccccaatcttgaatggatgagtaagtaagtgaactacctgatgattcattcatcggacaatagtcgatctsaggcaattacagtgtgtcttgtgttatttagactttccattgataaattactataggcagagttcagac

SEQ ID NO: 604751 - DNA, 620 bp, Homo sapiens
  misc_feature 619, 620: n = A,T,C or G
gctgtcaaagcttaacttttaaaaatatatgttgtttttaccccaatattattcttcccatatgatatggtttggctgtgtccccacccaaatgtcatcttgaattgtagctcccataattcccatgtgttgtggaagggaccaggtgtgagataattgaatcatgggggcggtttcccccctgctgctctygtggtagtgaataagtctcacgagatctgatggttttataagaggtttccccctttagcttggctctcattctctcttgcctgccaccatgtaagatgtgcctttcaccttccaccatgactgtgaggcctctccagccacgtggaactgtgagtccattaaacctctttttctttataaattacccagtttcatcgagtatgtctttatcatcagtgtaagaatggactaatacaccatataataggccttactatttcaacttagggtaaaaatatatacattatttgtctggtcattgtatttttttatgtttctaagtccacatagagttaaatttcaaggtccttctggttaagagctgtacctcttacatgacttttgtttatggatccattgatttctaacttcctttttagcttaagtnn

SEQ ID NO: 604752 - DNA, 588 bp, Homo sapiens
atcaaaaactctctcattgtttacaggctctataaaaygccgacacctctgagagaactttctggtttttctcagccagataaactagctctctcttctataatcccagcattctgcttgtatttttatttaagattcattaaattttgccttgtattctatttgatttggcaaattctccttgttaattcatgcatgaagtcccagcactcctactgtgtgctaggtttgtgccaagtttggggagagactggtaagaaagacataggcggccctatctcttcttcctactgacagttgagtgctgtgcagtccaatatggtgaccactagctccatgcagcgatgtaaatttaaatttatgttaattaaaatgtaataatataaaattaaaactaaaattcagttcctcagttgtgttagccacattttaaatgctccataaccacatatggctagtggctcccgaattggacagtgcagatttccatcactgcagacattttttaacacagcattggtctgtcctacggtgagaaagagataaaataaatgaatgtaagccagtaattcactacagctccttatt

SEQ ID NO: 604753 - DNA, 605 bp, Homo sapiens
ttcatacataaagtcttaacgctaacaaggatgatcctgccaacattgtgttgyaagagtttcatgctgattctaagtctaagccttgttcatgatgagagatatttaccatacagtcatgcataatcttgttccagtcttcacctgtgacaattcggaacagtacggtaatagcttttccagccgaagaaaaatttgcatgcctaatttaagaaaaaaaaattaacagaatgtgaattatagaagggtttgtcatgaaatagcatggtttgccaacaccaaaacaagtggaggttgtagcaaatttggttgctaagtcaccttttccaaaggttatacctttttattaatttgtcatttatacttgcctccaagtatagccgtctgaacacccaactctagcatggccactaatttattaccattcatcttgaatgactaagtaggcaggctttggcaactaagtgattccttctttcacttggacgatgctataaaaggtggggcagccatgtatctaattcctacaacttgacatatcggtatatactttgttgtatcaggacttgaaaaaaaatgatgcatctataaaacttaggcaaatc

SEQ ID NO: 604754 - DNA, 605 bp, Homo sapiens
ttcatacataaagtcttaacgctaacaaggatgatcctgccaacattgtgttgcaagagtttcatgctgattctaagtctaagccttgttcatgatgagagatatttaccatacagtcatgcataatcttgttccagtcttcacctgtgacaattcggaacagtacggtaatagcttttccagccgaagaaaaatttgcatgcctaatttaagaaaaaaaaattaacagaatgtgarttatagaagggtttgtcatgaaatagcatggtttgccaacaccaaaacaagtggaggttgtagcaaatttggttgctaagtcaccttttccaaaggttatacctttttattaatttgtcatttatacttgcctccaagtatagccgtctgaacacccaactctagcatggccactaatttattaccattcatcttgaatgactaagtaggcaggctttggcaactaagtgattccttctttcacttggacgatgctataaaaggtggggcagccatgtatctaattcctacaacttgacatatcggtatatactttgttgtatcaggacttgaaaaaaaatgatgcatctataaaacttaggcaaatc

SEQ ID NO: 604755 - DNA, 605 bp, Homo sapiens
ttcatacataaagtcttaacgctaacaaggatgatcctgccaacattgtgttgcaagagtttcatgctgattctaagtctaagccttgttcatgatgagagatatttaccatacagtcatgcataatcttgttccagtcttcacctgtgacaattcggaacagtacggtaatagcttttccagccgaagaaaaatttgcatgcctaatttaagaaaaaaaaattaacagaatgtgaattatagaagggtttgtcatgaaatagcatggtttgccaacaccaaaacaagtggaggttgtagcaaatttggttgctaagtyaccttttccaaaggttatacctttttattaatttgtcatttatacttgcctccaagtatagccgtctgaacacccaactctagcatggccactaatttattaccattcatcttgaatgactaagtaggcaggctttggcaactaagtgattccttctttcacttggacgatgctataaaaggtggggcagccatgtatctaattcctacaacttgacatatcggtatatactttgttgtatcaggacttgaaaaaaaatgatgcatctataaaacttaggcaaatc

SEQ ID NO: 604756 - DNA, 635 bp, Homo sapiens
catggccactaatttattaccattcatcttgaatgactaagtaggcaggctttggcaactaagtgattccttctttcacttggacgatgctataaaaggtggggcagccatgtatctaattcctacaacttgacatatcggtatatactttgttgtatcaggacttgaaaaaaaatgatgcatctataaaacttaggcaaatcgttgaaaactgcttttcatatattacaaccatttggggggctctaaattcccatattttgctgagaaagaaacccagagttatcttaaaattgttccatctaaaaataatatatcattttttggcaatatgtagatagaaaaagtgctggaattrggagtgatgattactgaatgttggtggaattatagattctttttgttttcttttatttctaatttttctaaggttttgaaagtagaccttttcagttgaataaccttttcaactggaaaaatatcatttaaaacttggctattttattttaatttccaactgattacttccctttcccctctcctagactttaatagacaaaaaacatttgtttatttaaaattttattaccaaagggtttgcttgataaatgaatagaaagataagtatataccaa

SEQ ID NO: 604757 - DNA, 625 bp, Homo sapiens
agactttcggggactgttgggagggtatgattgtattttgaattgtgaagacatgagatttgggaggggtccaggcagaatgatatggtttaactgtgtccccacccaaatctcatcttgaattgtagttcccatwatctccacatgttgtgggagggaccaggtggagataattgaattaagggaggcagtttcccccatcctgttctcatgatattgagttagttctcacaagatctgatggttttataagggacttccccctttgctgggcactcattcttctctctcctgttcccttgtgaagaaggatgtgtttgcttccctttccaccatgattgtaagttgcctggggccttcccagccatgtggaactttgagtcaattaaatatctttcctttataaattacccagttttgggtatttcttcataacagtgtgagaagggactaatacaaattttatctggagaaaggaaaaacatgggccttgctgccttttcttcccatgttagctaaagatctattgcagataccttccctctttatgttttggaagtaatgacaaccaatagtttttaggatgagaatctgaattcttcacctggactgcaaggtcctaaga

SEQ ID NO: 604758 - DNA, 581 bp, Homo sapiens
gcatctttacatttaccagatgttgccaacttgctttccaaagagcaaaaaccaaaacaaatttcctaccagcaatacacaggtgttaccatatcctaatattcttgcaatacttgatattgccagacattgtaatctgaccattttgataggtgtgaaaatgtatctaatgttgttttaatattaacgagatgaaacatttgcatgtgtgtaaatggtgatgcttgtatcttcctatgtgaattgcccattcatatcctttgctcatttttgtattttgatatttactttttaatggtttgtagagattctttatacatgctggatactaatcttttatcaattatgtaagttgtacatattttctcttagtcttggcttgtatttttattttgcttagagtgtcttttgtcattcagaamattttaatttaaatataatcgagtttataatttttttcctttacagatttcacttggtggctaatgggatgaaatccataactactccagggcaaaaaacaaatgcttactaggggtggggaggggaactagaatagggatagtcaaatgttgattaat

SEQ ID NO: 604759 - DNA, 238 bp, Homo sapiens
gaagtaagacttggagaagaagcgaggttctttataagacagaaaagaatggggaggggatgaatgaacatgtacaaaaacactgagataaaaagaaaagggaggtggggaagtgcayatgagaaagctgttagctttttgggttgctagttccctgggagatagaaacaagagcttgggaagcatcatagaagaactactcaaggcagaggtcagaagtgcatacaaatgtatttct

SEQ ID NO: 604760 - DNA, 544 bp, Homo sapiens
tactgttatgttctagatcttctagaagttagaatatgtgaaaaatattctaactaaaccaagtaaaacaaaatgtagcatcaaagacttcaatagttggaagaatttatcacattaaaaaaataagtctttttcagttttaatcatgtaaagtgttttcttatgctttcttcatgctagcaaagttgcaaagtttgaaactttacctgtaactacrgagtccttcaataaatcccaaatgccatctattattgtcatttttacctgctacccttccttgaattgaaaaggttgtcattttttctggttaatttgtgaaatattgtaatcttgcctgtccaattcagaaaactaagacattagatctgaccacataattttgtcagttttttacctcccagaggaggtgctccaaggccccccaagatcaaggtagggagagctgctcttcccttggggaacatgggggcaccctgaagacgtgactgagcgtctgcccttggatgtggaaatgcagaaaaagactttgtccaaaaacggcatg

SEQ ID NO: 604761 - DNA, 306 bp, Homo sapiens
tagaagttagaatatgtgaaaaatattctaactaaaccaagtaaaacaaaatgtagcatcaaagacttcaatagttggaagaatttatcacattaaaaaaataagtctttttcagttttaatcatgtaaagtgttttcttatgctttcttcatgctagcaaagttgcaaagtttgaaactttacctgtaactacggagtccttcaataaatcccaaatgycatctattattgtcatttttacctgctacccttccttgaattgaaaaggttgtcattttttctggttaatttgtgaaatattgtaa

SEQ ID NO: 604762 - DNA, 559 bp, Homo sapiens
tatatgtccctatagaaacttgtataaaatgtttatataagcattattcacaatagccaaaaggtggaaacaatccagatgtccatttttgaacaaacagataaacaaaatgtggtccaaccatacaagtgaatattattcagccataggaagggatgaagtcctgatacgtgctacaacatggaggatccttgaaaatattatgctaattgagaaaaaagtcacaaaagaccatatgttatgattttattcatatagaagtccagaacagtgaactctatagagacaaaaagaatattagttgttgtttaggtcttgaggtggaggctaaagggatgggggtaayagttaagagacatagggtttcttttcaaggagatacaaatgttctaaaagtggctgtcgtgtatacaactctatgaatacgctaaaaaaccattgaattgaacacttgaagtgggtgtattgtgtggtatgtggattacatctcaataaagctgttaaaaaggttttaaaaattaaacatctataggaagtttttgactcatttcctattctc

SEQ ID NO: 604763 - DNA, 612 bp, Homo sapiens
ttgttccctttgagtctccttgaagtgccatacaggtcacacatgtgtggcctgctctctcaggggctctgagtcaagtaagtattccaccccatatgctttctggtgcctttggaactgacagcaccctctaattaaaggcagtgggtggcgtgatgacaggattagtatcagtgtctggcttccctamggaccagggaacactgtgacccaagttttcccatctgtgtaatgggatttttcatatgtttacatatctaggggtaaaatctaaatgggggtggtgcttaatttctctggcttgcatatgctctacctgtttcaggaaaatcgtagagaggagtcctacaggaagtgtgtgactgtttcgcttcattgaaaatatagggtgctatggctttaaatacattggtattctgcccctggcttcactgcagaatgaacaacaatgatgttctgctgaacatcaattccagacgttttagaaagggctcagcagtttcgtgagaatgaagctgtattactcaagtgtaatgagccaaaaacatcttgtttttatgcagcactagtacagacccatgccctggacctgtaagtgccttttctgttcat

SEQ ID NO: 604764 - DNA, 612 bp, Homo sapiens
ttgttccctttgagtctccttgaagtgccatacaggtcacacatgtgtggcctgctctctcaggggctctgagtcaagtaagtattccaccccatatgctttctggtgcctttggaactgacagcaccctctaattaaaggcagtgggtggcgtgatgacaggattagtatcagtgtctggcttccctaaggaccagggaacactgtgacccaagttttcccatctgtgtaatgggatttttcatatgtttacatatctaggggtaaaatctaaatgggggtggygcttaatttctctggcttgcatatgctctacctgtttcaggaaaatcgtagagaggagtcctacaggaagtgtgtgactgtttcgcttcattgaaaatatagggtgctatggctttaaatacattggtattctgcccctggcttcactgcagaatgaacaacaatgatgttctgctgaacatcaattccagacgttttagaaagggctcagcagtttcgtgagaatgaagctgtattactcaagtgtaatgagccaaaaacatcttgtttttatgcagcactagtacagacccatgccctggacctgtaagtgccttttctgttcat

SEQ ID NO: 604765 - DNA, 569 bp, Homo sapiens
attttatgatatgcaaatctaatgatactctatttgctcaacacctgaacacacaattctgccattttttacatattattttcacatttatgtttcttaaaatgcatttcttgaatggctttgaatatgattaccatctgtctgagaattaagatctttgagaaaaagatttgtatgtgcttagcgcacttaaaatagcagctcttatgatacatgtataatagaagcatttttaagtatttaaatataacacatatattacagaagaacttatataatacatcatataagaacttattatatagtaatacattatataagaacttactaaatatgtcatatttaagtccttaaaaatgyttttaatgtggatgaagataattatggtgaatatctatgaaaaatcatacaaattcactgaatgtaaatgtattcttggaaacaaaccctaaataatcactatttttcatttactaaacagcatgaagcaacttttctacagatatataaatatgtctaacgagaacattctgaaaaatcttattccattatacaaggagaccactggc

SEQ ID NO: 604766 - DNA, 584 bp, Homo sapiens
ttttcacaatggcaagtactagaaggccagtttcttaggaactccatctagtggcttcatataaaaaactggcctgcctcctcagcttctgcaactgggaggcacaagacttcaagtgtctggtgaaaaataatgaagtcttttgtcttgtctgggtgaggaaattcttcattatgcaggcatatgtaatccctttattcctgttccctggaggagaattacagtgaggcattttccttttcccagttggggttaatgttatgccctstctacctttgaaagtaaaacaagatgaggacccctgaggatgattcaaatgtgggaatattcttcagcaaacacacattcccagttgcaaaaatattacccctggtttcttgccaagcctttgagaaaaaataatatgaaagattgatccttttttttccccctgcattgcctttgtgctgtggaatttcaattgctccttatatgacagccatatatatatatatatatataatcttttatggacgttggggaaagagaatcatgtcttgaaattgtctctatttttcttgacatttctccatctaaaatatttt

SEQ ID NO: 604767 - DNA, 530 bp, Homo sapiens
ggagcttttgccacagagattgcctgtggaagsgttccacgctgcccgggaaatggcaagcctttgtatcattgtgctccgtcattggctgaggattatccaggaagcatgtgacctccactcaaaagctgagggagaaacaaccaaatgtccatcaacagatgagtggatggacaaaacgtagtatgcacattcagtggaatattatccagccatgaaaaggcatgaagtactgacacacactaccacatggatgaacattgaaaacactgtgctcagtgaaataaaacagtcacaaaaggacaaatattgtatgcttctacttatggtaaatatttagaacaggtaaatccatagagacagaatatagattagaaggtccaaggcttgcagaaggaagaaatgaggagttatcatttaacgggtacagtttctgtttgaggtgttaacaatttttgaaactggatagtggtggtgatagttgcacagaattgtgaatataattaacaccactttaaaatcttaaaaat

SEQ ID NO: 604768 - DNA, 617 bp, Homo sapiens
aatacaaactctgttaacatttgggtatatttctttcagagattggtactcatattagagtggagttatttgggtttttgtttttcctttatgcctacttataatttacatgctcttatcctttgttttataatatttacaagttgcagttattattttaatatttcaggttaagttgacttttcaatatggagtcagttttaagtgtgtgcgttttaaaggggcatatttgcatttctgacccacaaagactaacatcacttgtgacaattaattttcactcatctaaattttgcaatgtttttaaacmaaaacaggtttaataatgataggtatccactaaacatccagcttttatcacatcacctgtagcttcccatggaaattttctacgaagcaaacattggctagtattacagatatttccttttcaagccctcatgtttaatcaactccgcttacctgtgtggctttaataagcgtaatgccaactccagctccccagagtgaggtaaacagtatgtatgggcataattagcaaatcatttggttgtaagatgttgtatgattcacatatttggttttctttaatgaggcattcctctccagacacatta

SEQ ID NO: 604769 - DNA, 448 bp, Homo sapiens
tttttgctgctaaacttagacaagtttagaaccccacagtccatatcctgatttaactggccaaaatgccaccacgggcactcgatagcsatgacccttcacaggacccttggttctataatcatctcagtgtagcagctttttaagtttcttttcagatccagggagaagcctattattgacaccaactaatgctttgtgacaggactttcatccctgccttgaaggagaaaaaaagtggggagcattcagcacatgactagagaagtagaaaagagattcattcataaaatatttggaacatcaattctgtgtcaatcaccatgtgaggagctggagctacaggtgaacagaatggagatcaccgtcctctgcagaagacaggctcatgactgtgcgacaacacagtcacaaaaataaacatacagtgacacactgtgctgaattc

SEQ ID NO: 604770 - DNA, 581 bp, Homo sapiens
actttgggtttttcttatgttaccttgtgattaagtgcaagtgttatgttccccaccagaataacaaataactattatttgtcagagtatcatatcggaaggactcagcgtctgtctcctcccatcagcaatggtaattctgaattactcagccaaggtgacgtgtgagatttccaatacagtcgctactttgccctttaactaataaggaatctttggggaaaaactttgagaacatgcaaattgcctattccctgccaatctttttagtttgcaaattcctacctattaatttttaagattaccatstcctctgtatgaaagtttcaccagtcacagataatgattatttcatcttccccacttcctgtgaagcctgtccatgtccctgtcataggactcatggtaaacctgtgtttgcataactgtctcttccatattaacttctcaaaggcagagacaacatattgctagccgttaacgtgctcaatgttaagaactacttgcattatttattaatggacttagatcgtatcaaaagaaactttcctaggtttgtcattttagattaacaagataat

SEQ ID NO: 604771 - DNA, 595 bp, Homo sapiens
taactttatttcatggcaaaataacagaatgccttgattcagcttaacctaggctcatcttgatgtatatgaaattgaaactctatagaaaacatttactcattttttggttgttatcatcaacttctaaaattcagtaattatcaaggtccaaacagatcattcatacattttakaaaaaccttctttgcatgacttttaacagcatttgtagttaccgataaattcttaaaaataaagatacataaaaatgaaatcctctctggatgcaaatcatctgttctttctggcatctatacacattctttatttctttttcctcaattcaaaagttttcaatgttttagcatttgggtagcagtctaaagaaatataagcaagcataaatcttttatagatatataaaaatatttttagttaacgctgttgatctctttagcaaaggtcatcttttaatatatttactctaactgcattagagggtaatttttagaattaaggtggtcctgcatctccttgacgaagtacatattgtgttcatttttaaattaattaagcaatagatttcaaataaacactttcaatacacttagga

SEQ ID NO: 604772 - DNA, 463 bp, Homo sapiens
gctttttcagcacacattcatctaactctatgaatatgattccaactgtctactgtggcccctaattgggctgaggaattggcatcccttatggcagatgcagaactcacacacggagtaccactttttctggcctttaaagattacatttccactagcacctgataatttgatcttagcctatctctacttgcagctttaggtagacacagcactagattcatctccaccctcaggcaatgtacttgaraaacaatgaaatgtggttcaatgtttttgataaaaggggctaaacgaaaagcaccttaatgattaagaaagatgttgactttcttgcgtttagcagaaaacagcacaaagagataagctacctactacaaattattagctgtgtcttaagtgataaactatttaatgtagatgttattattaaggtgttatttagcacagcatgtcaaaaagt

SEQ ID NO: 604773 - DNA, 282 bp, Homo sapiens
ctgcagtgcagtggcaccatcatggctcactacctcatgggctcaagcaatcctcccacctcagcctcccagtagctgggactacaggctcacgccaccacacctggctaatgtttttcatttttaatagagaagaggtcccactttgttgcccagacttcaaatatttttaatgcataagtaataataagacctgccaagattgtgcttgctatactggagacctgggttgaaracctgcttgctatactggagaccttatgcacatgccttccgactgtg

SEQ ID NO: 604774 - DNA, 606 bp, Homo sapiens
tggtgaaaaatgttgggagaatcaagaaaagtcagcaattctctcatcaagaaggaagacagacagacctaaagggaaaaatgcagtgttgatgtcacatgctatagcactcyacagagagcaaatggtctacaatgggaactggatataatgagggaattacagtcaactttaagtagaactgttttaggaaagtgctaggaataagtcccacaagtaggagtataagattatagttacacaaacaagctgaagggtgacaggtatatttgtaaattaccttttctacttcctattaatctacatcacaagcattagtacacacaagcaataattaatatgttttggccaaatacgaatatgtgagtatcttcacaattggtgttccctctataaactggtgggcttttgactttcacacacctgcaaactcaaattcctttaggtattgatatttactatattagttcatcctcatactgctatgaagacatacctgagactgggtaatttataaaggaaaggggtttaatttactcacagttcctcatggctcgggaggcctcaggaaacttacagtcatggcagaaggggcagcaaacatgt

SEQ ID NO: 604775 - DNA, 603 bp, Homo sapiens
caactttaagtagaactgttttaggaaagtgctaggaataagtcccacaagtaggagtataagattatagttacacaaacaagctgaagggtgacaggtatatttgtaaattaccttttctacttcctattaatctacatcacaagcattagtacacacaagcaataattaatatgttttggccaaatacgaatatgtgartatcttcacaattggtgttccctctataaactggtgggcttttgactttcacacacctgcaaactcaaattcctttaggtattgatatttactatattagttcatcctcatactgctatgaagacatacctgagactgggtaatttataaaggaaaggggtttaatttactcacagttcctcatggctcgggaggcctcaggaaacttacagtcatggcagaaggggcagcaaacatgtccttcttcacatgatggcaggagagagaagtgccaagcaaagggggaaacactccttaaaaaaaatcagatctcttgaaaactcactatcatgagaacagcaacataggggtaaccacctcccactgggcccctctcatgacatgcagggattatgggaacta

SEQ ID NO: 604776 - DNA, 603 bp, Homo sapiens
caactttaagtagaactgttttaggaaagtgctaggaataagtcccacaagtaggagtataagattatagttacacaaacaagctgaagggtgacaggtatatttgtaaattaccttttctacttcctattaatctacatcacaagcattagtacacacaagcaataattaatatgttttggccaaatacgaatatgtgagtatcttcacaattggtgttccctctataaactggtgggcttttgactttcacacacctgcaaactcaaattcctttaggtattgatatttactatattagttcatcctcatactgctatgaagacatacctgagactgggtaatttataaaggaaaggggtttaatttactcacagttcctcatggctcgggaggcctcaggaaacttacagtcatggcagaaggggcagcaaacatgtccttcttcacatgatggcaggagagagaagtgccaagcaaagggggaaacactccttaaaaaaaatcagatctcttgaaaactcactrtcatgagaacagcaacataggggtaaccacctcccactgggcccctctcatgacatgcagggattatgggaacta

SEQ ID NO: 604777 - DNA, 564 bp, Homo sapiens
tgaggtaaacctgatccattgatttaattttgttgtcttcttatgagactatgctaatctatattatatatattatattatattatattatagtcatgatccacatgaagacattttagtcaataatgagccacattaagaacagtggtcccataagatyataatgtagcagaaaaattcctatcatgtaaatattatcactgtgttgcaactgcctacggtatcagtacagtaagatgctatacagatttgcagcctaggagcattaggctataccatatagcctaggtgtatcatagattataacacctcattttgcttaaacacactctatgatgctggcatgacaaaatcagctaaggatgtatttctcagaacatatctttgttgttaagcaatgcataactgtatattgtatttgttgtgtgtgtgtgtatatatatatataatttattaaggaaaactttatttgttaagttgttggggaattttattcatgatgtaattattctatttggggaatttttattatatttctcctatacttacaactcaaaccataac

SEQ ID NO: 604778 - DNA, 439 bp, Homo sapiens
ttcattcattcattcaacaagtatttattgcatgctgactatatgctggacaccactcaaggtgctggaggatagcagcgaatgaggcagaggatgtccctgcttgaaggagtctcataacttgggataggacagagggagaagaggataagggacaatcacaaagtgarcttattgctgaataagacagtttcagagagtgatgcaagctttgaaggaaaaactaataacagtacaaacagcaatgaggcaagagagtagctgagaaagtttctacagtagagtcaggaagacctctctgaagagctggtacctgaatcattcagaagacagctatctgaagattttggagaaaagctctctgggcagaggaactgggctaggcaagggctgtgggatgggatcgagatccattcgactgaagcactccagaaggcta

SEQ ID NO: 604779 - DNA, 439 bp, Homo sapiens
ttcattcattcattcaacaagtatttattgcatgctgactatatgctggacaccactcaaggtgctggaggatagcagcgaatgaggcagaggatgtccctgcttgaaggagtctcataacttgggataggacagagggagaagaggataagggacaatcacaaagtgagcttattgctgaataagacagtttcagagagtgatgcaagctttgaaggaaaaactaataacagtacaaasagcaatgaggcaagagagtagctgagaaagtttctacagtagagtcaggaagacctctctgaagagctggtacctgaatcattcagaagacagctatctgaagattttggagaaaagctctctgggcagaggaactgggctaggcaagggctgtgggatgggatcgagatccattcgactgaagcactccagaaggcta

SEQ ID NO: 604780 - DNA, 620 bp, Homo sapiens
gccccataccactgtgtgtttaggaatgtatgctctccttctcagaccccaggcttcttcaggacacaggtttggggtgtataaatcctggaatcactagcactaaacaaacactgacaaagagcaagtctcaactcaggcatgatgccatgcctgaaacctcaagtaaagagggtcatgtccagctcaggkccttgctgtgctcattgcattcttttattcttatttctgtaacaatctacaaagtgttattatgagtgatattgtgctctactcatgctggtattcctaatacctgagaaaggtagttggcacctattatttcttgaatatacaaatatttgagaattatttaacacatcttatattacagctgttttgaattcgtctttataatcaaacatcatccaggcaaatgcttgataagataagggcaaatcttatattcaaaaggattggaatcatttgactgttttaaaatatttattatttaacttgccttcttgtttttacagcattgctttggtgagtgaaaaggaaatcatttaaaattataattaaaagaaacttctgccaaaaaaaagaagaaaacaactttacacagtgttaaaggttataaa

SEQ ID NO: 604781 - DNA, 497 bp, Homo sapiens
catgtaacattttaatacagaataaaatacagaacgccaaggtgaatttttaatgataggtttacacagttgtgtgatagcttctgttgacataaggtttacacagttgtgtgatagcttctgttgacacaggaaacactactacatactcagaaacatacgtctattacttcccattttcacaatagcaaccaggtttaatattatttcccctgtttacagacacggaaactcaggttaaaaaaaaaaaaaatctatccagtgctaagtagccaataaatggcaaagactgaacttgaacccatatctaattaactttaaatcatgtgcattttctactcaaccactctccacttggctacttaatgcattcttctagttaattttagcatcacaggacagaaaaaaatacctttaaaaaagacatttagagtgtgtgtgtgtatacatacatacatacatayatatatatatatatatatatgctttcacttaag

SEQ ID NO: 604782 - DNA, 414 bp, Homo sapiens
tgaattcttgtaggaacagacatcagcaagtccccctctcaatctcatgttagccatgagatcgtgataatactacaggtaataattgtgagagctttcatttttctgagtgcttactatgtgccagaccctatggsatgtgttttacatgcatcttctcattacaagaaagtatactccaaacttgatacagtatgtttgcagtttacaggtaagaaaactgatgattagaaattccatcatttgtcccagggcgcagaacaattgactcatggagtttatcacacattggctctagaaacgaactcttagctgctgcaatacccaaaaggatgatttaaacaaaaagcttgtcaaggcatggctttcatttgtgacaaagacatcatttaatacaatcacattaataatatt

SEQ ID NO: 604783 - DNA, 646 bp, Homo sapiens
  misc_feature 407, 408, 409, 410, 411, 412, 413, 414, 415, 416, 417, 418,419, 420, 421, 422, 423, 424, 425, 426, 427, 428, 429, 430,431, 432, 433, 434, 435, 436, 437, 438, 439, 440, 441, 442,443, 444, 445, 446, 447, 448, 449, 450, 451, 452, 453: n = A,T,C or G
  misc_feature 454, 455, 456, 457, 458, 459, 460, 461, 462, 463, 464, 465,466, 467, 468, 469, 470, 471, 472, 473, 474, 475, 476, 477,478, 479, 480, 481, 482, 483, 484, 485, 486, 487, 488, 489,490, 491, 492, 493, 494, 495, 496, 497, 498, 499, 500: n = A,T,C or G
  misc_feature 501, 502, 503, 504, 505, 506: n = A,T,C or G
ttcacatacagttcattaaaatagtctcccatttttggtgactgttctcacctatcgtcttacacaaatccataataataattgttctagttcctcgcaatttcagcctatggtgatcattcccacaaaagatgcctttggacatttacttttcatgtgactcatttactccagaattataggcttgcttctaggaattctgtgtttcattctrcattcttgttgaactctccagtgctgtaggttgcttagccaaaatctctggatatgaaacacattatctacactatatataaaatttcaaaaataatgagaaagataattttgttgactcatggtgcctaaattaccataaatgacataaatcctttaaaatagattcatttttcaaagtccttaatgactcnnnnnnnnnnnnnnnnnnnnnnnnnnnnnnnnnnnnnnnnnnnnnnnnnnnnnnnnnnnnnnnnnnnnnnnnnnnnnnnnnnnnnnnnnnnnnnnnnnnntatcactgtatacgaattcgagctcggtaccttacagaagtgccactgcattgtcagagaagcaggaagggattcacaggcagataacacttgcatctagtcccaaggctgagaacattccagttccaaaagataaccct

SEQ ID NO: 604784 - DNA, 646 bp, Homo sapiens
  misc_feature 407, 408, 409, 410, 411, 412, 413, 414, 415, 416, 417, 418,419, 420, 421, 422, 423, 424, 425, 426, 427, 428, 429, 430,431, 432, 433, 434, 435, 436, 437, 438, 439, 440, 441, 442,443, 444, 445, 446, 447, 448, 449, 450, 451, 452, 453: n = A,T,C or G
  misc_feature 454, 455, 456, 457, 458, 459, 460, 461, 462, 463, 464, 465,466, 467, 468, 469, 470, 471, 472, 473, 474, 475, 476, 477,478, 479, 480, 481, 482, 483, 484, 485, 486, 487, 488, 489,490, 491, 492, 493, 494, 495, 496, 497, 498, 499, 500: n = A,T,C or G
  misc_feature 501, 502, 503, 504, 505, 506: n = A,T,C or G
ttcacatacagttcattaaaatagtctcccatttttggtgactgttctcacctatcgtcttacacaaatccataataataattgttctagttcctcgcaatttcagcctatggtgatcattcccacaaaagatgcctttggacatttacttttcatgtgactcatttactccagaattataggcttgcttctaggaattctgtgtttcattctacattcttgttgaactctccartgctgtaggttgcttagccaaaatctctggatatgaaacacattatctacactatatataaaatttcaaaaataatgagaaagataattttgttgactcatggtgcctaaattaccataaatgacataaatcctttaaaatagattcatttttcaaagtccttaatgactcnnnnnnnnnnnnnnnnnnnnnnnnnnnnnnnnnnnnnnnnnnnnnnnnnnnnnnnnnnnnnnnnnnnnnnnnnnnnnnnnnnnnnnnnnnnnnnnnnnnntatcactgtatacgaattcgagctcggtaccttacagaagtgccactgcattgtcagagaagcaggaagggattcacaggcagataacacttgcatctagtcccaaggctgagaacattccagttccaaaagataaccct

SEQ ID NO: 604785 - DNA, 617 bp, Homo sapiens
attaaaaacaagggaagaaagggagaaactgcaataactgctattttaagaaatgtagaaaggcacattctgcagaacacatgagaaataaacatagctttcagcaatataataaaaatagcccattaaattaattttcagcaatagcatgggaaatggtcttgaatagttgtcctgggtaaacagaaatatattttggcctggctcaggatgagaaatggatagaggtcatacacagaagggaaactgtgaggctttgacagtcaaggagaagaatatgagaaaacgcagtcccaaagcagttccctagccatactggcaacgtgcactatgaataataaattttaatatgtaaatcacaagctacttcttccccttctcaattaacactctgtcatcctcctggcctcagccccatgtaactctcccagagaggccttcctcaactccatgccaaacgtaagctgtctaaatgccctcccagaatgacgcagccctggtagtacttaggggtgttggagttttacgtttattggtgggattatctgattgatgtctacctcccaaataccttgtgagctccygtatgtaaacacaatgcactgattatgtctgtt

SEQ ID NO: 604786 - DNA, 632 bp, Homo sapiens
gctctttgtacatctggcagaattcagctgtgaatttgtctggtcctgggcttttcttggtggtaggctatcactgcctcaatttcagaactcattattggtctgtccagggttttaatttctttctagtccagtcttgagagtgtatgtatctaagaatctatcaaattcttatagattttctagtttatatgcatagagatgtttataatactctctgatggttgtttgtatttctgtggggtcarctgtaatatcccccttatcatttctgatggtgtttatttgaatcttctttcttttcttattagtatagctagtggtctattattttattaacttttttttcaaaaaaaaaaacacctcctgaattcattgatcttttgaatgtttttttcctgtctctatctccttcagttcagctctgattttggttatttcttgtcttctgctagctttcggatttgtttgctcttggttctctagttcttttagttgtgatgttaggttattaacttgagatcttcctaactttttgatgtgggcattaatgctatacatctcccccttaatactgtcttagttgtgttccagagattctggatgtatacacaaatcaataaatgtgattc

SEQ ID NO: 604787 - DNA, 590 bp, Homo sapiens
tatgcatctgacaaaggtctaatatccagcatctataagaagcttaaataaatttacaagaaaaaaacaactccataaaagaagctggcaaagaacgtgaacatttctaaaaagaagacatgcatgtagctaacaatcatctgaaagaaatctcaacatcactgatcattagagaaatgcaaatcaaaaacacaatgagataccatcttacaccagtcagaatggctattattaaaaaataacagattctggcaaggttgtggagaaaaaggaacgcttatayacagttgatgggagagtaaattaggtcaaccattgtagaagacaatatggtaattcctcacctaaagacagaacctatcattcaacccagcaattccattactggatatatacccaaagaaatacaagtcgttctattacaaagacacacactcgcatgtgttcactgcagcactattcacaatagcaaacacacagaatcaacctaaatgcccatcagtgatagactggataaagaaaatataccatggaatactatgcagtcataaaaaagaacaagatgatgttttttgcagggatatggatgg

SEQ ID NO: 604788 - DNA, 576 bp, Homo sapiens
attatcctagcaaactaatacagaaacagaatacgaaatactgcatgtactcacttataaatgggaactcaatgatgagactagatggacacacagaggggaataacacacactgcagcctatcatagggtgatgggtgggaaaagggagaggatcaggaaaaayaactaatgggtacgaggcttaatacctgggtgatgaaataatctgtacaacaaactcccatgacaggcgtttacatatgtaacaaacctgcacatgtaaccctgaacttaaaagttttttttttaaaggtcaatatctgtatagtcgtcacacacttggggtttactcttcaagtttatggtgtagaaacacaatataatataagaaatgatgaataataacataatgtacttgagaggctaatagaaatatttaatcaatttcactaaactcctgcacattctgcaaagacaagacactaaaccttccagcaacaaggacacctgtgcccctaacccagcttgctgttttacctcagcaaaattaagccgtgtatcttccacattcaactgaaaaaagccacaaagttct

SEQ ID NO: 604789 - DNA, 617 bp, Homo sapiens
ttgtttcaagaagacagaaaacatgaaattgtggcagacaaaacatcctgagttgattcctggcacaatggaacacctagttgagatggaaccaactgaaaggatggttgttcaggtgtggtggcagaccaggttcagaacatttataaaggcttacagagtttgtctattttcccctctagggtcacatagaaatgactttgtcagttacaagatgtgacagacattgcaagaaattcctccaggtgattgactacaggtttgagaatgaaaaggaaaaagtgaatgatatctgtggagaygacacagttttcagaagcatataggatgctgactttttaattgcatggtgtttggagagttcgggctccactcagggagctgaagtccagtgattcagagactgagcctactagaagagcatccctgatccagctccccagaggtaccctgtgagtgagggcagccctatcattctacccctgcaaagattaatgatacaactacggaagcagaagtaataactggaatgtgaacatcatcaaaccaaccacatcagaaactactgttaaaaaaactcatctgtctctaccttgccccatatttaatgtcttgtt

SEQ ID NO: 604790 - DNA, 617 bp, Homo sapiens
ttgtttcaagaagacagaaaacatgaaattgtggcagacaaaacatcctgagttgattcctggcacaatggaacacctagttgagatggaaccaactgaaaggatggttgttcaggtgtggtggcagaccaggttcagaacatttataaaggcttacagagtttgtctattttcccctctagggtcacatagaaatgactttgtcagttacaagatgtgacagacattgcaagaaattcctccaggtgattgactacaggtttgagaatgaaaaggaaaaagtgaatgatatctgtggagatgacacagttttcagaagcatataggatgctgactttttaattgcatggtgtttggagagttcgggctccactcagggagctgaagtccagtgattcagagactgagcctactagaagagcatccctgatccagctccccagaggtaccctgtgartgagggcagccctatcattctacccctgcaaagattaatgatacaactacggaagcagaagtaataactggaatgtgaacatcatcaaaccaaccacatcagaaactactgttaaaaaaactcatctgtctctaccttgccccatatttaatgtcttgtt

SEQ ID NO: 604791 - DNA, 571 bp, Homo sapiens
tttattctacctgtaaaaatattgaccgcagtaaaatcagcagttaggaatgtatagaaataaagaagtttacagttctgagggggttggaacaaattgccagtaaaaataaaacaaaaatattctggccaggtgcagtgactcgcaaatgcaatcccagggagagtaaggcaggaggatcacttgagtccaggagttcaagaccagcctgggcaacgtggtgaaatcatgtctgtaaaaaaaataaaaacaaacaaacaaaaaatwgcaatgcgtggtggtgcatacctgcagttccagctactcaggaggccgaggtgagaggatggcttgagccccaagtgttcgaggctgtaatgaactataattgcaccattggactccaggctgggagaaagagtgggactccatctctcaaaattatatatatacacacacatatacatgcacacacacagtcacacacatatatccattagagaaaacgatggtctgtgcagaaaacattgttttcattatttaacactttggttgtctatacataggtctaatgatttgatttcagtacact

SEQ ID NO: 604792 - DNA, 603 bp, Homo sapiens
actttcttcaagtacatctttcagaatgatttcagatccacatccaatgctattctatcaataaaggctttttaaataaaagcaaacaaaattaataatccccagtgtccctatagcactttggatacagctatcttataactggattgacattatagatacgtgtgtgtatacaggtttttctcatctattacagaaagtccaaggtcagaagccctgcctcgtgtaacttcatatgcttacagctcctctggtagacggaggcatttaattaataactaaatatgtttttgctgcatctgataattaaatacaaaacaackaaatcacaaattagcaaatctgccatatgcatgcagataaagtcaataattgtaagctttattgtttccagatgatcagaatttttgtccttgttagaatatgaaacataacaatattgtttgagtgccttataagttctggttttcatgccaaaaaatcagatgaagctaataacatgtgatattttattagtttgatgttagactagatgaaatattgattatctaatttaagagctatcacagaaagcaaatcatgtacacataatctatgtgtaaa

SEQ ID NO: 604793 - DNA, 643 bp, Homo sapiens
taaggattaattttttaatgctttatgatgatctttagtgtcttctgtcaacattataaatattaattgtaatttttacatgagaaaattatagcacacagaaattcatttgtactagctcaagttatacttttaacattgtttttgggggttcagagaaatataattgttttctatatgtataagaaaaaatgcacatgaaagcaaaaatgatcagttgctaaaggggtcagtcacactggttctctgatgaagattttctgttctaagagtttgtattgtatttcatgattgaaagagtacaaatgaatttcaggcctccctaagcaacttacattccttcactcagtgtatcttcacagtaaatgtctagaaataaaatgttgaagagccaygattattacaacagaaagtaaggagaggattgaagctatacctgaagaaatgagctcagagattatgagatgtcttttgacataaattggaaagcagggaaacatttcataaggtaggattaattgtgaccacagtagctaacgcttattaaagagtcacacagtgcctggcacccaaataagctttctacattcaattcctcatgcatgaagtttattcacccaatcattaatttatccaaccctta

SEQ ID NO: 604794 - DNA, 485 bp, Homo sapiens
taagttgatggtttgtcactttacttttaactgtctttttttaccatctcaattttcatgtattttcttattattgtaagagctactacttctccatctctattttcttttcatgagcatctgtatgttcagataaatgggagtacgatcttaagatarcttgaattttaagatatacctaccacagtgcctctgaactcacctcttctgtgaggattcatctactgaaagcttttcctggcagcaatatatgtacctctttctgatgcctttatctcttaattctgtttcaattgattgttttatgttatctatgtatccctagcagagaaactgaggactccttgtacagggtagttatttgtgtagatcatttaatatgtattattcatctcatccattattttccaaggcaatacagcaagcctgacaatcttagaggattgagttgcattctaatgacaaataaggttactgtagaagga

SEQ ID NO: 604795 - DNA, 558 bp, Homo sapiens
aatgctggagactttgtcttaaccatgttagttctctcagtgcttagcatatggctggctgactctcagcaagtgaaggaatgggtgaatacctgcatagtgaataattattcaagagcagagaaaygagaccatagctctggtattaacaagttgtatgactttcagaatcacttcaccgatccaggccttcagataaaaaagatgagtagcaattgggtaggcagtcaggaaagagaatgccccagatggcagaaagggaatttgaaaacggagatttaagcaagcaaagtacattaatgaaacagcaaattatttggtaatcttagatgttcctcaaactttctgcttttgacttttcatacaaccctcaatattcacactatatgtcctagatgtgtgcaattcagtggtctaatctggacttccagataaaaggccagcaaggctgacttccagctcttccaagatggccccgcaggacagtagccaaccattcaccagcttggctcccattgcaatgtgtgtgtgatgattggaagatgtgatgaattaatt

SEQ ID NO: 604796 - DNA, 558 bp, Homo sapiens
aatgctggagactttgtcttaaccatgttagttctctcagtgcttagcatatggctggctgactctcagcaagtgaaggaatgggtgaatacctgcatagtgaataattattcaagagcagagaaacgagaccatagctctggtattaacaagttgtrtgactttcagaatcacttcaccgatccaggccttcagataaaaaagatgagtagcaattgggtaggcagtcaggaaagagaatgccccagatggcagaaagggaatttgaaaacggagatttaagcaagcaaagtacattaatgaaacagcaaattatttggtaatcttagatgttcctcaaactttctgcttttgacttttcatacaaccctcaatattcacactatatgtcctagatgtgtgcaattcagtggtctaatctggacttccagataaaaggccagcaaggctgacttccagctcttccaagatggccccgcaggacagtagccaaccattcaccagcttggctcccattgcaatgtgtgtgtgatgattggaagatgtgatgaattaatt

SEQ ID NO: 604797 - DNA, 432 bp, Homo sapiens
tctttttgacttaaacttttatttaactcattctactaaaattaatatccccacgaaaagagagttataaccataacttttaatgaggctcagttttgcccctttcttttttctctgttttacatattttgtttgtaaagtgactgttagaaacatttatagaaatttacacatttgaaatgcagagtgctataattacgtgagtgtakgttctttgctatggtttgaatgtcagatcctccaaaattcatgttaaaaccaaatcaccacagtgacagcattgaaagacagggcccctggaaggtgattaggtcatgaggctccttcaccataaatggataaggcccttctgaaaagggctttcaggtctctgccatgagaggacacagccttcctcccctacagaggaggcagccctcatccaacaaccga

SEQ ID NO: 604798 - DNA, 432 bp, Homo sapiens
tctttttgacttaaacttttatttaactcattctactaaaattaatatccccacgaaaagagagttataaccataacttttaatgaggctcagttttgcccctttcttttttctctgttttacatattttgtttgtaaagtgactgttagaaacatttatagaaatttacacatttgaaatgcagagtgctataattacgtgagtgtaggttctttgctatggtttgaatgtcagatcctccaaaattcatgttaaaaccaaatcaccacagtgacagcattgaaagacagggcccctggaaggtgattaggtcatgaggctccttcaccataaatggataaggcccttctgaaaagggctttcaggtctctgccatgwgaggacacagccttcctcccctacagaggaggcagccctcatccaacaaccga

SEQ ID NO: 604799 - DNA, 518 bp, Homo sapiens
ttgattgaaagacacaatattgttaggatgttaattcttcttaaattaatttatagatttaatataatctcaatactaacacaagataattttttaatatactttgataagatgctcctaaaattgatatggaaatgcatagccaaaacaatcttgtaaaagaacaaatctggaggacttatgggtcctcacttggagacttattacaaatctatagcaatgaaaatactttgatattggtacaaggataggcaaatggagaataaagtccagaaagagacccacacttagccaattgatttttgacaaagggactaaagcaattaaatggagaaaggaaaatcttctaactgatgaaatataaagaagtctatatcatacggaaaaaaaaamccctcaactcttactcacaccatacataaaaatcaatttgagatagatcatagacctaactgaaaattcaaaaacataaagcttttagaagagaagataggataatagcattactacctaccagt

SEQ ID NO: 604800 - DNA, 626 bp, Homo sapiens
ctttgcaaaaattatgactgtaagaaaaatctgacataggaaaattatgacagtgaaacaaatctgacctaatcaatttcatcttgcttctaacctccaagtggcccttactcattcctaggcataggccaaactaactataggaagaattaagagtttaacttttaaacaaagataataacagccccttcctaaaacaaatcccatctttgtttggggaccaaaactgcctttgtaaaaccaataaattgaccacaagattagaaattatggctcaggagtcatccagccagaggccacaagatttgtaacctccgcaattgctcctgtggataacatcactatgataaaacctaaggttggtgttcaagacattcttaagaccctgcattctgttggaccagccrgtgccacccgaccaataaactggctccaccagtcctgtaatcccacccaggaactgaagacagaaggaagatcccactttgaccccctgtgatttatccctgacccaatcaatcagcattctccattctgtaggttccccacccaccaaattatcctttaaaagccccaatctccaaatctggggaaattgatttgaataacaaactgtggtcttctgt

SEQ ID NO: 604801 - DNA, 515 bp, Homo sapiens
taccgtgctccaggcacttacttgctaacaacatgagttggataccaagaaatatttgtcttccttactcccagaacacagtatatactggatatttgctgaattctactcttcctcctttttcaaakggttagaagaaatatgcttcttaaaagtaacaatttgtagtaaataaggctatttagcaactctacaattacaaaggtgatgtgaaaaaggtttctacctcccagttggatgatccatggaggtaaggacagaggagcaatagagaccatattccaattcaaagtaactattatcaagtgctcactgtgtcaagcactaagctaatactttcataaatgattgcatttttttacaattaaatacttaaccacatcacaggaagaaaaattgagatgcaagagtgttaagtaacttattcaaggagtcataaaaaagaagaggtagaataatattttgaactaagtatgacccagactcatttcattccactatattgcacacaacat

SEQ ID NO: 604802 - DNA, 515 bp, Homo sapiens
taccgtgctccaggcacttacttgctaacaacatgagttggataccaagaaatatttgtcttccttactcccagaacacagtatatactggatatttgctgaattctactcttcctcctttttcaaatggttagaagaaatatgcttcttaaaagtaacaatttgtagtaaataaggctatttagcaactctacaattacaaaggtgatgtgaaaaaggtttctacctcccagttggatgatccatggaggtaaggacagaggagcaatagagaccatattccaattcraagtaactattatcaagtgctcactgtgtcaagcactaagctaatactttcataaatgattgcatttttttacaattaaatacttaaccacatcacaggaagaaaaattgagatgcaagagtgttaagtaacttattcaaggagtcataaaaaagaagaggtagaataatattttgaactaagtatgacccagactcatttcattccactatattgcacacaacat

SEQ ID NO: 604803 - DNA, 676 bp, Homo sapiens
ttttgtttactcaattttgttcctgagattggagtctgattatgaagaacctttctagattcaatagatggattggcttaacataaaaggggagtttattggctcatatggcatcactaaaaattccagaagagcatatgcttcaggaacagtttgatcaaggagctgacatgttatcagcagctgtctatcttctgcatagygttttcattctaccttcatatggtgtcagtatgactttcagcaactttagacctgtagtcacctatgtttactccaaagaaaaagagagtatctctttcaggtagtttctgtacaaaccctaggatttactctaaattggaccaatttggatgacatatccatgcctgtctttgacatgtcctgacctgatcatgaggctaaagggactgccccaacttgaatcacatgattcatccccagagcctgggtgagacccttgaaccacaagtaacagaagtggcaaaggatttgggatattataagctaaagaagtgggctgggctctggatgatacatactgtccattctagggtcacttatgtttttgagaagatgtcattttatccttagtttcccctactcaatagagatagcttttatggaagaaactttgtccttttgttttaaaataatcttctccctccctttgttt

SEQ ID NO: 604804 - DNA, 590 bp, Homo sapiens
aagaaactttgtccttttgttttaaaataatcttctccctccctttgtttatctgaagctcataattataacatggtgtatgtctttcctttctttctggcaaattttttttctccatctgttttttattgaatgatgtatgggaaagccacattttcctagctaggaaagcttggtaagctattctcaatgtctctatgcattctgtttaacacattcttatttttagctttctgggaagatttatacatgtgattgtagccagtattagctttttaaactctttcttagaaaatttaaagctgcatttatccctgaatacttttccatggctacttaggatattgttctaaatatgtaaaattttagctcatgtagatgtggttttaaacattttatggacattaacatgggtgcatatgtatttttctctagctaaattcatttatatttacttattttgatactaatattaaatgcagataaagaaaacttaaatarcatgttttctttcctgaataaggctgaaaacctatcacagataacctcttaggttttgaagtatcaggactaccagagaaaaagaaaaa

SEQ ID NO: 604805 - DNA, 437 bp, Homo sapiens
tgactatctatgtatgtaagaaaaatgaaattgtgtttgtacatttgaaatgtgaaaacatggaatatgtaaatgtccaaaaatgttggagttttataaaggctatttgaagtttagtgatacaataaatttctgatcagcttggagatttccctgctgcctctctttagaatataaaaatacttgtcacccgttgtgctctggagcctgtaatggttaattatatgtggcaaaatggctagattatggtgaccagttgtttggtcaaataccagtatagatrttactgtgaaggtatatattttagccatgattagcatttaaatcaataggctttgactaaagcagattattctccataatgtgtgtgggggggctcatccaattagttgaaggccttaagagcaagcatggtgatttcctgaagaaagaggaat

SEQ ID NO: 604806 - DNA, 490 bp, Homo sapiens
tcattctaaccatccaaaagcatgtatttaacataaataaatatatacatgcttctgctttggtgggataaggccttttcagtcttaaaatttctgctcttcataaggatatgttctgcacaaagggcaccccattaccttacatagcctccaacttcgggacacttccaaatcaattttcctcatccttgcaattaccatttagattagtgggagttctccagagaaacagaaccaataggatatacagagataaaaagaaatggatttattatgaaagattggctcacataattataaaggcagagaagcctcaccatctgccatctgtaaactgaacgccaagaagagccagtgcagtaattccagcccaagcccacagacctgaggaccagaagaaccaatgatgaaagtctcagtccaaaagcccaataactgggagtgtagaggggacaattgtttatrtctgaatgtccaagaattaggagca

SEQ ID NO: 604807 - DNA, 577 bp, Homo sapiens
tcccaaattgctgggattacaggtgtgacccaccgcacagggccaactgtgctaagttctgtattcctcaaacttacttgatcacaaaatccattttatgaaagattagtgtaggatgttgagtgattctttgaaagaagtaaatgtgaaataagttcagtttttataatttggaagtgggttaaagaatcagagttaaaatgatttgggaagcttagaaccattatgagactagaggagagacaaggcaagagaatgtgtctcagcagctaccacatgcaaaaaaagagtccagtgtgctggggagatcagggcttgagtcctagcatggccctcatgagtcatataagaatttgggcaactcattattccttrctctcggagccctttttcccctatttataaaattgggataattctgaccacacagggatatggtaaggtttaaatgagttaacgtaagctggcccatagtcttggcttgttcaatgctgccttctgacccacctcatttatacagaaattgtccagtgagttggcagaattcactggaaggcatcagagttaattaataagc

SEQ ID NO: 604808 - DNA, 530 bp, Homo sapiens
tccagcagttttattgagcacttaatattgctggctacttttttattgtgaaactctctctgtctctctctctcttttttttttttcgagacagggtctctgttacccaggctggaatgcagtaatgcaatcatggctcacctcatagtctcgacctcctgtgctcaagcgatcctcctgtctcagtctcccgagtagctgggactrcaggcacatatcactgcacccacctaatttttttttttttttcactttttgtaaagatggggtcttgccgtgttgctcaggctgatcttgaactcctgggctcaagctatcctcctgccttggcacgccaaagtgttgggattacaggtgtgagccactgtactggccatgaaatttctttctttgcattttttaataaaaaaatttttataatacaaaaaattagccgggcatggtggcgggtgcctgtagtcccagctacttgggaggctgaggcaggagaatggtgtgaacctgggaggtggagcttgcagtgagcagag

SEQ ID NO: 604809 - DNA, 459 bp, Homo sapiens
tatatataaaactgtaaagtataattataactggtcatacatctttcttaatagtaaaaaacaagcattgttccataaaaggccattatttgttttaaatatctttaaaaaaaaacaacttagaggacaggaaaaaagcatattaatttttgcacgtatatataaaagggaagaaaataaacagaaaagcaataactatttgaagaaaaagacagtaacgggggattttcaataaggactttgttaaataaatttttctatttttaactgttgcgggtacatattaggtgcatatatttatggggtacatgagatactttaatacaggcatgcaatgtgtaacattcacatcatggaaaatggggtatccatcccctcaagcattcatcttttgygttatgattatactcttttagttatttttgaatgtactataaattattgttgccatagtcaccc

SEQ ID NO: 604810 - DNA, 453 bp, Homo sapiens
aaccatatttattaagtgacagacctcagacgttattctgtactacttatttctatctttcttttaggactatcaggcaaaattcagcccccaatatttcacataggttcttttctatttttcctaagtggcagccggtctgagaaataaagggacagagtacaaaagagagaaattttaaagctgggtgtccgggggagacatcacatgtcagtaggttccgtcatgctccacaagccccaaaaccagcaagtttttattagtgattttcaaaaggggagggagtgtacgaatmgggtgtgagtcacagagatcacatgcttcacaaggtaataagatatcacaaggtaaatggaggcagggtgagatcacaggactggggcaaaattaaaattgctaatgaagtttcgagcacacattgtcattgataacatctcatgagcagacagggtt

SEQ ID NO: 604811 - DNA, 453 bp, Homo sapiens
aaccatatttattaagtgacagacctcagacgttattctgtactacttatttctatctttcttttaggactatcaggcaaaattcagcccccaatatttcacataggttcttttctatttttcctaagtggcagccggtctgagaaataaagggacagagtacaaaagagagaaattttaaagctgggtgtccgggggagacatcacatgtcagtaggttccgtcatgctccacaagccccaaaaccagcaagtttttattagtgattttcaaaaggggagggagtgtacgaatcgggtgtgagtcacagagatcacatgcttcacaaggtaataagatatcacaaggtaaatggaggcagggtgagatcacaggacyggggcaaaattaaaattgctaatgaagtttcgagcacacattgtcattgataacatctcatgagcagacagggtt

SEQ ID NO: 604812 - DNA, 430 bp, Homo sapiens
gagtctaagtgacatttagaacaaaaattatttaacttttttttgatttcatctcttggctaattatattttgattccttgattatatgtttttgaaagattggcaagcctgtcctctggggttgaaatgttagattcaggaatttattaaaaaatgattgctatttttaatgaaatgtaggaatatgcttgaaattaaatatatttaaaaagcaggtgaattgagaatatgaatataacttacggatttttatcctttatgctaacagatactggttactgtaaagtgtatagctatygtatagctgctactgtaaaactaaagtatatatgtatatatatagcaaaagacacaggatatagttaatattcaaatatattaatgaatatgaagacaaatagatttatataaatgttacaatatcaagca

SEQ ID NO: 604813 - DNA, 621 bp, Homo sapiens
aattcagggaatacagagatgtaggtctgaattagtccattttcacactgctatacacatactactcaagactgggtaatttataaaggaaagaggtttaattgactcacagttccatatggctggggaggcctcaggaaacttacgatcatgacagaaggggaagcaggcatgtcttgcatggtggaaggtgagagtgtgagcatgtgaaggaggaactgttaaacacttataaaacaatcaaatctcatgagaactcactcagtgtcacaagaacaacatgaggaaaccacccccatgatccaatcacrtccctcccttgacacgtggggattatagatctctcctataatcctgtaaggattacagttcgagatgagatttgggtggggacacagccaaaccatatcaaggccctgttcccatctaataaggaagctaatgaataattacagtagacaggagtcaacacagcaatagaagtatagttcaatcaatggaatgattacctaattaggaggagaaatataacatggttggttatagaatgcttcctatgaggggtacagtacagggttcccttttaaaaagtaattgcaattttgtttgtatgtttaattt

SEQ ID NO: 604814 - DNA, 603 bp, Homo sapiens
caaactttcccacatcttcctgtcttcttctgagccctccaaactgttccaacctctgcccattacctagttccaaagtygcttccacattttcaggtatctttatagcagtgtcccactctccatggtatccatttattgtattcatcaattttcacactgctataaagacatacccaagactgggtaatttataaagaaaagaagtttaattgactcacagttccacatggctggggaggcctcaggaaacttacaatcatggcagaagggaaagaggcacatcttgaatggtggcagatgagaaagagagaacagtgaacagtgaagggggaaaagccccttatagaaccatcagacctcatgagaattcactcactatcatgagaagagcatgggggaaactgctcccatgatccaatcacttcccaccaggtctcttcctaaacacttggagattacaattcaagatgagatttgggtaggggcacaaagcctaaccatatcacacactattctagttcacccaggaaataggtaaattatgaaataggagaccacctgtgaaaccatgctaacctaaagactgaaattcaaaacaaa

SEQ ID NO: 604815 - DNA, 603 bp, Homo sapiens
caaactttcccacatcttcctgtcttcttctgagccctccaaactgttccaacctctgcccattacctagttccaaagtcgcttccacattttcaggtatctttatagcagtgtcccactctccatrgtatccatttattgtattcatcaattttcacactgctataaagacatacccaagactgggtaatttataaagaaaagaagtttaattgactcacagttccacatggctggggaggcctcaggaaacttacaatcatggcagaagggaaagaggcacatcttgaatggtggcagatgagaaagagagaacagtgaacagtgaagggggaaaagccccttatagaaccatcagacctcatgagaattcactcactatcatgagaagagcatgggggaaactgctcccatgatccaatcacttcccaccaggtctcttcctaaacacttggagattacaattcaagatgagatttgggtaggggcacaaagcctaaccatatcacacactattctagttcacccaggaaataggtaaattatgaaataggagaccacctgtgaaaccatgctaacctaaagactgaaattcaaaacaaa

SEQ ID NO: 604816 - DNA, 532 bp, Homo sapiens
catgaacagcaaataggatattgaagcctaggcacattatatagacagagaatgtagttttatgttttgtactaaaaataaattattttgtgtgtttgtgtgtgtgtgtgtgtktttttttttttcctgagggaccaacagaacagctttattcagatctttgttagcaaaaccagtattcaagttcaaggacttggtccgtgctttctgccagatgaaacccacactgtgagttctagcctaaacatttatgttgtggcccttaatctgagtgctgaagaacggagatatccatggtgaatttagcacagtaaggaccggtgctttgcctttgctgctagctcacacgggcacaacattcaatatagtttggcttcttcagagctgcatcattttctgccaaaaaataaagtcggtatacagaaatcaacaatcatgtattgcatgcactgcttggttgtagtggcttattaataagagctccgaagcatgaaatgaagcttgtgtcagtgcagtggaaaacaataatctg

SEQ ID NO: 604817 - DNA, 603 bp, Homo sapiens
gtgccttttttccccccttgatcagtcttgcctggggtttatcaaatttattattttatcagtgaacttattttgacttttttttgctattgtatgcttattttctaatttattcatttctgttcatagtttgttctttcctaatatttttggctttaggttttctgttttttctaactttgtgaaaatgctacttagattattgattttcaacttttctaacatatgcattcgaagctctgcattttcctcaagcatggctttaatagtatsctcttaaattctgtcacattttttctgctcaaaatatttaaaaatatccatgtgttttttctttgaccataagttattagacatttattacttaatttccaacggtttaggatattctaaaaatctttttgttgatttctagcttaatccagctattgtcaaagaacacgctattaacattttagtctttttttttgagactattcttatggcctggatatgatcatttttgctgagtgatagacatgcacttgaatagactatacaatataatcaatctgtagttgtaattgcagaatttggtgcacatagattgggtcaaattcatta

SEQ ID NO: 604818 - DNA, 636 bp, Homo sapiens
ggtctcaccgtgttgtccaagttgttcttgaactgctgggctcaagtgatcctcctgcctcagccttccaaagtgataggattagaggcctgagccactgtgcctggctgaagtccatgtttttttgatggagatataaaaatggactttctttttttaacagtaaatcatgtatgctactgggtaagtgaattttgagatgctagttacaactttgtaccattggtacttatcttacygccttggaactgctatattttgcatacatgcctgtccccctctgtgaattacaaattttttgaggaaggtgacaatgtcttgctcattgttagtatcattgtatggcacctagaacatgggaagtattcaacaaatgtttgctaagtgaataatgttaaagttttgcagccgacacttttaaaaatgataagacatattttattcagtactacttcagtaggggagagacctcagtgttaccggagcttaactgaactgaacaaaagacaggagcccttttaaatgctgggatgtactaaacaaaaggtactaaaagacattaagggtgatttgtatgtgtagttaggcagtgtgggtttgttaattggtgtttatctggaggagaaacaaacttct

SEQ ID NO: 604819 - DNA, 545 bp, Homo sapiens
tcggtctcctgactctagatgctatgtgcttccattgtagactgcctgcaagggatggtcatactcctggctgcacttccagagtcttgaagaagaaagcagatgtggatacctaaatatagggtgcggagtacctggtttttttctctcttattcctgaacatttattggtttaaaactgctggcaaacagcacagcataaatcacaactccatatataaaaatagtggcctctcttccaaaattaataacttagattgctaggttattaacttggctgtatcctaataaatagattatgactctccatcaaattaaattgcwtgttcttggaggaggggggaggtaagagttttaattgttgagggaggctttctggaattgctccttatgctgccaaacaaccattaggggttatgggtattgtgggttaaattcttctagagtcagctgatggtccttcaagaatgagtacttggcatttgttgagcctattctttttaggatttttgagttggagacttttattatagtgagaaggattt

SEQ ID NO: 604820 - DNA, 563 bp, Homo sapiens
gagtattgccaaggaagaaggctttaattgggtgctggggctgaggagatgggagatccttctcaaatccatctctctgacagactaaaaccgagggcttatatagcagggcagaaatgtaacaatgtataagaaaacaggaactagagaggggcaaggaagcaatcatgatcartgaggggcccctcaaggatctggtgtggtgatctggtgagtttcagttctttgatacttttttttgagtggactggaagtactctcctgaggacggagctcagataaaacaaatacaagttttaagctttaagacaagaaagggcaatctatgtttatacaaaagaatagtctataggactactgggttggtttcagagagaaaaaagacagcagccagaaaatcccatacatttccctgtcaggaggaaatttattactacataagaatttagaaatatcatcacctattttctgacaaagatactcaataatacaaagaaaaagtaactgaacaaaaagttaaccagaaacacagaccttgagatacaggaagatgacaggaggga

SEQ ID NO: 604821 - DNA, 557 bp, Homo sapiens
ggcaaggaagcaatcatgatcagtgaggggcccctcaaggatctggtgtggtgatctggtgagtttcagttctttgatacttttttttgagtggactggaagtactctcctgaggacggagctcagataaaacaaatacaagttttaagctttaagacaagaaagggcaatctatgtttatacaaaagaatagtctataggactactgggttggtttcagagagaaaaaagacagcagccagaaaatyccatacatttccctgtcaggaggaaatttattactacataagaatttagaaatatcatcacctattttctgacaaagatactcaataatacaaagaaaaagtaactgaacaaaaagttaaccagaaacacagaccttgagatacaggaagatgacaggagggaaatatttggaattgaatcaaataaatcaagtgaggaggaaagaatgagttaatatataacagcctttacattaaaggtgaatgaacttggaaaattcacaaatttttagaattcattagatgttttaattggaaaattgtcagact

SEQ ID NO: 604822 - DNA, 558 bp, Homo sapiens
gagaggaattttacagctgggccgccaggggtgacatcacatatcggtaggaccgtgatgcccgcctgagtctcagaccagcaaggttttattaagggtttcaaaaggggagggagtgtaagaacagggagtaggtacaaagatcacatgcttcaaaggacaaaaagcagaaccactgataagggtctaacaaagatcacatgcttctgagggaacaggacaaagggcaaaagcagaaccactgataagggtccaacaaagatcacarggcaaagggcaaagcagaaccaccgataagggtctatgttcagtggtgcacatattgtcttgaaaaacatcttaaacaacagaaaacagggttcaagagcagagaaccggtctgaccacaaatttaccagagcggagttttcccaaccctagtaagcctgagggttctgcaggagaccagggcttatctcagtccttatctcaactgcccaagacagacattcccagagtggccatttatagacctcctcccaggaacgcattcctttcccagggtattaatattaatat

SEQ ID NO: 604823 - DNA, 637 bp, Homo sapiens
ggcacctccttcttaactgatatgcaaaataagaaattggacacacattgccctgtttgagtgtgaagttagataatttataatttattttcttttatgttctttatgattagtatccatgacattaacaaaacccttggccacatgttgacttgattggttttcctgtaggctggaagtaaaaatgttcatttctmcttaggggttagcaaaattgtataagctcacacttcatggagcactgacagcagtgagtcttcccagagaaaggacagggtttctctcagcactgccagacagacggcaggggtgtggtgtgttatactatagggagagcatggatccctcctttcgtattcatggatgttctatgatggcagttggacacaagaggaaagttgctctgagacacaaagtgtgtactcctttcccaccccatacccctggtattggaacaccctagaattgtcttcaggtgttttctctcttaagtcactctctgtggtcggcgatcccattgagatacttgtttcctctgcccattctcccttgccaagaggaaactcggttccattcccttgggtagtttcaactgaataccagttttgccacattactaaggagaatgaaaagcact

SEQ ID NO: 604824 - DNA, 637 bp, Homo sapiens
ggcacctccttcttaactgatatgcaaaataagaaattggacacacattgccctgtttgagtgtgaagttagataatttataatttattttcttttatgttctttatgattagtatccatgacattaacaaaacccttggccacatgttgacttgattggttttcctgtaggctggaagtaaaaatgttcatttctacttaggggttagcaaaattgtataagctcacacttcatggagcactgacagcagtgagtcttcccagagaaaggacagggtttctctcagcactgccagacagacggcaggggtgtggtgtgttatactatagggagagcatggatccctcctttcgtattcatggatgttctatgatggcagttggacacaagaggaaagttgctctgagacacaaagtgtgtactcctttcccaccccatacccctggtattggaacaccctagaattgtcttcaggtgttttctctcttaagtcactctctgtggtcggcgatcccattgagatacttgtttcctctgcscattctcccttgccaagaggaaactcggttccattcccttgggtagtttcaactgaataccagttttgccacattactaaggagaatgaaaagcact

SEQ ID NO: 604825 - DNA, 592 bp, Homo sapiens
tttagtttgtttgatttcatttccaggtttttgcctaactactcaacaaaatagaatccaacttagttgggaaatcacttaccttgtatggtctgggaaaattttaaaaatcacatggcatctaactatgaccattgttaggcaaagtagaaataatttgggaatatgcagcagttttatgcttatgataattagtgaattggcaagaataatggtttcattcacttctgaaatgtttatgtaaatgagcaaagaatcagcttaaagaaagcagttacctgtattggtcataacttacagggtgaactcatgcatatctgccgagagacttgaaagtgatatgtatttgccagattgtaaacagatactaggcttcgaagacaccttgaagaaatgtcttagtatgtcaaccaggtagtcccaaagccaaatgaatcctggtatygataggcaaactgatatagccattatgaatatgagctctggagtagctcatatttatagttcatgagatacagatgagatgcaaatgagttagagagagtatcatgcaagcaaactacgattttatgtttctgcattttttgagact

SEQ ID NO: 604826 - DNA, 590 bp, Homo sapiens
ttgatttaattaaaacatcaattaactgaaaagtcacaagcattttaattaagagtttattagatttgtaacatattaacactttaaattgagaaggttggaatttcacaggagaaagaatatgctctgacagtaggtggttttagatcttgtttttcgcatgaagtgtaaggaaagtttctttgtacattcacgttcacattacatttacattcttattaccccagataagaggtctggcctgaagacatagctttgggagtctttagcaattcttcttttttatagtctatttttaagatttttaaattgaaatataattgtatatatgtagtacatagtggtgttttgatacatataatgtatagtgatcagatcaggctaattagcatagccatctcacacatttttcatttttttgttgggaatattcactatcctccttctagctatttaaaactatataatctattgttaactagggtcatcctacagtgttatggaatactagaacttactcctcccatcgagctgtaattctgtatccttkaacaaatttctccccatctctcccttccctctacgctgcc

SEQ ID NO: 604827 - DNA, 473 bp, Homo sapiens
aacaatgtgattaaactcacatttaaaattactttagtgggcaatgtaaaagctagaccagaggaagggaagatgagatcagaggcagagtgattagaaggtaactgggagaactggggaggaaggctgagcatctgaaccatcgtggtgttggaggctgtcgcatctagaggagatttgggagatgctgaagaggtcaaatcaatgggacttgataagtgattggatatacatgttcaygagaattcaggaatgacaccatgtttctggctcaggcaactgggttgatgtgctgcctcgtgatatcaaagggattactgaagaagaacaaagtaatttttgaggaagtattgactttgggcaagttgagtttgaagtgcttgtagaatgtgtaaatgagtatgtctggtaggcagcttggagatacaagtcaggagagtggtctggcaggagatacggatttaccatctgca

SEQ ID NO: 604828 - DNA, 484 bp, Homo sapiens
ccattttcctggtaatgatgatggtggaggcatcgagtttcaggggaggcagtaagagcagttttggcatctaatgcacagcaccaggtatgatccccagggcctttgctggtgtagtgctgtcatatggtagtacattgggcatttttcctggttctgtactctccaagcctgattgattctcctgcaaattctgtgacttacgtaagtgtctttactaaattaaatttctgcttaactarctaaattgctgtactatttaggatgtaggttcaatatctaaaaccacaagctctacagataagattgagatcttttctttctcatgtaaccatacaaggttgatatggtggctccacagtgttggcaaacccactgactcaccaatcttagacagttgtcattatctgtcaacatgggtcaccaacattctggcattctactcagtcagaaaaagaaagggaagatatgccttttcccttta

SEQ ID NO: 604829 - DNA, 572 bp, Homo sapiens
gtagagccaagtggtctgttttgacagggcactgattggtgcgtttacaatccctgagctagacacaaaggttctccactccccactagattaactagatacagagtgtccacacaaaggttctccaaggccccagcagagtarctagatacagtgtcaattggtgcattcacaaaccctgagctagacacagggtggtgattggtgtgtttacaaactttgagctacagagtgccgattggtgtatttacaatccctgagctagacataaaggttctccaaggccccactaaagcagctagatacagactgtcgattggtgcattcacaaaccctgagctagacacagggtgctgattggtgtgtttacaaaccttgagctagatacagagtgctgattggtgtatttacaatccctgagctagacataaaggttctccaaggtcccaccagagtagctagatagagagtgtccattggtgcattcacaaaccctgagctagatacagggtgctgattggtgtatttacaatccctgagctatacataaaggttctccacgaccccaccag

SEQ ID NO: 604830 - DNA, 572 bp, Homo sapiens
gtagagccaagtggtctgttttgacagggcactgattggtgcgtttacaatccctgagctagacacaaaggttctccactccccactagattaactagatacagagtgtccacacaaaggttctccaaggccccagcagagtaactagatacagtgtcaattggtgcattcacaaaccctgagctagacacagggtggtgattggtgtgtttacaaactttgagctacagagtgccgattggtgtatttacaatccctgagctagacataaaggttctccaaggccccactaaagcagctagatacagastgtcgattggtgcattcacaaaccctgagctagacacagggtgctgattggtgtgtttacaaaccttgagctagatacagagtgctgattggtgtatttacaatccctgagctagacataaaggttctccaaggtcccaccagagtagctagatagagagtgtccattggtgcattcacaaaccctgagctagatacagggtgctgattggtgtatttacaatccctgagctatacataaaggttctccacgaccccaccag

SEQ ID NO: 604831 - DNA, 549 bp, Homo sapiens
gtttagtccatccagtgagaaagcagcaagaatccctcctaggttcatggacttcctagcaccccgaatccagartctcaggtaatctcgccacatagatgacactgggttcatctaattacattcttccctttttggtctagccccttaaggatctattcccacacccgttctctagggtattggaaggtccacaaaccgggcattttttctgctgtgaaactaaacattgccttggagcctttttttttttttgagacaggatcttgctctgttgcccagactagggtgcagtggtgcaatcatagctcactcaacctcctgggttctgtctcagccttctgagtagctaggactttaggtgtgtgccaccatgcccagctattttattttttgtagagatgggggtcttgctgtgctgctcaggctggtctcaaaactcctgggctcagttcattctcctgccttaaccttccaaaccgctaggattataggtgtgggccactgcactttgccaaattgtcttttgaattgaccccctagggacaa

SEQ ID NO: 604832 - DNA, 549 bp, Homo sapiens
gtttagtccatccagtgagaaagcagcaagaatccctcctaggttcatggacttcctagcaccccgaatccagagtctcaggtaatctcgccacatagatgacactggkttcatctaattacattcttccctttttggtctagccccttaaggatctattcccacacccgttctctagggtattggaaggtccacaaaccgggcattttttctgctgtgaaactaaacattgccttggagcctttttttttttttgagacaggatcttgctctgttgcccagactagggtgcagtggtgcaatcatagctcactcaacctcctgggttctgtctcagccttctgagtagctaggactttaggtgtgtgccaccatgcccagctattttattttttgtagagatgggggtcttgctgtgctgctcaggctggtctcaaaactcctgggctcagttcattctcctgccttaaccttccaaaccgctaggattataggtgtgggccactgcactttgccaaattgtcttttgaattgaccccctagggacaa

SEQ ID NO: 604833 - DNA, 604 bp, Homo sapiens
atctaatggccaatgaagaagaagaagtatcaactaattaatggatcaggcaggagccagacaacccccatgtgaaccatgacaaagttggactttatgacaaagttggattggtgaatatacttggatctggggccaaagtggggccatcttactctctctctgtatctagacttagggacctcccatgagtaaagctggattcacagagcagactctgacttagccaccatctgtgagaagtttaggtggccttatatattctaggtgtcatcaggagaaaagagatggaagatggccagagctatccctgaaagatctmctgggtctgttttagcaggtagtaacagaaaggtcaagggctcattgtccccggtgcaagcaggtcaaagagagaacaaaggagttggaacattcctggatgtgacctttagcatactgatactcttactagtaaacactgatgggggaatgtcaacttccactaatcaaactactattctccgtaattgaagagtgttaaagggtgaagaaaggattctccttctgggtaaaatggaataagcacactccaccctgtctttccacctgaatgcaggcataa

SEQ ID NO: 604834 - DNA, 599 bp, Homo sapiens
tacctacggcacagttgtgggagctaaatgaaattgtgtaggtaaagcacttaagagcacacagtaagcattcaacacatgctactattattattatcatcatcaatatcaccagtcatttaaataatagcctttttattacatttgaaataatttgttgtatggtataatgggaagatcactggacttggagtcaaaatcaatggtttcttggcccccatkttactattattcctctgtgatgccttgagatgcttcttatcctctgtgggcttcagcttcctcacctataaaatggaatcagataatgcttaagttctctttcaatatattatttgcttctttttatgacttctattaaaacttacagttgtcttttaaaaaaaccctgccctaatactaaccctacactagtagtgtctatacatgctttctctctctctcttttacacaacacacacacacacacacagataatcttactgtaggatttactttatatgtccctaggccgatgcagaatcattgagcaaaataaaaatcgtattggatttttcttaaggtcatagtgatactgcactacagaaaatgactagtgt

SEQ ID NO: 604835 - DNA, 545 bp, Homo sapiens
cccgggattcccaggaattcgtctcttctgggctaagccccgccaccgcggccgagcagggcgggcccggaccttcgacccacgctccgggcagatgccggtggccttggaggacccgccctccggcctgccgggcctttcctcggggaggctgtagctgagatccccgccccgccgtccaaccccgcgagacgagccccytctcctctcccgcccgggcctcacctctcctgcaggaaacgagtgcaggcgccgggccgtggtactggggaagggcgccggcggcagcggcgacgcccggtgagcacctccacgcgccgctgcgcccggccgggggtgcggcatacccgaggcgcgagcgctcccagtccccgagctgccggcgcggggctgcggcggccaagcgcggggagggcactagcaggaggaggagcagcggtgaggcacgtgacacgccgccgcgggccgccggggcgcgagggcgcagcgcccccagaccgtcggagagcgcagagaggcagcggcgtgctgaggtttcgctgccg

SEQ ID NO: 604836 - DNA, 545 bp, Homo sapiens
cccgggattcccaggaattcgtctcttctgggctaagccccgccaccgcggccgagcagggcgggcccggaccttcgacccacgctccgggcagatgccggtggccttggaggacccgccctccggcctgccgggcctttcctcggggaggctgtagctgagatccccgccccgccgtccaaccccgcgagacgagccccttctcctctcccgcccgggcctcacctctcctgcaggaaacgagtgcaggcgccgggccgtggtactggggaagggcgccggcggcagcggcgacgcccggtgagcacctccacgcgcygctgcgcccggccgggggtgcggcatacccgaggcgcgagcgctcccagtccccgagctgccggcgcggggctgcggcggccaagcgcggggagggcactagcaggaggaggagcagcggtgaggcacgtgacacgccgccgcgggccgccggggcgcgagggcgcagcgcccccagaccgtcggagagcgcagagaggcagcggcgtgctgaggtttcgctgccg

SEQ ID NO: 604837 - DNA, 569 bp, Homo sapiens
catcatttaaaattttaaatttgaattgagtcattgtcattaaaaccaggttaaaatcacagtgatcttttcctcttatataggaatgaatcctcttgctccagatggaacataaagctccttaaattgaaattcattgcacgggggctctgatggcccttaacagatggaagaacaatctcatttgggtggttatgtaattcagtgattatcatggaacccttcagataccatcagacagaaggtggacagagtgaggctctgcggcaaaggcaggtgccatggctatagattcactatacttgtttctctgcatttatttgcatcaataagaccagaatcaagatctgagcagtataacatgatctggtctaatgaccaactttggaatctcagaaatcaaacattgggatgccagttggaattcaactagtttctagttaaacaaccttgagagggtcgttccatctctctgaaagccttatttktacaagtatgctagacaatgcctctagaaggaggttatgatattaatattcattcaatagatattagttgaggattatgtg

SEQ ID NO: 604838 - DNA, 621 bp, Homo sapiens
gcagaaccctcttttcttaaactctcctcttctttgaagggaataactattcatagttagtccaatcaagggtacagtgtcttgtgagaatcccatcartgggccctccggggacccttggtggggtgtggctgcatggccattgctgtggcagggtctgctggcagctctgcagctaatgacatttgcagtttccattacagtctggctttcacaatatagattgtcccagatgcacaccttggagtatggagttttacttcttattttatttggttttatttcttaaacataggctgaatgttaagttgcttgacttgtgtttttcccctttaggttttattttgggagctttacgtgattaaagccgtagtaggaggctttacatttcaccatcttttcagatgcccaaggcgtacgttttactttgggtattctcctgggaaaaaagaggagagtctttcagaagggaggccatttgtcacccaccccgtggtctcatctaaggctgctgtgtactgttcagctaataaatgtctcatctctgctttcccaaggacctggatgatccatccactttttatgggttgttagtattccatcacttcttttgctaaatag

SEQ ID NO: 604839 - DNA, 499 bp, Homo sapiens
agagcacagcaactgtcttggacaatgcagtgactttgaggttaaaagccactaggatggtacagcagaaatatagatggggcagagtctcagatgaccagaaagtcaccatatctgtccagattccctactctcagacttcttttacatgacagaagagtaaacttctatctagtttaagccactgcaatgtgattgttctgtcgtttgcagcccagtttaatttctccagatgcagggaccttgtttctggtgacacacagtctcctgttccccttctactcacctgcatggaatgcaaagggccctctcctcatagttctcagctctcatagtttctatctgctggactcaggtcataagggctatcccaggagggtaccttcctgggtcctttaaacctgctgagagttctggaaaatgagaattgacatagggcacactttcttctgtgagtttctatagccaagcaaaactaacrggggaaaacaagagaatt

SEQ ID NO: 604840 - DNA, 546 bp, Homo sapiens
tcaaattttcttttttgttacatgaatatctgattgtttgatatcactgattagaaacatcttcctttcccarcccctctgcagtgctgtatttgtcatatgtcttttcctgggctgtctaatctgttccattggtttgtttatccttgcaccaataacatgttattttaattactgtgacttttaatacacagtgatatttttgtgagcaaaatccactgatcttgctcttctccaagagtatcttggctattcctggtgctttgcctctccacttaaattatagaatcaatttgtctgtaaaaataaaaacatttttggattttttgacttaattttaaaccatagatcaatttggggaaaatatttttataatactgaattttctagccaatgaacatggtatatcccttcatttatttaggtcttcttaattttctctcaataatattttaggtgttacatatttttggtatgtaacatatcttttgtatgtaacacctaaaagatatgtaacacctaaagtgtttttgtatgtaacaccta

SEQ ID NO: 604841 - DNA, 560 bp, Homo sapiens
ggacgctgaggcaggagaatggcatgaacccaggaggtagagctagcagtgagccaagattgtgccactgcactccagcctgggtgacagagggagactccaactgaaaaaaaagaaaaaaaaaaaaaaagagatcaagaccatcctggccaacatggtgaaaccccacctttactaaaaatacaaaaattagccaggtgtggtggtgcgtgcctataattccagctactcggcaggctgaggcaggagaatcgcttgaacccaggaggcagaggttacagcaagccaagattctaccactgcactctagcctggcaacagagcaagactctgtctcaaaaaaaaaaaaaaaaaaawatatatatatatatatatatatatatgtgtgtgtatagactcaataacatcagggtccctggtagacttctctgctgttctcttaactttcccttcaagggcaagatggctcctgcatatcctagaatcatatcaagtagcaaagtctagggcaggaagaaacaagtccttgacttgcatccatattaagggtgaggaaagtg

SEQ ID NO: 604842 - DNA, 473 bp, Homo sapiens
atccaccacgattaagtggttttcataccagggatgcagggatgatttaacatacgcaagtcaataaatgtgatacaccacataaacagaattaaaaacaaaaatcacacgatcatctcaatagatgcagaaaaagcaatcaacaaaatctagtacccctttctgattaaaattctcagcaaaattgatacaagggacatacctcaatgtaataaaagccatctatgacagacccacagccaacataatgctgaatgrggaaaagttgaaagcattccctctgagaactgggacaacataaggatgcccactctctccactcctcttcagcacagtactagaagaagtcctaggcagagcaatcagacaacagaaagaaataaaggtcatccaaataggtaaagaagtcaaactgtcactgttcactgatgatatgattgtttacctggaaaatcctaaagactcctccagaa

SEQ ID NO: 604843 - DNA, 495 bp, Homo sapiens
accacgattaagtggttttcataccagggatgcagggatgatttaacatacgcaagtcaataaatgtgatacaccacataaacagaattaaaaacaaaaatcacacgatcatctcaatagatgcagaaaaagcaatcaacaaaatctagtacccctttctgattaaaattctcagcaaaattgatacaagggacatacctcaatgtaataaaagccatctatgacagacccacagccaacataatgctgaatggggaaaagttgaaagcattccctctgagaactgggacaacataaggatgcccactctctccactcctcttcmgcacagtactagaagaagtcctaggcagagcaatcagacaacagaaagaaataaaggtcatccaaataggtaaagaagtcaaactgtcactgttcactgatgatatgattgtttacctggaaaatcctaaagactcctccagaaagctcctagaactgataaaagaattc

SEQ ID NO: 604844 - DNA, 623 bp, Homo sapiens
agttcagatcagtaattgtaaactatcacaaagctacagctttcatctccatgatattacaattacctacctgcctaacctgtagtatctacaaaggttgtgattgtttatcactcagaattacttcattttaaaaatttttcaacttttcttttctattcaggaggtatatgtgcaggtttgttacaagagtatattgcatgatgctgaggtttgcggtatgactgagtccatcatccaggtagtgagcatagtacccaacaggtagtttttcaaccttgccccggtccctccttctcccttcttgtagtcctgtgtctatttttcccttctctatgtccatgtatacccaatgtttagctcttacttataagtaaaaacatgtgktatttggttttctgtttctgcattaattcacttaagataatgttgctgcaaattctgttttacagctccacagtattccattatgtgtacataccacaatttctttattcaattcactgttgatgggcactgaggttcattcctaggttgatctttgctatttttgaatagtgctgtgatgaacatatgagtacatgtgtctttttggtagaacaatttgttttcctttgagtaca

SEQ ID NO: 604845 - DNA, 612 bp, Homo sapiens
tagaaaacaaattgtagctcagagaaattaagtaaattgtccaagagaaccaaggcagaggtcctgaaattcaaacacaggtctcacgtcaaaatccatgtgctctccttgacacatgtcacttcctcttgtctggatgccttctaggcttccctttgactaaactctaaacaactcatatgttgacaagtaataatcatatatatttatggtatacaacatgatgttctgatatatgtatcccttgtggaatggctgaatcaggcgatttaatgtatgtgttgtctcaaatacttatctcctctatgttccatctgctytctggtgccttcccagacaattggtgcctttccagattttctctctttaaaatctggtgccttttctctttctctttaaaatctggtgcctttccagattttatctctccttggattttatgtaacacttaaaatctataaaatttagagtttaaatattatctcaaaatgttatttggtatgcatttcttttgctttctaacttatttttggatttctcaagggcttcatgggctgcacacacacagtgggttggggggggagtcatgaatacttaaaaaattattgtgag

SEQ ID NO: 604846 - DNA, 612 bp, Homo sapiens
tagaaaacaaattgtagctcagagaaattaagtaaattgtccaagagaaccaaggcagaggtcctgaaattcaaacacaggtctcacgtcaaaatccatgtgctctccttgacacatgtcacttcctcttgtctggatgccttctaggcttccctttgactaaactctaaacaactcatatgttgacaagtaataatcatatatatttatggtatacaacatgatgttctgatatatgtatcccttgtggaatggctgaatcaggcgatttaatgtatgtgttgtctcaaatacttatctcctctatgttccatctgctctctggtgccttcccagacaattggtgcctttccagattttctctctttaaaatctggtgccttttctctttctytttaaaatctggtgcctttccagattttatctctccttggattttatgtaacacttaaaatctataaaatttagagtttaaatattatctcaaaatgttatttggtatgcatttcttttgctttctaacttatttttggatttctcaagggcttcatgggctgcacacacacagtgggttggggggggagtcatgaatacttaaaaaattattgtgag

SEQ ID NO: 604847 - DNA, 606 bp, Homo sapiens
ttggctaagcattaaaacagatgtatgcccaccctgtgcaacatagggacaccagtctgtgaaaaaaaaaataaacagatagccaggcatggtggtgtctacttgttgtacttgctactcaggaggctgaggcgagaagatcgcttgagccccaggggttgaggctgcagtgagttataatggtgccactgcactccagcccgggcaagagagagagagggagaccctgtctaaaaacaaaacaaaaaaaccccacaaacaacaarcaacaaacaaaaaaacccccaaaaaaccatggaacagatgtaggcaagaatagacataaatctgtgatgtcacaaagagttactacagtgctagtctgtgtgaacaaagtgagatagcaaatttctacactcttttcaagatccagcttaagcaccactaaccagaccaatttcagctcacgctgattttccattcctctgaattctcacagcccttattatctgcatgttcattttggcaccttatcatttaacatctcattttctgtgtatcttatttccatagttataagacagaaagtagaggctcaataaatattcaatgaattaatactgtgta

SEQ ID NO: 604848 - DNA, 606 bp, Homo sapiens
ttggctaagcattaaaacagatgtatgcccaccctgtgcaacatagggacaccagtctgtgaaaaaaaaaataaacagatagccaggcatggtggtgtctacttgttgtacttgctactcaggaggctgaggcgagaagatcgcttgagccccaggggttgaggctgcagtgagttataatggtgccactgcactccagcccgggcaagagagagagagggagaccctgtctaaaaacaaaacaaaaaaaccccacaaacaacaaacaacaaacaaaaaaacccccaaaaaaccatggaacagatgtaggcaagaatagacataaatctgtgatgtcacaaagagttactamagtgctagtctgtgtgaacaaagtgagatagcaaatttctacactcttttcaagatccagcttaagcaccactaaccagaccaatttcagctcacgctgattttccattcctctgaattctcacagcccttattatctgcatgttcattttggcaccttatcatttaacatctcattttctgtgtatcttatttccatagttataagacagaaagtagaggctcaataaatattcaatgaattaatactgtgta

SEQ ID NO: 604849 - DNA, 585 bp, Homo sapiens
gatacacctttgtaaaaagttaacatgctatgccatgtctataaggtttctatgtaggtgagcaaataatatacattcatacagttgaackccacatagcttttttaaaaaaaataaatcaatataacaatttggaaagacctctaagatataatgttaagtgtaagaaaaaaacaaacaaaaaaaaagcaggctgggtgcagtagctcatgcctgtagtcccagcactttgggaggctgaggcgggtggatcacctgaggcaggagttcgagatcagcctggccaacatggtgaaaccccatctctactaaaaatacaaaaattagccagatgtggtggtgggcgcctgtgatcccagctactagggaggctgaggcaggagaatcatttgaacctgggaggcggaggttgcagtgaaccaagatcgtgccactgtactccagcctgggcaacagagtgcgactccatctcaaaaaaaaaaaaaaaaaaagcagacagaaagagtataaatgaaacatttttataaaaacatgtatatataggccaggcacagtggctcactcctgtaatcccagcactctgag

SEQ ID NO: 604850 - DNA, 617 bp, Homo sapiens
aagtacacataccctttgtttttaatgctaagaaacactggttcaagatagagatttgtaagggcaggttgctaagtagtcctacagcacaggcacttgacattccatcagtgtgggcatgcatttctattcaaaggcaaagagggaaaacaaccagccctagttattgctttttactgaattttcaagtaccccaggcttgttatatgctgcccattaactttcactaaaacatttaatctcgagtgtccctctcttcttctgtatctctggctaaaaagtgcaaaataagtgaaaacgttcacatgaatcccatgtgcatgtcatacaaaacacaggtaaatggttaacaattctaggggggaaaactggcatctagcttataaagagagaaacaaagaaaaygaaaacaaattatagcaatgcaacaatggcaaaataaaataatcactattaacaaagaaaactaccaccatttagtcacattttgaaagttacatttattaagtagcattcaacagatatttaaataagcaattttcttaacaggtaacaaattgtaaggaaaatgtttcaaatagaacatctcaaaacccaaatgacccaagggaaaaaaa

SEQ ID NO: 604851 - DNA, 644 bp, Homo sapiens
ggaaccacctcaggaaatttcctgtttccacccagtgtccgtgctaacccttggtctgtggtgccaccctgctttgccacgtaggggtgctatcattgtcacaggcaaatgaaaaaaagaagagaagaatctgggcccagtgaatgctgaacacgtcaaaatttttagtgattccaacagagaaaggtgacaagatcactgaattaccacttagtcattggaacacatcaaactcagagcctaactggaaaaagcaatttacccaaagttaaacatcactcatcacattaatgttaacttacattttattggtctgtaattttattttatatatatgtgtgtgtgtgtgtgtgtgtgtgtgtgtgtgtgtgtgtgtgtrtaatatataatttttttttttgagatggtttctcactctgtcacccaggctggagtgaagtggtacgatctcagctcactgcaacctctgcctcctggggtcaagcaatcttctcacctcagcctctgagtagctgggaccacaggtgcgcaccaccatgccaggctattttgtatttttggtagagacagagtttcgccatgttgctcaggctgatcttgaactcctgagctcaagtgatctgtctgcctcagcctcccatagt

SEQ ID NO: 604852 - DNA, 425 bp, Homo sapiens
cactgccagaatacagctagcatatwtagctctactctttttagtgtggttatctagcttttgactgataatttccaggattgggacataccatagtactgactattcaattattggaaatttctaaattgaaaccatctttgctctacattcatttgaaactggtttctatgtaaattctaactattagcgttacttccactctctaaaataaaattggttagaatctaattttactattcctggttgaaatctaattctactcactagctgcatattatttgaatgaaggttatcttttttttagagggcggacgtcagattactcatgaaaaattctcctatagtgctcagtccaatgtaggaaatagtgagctatctagtagtgagataagtaggcctgctattagttccaattctgtcaa

SEQ ID NO: 604853 - DNA, 556 bp, Homo sapiens
aaataagtgatgcagtcaactcaggaagttaaaaaaaggcaataaaaaaacacaagaaaagcaggaagaaaaattaataaagattaagaccaaattaatgaattagaaagcaaatatcaaattaataaatctaagagctcattatctgaaaaggctaagaaatagacaaatatctggcaatgaagaaacaactgtgaggaaaccagataaaaacaccattctgagattcagagtttgtttttacttattaaagacctctacacaactcaattcttaaaattttcaccctctcaatacaacacgtagtattaacataatggatagaggaacatttgcatatagaagtgatgcacatgttttaacacayatatatatatatatatatatatatatatatatatatatatatatatatatatataacccatgtatgtattaacagaattgatagaggaacatttccaacatttatggaacaatttgggaaaactgttcaagcatgtctccaagtttcacttatcctccctaagcgttaactgatcaacacacaagaaac

SEQ ID NO: 604854 - DNA, 556 bp, Homo sapiens
aaataagtgatgcagtcaactcaggaagttaaaaaaaggcaataaaaaaacacaagaaaagcaggaagaaaaattaataaagattaagaccaaattaatgaattagaaagcaaatatcaaattaataaatctaagagctcattatctgaaaaggctaagaaatagacaaatatctggcaatgaagaaacaactgtgaggaaaccagataaaaacaccattctgagattcagagtttgtttttacttattaaagacctctacacaactcaattcttaaaattttcaccctctcaatacaacacgtagtattaacataatggatagaggaacatttgcatatagaagtgatgcacatgttttaacacacayatatatatatatatatatatatatatatatatatatatatatatatatatataacccatgtatgtattaacagaattgatagaggaacatttccaacatttatggaacaatttgggaaaactgttcaagcatgtctccaagtttcacttatcctccctaagcgttaactgatcaacacacaagaaac

SEQ ID NO: 604855 - DNA, 602 bp, Homo sapiens
ctttacatttgtttgtgtcttcttcaatatcttccaccaacattttagttttcattgtggtctttcacctattcagttaaatttattttaagaatttttttcttgtaactattatatatgggattgtttcattgattttgtgtgtgtgtgtgtggatagttcactgtaactagggagagtttttaaaaatctttttctttcttaaatccaagctctcaaaagcgttgctaaaagttgcttgcttttgtataaatttaaggcatgcaaatacagttttgttaagtgaatatattatgtagtggtgaagtttgggtttttagggtaaccattacctgaataatrtacatcatacctattaagtaattttttaaccctcaccctcctcccactcttccaagtctctaatgtctgttattctacactctgtccatgtgtatacattatttagttcttactttataactgagaacttgcagtatttggttttctgtttctgagttgtttcacttaagacaagggcctttatttccatccatgttgctgaaaaagacatgatttcattcttttttatggcagagtagtattccattgtgcatatgaac

SEQ ID NO: 604856 - DNA, 596 bp, Homo sapiens
gggctgataaggtttggctgtgtccccacccaaatctcaccttgaattgtaataatccccatgtgtcaaaggtggggccaggtggagattattgaatcatgggggcagtttcccccatactgttttcatggcagtgaagaagtcccatgagatttgatgtttttgtaagtgggaattcccctgcacaagctctcttttgcctgctgccatgtaagacatgcctttgcttctcgtttgcctcctgccatgactgtgaggcycccccagccatgctgactccatgaattagtaacaccaccaacaaattattagctaaaacacattaactagaactaactagaactctaattttaaaaaccaaggtagttctgaaactctctttgtgaaacactgtgagtccgttaaacattcttcctttataaattacccagtctcaggtatgtctttattaacagcatgagaacagactaatacaggggccttcactaaatcatgtggtgaactgagaccatttttggccacatagtatgttttttgaaacacaaacatacaagcatgtgctatccctcattaggaaaaatcataaacaaaataga

SEQ ID NO: 604857 - DNA, 611 bp, Homo sapiens
aaaacaaaacatttgtacagttcaattggaatcaaagatgattccaatactttcaaagggcagttcccctactgtggccgaaaatatgttaaaacgaagacacaagatgatggcaattgaaaccagaaaaaaaaataaatgcaacaattatacaacatgtgtctaacctcaataattagataaattaattcaggctattcacattaaaagcaatggggctgataaggtttggctgtgtccccacccaaatctcaccttgaattgtaataatccccatgtgtcaaaggtggggccaggtggagattattgaatcatgggggcagtttcccccatactgttttcatggcagtgaagaagtcccatgagatttgatgtttttgtaagtgggaattcccctgcacaagctctcttttgcctgctgccatgtaagacatgcctttgcttctcgtttgcctcctgccatgactgtgaggcccccccagccatgctgactccatgaattaktaacaccaccaacaaattattagctaaaacacattaactagaactaactagaactctaattttaaaaaccaaggtagttctgaaactctctttgtgaaacactgtga

SEQ ID NO: 604858 - DNA, 618 bp, Homo sapiens
taaaactacctcttactggctgtacagttgacctcttcaagcttcagtttcttattctgtaaagtgggaataaccctcatgcagctattataaggtgtaatgaaataacacttaaacagcacgtagcatgctggtgcttggcattgaggactaagctctgattttttttttattttgcccaaattcctatctaaggggtctgaagagtcatgccctacacaccataaattttaatcagatggattttatttaaccctatatatcgtgacttaccttccaatctgactctggcataacattatgtgacaaagaagaaagtcaaaatattttaccctgaaacatgctactttgtcatatattgaaatggctctgcaaagctgtcctttgtgggggaaaatttrcacctgtaaatatctctgttaacatagctagatctttttctttcaggccatcccaatcctaaagagattaactaaaagtctagcaccttttaaagatctgaataggaaacatctaatgtctctaaaggcagccactataaaacttcaaaagaacctcggtctccacaatcttttacgttaacctttcctttctatcaatcccaagtctttagacaaa

SEQ ID NO: 604859 - DNA, 505 bp, Homo sapiens
aaagcaatgaatatctgcaactgtttgcaccttgaaaatgactgtatttgcctgggcatgatggctcacgcctgtcatcccagcactttgggaggccaaggcaggcagatcrcttgaggtcaggagttcaggaccagtctggctaacatggtgaaacccgtctctactaaaaatacaaaaattagctaggcatggtagtgcacgcctgtaatcccagctacttgggaggctgaggcaggagaatcgcttgaacctgggaggtaggggttgcagtgagtcgagatcgtgccattgcactccagcctgggagacagtgactccgtctcaaacaaacaaacaaaaaagaaagaaaacaactgtgtttatatacatccttcttaggtactagattgttatttggcatcaaatcctgctagaaagtagacattatgaactggatgttgtctaatcatgttttctgtccttggagaaacctataccattcagttttatgtatgaaaatttc

SEQ ID NO: 604860 - DNA, 505 bp, Homo sapiens
aaagcaatgaatatctgcaactgtttgcaccttgaaaatgactgtatttgcctgggcatgatggctcacgcctgtcatcccagcactttgggaggccaaggcaggcagatcacttgaggtcaggagttcaggaccagtctggctaacatggtgaaacccgtctctactaaaamtacaaaaattagctaggcatggtagtgcacgcctgtaatcccagctacttgggaggctgaggcaggagaatcgcttgaacctgggaggtaggggttgcagtgagtcgagatcgtgccattgcactccagcctgggagacagtgactccgtctcaaacaaacaaacaaaaaagaaagaaaacaactgtgtttatatacatccttcttaggtactagattgttatttggcatcaaatcctgctagaaagtagacattatgaactggatgttgtctaatcatgttttctgtccttggagaaacctataccattcagttttatgtatgaaaatttc

SEQ ID NO: 604861 - DNA, 505 bp, Homo sapiens
aaagcaatgaatatctgcaactgtttgcaccttgaaaatgactgtatttgcctgggcatgatggctcacgcctgtcatcccagcactttgggaggccaaggcaggcagatcacttgaggtcaggagttcaggaccagtctggctaacatggtgaaacccgtctctactaaaaatacaaaaattagctaggcatggtagtgcacgcctgtaatcccagctacttgggaggctgaggcaggagaatcgcttgaacctgggaggtaggggttgcagtgagtcgagatcgtgccattgcactccagcctgggagacagtgactccgtctcaaacaaacaaacaaaaaagaaagaaaacarctgtgtttatatacatccttcttaggtactagattgttatttggcatcaaatcctgctagaaagtagacattatgaactggatgttgtctaatcatgttttctgtccttggagaaacctataccattcagttttatgtatgaaaatttc

SEQ ID NO: 604862 - DNA, 422 bp, Homo sapiens
gtccactttggtcagggaggtgttgcttcccagggcattgatgatgatggtgacctcagtcttgagtttcgagtcagccagggacaaggactgcagaggctgcggagcaaatgacacacggcactcagcagtctcatcaaagcagcacccactctccacgacgcatttcgtggagaatgagaggggatggacctactgcacgtgtctgattttagaactactacctaaaagacactcgtggatagaaacttaaggttctggcacaaaatggaccgctggagtcaaagatggagaacttgtgttttaatgctgaatacctaccacttctcttttaagggaagccagggaaagacatgcaggctgacaamtgccagcgtgaagcagaggataggatgaaataaataaaaacataacataaaaat

SEQ ID NO: 604863 - DNA, 565 bp, Homo sapiens
ttcatctaccaaagggctacaggagacagaatgagggtgttgatggtttcaagactcagatatcaacaaagcatcattatgcatttggttggtaccaagagacaacaagcatattattgtccttatcatccaaayataccatggctttcaaagttaatacatttatggtaaaatcaaaaggtaatgttgtattaatcagaatcaaattaataaaagttaaatggcctggtaagtgctaaggcaattaaaacctgggccaaaaagtctgaatacatttagactcaagtgggtttagcttggtttcttcaattttcttaacatcctacatacaggtaagtggaaatgacaactaaaaacacttcaggctcaggaaacttactgttttaaagaaaaacaaacacagtatgctttaataaaaagatgtaattacatctttcattatttcaataatcttgattcaattactacgaaaatgatatattatagcttcttcctaatactggaaaactgccaactctccgagctatcaagcatcaattccaggactatattcaaattctaatac

SEQ ID NO: 604864 - DNA, 577 bp, Homo sapiens
aaactaaaccaggaagaagttgaatccctgaatagaccaataacaggctctgaaattgaggcaataattaatagcttaccaaccaaaaaaagtctaggaccagatggattcacagccaaattctaccagaggtacaaggaggagctggtaccattccttctgaaactattccaatcaatagagacaggagatgtgttagtcttttttaaaatacaacttgcaactctatgccatttaaatagggcttttagactgtttaagttcaaggttattttgatatgtgaagttttgattctatcactatatcattagttggtcactttgtagtttctatttgctttgtagtttctggttgcttttttagagtctgtgggctatgtaattgacatgtttttgtggtaacaagttttgttcctttgtgttcatgtctagaactccctaaatgtgccttayaaggcaggtctagtggtaacaaattcccttagcacttgcttgtctggaaaacattttatttcttcttcacttatgaaggcagggtataaaattgttggttggaatttcttttctttaataatgc

SEQ ID NO: 604865 - DNA, 556 bp, Homo sapiens
  misc_feature 533, 534, 535, 536, 537, 538, 539, 540, 541, 542, 543, 544,545, 546, 547, 548, 549, 550, 551, 552, 553, 554, 555, 556: n = A,T,C or G
ttttaaaccatcatctcaaacttctattcaactggcccatccctagaagggtagaaaaaaagaaataaacagatcaaaattaaatattacaagttttctgggttggctatttgtcagaattagtagttcccttggtcgtaggtttttggtgtgctttatcctttatatgactattcatggatatacagttttttttggtgggggggkttagaactatgaacacattgaaacttaaaatatgttctaaatgtacttctaagagccccaagattgcgccaaacagccattttacagctctctagatttccactaatcagcaaaagttactggccttagaaaaagctaagttcattgtcctgtaaaatactgtgggtatttatatcacagcgtgatacatctcagagagaaaagaaagcgggtaagagatatttagatctattacaccatttaactaaaagaatgtttatatgactcactgcacaaagtttaaatacatgaggcaattttgattgttaactttcctgaacttgctnnnnnnnnnnnnnnnnnnnnnnnn

SEQ ID NO: 604866 - DNA, 583 bp, Homo sapiens
ttttatgttatggaggtggcttctttccttaaacctcatgaaccaacctctgttagcttcaatcatttcttctgcagcttcctcacctctctctgccttcaaagaattgaagaacattagagccttgctctggattaggctctgccataagggaatgttgtaactggcttgatctatgcagactacataaactttctctatatcagcaataaggctgttttgcttttttatcattcatgtgttctctgaactcacacttttaatttccttcaagaacttttttttggcattcacaacttggctaactctttgayacaacagatctagatttccacctcccatttcagttttcaacatgttttcctcactaagcttaattatttctagcttttgatttaaagggagatatgtggggctcttcctttcacttaaacacttacaggtcatttagggttattacttggctgaatttcaatattgttatgtctcagggaataaggaggcttgagtagagggaaagaaacagggtggttagccagtgtagcagtcagaacacacacatttattgatcaagttcatcatt

SEQ ID NO: 604867 - DNA, 481 bp, Homo sapiens
ttgagattctaaattctgtaattgcatttttagttatagagtttccatttgattatttctgtatctgtcatttatgttttaaacatataaatcaaatttcatatctgataacttcactaaccaggtcatctatacatctgttgattatgtatactttttgtcccttgggtcctgtctcttaaaatgtttagtaatttttaatttagtaactaacattgtatctaaaaaaatttagagactctaaatggtgctatayttatagaaagttcattctcctctggcagatacgtatagtggggctctatctaccaatattccaacaaactctggttcttcccaatatggtgtggtcctccaaggattgcaatagggaacttgtagtctttattatactacattttagagactgtgatttacattgtattatgttggtgcaaaagtaattgtgtttttttgctattacttttaatggcaaaacccg

SEQ ID NO: 604868 - DNA, 579 bp, Homo sapiens
aagatggagtaacttcttggctgcccagtatatatatatatatctcacatcttctcacacatttaattgtaaaaatgctcctacttaatcctaatccagccaccttctgtgcaattccaaatgtgctgtgcaattccaaatgtgctcaccttctccccagtgggtaacaatccaaaatcacatgcagcttctgtactgtgaagtgacacwatttagcccctctgagttcaggttttctaggtagtgtcaattcctccattagcttggatctgatcaggtttgtgacttctcaccattctgcagattatgggataaatgataaaagtagcttctcctgcctacccgatacagtgaaatggaataaaaatcaaacaaaaacagggaaagaagtgccatacattgattactggtacagattatataatagcatatctcgctgagcaagcttagcaggatgaatgatagaaacaatgggtctcatgagcattctctttgttgcctcacttctctggatgtagaataaattgttggaaccaccttcagaaaaggcaccaagggaggatttcctactggtgcttg

SEQ ID NO: 604869 - DNA, 509 bp, Homo sapiens
caatgtattttgtattttttgagggatgtgtcttttgtgcacatatttactcatggatcttgagaaatcaaactaccacactggaggaaaagttgtgaagaggcatgggactcagcttgcccctacactgtatygggtcccccttccccacctcctgtaccaattatacacactattctggaacactgaaggtctcagaccttttttgtttgtctttttgtgtttttattttgagacagggtctggctatgtcacccaggctggagtgcagtgatgcgatcacagcttactacaaccttgaactcctgggctcaaacaattctcctccccagcctcctgagtagctgggactacaggcatgtgccactacacccagctaagttttttttttttttttttttgagagacggagtctcgctctgttgcccaggctggtctttaactcctgggttcaagtgatcctcctgtctcaacctcccaaagtgctgggattacaggcatgagccaca

SEQ ID NO: 604870 - DNA, 490 bp, Homo sapiens
agatatccatgtccatgggtcggaagaattaatatcagtaaagggtccccactacccaaagcaatctacagattcaatggaatccctatcaaaattccaatggcatttttcacagaaatactttttatcctaaaatttatatggaaccacaaaagatgccagatagccaaagcaatcttaacaaagaaaaataaagctaaaggcatcaaagtctctgatttcaaactatattgcaaagctatggtaatcaaaacagtatggtattgacataaaaccatayacataagtcaatgaaacagaataggaatcccagaaataagcttacacatatatggtcaactaatctttgacaagggtgtgaagaatacacaatgaagaaagaaaaatctctttgataaatggtgttgggaaaactggatatccacaggcaaaagagtgaagtcggacttgtgttttataccacatacaaaagttaacttgaaatggatta

SEQ ID NO: 604871 - DNA, 658 bp, Homo sapiens
tccaatggcatttttcacagaaatactttttatcctaaaatttatatggaaccacaaaagatgccagatagccaaagcaatcttaacaaagaaaaataaagctaaaggcatcaaagtctctgatttcaaactatattgcaaagctatggtaatcaaaacagtatggtattgacataaaaccatatacataagtcaatgaaacasaataggaatcccagaaataagcttacacatatatggtcaactaatctttgacaagggtgtgaagaatacacaatgaagaaagaaaaatctctttgataaatggtgttgggaaaactggatatccacaggcaaaagagtgaagtcggacttgtgttttataccacatacaaaagttaacttgaaatggattagagactttataagatctgaaaacagcaatcctgatgtaattgaactggttacaggtgggcactgggatttgtaaaggctcttggtgattttaacatgaattcagagcttagaagcactacattagaagtttattaattctccctacagcattcactgctttccccattaatattactcttttcttctttgtttgtctaacccctacccattctttgagatccaactcaaagtgaccaaaaggataggtcacagatctcaattc

SEQ ID NO: 604872 - DNA, 658 bp, Homo sapiens
tccaatggcatttttcacagaaatactttttatcctaaaatttatatggaaccacaaaagatgccagatagccaaagcaatcttaacaaagaaaaataaagctaaaggcatcaaagtctctgatttcaaactatattgcaaagctatggtaatcaaaacagtatggtattgacataaaaccatatacataagtcaatgaaacagaataggaatcccagaaataagcttacacatatatggtcaactaatctttgacaagggtgtgaagaatacacaatgaagaaagaaaaatctctttgataaatggtgttgggaaaactggatatccacaggcaaaagagtgaagtcggacttgtgttttataccacatacaaaagttaacttgaaatggattagagactttataagatctgaaaacagcaatcctgatgtaattgaactggttacaggtgggcactgggatttgtaaaggctcttggtgattttaacatgaattcagagcttagaagcactacattagaagtttattaattctccctacagcattcactgctttccccattaatattactmttttcttctttgtttgtctaacccctacccattctttgagatccaactcaaagtgaccaaaaggataggtcacagatctcaattc

SEQ ID NO: 604873 - DNA, 602 bp, Homo sapiens
agtacattctcctacacaggtcatatattgggccagaaaacaagtcttagcaaatttaagaagattgaaatcttatcaagtattctttttgaccacagtggcatgaaactgaaaattaaaaacaggagaaaacttagaaaagtgacaaatatgtggaaatcaaccaacacactcctgarcaaccaatagatcaaagaaaacatcaaaaaagaaataaaatatcttgagacaaactaaaatgaaagcacaacatactaaaacttatgagatgaagcaaaagcaattctaacagggaagtttatacaggttaagtgctaaatgaagaaaaaagatctcaaataaacaataaacctcaaagaaatagaaaagaaaaaaaatgaagcccaaaattagaagaaggaaggaaataacaaagatgatagcagaagtaaatgaaatacactagaaaaacaatagaaaagatcaatgaaacaaaaagctgattttttgaaaacataatggctgggcgcggtggctcatgcctgtaatcccagcactttgggaggcgggcagatcacgaggtcagagatcaagaccatcctggctaacatggtgaaaccccg

SEQ ID NO: 604874 - DNA, 602 bp, Homo sapiens
agtacattctcctacacaggtcatatattgggccagaaaacaagtcttagcaaatttaagaagattgaaatcttatcaagtattctttttgaccacagtggcatgaaactgaaaattaaaaacaggagaaaacttagaaaagtgacaaatatgtggaaatcaaccaacacactcctgagcaaccaatagatcaaagaaaacatcaaaaaagaaataaaatatcttgagacaaactaaaatgaaagcacaacatactaaaacttatgagatgaagcaaaagcaattctaacagggaagtttatacaggttaagtgctaaatgaagaaaaaagatctcaaataaacaataaacctcaaagaaatagaaaagaaaaaaaatgaagcccaaaattagaagaaggaaggaaataacraagatgatagcagaagtaaatgaaatacactagaaaaacaatagaaaagatcaatgaaacaaaaagctgattttttgaaaacataatggctgggcgcggtggctcatgcctgtaatcccagcactttgggaggcgggcagatcacgaggtcagagatcaagaccatcctggctaacatggtgaaaccccg

SEQ ID NO: 604875 - DNA, 602 bp, Homo sapiens
agtacattctcctacacaggtcatatattgggccagaaaacaagtcttagcaaatttaagaagattgaaatcttatcaagtattctttttgaccacagtggcatgaaactgaaaattaaaaacaggagaaaacttagaaaagtgacaaatatgtggaaatcaaccaacacactcctgagcaaccaatagatcaaagaaaacatcaaaaaagaaataaaatatcttgagacaaactaaaatgaaagcacaacatactaaaacttatgagatgaagcaaaagcaattctaacagggaagtttatacaggttaagtgctaaatgaagaaaaaagatctcaaataaacaataaacctcaaagaaatagaaaagaaaaaaaatgaagcccaaaattagaagaaggaaggaaataacaaagatgatagcagaagtaaatgaaatacactagaaaaacaatagaaaagatcaatgaaacaaaaagctgattttttgaaaacataatggctgggcgcggtggctcatgcctgtaatcccagcactttgggaggcgggcwgatcacgaggtcagagatcaagaccatcctggctaacatggtgaaaccccg

SEQ ID NO: 604876 - DNA, 562 bp, Homo sapiens
atcaggatgacatctaccatgcatcagtcctcgtgtgtcttcagcgcctctttcacatgtctgtgtccttagagcttgctggaaccatctttgcttgtctctgtgtrttctgagtctgtgactatttggctctaggagtcttctcaacaaagtacaatttctgttgtctttttccaaaaaactttatgaataaaatgaaaatatgagtaatataaaatcaaaatatattttgatttctcatttcaaaattatctacctctgtagtttaatagaactcaattattggccccagaagataatttttttccctaaagtattttctaaataataaccagtagttgacctacgtcctttatatatatcacatagaagatctccacagtacattcttcaaattcagctcagataatccatggaatgctcaagttccctgtaacaaattgagctcctatatctctgtggacttataattgactaataaaagtaagacttgtttgctaatgataaagataatttgtaaaaaataaatcattttagtttgaccatgagacgcacacatcta

SEQ ID NO: 604877 - DNA, 573 bp, Homo sapiens
atataaaatagtattcaaagatcaaatatttatccaaactttaatactagagaaagatgggcaggtataagcatgagcaatgggaaaatgagaaagagcaggagaaggaaawgttactgaagcaaagtcagagattgcctgcttaaaaaagttttaaaagctaatttacggagatggcttctttccttaaacctcacgaaccaacctctactaccttccaacttttcttcttcagcttcctcacctctctcagccttcatagaactgaagagagttagggccttcctctggattaggctttggtttaagggaatgttgtggctggtttgattttctgtccagagcactcaaactttctccatatcagcaataaggccgtttcactttctcatcacttgtgtgtttactggagtagcacttttaatttcctccaggaacattctctttgcatgcacagcttggccaactgtttggtgaaagaggcctagctccccatctatcttggtttccaggatgccttcctcactcagctcaatcatttctagcttttgacttaaagtgagaaatacgtga

SEQ ID NO: 604878 - DNA, 521 bp, Homo sapiens
aaactcatgccatgtcaatatgtaatattttcataagttgtaaccggtagcaatagaaagagtcaagaaccaagaaacttcatgagaggtatgtgaataataaggctagaagtgtttgcaactttcgtgggtcctactcttaaggtctaacattattatatttctaacttttcctaaatattaatcatttgcatgtgtattctcaaaactaaaactttgctgaaacaagacctttcaaagttatgaagcaatcaaaattaaccatagagaagctttgtgctttgttttagcctaaatttkcaatgtgaagtaaatattgtcactaccatgttttatagtgagaaactgaggatcagactggttaaaactagtgcagtgctcagacttttattgatattttactagagattaattttcttcttctcttctatagtgagacatttgccagttcatttctgttttggttaagacacaaaattacatttaaacctctgagagtagttttcagaagagatataaaa

SEQ ID NO: 604879 - DNA, 685 bp, Homo sapiens
aatatgtttttggacatgaaatagttgcatcaaagaatttttaaagtcttgttaataagtacccattcaaattgattaaacttagagtgaattgtatggaaaatgaacattgatcaagtaatcagtgtcaatataaaacacagtcatgtgttgcttaataatggaaatacactctaagaaatgcatcattaggcaattttgttattgtgccaacatcaaagtgtacctatacaaaatcagatgatatagcctactgcatacctaggctatacggtatagcctgttgctcataggctacaagcctatgagtactatactgaatactgtagatgattgtaacacaatggtaactatttgcatatctgtgtatctaggcataggacagtacactactgtagactttgagcactgtacacttaggcactaaacttataataaatatttttctttcttcgatagtaaattaaacttagcttactgtaactttttcactttgtaaacttttaaattgttttaactttttgactttcataataatacttaacataaattacaaatacattgtacagctgtacaaaatatrttctttctttatatccttattctataagttttttcttacttttaaacttttaaatattattttacttttttaaactttagtgttaaaaatgaagaaacaggc

SEQ ID NO: 604880 - DNA, 544 bp, Homo sapiens
tcacatgtagcacatctgctatagtcagactatatcaaattgaaactccccagtccattagggamccgggtatgtggaggtgattggtgtattatcatgagcagcagttgcattgtatttcatggttttcaatcacgaaacacggaaaatgttctcagaataactcctctctctaactgattcccacacagttcaaaacatgaagagattaaaaatcctgatagaatggagcatagttgctgatcatccctgtaatcccagcattctggaaggaagaggcaggcagatcacttgagctcaggagtaccagaccagcctgggcaacagcgtgaaaccctatctctaccaaaaatataaaaaattagccgggcatgatggtgcatgcctgtagtcccagctactcaagaggctgaggtgggaggatcatttgaattcagaagtcagaagttgcagggggctgcgattgtaccactgcactccagcctgattgacagagtgagaccctgaaaaaaattaaataaataaaaataaaaaaataaaaaaa

SEQ ID NO: 604881 - DNA, 582 bp, Homo sapiens
ccaaaagatcattttaaaattgtataattcactatcatgtttatcattatctttaacacctaagtgactacaatctactaaccaccagcaaggctttcagcaacgtatargcaataaagacagaaatactatttcttggacctattaaggaaatgatcaaaaatttcctatcatatattaacattcgcttttaaccgcatacctattgttctctctacatattctttaactattcaaacactggcattataaaaataatgttattactatttcaaaatattgcataattcttcattaatctcatttagtgatgactgtactggtgattcagtggttagatgttttacatctagttaaacttcctctttggttttaaaaacatcactgttgtgatttgctgtcacattctctcaaattaaaatgcaacaccttctagtctagattaacagattaaattatttttaaagattatattatattaatcttaaaaaatggaaaaaataccttatagcctattgtcttccgataataaagaatttccttttccaggagctcaaataagcgtggtgggaaaaattgaaa

SEQ ID NO: 604882 - DNA, 475 bp, Homo sapiens
gatagtatcttgaagagtgttttccaacttggttccattctccctgtcactttcaggtaccaatcaaacataggtctggtcttttcacatagtaccatattttttggaggctttgttcatatcctttcttctgcttgatccattcggctattgatacttgtgtatgcttcacaaagttctcrtgctgtgtttttcagttctatcaggtcatttatgttcttctctaaactggttattctagttagcaattcctctaaccttttttcaaggtccttagcttccttgcgttaggttagaacattctcctttagctcagagtagtttgttattacccaccttctgaagcctacttcaatcaatttgtcaatctcattctctgtccagttttgctcacttgctggcacggagttgtgatcctttggaggagaacaggcattctggtttttggaattttcagcctttttgtgctggtttt

SEQ ID NO: 604883 - DNA, 624 bp, Homo sapiens
tggctattatcaaaaagacaaaaaataacagatactggctaggatgcagaaaaaaggaaattgttatgcatttttggtragaatgtaaattagtacagccactatggaaaacaatatggagatttcatagaaaactaaaactagaactaccatatgatccagcaatcccactactggatgtttactcaaaggaaaggaaatcattgtatcaaagggatacttgcactcctatgtttatcacagccctattcacaatagccaagatacagaataaatttaagtgtccatcaatggataaatggataaagaaaatgtggtaaatacatatgcaatggaatactatttggccgtaaaaaagaatgaaatcctgttacttgcagtgatatagatggaactgaaggtcaatatgttaagtgaaatgagtcaggcacagaaagacaagtatcacatgttctcactcatatgtaggagctaaaaaatggatcacatggaggtaaagagtagaatgatagataccagaggctgggaagggtgtgtgagttggaagggcaatgaagaggttggataatgagtacaaacatatagttagggagaagaagtaagttctaatgttccatagcagaa

SEQ ID NO: 604884 - DNA, 582 bp, Homo sapiens
aaaataataatgaaatattattcagccctaaaaaagaacaagatcttctcatttaacacaacatagatgagactggaggacaatgaaataaaccagacaaagaaagaaaagtattacatgattgatttcacttaaatgaggattcttaaaaactcaaatatagaaagagaacaaaacagtggttctggggcagaggaggaagggagaaaattgggagatataagtcagaggatacaaagtataagatatataccatgaacaagtctagaggtctaatatacaacaggaggactatargaaataaaattttaccatacatggaattcatgctaaatgaatagattttaactgttattgccataaaaacaaaaacaaaaaatgggtaactatgtgagaggatagatatgttcatttgttccactatggtaactttttacaatctacatatatttcataacatcacattgtataccttaaatatacgtaataaaatttattttaaaacaaaggttttttttaaaaaattaaattttctcagaaaaagaaaaaaaacttgataagtatcacctacatgtaactgcc

SEQ ID NO: 604885 - DNA, 582 bp, Homo sapiens
aaaataataatgaaatattattcagccctaaaaaagaacaagatcttctcatttaacacaacatagatgagactggaggacaatgaaataaaccagacaaagaaagaaaagtattacatgattgatttcacttaaatgaggattcttaaaaactcaaatatagaaagagaacaaaacagtggttctggggcagaggaggaagggagaaaattgggagatataagtcagaggatacaaagtataagatatataccatgaacaagtctagaggtctaatatacaacaggaggactataggaaataaaattttaccatacatggaattcatgctaaatgaatagattttaactgttattgccataaaaacaaaaacaaaaaatgggtaactatgtgagaggatagatatgttcatttgttccactatggtaactttttacaatctacatatatttcataacatcacattgtataccttaaatatacgtaataaaatttattttaaaayaaaggttttttttaaaaaattaaattttctcagaaaaagaaaaaaaacttgataagtatcacctacatgtaactgcc

SEQ ID NO: 604886 - DNA, 582 bp, Homo sapiens
aaaataataatgaaatattattcagccctaaaaaagaacaagatcttctcatttaacacaacatagatgagactggaggacaatgaaataaaccagacaaagaaagaaaagtattacatgattgatttcacttaaatgaggattcttaaaaactcaaatatagaaagagaacaaaacagtggttctggggcagaggaggaagggagaaaattgggagatataagtcagaggatacaaagtataagatatataccatgaacaagtctagaggtctaatatacaacaggaggactataggaaataaaattttaccatacatggaattcatgctaaatgaatagattttaactgttattgccataaaaacaaaaacaaaaaatgggtaactatgtgagaggatagatatgttcatttgttccactatggtaactttttacaatctacatatatttcataacatcacattgtataccttaaatatacgtaataaaatttattttaaaacaaaggwtttttttaaaaaattaaattttctcagaaaaagaaaaaaaacttgataagtatcacctacatgtaactgcc

SEQ ID NO: 604887 - DNA, 594 bp, Homo sapiens
taaacagaaagaaagatcataatgaatttgtaaacaaaattcaaattgaatggctagagataaaaattccatatatggaatgaaaaaaagaaacattgagtgggattaaaagcaaattaggcactagagtaggaaaagtcattgaacttaaagaggaaaaaatatgtaatgacattattaagcatgctatcagatttgtaataagaattccagagagaaggaaatgaacaaggcaggaaaaaagttatacaattatggtaaaaaaaaatttacaaatgtgatgaccatcatagacatacagcttcagtaaatctgaaaaaaaaaaacataataatgatagaaagcaataccaaggcatgtggtaataacatcactgaaaaatcagtgataasgaataagtcctaaaagaaaccagagacaaaaagacacgcatgcctaagagagaaacaagaggcaaaattaaaggagacctgttgtcagaaactgtgaaagccagaagacattggaatgatattttaagatactaaaaaaaagaatgctacacccatgacaatatctttcaaaactgaaggcaaaataaagacttttagacca

SEQ ID NO: 604888 - DNA, 587 bp, Homo sapiens
tacatgtgccatgttggtttgctgcacccatcaactcgtcatttatattaggtatttctcctaacgctatccctccccytccccccaccccacagcaagccccagtctgtgatgttccctgctctgtgtccaagtgttctcattgttcaattcccacctgtgagtgagaatatgctgtgtttgcttttctgtccttgcggtagtttgctcagaattatggtttccagcttcattcatgtccctacaaaggacatgaacttatccttttttagggctgcacactttttaaacttctttttgcaatctgggcagtgacctcaattttcttgaaacccctttaaatgtactttccccatttagtccagtgagaacgatatcttgatttcttctcttttttccaaagagatcatgcaaatccatcttaattttaaaacatgttacagtataataagcataatgaacataaaaatgttcacaagtgggcccgataaagacagggaatttttcttttcctgtggtttttacacaattataagaacaatgttattttatgagttaaaattcttaagagcataaagactgaagat

SEQ ID NO: 604889 - DNA, 440 bp, Homo sapiens
atggggccttcagggggcatcccaggaggagcaaggtagaggacaattggtatacagccagaatttctgtccagtgctaccccacttggaaacctgacctcttaagtggaccatttctttgtgttccttaaaatggttagtgatgctttccttgatctgaacaagtagttttttttccacattatacaggaaatctgagttttttttctttttcyttccttccttccttccgtccttccttccttcctttctttctttccttcttttcctttcctttctttctttctttttttttttttttgagacggagttttgctcgtgttacccaggctggagtgcagtggcacaatcttggctcaccacaacctccatttcccaggttcaagtgattctcctgcctcagcctcctgagtagctgggattacaggcatgtgccacca

SEQ ID NO: 604890 - DNA, 587 bp, Homo sapiens
tacatgtgccatgttggtttgctgcacccatcaactcgtcatttatattaggtatttctcctaacgctatccctccccttccccccaccccacagcaagccccagtctgtgatgttccctgctctgtgtccaagtgttctcattgttcaattcccacctgtgagtgagaatatgctgtgtttgcttttctgtccttgcggtagtttgctcagaattatggtttccagcttcattcatgtccctacaaaggacatgaacttatccttttttagggctgcacactttttaaacttcwttttgcaatctgggcagtgacctcaattttcttgaaacccctttaaatgtactttccccatttagtccagtgagaacgatatcttgatttcttctcttttttccaaagagatcatgcaaatccatcttaattttaaaacatgttacagtataataagcataatgaacataaaaatgttcacaagtgggcccgataaagacagggaatttttcttttcctgtggtttttacacaattataagaacaatgttattttatgagttaaaattcttaagagcataaagactgaagat

SEQ ID NO: 604891 - DNA, 448 bp, Homo sapiens
gcccaactggaatgtctttgcttcttgatgctttcagaagacagagctaggaaatatgcacatgtatatatacaaattcattcagaaacgtacaaatatgcatacatatatgcacccacacatgcacagacatatgcatacattcatgctatatattatacatttatatccacactttagaaattatgagttcacatcagcatgtccaattccaattcaccaccacagagtacttcattgcctttgctcctccacatttttatttctcttctcagtggcaaggctgaatcccaacaacatcaacacatgtatttattggctcattcatttgttcatatatttctatccaaaattgtttycaaattgatttacttatcataaaattgctttaattagaaaaaatgagatacttcttctcaagtacagcttcactcctttcttacacaat

SEQ ID NO: 604892 - DNA, 551 bp, Homo sapiens
ttttttttaagacagagtctcactctgtcacccaggctggagtgaaatggcactatcttggctcactgcaacctctgcttcccaggttcaagcgattctcctccctcagcctccttagtagctgggattacaggtgcctgccaccacgcttgattaatttttgtatttttagtagagacaaggttttgccatgttggccaggctggtctcaaattcctgacctcaagtgatccacccgcctcagcctctgaaagtgctgggattacaggtgtgagccactgtgcctggccaagataaatttctttagcattagattcaagacccttcacatctgatttgcctttagggacaccagatagactgtgctagaaaatagtcattgatctatttagggtgkctggtgatctacatcaggtactatgaagttggaagagtcatagaactgctacaaacaaaagtctgatggggaattagtgatttgattctggtcttaaatacaaataaatactatagacaaagagacagagccaaataataagtggatggtcctt

SEQ ID NO: 604893 - DNA, 560 bp, Homo sapiens
aggtttttcatatgggggcaaaacagaatctttttcatatgggggcaaaagagaagcagtcaaataaaaatctatgaacctaagtgggggcaggtggaaaaagccttgcaagttactcaaatcactcaatgtgttatgaaacacagagaaggaccctattccagggaggagggaatcttgcccctcttgcaataaatacacaaaatgaaaggtcaggccgggaacggtggctcatgactgtaatcccagcaatttgggaggccaaggcaggaggatcacttgaggtcaggagttcgagaccagcctggccaacatggtgaaaccccatctctactaaaaaaataataataattaatataaaaattagccaggcgtggaggcgtacacctgtcatcccagctactcaggagtctgaggcaggagaatggcttgaacccgggaagcagaggttacagtgagccragattgcaccactgcactccagcctgggtgacagaacaagactctgtctccaaaaaaaaaaaaaaaagggggtcacctcaatgttaaacagatggccc

SEQ ID NO: 604894 - DNA, 450 bp, Homo sapiens
aagaattcagaggaagatttttttttttttttaattgaggtggtcaggaaaggtttcctggaggcagggtgtattttcatcttgaatggaggtgcaaaagttaactaactgcaaagttaggggaacagctctcataggaatacactcttctgaaaccaattgtgagttcgaggtgttcccaaaaccacccttggttttgataactcattagaaagactctcagaggtcactgaaagctattttatacttgtggttatggcttattataaggaaaagatgcagattaaaatcagccaagggaagaagtaattcatagggcaragtcaaggaaaggtagctgaaagtggaacttctaattatcttctcccccatggagtaaggaaagtgctgttttgcagcactgatgtgtgataatgtgcatggagtattgccaacaagggaagcttgcta

SEQ ID NO: 604895 - DNA, 561 bp, Homo sapiens
gttgcagtgagccgagatccagccactgcactccagcctgggtgaccaagcgagactccatctcataaaaaataaaaaaaaataataataataatgagaaakagaaaatacatttacagtacggtactgtatttatcaatactgcaaatttatgttatctgtttacaagatgaatcgcctctctgacacggtgggcaaccgcagctgcagacctcaatctatggtacatatcaagcagttcaagtttttcttgtaaagccatgagttttctctgcttcttggaagcactcccagcatcagtagtagcactttgtatgggttccatagtgttattcaaggtttacggtattgcacaaaacacgatggaaaatacccaagaacttcaagagatcacattttactgcaatatgcgatttactggaaaagcgaatgttcacgcagagataattagcatcagggcattttaagcagatagtcacaacacttgagctcactgcaatagcaacaggaggcggctacaaaattcctacggtagtacagtatgtactgcagttaatttta

SEQ ID NO: 604896 - DNA, 619 bp, Homo sapiens
gaggccgaggggggaggatcatttgaggccaggagttcaagattagcctgggcaaaaataataaaactagctgggcatggtggctcatgcctgtggtcttasctgctcagtaggctgagttgggaggatcactgaacccgggagaagtggaggctgcagtgaacaaagatcaggccactgcactccagcctgggcaacagaatgagatactgtctcaaaaagaaaaaaattcactacagaagatgactctatcttcagaattatatctaagatcaaaaacattttaggctacgacttagagtaagaaacaaactttgcatggcaacctagcacacacatgcatctacataactttagagaaaatggaaaagaaaacttaatgaaataatattcacctttgtaatgtgcattatgctctggtatggttcttctatttcattttctaatgatgactctgattcactgaatttcatttcccagccaactaatggatcataaggcaaaaacactggtttaaacctgtcatgtcaacaccactcttcttagcaatttttcagtcttaaaagaaaactaaaagagtgagcttatgaattggaaaaactcaatattaacatgtcaa

SEQ ID NO: 604897 - DNA, 212 bp, Homo sapiens
atttacccacgtatttattaacagcaagccagtcattagcattgtttctatagatattarattaactaaaagtatcccttatgggaaacgaagggatgggccgaattaaaggaataggttgggctagttaactgcagcaggagcatgtccttaaggcacagattgctcatgctattgtttgtggcttaagaatgcctttaagcggttttcca

SEQ ID NO: 604898 - DNA, 499 bp, Homo sapiens
ctggggaataaaagcaaaacagaataaagttagaggcctgaacaaatgaaatggtccttctattttctttccgtatgtcagcataaaaatcccctgtgtgtctctttcaaatatgtgattattttttaaaaacttccaactccagacaataaattttkgttctctgtacttggaccaaatgcctaatagaatgggtaagtttggggaataatcaccacagtggaatacattataacaattagaatgaacagcctgctacgaatgcaacaataccagtgactctcataagcagaatgttgagtggaagaagcgagacataaaagtttgcacactatgtgatttattttatatgaaatatagaaacaggaaaactaactgggatagggattgtcctttgtgggaggagatatcagtgtgtcttctggggtgttcgtgacattgttttttgttctaagtgctggttacacagttgtgttctttgcaaaaattccttagattg

SEQ ID NO: 604899 - DNA, 617 bp, Homo sapiens
gcctacctaatagcaagcaattaatgaatgctggctttattaaattaaaacattttttaagattggaagaaaatatatcaacatgctaaaagagattatttcagagttggggaatcataagtgatttttgttttcttactagagctcagaaataaattattcctgaacttaaaacaatttttggccgggtacagtggctcacacctataatcccaacactttgggaggccgaggcgggtggatcacctgaagtcaggagtttgagaccagcctggccaacatggtgaaaccccgtctctacctaaactataaaaattagccgggtatggtggtgagtgtctgtaatcccagctacttgggaggctgaggcaggagaatcacttgaacccgggaggcggaggttgcagtgagctgagattgtgccactgcactccagcctgggcracaagagcgagactctgtctcagaacaaacaaacaaacaaacaaaatacaatttttacaaataactgaagagtaaatcatacaatgcttgaaatattaaaaatcatctactacacaactgaaaaataatttgtagttctatagaaaaacaatgaaattttggtaaagccctaa

SEQ ID NO: 604900 - DNA, 549 bp, Homo sapiens
attcttggcagaagaggctccctgtcatcctgtcatgcctgttttattttggttatgcctgtactagtaagcacccatgaacccactctccagaattagagaaaggacaccccaataactcacagctacctgtctattcctctcctctcctccacctttcttccccagctagtaaacactattttccagttttgtactatttcctgcttatatgtttgtatatacctagaagaacattatttttagttgttcttaatgtaataaaaagggatcttgctgtacttaatattctgagactttgtttttaaagtcaatgttatactggtgtgttttatccacattattgcatgtagctgtatatattagtccgttttcatgctgctgataaagacatacctgagactgggtaatttataaagaaaaagaagtttaatggactcacagttccacatggctggggaggcttcataatcatggyggaaggcaagggaagaacaaagatatgtcttatatggcagcaggtgagagagaatgagaaccaagcaaaag

SEQ ID NO: 604901 - DNA, 619 bp, Homo sapiens
tacaggtgtgagccattgcaccctgccctcttccttgctttttaatacttgcatttaaagctataactttccctctaagtactgctttaggttcatcctatattttttatatgctatgcattcatcattatttgattctaatttctaattttcaatatgatttcttccaattcataagctatttaaagtgttgaattttcaaatacatttgcagggttgactgtctttctgtaattgatttttagtgctgtttcactgtggtcagagactgtgctctgcgtgggattggctrttttggtgtttcttgaggccacttttgttgcttagcaactgatcagaatgtgctgattgttgggtgttctgtgactgtttattaggtcaagtatgtaaactgggttgcttaaattttctgtgtccttgctaatctttattttccctgcttaatctatcaattactgaacgaaggtatgtgaacttttccattattatatggattttaaaatttctctttataaatctatcagtttttgatttttctgttttaagactatattgttagaaacatacagattctggattttaaaaatatctttatggtgaattttcattgtcatatatg

SEQ ID NO: 604902 - DNA, 591 bp, Homo sapiens
ttactcaacccaaggatttatatttttaataatttctttaaaatgacgaatctctcaaatattgcctctcctccctcttcattcagaaagttctcctttctataggcccatcagctgtgtgtcagctcttattcttttctccagtttttgagcccttcaaggtttttttaaaaattatttatatctctgtgatgcattctaggtgatttcctcagaagtatcttccacttcacgaattctctccccacaggtgtttaacttgcatttaacstgcccattgagtttttaatttcaatgccttttaattttatttttcagttttattgaggtataattgacaaataaaaattgtatatatttacagtgtacatgataacttgatatatctatacattctgaaaggattgccacaatccagctggataacctatcacctaacattcttaccatttttttttgtagtgagaacatttaacatctattctcttagtgactttttatatttttaagtgttttatttttcctttacctaatcttttagaagttctcttttctcatatgatttctagtttctttaatcttttgaaatag

SEQ ID NO: 604903 - DNA, 469 bp, Homo sapiens
tattgtctttatgtgaaaattaagtatggtttaaggagatgcatatggctatgtatttcatctttgcatcatttccaatactggaggtataaattgtatagagacttctagagagttctaatttgtttcatgcattttttgcagatttgactccagagtgcattatcacagtgttgactgtgtgtaagcattgtgtrtatacataggaatgttgaaacttcttcaataaacgaagagatgtcctttttgtacatctgcatttgtaaaagagatttcttaagatcttggctgtttgggtaactgcttatgtgctggtgacccattgtggttttttgattgatcttctcaaaagataggctgttcatcatgatatttcagatgaccacagttataaagctgggtgcacgtagtgactgaccataatgatatgtgtttatacatccctttttgacctatttcttcatgaata

SEQ ID NO: 604904 - DNA, 469 bp, Homo sapiens
tattgtctttatgtgaaaattaagtatggtttaaggagatgcatatggctatgtatttcatctttgcatcatttccaatactggaggtataaattgtatagagacttctagagagttctaatttgtttcatgcattttttgcagatttgactccagagtgcattatcacagtgttgactgtgtgtaagcattgtgtatatacataggaatgttgaaacttcttcaataaacgaagagatgtcctttttgtacatctgcrtttgtaaaagagatttcttaagatcttggctgtttgggtaactgcttatgtgctggtgacccattgtggttttttgattgatcttctcaaaagataggctgttcatcatgatatttcagatgaccacagttataaagctgggtgcacgtagtgactgaccataatgatatgtgtttatacatccctttttgacctatttcttcatgaata

SEQ ID NO: 604905 - DNA, 422 bp, Homo sapiens
gtttgggattgtgattggctcccagtaaagcacagggctaattatcacaggtgagcaacagaaatgttcaaatacaggtgtgaatcttctgaatatgaaatcagtggtgaaatttctactcgcagtaataaggagacagttgtagaggaagggcaccaccagagtcgtgsgtgcatgccttcaccccaggtcaggttcttggaggagagagaggagtgtgtgggtgggagcatggggatagcgtccagcactgctgccccttccagtacggtaagcaccaggctcaggtggctgctgcgtgcttgcagtgtggctctcacagattgagatgtgcttaaaatacacacgggatttcaaagacttgggtgaaaaaagtaaaatatttcaatatatttgtatatggatacatgttgaaataataa

SEQ ID NO: 604906 - DNA, 581 bp, Homo sapiens
tatgactaaacctaattgcaacaaatcttgtaaacatagtgctgagccgaagaactcagacacaaaaaaatacatactgtaagactccatgtatatgtgtgtgtgtatatgcatgtgtgtatatatatgctgtatatctactatatatatagtacatatatgtatatgtgaagttcaaaaaagtcaagactatagattgagcctcccaagtccaaaatttgaaatgctgtaaatctagaacttttgcatgctaacatgacacacaaataaaatgctcattggagtgtttcagatttaggattttcagatttgggatgctcaaccactaagtaaaatgcaaatattctgaaatccaaaaaaaatgcaaaatcagaaacacttctggtccaaccactgtggataagggaaactaactggtacagtgtttcagaatgcctacttcagtggtaaagttatatcatcataaaagtcagcagagcggtgtcttttgctgggaagaaaagtgacgtgagtwaaacgaggcacatggagttaggagtgtggagtgcaagcaaggccatttggatgcttgaaaccattaa

SEQ ID NO: 604907 - DNA, 598 bp, Homo sapiens
gtcatctgtgacacagatgtttttcccaatttcttgtgtggcagtggttgtgtgtccactcacatgacagtctcaactgcctcggcccttttagtcttggtgagggtgggagacagcccccaaggccccattcccccagaaagtccttgcggcaggaacatcagagctccaccagttgggtgaggtagcacccggcactgattctctggctacccaagaagagagaccctctccttgccaaccccagcagggcctgtctcacccatcttccccccaagggccttcctccttcctgccctcctgcatccctggctcttcaacctctttattcccatcttgcattcaggctcctggctttttgagtctttgtttctacttaggaagggaytaggggaggacaaaacaacctgggacaccaaagagggaagaaaggggaaagaaatctgcaagaaagccacacagtccaggagcgcgtccagcaggacagctggacttcaccggtgtgttttctcagaaagtcttctaaaccctgtggccctccccaggtctgcaggtggggctcctttcagaattcaccatcatcaaaggagcactagat

SEQ ID NO: 604908 - DNA, 494 bp, Homo sapiens
gtagctgacatttcactgtgttatatactcacttggttttctattaaattaacagcatataatctggatggagtttccactgcagctaagtggtctgtgtcccaggaggagtatcatatgggtgtctttgagaattcactattgctgttgattcattctttaattaagtgcctgcctgggtgttctctcactgttcaagcttcttgcattccaggagtgggttctttctggctgactcttcaagtacagtgcagtgtgactctatagctggcttttccagaaggaggctgtggccccagagtctccttatcattgttgttgtttttctttgctgaaatgaaagaactttgcactttctcctcagaccggcaggtttcagtacatgttggtttatttttaatttgcaagtcatgaagtttaagtgcttgggatytgaagtacaagccctgagcatccaggaatgcagggatttgttctgatttccctcccaaaat

SEQ ID NO: 604909 - DNA, 597 bp, Homo sapiens
  misc_feature 366, 367, 368, 369, 370, 371, 372, 373, 374, 375, 376, 377,378, 379, 380, 381, 382, 383, 384, 385, 386, 387, 388, 389,390, 391, 392, 393, 394, 395, 396, 397, 398, 399, 400, 401,402, 403, 404, 405, 406, 407, 408, 409, 410, 411, 412: n = A,T,C or G
  misc_feature 413, 414, 415, 416, 417, 418, 419, 420, 421, 422, 423, 424,425, 426, 427, 428, 429, 430, 431, 432, 433, 434, 435, 436,437, 438, 439, 440, 441, 442, 443, 444, 445, 446, 447, 448,449, 450, 451, 452, 453, 454, 455, 456, 457, 458, 459: n = A,T,C or G
  misc_feature 460, 461, 462, 463, 464, 465: n = A,T,C or G
catgtaaatggctatcgttactacctaataacagtcccaacactacacttggtgctttacacacatgacactattcctcacaaccactctgaaagatatgcccattttacagataaaaatgagacttagaaaggttaatgtgacctccatggccataaaaaaagctgagcaacagcatggacatttattccagtgctttcargctctcatgcttatgcctttcccatttatcatactgtttccaaaagttctttattttctagctatttcacacattctagagattctatcacatggtgaaaactattacctcttccttttaatagatgattatgatagaggatcctctagagtcgacctggaggnnnnnnnnnnnnnnnnnnnnnnnnnnnnnnnnnnnnnnnnnnnnnnnnnnnnnnnnnnnnnnnnnnnnnnnnnnnnnnnnnnnnnnnnnnnnnnnnnnnnactgtgctgtctcctaggtgtctctggtttctccaagaatactctgagaagtttccaaacaggaatcattcaggcaacaccttaacatgcctacatcatgatcttccattgaacctaagctttaaaaaatgc

SEQ ID NO: 604910 - DNA, 585 bp, Homo sapiens
atttctggactctttattctgtttcattgagctatctgtctattattatgccaatatcacactgtcttgattatatggttttataataaatcttaaaattgggtaactttttcaaaattgtttgctattttacttgtctttgaatatacatttcagattatcaatatctaccaaatatccgcttatcaatatctaccaatataaaatcctgctgaaatttttttgatattgagttaaatttataaataatttttggagragtctctgctttcctgtgacaattcttcactcatgatgattctccaattcatgaacatggtatgcctctccacttatttagatttttaaaattactttcgtcagtgttttgtagttttcagcatatagagctgaaaactatattgttttcatacatagctaaatatttcatcagttttgttattcgaaatgatataattttaattttggtttccaaatatacattgttagtgtagaaatacccagttgtttttgtgctttatctcatgacttttctgaactcacctgttagttctagggttatattgttttcatttgtagagtcat

SEQ ID NO: 604911 - DNA, 593 bp, Homo sapiens
caagttatgcatatttaaataatgtatagaaaaatacagaacaccggtaaatagmaaagaaaatgacccaaacccaagtactattttgatttcctttcaatcttccccaacgacaatagttttactggttgtaacctaagtataattacaaagactgcacgggatcccatccagtgggaatggcagtgaagttgtcagggagttatatctaattttctgaggagcagcagagaatccctatttaagtaaactccccaggatctggtaatgctggtccttaagcaggtctgggacactatattagataatgtattatgatcctttctatacagatatcttttcagatatatccactacaatgtgtattctccttgaaaagtagagcctttatgctggggcttggctgcccatcctataagcacatttccagtcaggggaatgtatggttttggctgttagaatgtgggtgtggccaaagcttttaggaagtggttctatccttttccacactctcctccctttgactcactggctgtggacccgaactaggcttcaaggctggtgtttccacaagatggaaggaatttaggatt

SEQ ID NO: 604912 - DNA, 468 bp, Homo sapiens
atcctttctatacagatatcttttcagatatatccactacaatgtgtattctccttgaaaagtagagcctttatgctggggcttggctgcccatcctataagcacatttccagtcaggggaatgtatggttttggctgttagaatgtgggtgyggccaaagcttttaggaagtggttctatccttttccacactctcctccctttgactcactggctgtggacccgaactaggcttcaaggctggtgtttccacaagatggaaggaatttaggattattgaaaagcatgaaaaagtgtggtttgttatatgaacaagaggtaaactaatatcttaagtcacagaaccatgggggttttttgttacaaaactagtgttaccttaactactcctctagataaattcttctccgaggaaatacacataagaagtctatgaggaagtgtattacgccttcatcaatgcacta

SEQ ID NO: 604913 - DNA, 579 bp, Homo sapiens
cttcatagcagtgtgaaaatggactaatacaatgttcaatatttttattggtaattcatattaataccttgcctcaacttcaaattatggaagaacttagttctcaatattttcacctttgaaggactaagtagtttgttgtctgggagctggatggtgctgctcagagcgacagtatatttgcatgaattaaaatactggcatatgttctcctcaagcttcctctattttctgttttgagaaacaatgacaaaaacgttgcctcaaatcagaggacttttagaaaayaaaaccaaaaggcagtggcataattaattcctgtcattcttgttaggatgatgcatataaggaaagttttggaacaatctggaagaaagctctgataaaattacagaagagataggtaatttttctaatgattattaatcattaccatcttcatcattctcacttctgttattaatgttcatattgagcttacgactggccctgaattatggtaattaatttctggtccacacactgatttgcattcatgttcaagagctcaattaacagatttttgggcagaactataag

SEQ ID NO: 604914 - DNA, 554 bp, Homo sapiens
tttttttctcatcagtcagagaaatgacatggtttgataaacacacaatgttattttgctttgcatagactttattttaaaaattatagtacaatccattttgagggagcaagatgaacatttgaaacataaataaataaagactgaaccatttgagaaggcttcatgaaaaaacaacttgagttatyctagaagaatgagggtgatttgagcaggtggaggaacaaggagaaacatggatgctgagacccctgatacatcacaggaaggtcccaacacaaagagaagcacatgagtatcactaccatatagccatcaacacatgaatcctcattcctcagagaactctttggaatcataatttaagaaattcagggatgaaagttggggttgcccttactgtaccttggtgccagcttaactgttttcccatcaggaatgtaatcatctttcatataatatcactctataaagactgtttgttgatcttcttcaagatattttgtcatgtgcctctatattattcattttgcattgctataaaggaatacctg

SEQ ID NO: 604915 - DNA, 504 bp, Homo sapiens
gaacatcagtctctttaaatgttggtcagagagaacacaggttgtgaattaggtgtgccagcttgtccagaaacatggcaaagataaagaatcaaatgycaaatgttctcttctttgaaaacccactttgtaatattatgttttatatcagcatgtgagcattgaattttcatgtgcaaatagttagagtttcagttctctctcccacttttaaattacctacagaaaaatgtcatctttaagtaaaattgaaagtaaaaaactagaaaaagaaatttaaagacacaagaaaaatgttatatgagcctcaaaacataaatagttcctacatatcaataagaaaaatggagcactataacagatgtatcaaatgtacatacaaatcgcaattgaacaaatgccaagcccataaagaaaatgttgtacacatttaaaaactaaaatttatttgtatattttgttatcaaaatttattttttgaaattgttttaatgataatatagc

SEQ ID NO: 604916 - DNA, 530 bp, Homo sapiens
ttctcttttcttaagagagttccaatttggatgaattgtatgatcactctatatataaccaagcaacaaaccttctttccacatttgccaacgatgccaaaaatccccaagtaatcatgcatggttctccaacatagtctaggaggaaatttaacatcctaacaaactgtctctttatgtgcttgttgtagttagattcttttgccaaggcagacgttttcatatactctgaagcctacttaacatgagatttcactttattactttargattcagggtgtgttgatgggacagggagaaataaagttcaattgcatatttcaatgaattcccatttctggcacagaaagaattgaacagatcatggtagctgaacattatgtggctataaagagcaaagtgtctgaaaacaacagattggaccattcttgttttctagattgctaagtatggctgcctctttctggtatgggaaccctcatttctcatttctccccacaagagctggtggagctgaggcagtaattcca

SEQ ID NO: 604917 - DNA, 610 bp, Homo sapiens
cattctctttgtctttgagctgcattctgrttgataaactgacctttcatttactcatccactctttggcagtaaagaagctgctattaagagctattaagagctcatctgttaattttaatagctgtgtcttttcattttaacatttctagttggtgctagtgtcataatgcatgttctgctttcaaacttcctcttgtttcatggcttttattctcacctaaatactgttaggattttaaataaatccttactggggagcttgccctctagcccagtattcacagctaccaaaaaataaaagtttatgaatggattaaatcaaaataaatatcccaaaagctacatgcttctaggggagggaaaagcagaaatgctctcctcttttttttattttatttttttgagacacggtcttgctgtgtgacccaggctagagtacagtgacgcaatctcagctcactgcaacctccacctcccaggttccagtgatcctcctgcctcagcctcccaagtagctgggattaaaacatgttcaccaccacacctggctaattattgtatttttggtagagatggggtttcaccatgttggccaggctagtctcga

SEQ ID NO: 604918 - DNA, 643 bp, Homo sapiens
taagacaaacaattctgtataaagtgtataaacaagcaagatgtgcttttagtgaggaaagctataaagtgtgtgtttgttaaaaagacttttttttgtctagtttgaagttacttaaaggttctttcaagtagaaggaataaaaaagatgtagatgaaactcatatagaaagttgaaawgaaaaagaattgtataaatgtacgagagattacgaaaagtttatggaaatctggtgtggtcaaaagccaaccgaggtttgtttataagtttttattaaaattagctttgatatcaataaatacactaatacaaaagtaaaattttgttttatcttttgaaaaaaaaatttcatgtagtattaataagacaagtaaaagtggctgggtgtggtggttgatgtctttaatcccagctctttgggagaccaaggcaggtggatcacctgaggtcaggagttcaagaccagcctaaccaacatggtgaaatctcatctctactaaaaatatgaaaattagacaggcatggtggtaatcccagctactagcgaggctgaggcaggagaatcccttgaacccaggagatgtaggttgcagtgagtcgagatcatgccactacactccaacctgagtgacagagtgagac

SEQ ID NO: 604919 - DNA, 643 bp, Homo sapiens
taagacaaacaattctgtataaagtgtataaacaagcaagatgtgcttttagtgaggaaagctataaagtgtgtgtttgttaaaaagacttttttttgtctagtttgaagttacttaaaggttctttcaagtagaaggaataaaaaagatgtagatgaaactcatatagaaagttgaaatgaaaaagaattgtataaatgtacgagagattacgaaaagtttatggaaatctggtgtggtcaaaagccaaccgaggtttgtttataagkttttattaaaattagctttgatatcaataaatacactaatacaaaagtaaaattttgttttatcttttgaaaaaaaaatttcatgtagtattaataagacaagtaaaagtggctgggtgtggtggttgatgtctttaatcccagctctttgggagaccaaggcaggtggatcacctgaggtcaggagttcaagaccagcctaaccaacatggtgaaatctcatctctactaaaaatatgaaaattagacaggcatggtggtaatcccagctactagcgaggctgaggcaggagaatcccttgaacccaggagatgtaggttgcagtgagtcgagatcatgccactacactccaacctgagtgacagagtgagac

SEQ ID NO: 604920 - DNA, 643 bp, Homo sapiens
taagacaaacaattctgtataaagtgtataaacaagcaagatgtgcttttagtgaggaaagctataaagtgtgtgtttgttaaaaagacttttttttgtctagtttgaagttacttaaaggttctttcaagtagaaggaataaaaaagatgtagatgaaactcatatagaaagttgaaatgaaaaagaattgtataaatgtacgagagattacgaaaagtttatggaaatctggtgtggtcaaaagccaaccgaggtttgtttataagtttttattaaaattagctttgatatcaataaatacactaatacaaaagtaaaattttgttttatcttttgaaaaaaaaatttcatgtagtattaataagacaagtaaaagtggctgggtgtggtggttgatgtctttaatcccagctctttgggagaccaaggcaggtggatcacctgaggtcaggagttcaagaycagcctaaccaacatggtgaaatctcatctctactaaaaatatgaaaattagacaggcatggtggtaatcccagctactagcgaggctgaggcaggagaatcccttgaacccaggagatgtaggttgcagtgagtcgagatcatgccactacactccaacctgagtgacagagtgagac

SEQ ID NO: 604921 - DNA, 501 bp, Homo sapiens
gagtgagactccgtctcaaaaaaaaaaaaaaaattagactgggtaatttataaagaaaaagaggtttaatggactcacagtcctgcacagctggggagacctcacaatcatggcagaaggtgaaggaggagcaaaagcacatcttacatggcggcaggcaagagagtgtgtgcaggggarctgccctttataaaaccatcagatttcatgagacttattcactatcatgagaacagcatgaatgcctccatgattcaattaccttccaccagctccctcccatgacatgtggggattatgggaactacaattcaagatgagatttgggtgggaatacagccaaaccgtgtcactggatttgtaaacagactgtaaactactcttgtgttgatcactgagttttggcctatcaaaggcggccaactcttcaaaccgcattcagataaggcaattgccaagctgtaactgatccagccagttttgtacctcattttcattttc

SEQ ID NO: 604922 - DNA, 629 bp, Homo sapiens
actaatgatatttaccacttcttgaatgctttaatggtttaaaaagagttatagtttcttattggaaggtactagccaccattactcaatattctacttgatgtgtagtatgtatttgcatataatatccatgaagaaatattcttttgagtttctgaaaaagaaaatttcactttcaacaagagaaaggaatggtttggaagaatgcatgaagagaattttaccttaccaaatatcacaaatatttggataaaagagaagaaatgatcataactaaatattatgtataaaaagcttaaaatataaaaatatttaattttatatctttgtacagtcctttcattgaatgtttaacagttcagttgcattaatgtaaaacaattttcttaatatcataaaactcaagtatccaaataggcacatccattttcctggtgaacttctaagctatgtcaatgatctttttatgtaattcatagaaaatgtatcttaaaattctgamaacattgacaactatgaaacctctgccataatggagtgatcaagcagccaaaatgctgatataaatacttttcctttttttcactcaatgaggaaacagccaaccattttttcaaaattcttaaata

SEQ ID NO: 604923 - DNA, 600 bp, Homo sapiens
tttgtccagacaaggagatctctttggggaaacaataagttaaggtcaaagtatgttgaatctgagatgctaatgggccatccaggaaaagattgacggcaagtagtagagaattggagtccaggagagagctgaggcacacagatatctacttggaagtcacyggcggataatatttgaatttctgaaattaaatgagatcactgaagaagagagtatgaagaaaacaaaatacctctaagtaaattcttgaaaaacttaaagatcaatcagcaataaaagaaaccaagaaaggaaaacctggaaataggaagaaaattaaaacattaccctgtcacagggtattttgaataggagaaaatagaccacaaaatcaaaagcttgagagtaatcaaaaaagataaggactggaaaaaaataaaaggcaactgtatttgactcttcaggaacattctcagtaaaatggcagagacagaagccagattcgaagaggtgaggagttgttaaaaaaaaaaaaaaagaaaaagaaaaagagagagacagagaaaggaaaaagcaggcactaagtaaagaaaaaacacttaaaagaagtttagggta

SEQ ID NO: 604924 - DNA, 544 bp, Homo sapiens
cgcccgcctcgacctcctcttttttttttttttttaaggaagtagtgtaagtagtataccatcgtgtgtatatagcacactttctccatctgtcaatggacacaggttgatwccctatcttggctattgtaaatagtgctaccattacatgtgagtgcagacacccctttgacctatggacctatggattttggttcctttggatggtgggattgcagatagtttcattcttaatatcttgggaaacccccatactgttttccataatggctgcattaatggacatttacaccgacagtgtggaagagttctgttctctgcattcttgccaacactcaatatctcttgtcttcttgataatagtctttctaactggggtgaggtaatatcttattgtgactttaatttgcgtttccccaaagattagtggtgttaaacattttttcatatgcctgttggccatttgtacatattcttttgagaaatacctactcagatcctttgcccattttaattgggctgttttcttactgttgagttcttt

SEQ ID NO: 604925 - DNA, 620 bp, Homo sapiens
tatatatatttattatactttaagttctagggtacatgtgcacaacgtgcaggtttgttacatatatatctatgtgccatgttggtgtgctgcacccattaactcatcatttacattaggtatatctcctattgctatcctggagagacagactaatcagcttggtttagagaactcatttcctgctctgaggagaatggaaaagaggggcaaggctggatttgagctgttgtgcaaacggattagagatggagatgtgatcagaggctgtctgttgtggaagaggacagaggatgaactgcagagattttyagagaagtacagtcaagtgcttaatgatgttggtgatctggcatcaccaataactagtctctgacatgaaagaaaattaaaaatagaataaatcctaaattactgagttaactgggaagggatggagaatggaatagcacaagaagtgagaggacgggaggaagaggggtaagaaaatgggaaagtgggaaagagagggatggggcattcaagaagaaaggaaaaaagacctggcaaaaaaggatctcatgtataagaaaagatcatgtttatgaaaagacgatcatttgggcttgtatgtaacaaca

SEQ ID NO: 604926 - DNA, 549 bp, Homo sapiens
aggtgagatcctgggagccaggctaaatctccacttgatcttagccaaaaggctgagaaatgatcaggctaaatcgccaggtcaggcttgatgatgcttggttaagacaatgaatgcacagttacgttttctttgcacagaaaaaggtaaaaagggttaaatggtgactaatcgtaatagtaattcccatttattaagaaaccatgacatttcaggattgcaaacgttatgcaatttattccacataacgaatgtttgaggaagatattaatattttcactttccaagtgtgtaaacttgagttttaaaatattaaatgacgtgtccaaagtcccctggtagatcaaggacctaaactgaggtctgtgtggttccagagctcgtattcttaatcacagctttcaatcagaccctaccttagaaaaaacagagctctttgcctgatttcattggtgagaattatagaaaaggtgatgaaaccatcatgatacttatctccttaccatcacgatacttatckcgtttccatcataacttccgtgtagtttg

SEQ ID NO: 604927 - DNA, 567 bp, Homo sapiens
tgaaaagagcccctactagagcaacatgaattccatgaaaactgaagaaagaacaaacatcaaatttagaatgaagcttgggtggaagaatgagatcactgatgctttatgtaaagtttatggggatagttacccacataaactcacaatttacaaatggataacttgtttaaaggagggatgagaacagtgttgaggatgaaacccacagcagcagatggtccacatcaaattgtgargaaaacatttttcttgttcacgccctagttgaagaggcccaacaattcacagcaggagcaataaccaacaccatagacatctcgaatggttcaccttacacaattctgactaagaaattaaagttgagcaaactttccactcaatgggtgccaaaaccattgtatccagatcaacagcaatcaacagcagtgctttcaatagaatttttaaacaagtaggatgaagattctgaagcatttctttgaggaattgtaacaggagatggaacatggctttaccagtatgatcgtgaagacaaagtacaaccaaagcaacggctaccaggag

SEQ ID NO: 604928 - DNA, 584 bp, Homo sapiens
aaggcagcatgctccttaagagtcatcaccactccctaatctcaagtacccagggacacaaacactgcggaaggccgcagggtcctctgtctaggaaaaccagagacccttgttcacatgtttatctgctgaccttccctccactattgtcctatgaccctgccaaatccccctctccgagaaacacccaagaatgatcaataaatactaaaacaacaacaacaacaaaaacaaaacaaaaaaaagaaaatggcagaattttctgctttattaaagctggatmatattttattgcatataaaaagcagacatatagaccaatgaaactgaatagagagtccagaaataaaaccatacgtatatgctcaactcgtcttcaacaaggacaccaagaatatcaatggggaaagcaatgtcttcagtgaacggtattgaaaaactgaatattcacatgcaaaagaatgaaattggatccttatctcacactatacacacaaatcaactcaaaatcaattgaagactaaaacttgaaacctgaaatgaaaatattaagaagaaaacatagaaaaaagttttttgacact

SEQ ID NO: 604929 - DNA, 584 bp, Homo sapiens
aaggcagcatgctccttaagagtcatcaccactccctaatctcaagtacccagggacacaaacactgcggaaggccgcagggtcctctgtctaggaaaaccagagacccttgttcacatgtttatctgctgaccttccctccactattgtcctatgaccctgccaaatccccctctccgagaaacacccaagaatgatcaataaatactaaaacaacaacaacaacaaaaacaaaacaaaaaaaagaaaatggcagaattttctgctttattaaagctggatcatattttattgcatataaaaagcagacatatagaccaatgraactgaatagagagtccagaaataaaaccatacgtatatgctcaactcgtcttcaacaaggacaccaagaatatcaatggggaaagcaatgtcttcagtgaacggtattgaaaaactgaatattcacatgcaaaagaatgaaattggatccttatctcacactatacacacaaatcaactcaaaatcaattgaagactaaaacttgaaacctgaaatgaaaatattaagaagaaaacatagaaaaaagttttttgacact

SEQ ID NO: 604930 - DNA, 584 bp, Homo sapiens
aaggcagcatgctccttaagagtcatcaccactccctaatctcaagtacccagggacacaaacactgcggaaggccgcagggtcctctgtctaggaaaaccagagacccttgttcacatgtttatctgctgaccttccctccactattgtcctatgaccctgccaaatccccctctccgagaaacacccaagaatgatcaataaatactaaaacaacaacaacaacaaaaacaaaacaaaaaaaagaaaatggcagaattttctgctttattaaagctggatcatattttattgcatataaaaagcagacatatagaccaatgaaactgaatagagrgtccagaaataaaaccatacgtatatgctcaactcgtcttcaacaaggacaccaagaatatcaatggggaaagcaatgtcttcagtgaacggtattgaaaaactgaatattcacatgcaaaagaatgaaattggatccttatctcacactatacacacaaatcaactcaaaatcaattgaagactaaaacttgaaacctgaaatgaaaatattaagaagaaaacatagaaaaaagttttttgacact

SEQ ID NO: 604931 - DNA, 573 bp, Homo sapiens
caaagccacaggacataagaacaacagaacataatcagttatatttctgtacactggaaatgaacaatcaaattgaaatagttaaaaatagtaccaattgtaataatataaaatataaaatatttagaaattaatctaagcaaccctgtacaagactgattaattgatctctttataagtataaaaccaattgatctctttataactataaaaccaattgatctctttataactataaaaccaatgaataaatatgacacatatgtgggtagtttatacatacacacatgcttgtgcatgcagacacacacacacacacacacatattttcatataagactcaataattttcagatactaagtttccttaaacttcaackgagctttgaaataggttcaacaaaattctcttcaaaaccacagcagaacttttggcagaaatagacaatgaattttgtagagataaaatctttagtagaaatagactgtaaattatataaagctaataggatagacaaacgcaattttgaaaaagaacaaaattcagcactcacactgatttctagactgaag

SEQ ID NO: 604932 - DNA, 463 bp, Homo sapiens
catttctgtgccttctagaaagatagatgaaaccaagattctatttgtaattaaattcagcatctcctttagctacagatttatgtacatacattactgaattaggtcatttcctaattttagagaacttttgctcatgcttaatacttaggcctcctcatttgtaattaccattcccacaatgttggtcacaaacctcaaaagaagaatgaattaaaattagatgcyccaaacagtgtttttatttttagcttgaaagacacttgaacccctaacactgtaaagcgtaaggaaaattgctactcattcagagttttgttttgttgtgagtaaggtttgggatttgtgtttgctcattctctccacagcctctcctccaggtgttttgtcttgttttgttttgtcctgcatctgttttacagtttgttgctctggcgataaattttaatttatatttattttt

SEQ ID NO: 604933 - DNA, 463 bp, Homo sapiens
catttctgtgccttctagaaagatagatgaaaccaagattctatttgtaattaaattcagcatctcctttagctacagatttatgtacatacattactgaattaggtcatttcctaattttagagaacttttgctcatgcttaatacttaggcctcctcatttgtaattaccattcccacaatgttggtcacaaacctcaaaagaagaatgaattaaaattagatgccccaaacagtgtttttatttttagcttgaaagacacttgaacccctaacactgtaaagcgtaaggaaaattgctactcattcagagttttgttttgttgtgagtaaggtttgggatttgtgtttgctcattctctccacagcctctcctccaggtgttttgtcttgttttgtttygtcctgcatctgttttacagtttgttgctctggcgataaattttaatttatatttattttt

SEQ ID NO: 604934 - DNA, 501 bp, Homo sapiens
atccattgagaccattacagaccttccaatgaacagttaagctttgtagtgtgcctcctcgagaaacagctgtttgtctaacctttgaactgaccgatacattaatctgaagcataatttagttctgtctgagctcttgggtacagcatgaatagctggcttgctcatattataccagtctccaaaataatactttatgtgcttgtttaaaaatagtcattttcccttcccaatttaattatgtatgattattcgataaggggatgccagagctggtgtatagttcctacactcccattctgataactctactkctatctagccttgatcctgctgttatttcctgatattcatcagaatccgtaaagcagctactctctggagcctcttttcacaccaaagagaaagttgcacccagggcttcgctcaggtgaggagagattaagagagtgatgcacaggcacaagcgcccacattgtgatgtgctgcggttgtcgagta

SEQ ID NO: 604935 - DNA, 499 bp, Homo sapiens
tgcctgtagtcccagctacttgggaggctgaggcaggagaatcgcttgaacccgggaggtggaggttgcagtgagtcaagattgtgccactgcactccagcctgggtgacagagcgatattccrtcaaaaaaaaaaaaaaaaatctcaaacataacccctgtctcggattcacagaaaaaaagaaatgctacttaactccaaaattgactagttactaggttcttaggaggatgactctaaatcagcaaaactatttttaacttcttgcagaggctgtttaaaaaagcagagagattaaaacctgaaataggtggacagcactttagcaaatgacccatgtctgggtgtgtaaagatacagggagacaaagtgaacagcactttagtaaatgaaccagtgtctgggcgtgtaaagatacaggcagaggtgaatttcggggatgggtggaattagtctgcatggtttaaaaagagggttttgttttttgttttttttaag

SEQ ID NO: 604936 - DNA, 579 bp, Homo sapiens
aatcctctaaaaataaatccatctaaaagaagaaatgatgttggaagggtgtgatcattatgggatggagatttactgtcctctcctttgagacatggctcctctgtgaaataytgactcactggtctctacaaggaaggtattatctttatattgctaaatcacatatgcattttacaaaatgattcacaaatgcatcaccagcaggtgcacacttcaaagcaaaacatttctgtgaatccctggcaaaaataagggtgtagcctaggttttgtaagacagcagtggcagggaagaggatgagtgatacagggaaaaccagccagaagtaaagtacttacagaagatcttatcttcccagatgaaattatccaggctttgggtgcacagaatatacaatgcagaggtgaacagagaaatcaaggattgggcaagacaagacaaaacaaatgaaacaccacaaacaatacaaattaatcaaaagatgagacctgctgcaatgcttcaggatcagcaatagccaatagtcttttctagaaaatcctgaacccgaaagtggttcccttttaagttttgcaa

SEQ ID NO: 604937 - DNA, 540 bp, Homo sapiens
acaccctaacacaaagcttggctgcattgtgttcatgtcctgggaacctgtggaaagctgaacttatgtaagtatgaaagtaactaaagtatctgagtatcaaagcattcaggatgtgacatggctgcttctaataatctatgatcatatatggaagcaaattaatgacttaaatttggaatttataactaaaagggaagcagggcataaaaatttaggaaattcacaacctgagcatgtggtaaaataggaaagatcatttttagaatgtatatagaaccacgtagtgaagccaccacttgctagggagatttgtttgaccaaaagggaggaagctggtaatacccaagacaatggggagaaaagccttgaaggcatttcagaaatctctaaggcttccccttccatcacaggcccagaggcytaggaggcaagaatggtttgtgggggaggtctctgctaccctgcatagcctcaagacactgctcagtgtatacccactgctcctgctcaagctgtggctcaaatggccccaggtgt

SEQ ID NO: 604938 - DNA, 592 bp, Homo sapiens
aagctgatgggaggtgtttgagtcatgcaagaagatacttcatgaatggattcatgctgttttggtggtagtgagtgagttcttgctctgaattcaagcaaaatctggttgtttaaagagtgtggtatgcccctctgtctcttgctcctttctcaccgtgatatatgctggctccccttaaacctccaacatgattttaagcttcctgatgtcctcatcagaagcagatgtcagcattatgcttcatatatagcctgcagaaccatgagccaaataaacctcttttctttataaattaccaagccttaggtattattttatagcaatgcaaatgtaccaacacaagaagaggctagatagtatccaaaataacctctatcrataaaatgctatgactctcataaatttttttaagtttttacacacctactagtgaaaacttttgataatagtaatcatcactatttgcattatacttattggtttacactacattttctcatactttctttttattcttacaatagtatttcaagatgggtattattatattcccagttttcagattgaaaaagttaagattcagaaagtt

SEQ ID NO: 604939 - DNA, 541 bp, Homo sapiens
tatccaaaataacctctatcgataaaatgctatgactctcataaatttttttaagtttttacacacctactagtgaaaacttttgataatagtaatcatcactatttgcattatacttattggtttacactacattttctcatactttctttttattcttacaatagtatttcaagatgggtattattatattcccagttttcagattgaaaaagttaagattcagaaagtttaaatgaattattctaagttaaggagttattgcaagcaaggttgcatctgtattcttgtttacaccataaatccaacaactttggcataattcagggtggttatattaccacaatgcatttaagattggtagacaccaaaggtttatgcaaggaaagtttgycaatgtttttttgagattaaaaaaatgtgaaaaacgaggttcctgtattcacaaggcctacagtttttgggtttttctctcttcatctttagaataaggttattctgctagatatttctaaatcatttctagtttaatagtctaaac

SEQ ID NO: 604940 - DNA, 539 bp, Homo sapiens
tatttctaaatcatttctagtttaatagtctaaactaagactatttaagaatgtatatagaacgaagttgtggagccaccacttgctagggagatttgtttgaccaaaagggaggaagctggtaacatccaagacaatggggagaaaagccttgaaggcatttcagaaatctctgaggcttccccttccatcacaggcccacaggcctaggagacaacaatggtttgtggggaaggtctccgctaccctgaatagcctcaagacactgcttctcttagagtacacttctcttccaaacatgaatctgacctgcaaattactcatctgttttcttctttatgaagtatattcattctagaagactacatgtatagcaagccatatttcttgcttcacagaatttgaatgaaaggactacgggatcaccaaataatcaaagagagacccccctagagaaggacttacccattgtttagtcaaataacctcctgtggctaaaawccctcatttgttttatttccactcttttagttctgtag

SEQ ID NO: 604941 - DNA, 454 bp, Homo sapiens
gaaattagtgaaggtcgggttttaaatcacatactcaactcgatttatcagtagaactctttagaacrggcagagttacagtttctttagcttcttcattttttactttcaactccattgtctaccccttagtaatttcatttcactttagtactgccaatgagagtgccagttattaaagacaagctcatatcattccattcctttttctgtttgttatctcctggcaagtttattcattcagcatatagaagtgagtgcctactgcaggctaggtaatagaaatataaataggtatattatccttcatcaaagactacagacaaataagttagtcagcatccaaacagatataaactagtagtgttgagaggatatttaagtgtgtgacgtgatgactctggagagataacataccaaactgtggcatggtgggagaaaatttgaagataag

SEQ ID NO: 604942 - DNA, 579 bp, Homo sapiens
aatcctctaaaaataaatccatctaaaagaagaaatgatgttggaagggtgtgatcattatgggatggagatttactgtcctctcctttgagacatggctcctctgtgaaatactgactcactggtctctacaaggaaggtattatctttatattgctaaatcacatatgcattttacaaaatgattcacaaatgcatcaccagcaggtgcacacttcaaagcaaaacatttctgtgaatccctggcaaaaataagggtgtagcctaggttttgtaagacagcagtggcagggaagaggatgagtgatacagggaaaaccagccagaagtaaagtacttacagaagatcttatcttcccagatgaaattatccaggctttgggtgcacagaatatacaatgcagaggtgaacagagaaatcaaggattgrgcaagacaagacaaaacaaatgaaacaccacaaacaatacaaattaatcaaaagatgagacctgctgcaatgcttcaggatcagcaatagccaatagtcttttctagaaaatcctgaacccgaaagtggttcccttttaagttttgcaa

SEQ ID NO: 604943 - DNA, 454 bp, Homo sapiens
gaaattagtgaaggtcgggttttaaatcacatactcaactcgatttatcagtagaactctttagaacaggcagagttacagtttctttagcttcttcattttttactttcaactccattgtctaccccttagtaatttcatttcactttagtactgccaatgagagtgccagttattaaagacaagctcatatcattccattcctttttctgtttgttatctcctggmaagtttattcattcagcatatagaagtgagtgcctactgcaggctaggtaatagaaatataaataggtatattatccttcatcaaagactacagacaaataagttagtcagcatccaaacagatataaactagtagtgttgagaggatatttaagtgtgtgacgtgatgactctggagagataacataccaaactgtggcatggtgggagaaaatttgaagataag

SEQ ID NO: 604944 - DNA, 454 bp, Homo sapiens
gaaattagtgaaggtcgggttttaaatcacatactcaactcgatttatcagtagaactctttagaacaggcagagttacagtttctttagcttcttcattttttactttcaactccattgtctaccccttagtaatttcatttcactttagtactgccaatgagagtgccagttattaaagacaagctcatatcattccattcctttttctgtttgttatctcctggcaagtttattcattcagcrtatagaagtgagtgcctactgcaggctaggtaatagaaatataaataggtatattatccttcatcaaagactacagacaaataagttagtcagcatccaaacagatataaactagtagtgttgagaggatatttaagtgtgtgacgtgatgactctggagagataacataccaaactgtggcatggtgggagaaaatttgaagataag

SEQ ID NO: 604945 - DNA, 604 bp, Homo sapiens
gcgtctctgcatcccagagcaaatcctctgagatcctcagtctctcctgctgaaacttcatcttccactcctgcctttgggtcatttccaaacrgcagggcaccagacacgctctaccttatgtggagccatacctaagtacaagaggatggagtttcactgtcgactcaaagcgtttttacctctgagactttacagtaagtcaggaccttgcagtaatatgatcgtttgttgttttagaatgttaatcactccattgagttatctcattattttaaaaataaaataaaaaccacattaagataaattagcccatccttcttatgccatgtcaagcgttaaaaagaaattatttcataatttaatactttgctaattctcttgtaacagttcatggttttgtgtttaggctgaagtcaggaaaaacatttttctgaaatcacttcaattctgattgtgatactgactctcctttgtgaacgggtgtaaatccctcacagtctgtgctccatgtctgagttacttgagtattaccattattatagttgcatatatggaggtggaagccttcagtgtttggaaatcaaacttccattgtcatcat

SEQ ID NO: 604946 - DNA, 558 bp, Homo sapiens
aagaacaaaaaactaatttagaacaagaaagagactaaactataagaaaaaaatagttggtcttcagctaagagacccttctcaagtcagtttttagaaagtactattccttttcaaaaacagaattaggactttgtgttatagcacatttttatcaatgtatatatgatactcataacacttyagatttacggtaggcattaaagataatcgagtataaacttttaaggaggtattgatagcaaagtcaggactgaaactcctctatcctcctagcccagtggtctttcaactctatcattctcaaattggttttgttcatatgaataaaaggaaaactgccaattatcactcccggatatgtgaaaggaccagcattcgttcatgctctttgatgttaaaatccccaagcttctgattcctctatttgagaaacaactcaactgctctaatcaaagcttagttgtatgaaacacttaggccaaatgatttagtacacaggcatgaagaggttaaatgaagtattcaagtattaagcctttaaaattttctaacttt

SEQ ID NO: 604947 - DNA, 611 bp, Homo sapiens
tataaatgtatatacacatatgtatgtacatgatattttaaaactctccagcaaggtaaggacatayctgaagatttcaaatcactgaaaatttctaagcaatgagaatttttacattcttaaggcccatttaggaccttcttaatgctaaaaagtaagtaacttcatgtaacaaagagttatactgttgaagaattcagtatctattacaccgcttatgatctcttttattatttttagtaaggaatttttctgatgggcatgttaagtaaaagtatattgcctgaagtattagcattattgctttgcgtctgttttcttctctgtgtggatagacagacacaaacttagttgaaattacaacttctaattatattcacattgagaagactacattaacagttaatttttaaacaacttccttggtgtgctagtaataagatatatttacatgcacacacaaatatgtatatagccatagcatattcattaacagagaaactattttgttcttgataaaactgtattttatctttcaggtgctacaaacaagttccaaactttattggacaggggaagaagtagaagaaacaagaagtattattaaaatg

SEQ ID NO: 604948 - DNA, 611 bp, Homo sapiens
tataaatgtatatacacatatgtatgtacatgatattttaaaactctccagcaaggtaaggacatatctgaagatttcaaatcactgaaaatttctaarcaatgagaatttttacattcttaaggcccatttaggaccttcttaatgctaaaaagtaagtaacttcatgtaacaaagagttatactgttgaagaattcagtatctattacaccgcttatgatctcttttattatttttagtaaggaatttttctgatgggcatgttaagtaaaagtatattgcctgaagtattagcattattgctttgcgtctgttttcttctctgtgtggatagacagacacaaacttagttgaaattacaacttctaattatattcacattgagaagactacattaacagttaatttttaaacaacttccttggtgtgctagtaataagatatatttacatgcacacacaaatatgtatatagccatagcatattcattaacagagaaactattttgttcttgataaaactgtattttatctttcaggtgctacaaacaagttccaaactttattggacaggggaagaagtagaagaaacaagaagtattattaaaatg

SEQ ID NO: 604949 - DNA, 611 bp, Homo sapiens
tataaatgtatatacacatatgtatgtacatgatattttaaaactctccagcaaggtaaggacatatctgaagatttcaaatcactgaaaatttctaagcaatgagaatttttacattcttaaggcccatttaggaccttcttaatgctaaaaagtaagtaacttcatgtaacaaagagttatactgttgaagaattcagtatctattacaccgcttatgatctcttttattatttttagtaaggaatttttctgatgggcatgttaagtaaaagtatrttgcctgaagtattagcattattgctttgcgtctgttttcttctctgtgtggatagacagacacaaacttagttgaaattacaacttctaattatattcacattgagaagactacattaacagttaatttttaaacaacttccttggtgtgctagtaataagatatatttacatgcacacacaaatatgtatatagccatagcatattcattaacagagaaactattttgttcttgataaaactgtattttatctttcaggtgctacaaacaagttccaaactttattggacaggggaagaagtagaagaaacaagaagtattattaaaatg

SEQ ID NO: 604950 - DNA, 593 bp, Homo sapiens
ttaagatggatcttttgatattgtaatgatgaaataggtctctcgaggaaagatgaaaaggtaaagccaaggcttgtttaaaagatcaaaaagagagatgctgtgaatgctctcagcaaatatgatgctctctttatctggatgcattcctgttctaaagataaatggatatttctcaataaaaatatagaatsttaacatttttgaagtgttgaggaaaaacaaagtgacaacaaagtaaagatatctgaagataacaacagttccttgatttcttaaacagtgcaaagaagttaaagtagaaggaagttaggcctttgcacatttaaatttcatcagggcatcttataaaactttggcaattttattagatcttggattcctcacctaaaaatattaatgtatgtactaaactaactttaagttctcttcatgctctttattataaaaatatagtacattaacttggagtacatcttagggacatcttgaaaaccatattttaaaaaataatctctaatggagaaagaaaggtgtctctctctgacaatacaggtgaaatttgtaagctactttaggcaagttccttcctc

SEQ ID NO: 604951 - DNA, 593 bp, Homo sapiens
ttaagatggatcttttgatattgtaatgatgaaataggtctctcgaggaaagatgaaaaggtaaagccaaggcttgtttaaaagatcaaaaagagagatgctgtgaatgctctcagcaaatatgatgctctctttatctggatgcattcctgttctaaagataaatggatatttctcaataaaaatatagaatcttaacatttttgaagtgttgaggaaaaacaaagtgacaacaaagtaaagatatctgaagataacaacagttccttgatttcttaaacagtgcaaagaagttaaagtagaaggaagttaggcctttgcacatttaaatttcatcagggcatcttataaaactttggcaattttattagatcttrgattcctcacctaaaaatattaatgtatgtactaaactaactttaagttctcttcatgctctttattataaaaatatagtacattaacttggagtacatcttagggacatcttgaaaaccatattttaaaaaataatctctaatggagaaagaaaggtgtctctctctgacaatacaggtgaaatttgtaagctactttaggcaagttccttcctc

SEQ ID NO: 604952 - DNA, 487 bp, Homo sapiens
gttaacatatttgtagtcaaactccaaatctatttcctgttttgggccgcagctaaaagctctgctcagttctgttaaacctccagcttttggtgtctgccaggccttgggctccccctgaggggtgcacaattaggtttctagtttatttgaagatttggggttkctctttctgtgtctctctcttttccattgtcttagtccatttgtgttgctataaaggaatacctgaggctggacaatttataaagaaaacagggttatttggctcttggctccacaggctataccagaaccctgacatcactatcaccttggtgagggcttcaggctgcttccactcttggtggaagaggaacggggttgggggggcgggggtcagtgtgtacagagatcccatggttagaggggaaggaagggggtggtgccagactctttttaataagcagttcctgtgggaactaatacagtgagaacagcaccaagc

SEQ ID NO: 604953 - DNA, 553 bp, Homo sapiens
atggttggcaacaagtcattaacaggtaggatgcaaatagagaagtttagaaaattgaaaagctgtgaggacgttgccttgtggtatatcctaaacaacagcattgggagtgttttcagagttcttatgtgaccaccgaagtcctgccctaaccaacactaatgctgctgcctccagagtagcaataatgggtgtgatgtctttgactgcacattttttgttgtgatccattcaaatttctactctccccatatgactttgtaatccattattcatcataacaacctggcagacgatgactgtatgaactctagaagctacatttaattatgttctactagaaagctgggatatttcatatcgtcataacaataactcaattcrtatgtgttctttggggaggccagccctaaacaaaagtgccatgttagctttcttaccataatgccatgataccacctttaactgaaattctcattattcaagtcacaaaagcattaggctgcaaagctgggtcattgtcttctgaagctgccattgtaatacctgcaca

SEQ ID NO: 604954 - DNA, 596 bp, Homo sapiens
atttgtgcaccttctccaattcgcttgcctgcctctttcctgactcctttacattttgttcctcctcactcccagagcctggtgcttgaactttccagtaaatttaatctttttctcaagctccatttgctagaggccccaggtcaacacaatttctgcctcaggatggggctttggagttggattaattagctcttggaaaacaacaacaataaaaatctgcattaagtgacatcataataattatttaaatggattgtgatggtgaggaattatttatgacaagagtagagtccttataaatatgagagtaaaagagccagagaagttgctatccaaattattacctgaccagaaagctagaggacagtagattagcagccttggaagttttttgatgacaaagttaggactttcagggtcgaagattgggacactgagawctgggatggggcaacgggtggataaactggaaaatagaaaattttcaaactttagcccctggctgttgtcataggacataattcagcgcccccttccccactccgggaggggaaggaatgagaccttaaggaggtagatgtcttacaataaga

SEQ ID NO: 604955 - DNA, 618 bp, Homo sapiens
caggccagtctcgaactcctgacctcaagtgacccacacccccttgacctcccaaattgctaggattacaggcgtgaactccatgctcacactgatattcatcaatttatgtatttttcctcatgcatggactttctacattttataacatttaaatcataaasaacattaaatggactataaaactgaaaacttctatagtaaattgaaatcaaaatatacagtaatttttcttctttttaacttagagaaaatagagagtatataaaatagaaagatattgataaccatagttctgtttcccttatattcctcttcctgtaataagattttgtaagtcgtacaatcaattaattgacctgaatgtattttttcctctggtttctacaaaaataaaatcctaaaattttattttatgcacacaacttttaaatctaatttgtaacgagttggaacttcagataagcagatttagccaaaaaaagtgcatccattcaggccaacaagtgctacagcccatttgtagcaccaaaatgcatctatctaaatcccatccggtccagtatcctgcctagtactctcagtcattctcctaattatctcctgaattttcagttg

SEQ ID NO: 604956 - DNA, 570 bp, Homo sapiens
ttattacagtttaacattcctgaattttggaaacatgacaagtacattttaatacatacataaaaaagatgacaataattcaacagcatgtttggtcgagaaaattttaatattgtcaatcatatagaataatatttagtgtaaagttcagctgatgcctaatttgtgttgtaacatataaagcttttaaatttgtttaggataagttgtgtgctattataaatgacaatattttataatggtaaaatattacataaaatttaagaagatggtatgccttcatcttccatacatttagagattattaaggttagtgctaaaattaaacacatagtgactatgaattacttattgatyagaatattttgcaagtataaacttaaggctctcctagaaaatgaatattcaaagattgctgggcttagttcaagaaataaaacagcaacatattcttatgaaaagtttacatttttttctatttcataaacttagaaagttacttaaaaatatgagaaatactgttccatttaggttggtgcaaaagtaattacagttttgccattattgtca

SEQ ID NO: 604957 - DNA, 603 bp, Homo sapiens
aaaatcctaaaattttattttatgcacacaacttttaaatctaatttgtaacgagttggaacttcagataagcagatttagccaaaaaaagtgcatccattcaggccaacaagtgctacagcccatttgtagcaccaaaatgcatctatctaaatcccatccggtccagtatcctgcctagtactctcagtcattctcctaattatctcctgaattttcagttgaactcagcgtttctcatattgaggtctggaaactgactacattggaatcacctggagtatttattcacagtaaccctgggcacatccaaacctactgattcagtatttccagggatgggtcctgaaatctgcatgttctacatgcttctagatgaatgagaacaattgatctaatccatttcagcccaccttctcacttggttgatctaatactagactagattattcctgttgaaactagtatttcattattgccatcaaatcccattgttttccacctccrccctattcccataccagctcttaaacatggcttttctcaaatcatctgatatatttcaatcacttttaccacagaggcttcactttttcctacttt

SEQ ID NO: 604958 - DNA, 617 bp, Homo sapiens
taatcatatgtaatgtaaggaaaggattacatctgttttgttcttagctatatccccttagcttagcagaaggcacagcttacagtaagcactcactgaacaattgttgaatgcatgaatatatttaaagaagatattatactagaaactgagagatgggaggctaaaatcaaaattattacttcaaggaagttttcagtagggggtttctggtaagatatggaaatgtggaatagaaataactataatacaaagcagcttttttcaagtgcaatacagtattcacaaatgcagtgttaccatttcaaaggaagagagtccattaccaaaacaaggtaagaggattcctcatactaactctgttatcatgatttagctttgaaaataggcaatatggtgttcttgggtgctttttcatacacccaagatcaagtattcttrgtcacctaggacatgatagcattattaaaatttctacttatggaaaagattaattaatctagaacaatctatcttaatagtaaaatcaacgtgttaggagagatgtgcgtggggatacattcactaaaaattaagtagttttgaagatgtgatggctgccctatatgatgtcaata

SEQ ID NO: 604959 - DNA, 556 bp, Homo sapiens
tcagtcatattcagaacacattgaaaaacacaaccaaatcctgtttccattatataattttggtaaaaagaaaagattgggactaatgtacaagtgacatatacagtagtagtgcaaaggtgagtaaaaataattttcagttctagtgggacatagacacctctattaagatatcagaaagatgttctcctttaacgagactcaacttcccctcaaaaatgtattcctaatgtttttttttattctatagctgttgtcttacaactgaaataataatagtctaattcatgtctctaaattaattagataggaaaactgatttcctgtaatatttgaaaaattaaatgctaggtctgaatggaatttcaagttaatggctatcaacattgcaaaaggtgaagtgagaaattagtaccaaacacagcrtgttctaactcataagtgggagttgaacaataagaacacatggacacagggaggggaacatcacacaccagggcctgtcgggggtgagggactaggggagggataacattaggagaaatacctaatgtag

SEQ ID NO: 604960 - DNA, 547 bp, Homo sapiens
aaaaaatcacattaccatttaaaatgttttttctgtcagatttgattagtttccttcaagtgtacttttataatatacatttatgaaaaggagagaaactagtagataccttatagttctattacctaaaaccctcaaaagaattcaatttcatccaaatgcaaaattcacaccatatttttccgaattaagtttttctaagttaaagcaaactattaactaaaacagtagttagctttccctgaggagatatttcctttcttattttttctccatattttggaagacaagactttgsagaaatgtttttaatccacttaaaaataaaggaggtatgctttagccatttttcattaaacaccatgaaaatgtgttaattccatctaattgtggataagctaaaaaaaaaaagcattttaacatgtgtgaactatgacctcaggagggcttaattctctttgttattacagtttttctaagattgttgctcacatggctctcactatttttccaacaacaacaaaaaaaatgcattagtgctggtttg

SEQ ID NO: 604961 - DNA, 575 bp, Homo sapiens
aaagggttcttgttccgaaccagggccagagttttcctaacctctggggcttacccagcataggccgaggcacatgaaaacaggtatacaagtgcccagaaccttcagtaaatagaaactcttgtctcaagcttgtatagtttcctcattactctgatttccccctacatcccccatctccaattttttcctcaacttctgttctttagagcagtcctggattcaaatcctgattctggttatttactagctgtatgattttgaacagtctcattaacttctctcagcctcagtttcctcatctgtaaaatggacccagcaactccactcctaaatatgttaatctcagaaacattttttatgtgarcaccagaaaacatgtacaagaatgctcttagcagaactgttagcaatagcaaaagactggagaccatacaaagggctctcatgagaagaatgagaaggataaactgtggtacatgagcacagtggaatatcataaagctgtgaaatgaatgaactctagggacactatagtaaccatatagatgaatcttagcaaaataatattggaa

SEQ ID NO: 604962 - DNA, 524 bp, Homo sapiens
gacccagtctctagaaaaaaaaaaaaagaaaaaaaracaggcatggtggcatgtgcctgtagtcccagctactcgggaggctgaagcacgtggatcacttgagcctagggaggtcgaggctgcaatgagctgtgattgagccactgcactccagctgggacacaaaaagtgagactctgtctcaagaaaaaaaaattaattaaaaaaaagaaaatgttttgtgggagttttttctacgcaaaatattctgccagagattttgactagcaaatgtatatgttctactatatcctcaacatctagaagaggaccttttatatagctagccattatagatagataatagatagtaactgaataaaaatgaatacatgagtaagtgaatgccatggcctacaagaaaattatagtcaagtcaagaagttggaaaacatacctaaaaagtaaagaccggtaaaaagtagtacatataaatgcttgatattgtactttagacctttagggtttcagaagagaaggaagtt

SEQ ID NO: 604963 - DNA, 524 bp, Homo sapiens
gacccagtctctagaaaaaaaaaaaaagaaaaaaaamcaggcatggtggcatgtgcctgtagtcccagctactcgggaggctgaagcacgtggatcacttgagcctagggaggtcgaggctgcaatgagctgtgattgagccactgcactccagctgggacacaaaaagtgagactctgtctcaagaaaaaaaaattaattaaaaaaaagaaaatgttttgtgggagttttttctacgcaaaatattctgccagagattttgactagcaaatgtatatgttctactatatcctcaacatctagaagaggaccttttatatagctagccattatagatagataatagatagtaactgaataaaaatgaatacatgagtaagtgaatgccatggcctacaagaaaattatagtcaagtcaagaagttggaaaacatacctaaaaagtaaagaccggtaaaaagtagtacatataaatgcttgatattgtactttagacctttagggtttcagaagagaaggaagtt

SEQ ID NO: 604964 - DNA, 524 bp, Homo sapiens
gacccagtctctagaaaaaaaaaaaaagaaaaaaaaacaggcatggtggcatgtgcctgtagtcccagctactcgggaggctgaagcacgtggatcacttgagcctagggaggtcgaggctgcaatgagctgtgaytgagccactgcactccagctgggacacaaaaagtgagactctgtctcaagaaaaaaaaattaattaaaaaaaagaaaatgttttgtgggagttttttctacgcaaaatattctgccagagattttgactagcaaatgtatatgttctactatatcctcaacatctagaagaggaccttttatatagctagccattatagatagataatagatagtaactgaataaaaatgaatacatgagtaagtgaatgccatggcctacaagaaaattatagtcaagtcaagaagttggaaaacatacctaaaaagtaaagaccggtaaaaagtagtacatataaatgcttgatattgtactttagacctttagggtttcagaagagaaggaagtt

SEQ ID NO: 604965 - DNA, 554 bp, Homo sapiens
caaaatggatcaaggagaggaaagaaccagtgagcttgaagacagtctattttaaaatacacagagaagaaaaaagaagaaaaaatataaaaatcaacaaaggttgcctacaagatatagaaagtgatctcaaaagagaaaatcaaattactggtgtttgagaggaagtcgagcaagagcaagggatagaagatttatttaaaaaaaaataataattgaaaactttccaaaacttgagaaagagataagtatccagrtacaggaaggtcagagaacaccaaacagatttgacccaaataagactaccccaaggactataataatcaaacacccaaaagtcaaggacagagagaaaaatccaaaaaaaaaaacagaaatagaaaagaggctaatagcatataaaggacctccagttcatctagtaacagacttctcaatagaaatcatacagaacagcagggagttgagcaacattttcaaagtgctgaaagaaaaacactgccatgcaagaatattgtatccagaaaagttatctttcaaatataaaggagacg

SEQ ID NO: 604966 - DNA, 554 bp, Homo sapiens
caaaatggatcaaggagaggaaagaaccagtgagcttgaagacagtctattttaaaatacacagagaagaaaaaagaagaaaaaatataaaaatcaacaaaggttgcctacaagatatagaaagtgatctcaaaagagaaaatcaaattactggtgtttgagaggaagtcgagcaagagcaagggatagaagatttatttaaaaaaaaataataattgaaaactttccaaaacttgagaaagagataagtatccaggtacaggaaggtcagagaacaccaaacagatttgacccaaataagactaccccaaggactataataatcaaacacccaaaagtcaaggacagagagaaaaatccaaaaaaaaaaacagaaatagaaaagaggctaatagcatataaaggacctccagttcatctagtaacagacttctcaatagaaatcatacagamcagcagggagttgagcaacattttcaaagtgctgaaagaaaaacactgccatgcaagaatattgtatccagaaaagttatctttcaaatataaaggagacg

SEQ ID NO: 604967 - DNA, 565 bp, Homo sapiens
cgagtgacatggcctctctgtgcctcagctttctcatctataaaataagataacaactaatagctamtttgtggtgttacagtgataattagatgaatttacaagagtaaagtgcttggggcagcattaggtaaggtttttctaagtattatcgatgcttccaatgtctcctcagagctgcatattttttccatttgcaacaactgttactttgatattttaaccagaatgtttgaagaaataaaacacataatgtctaagacttatctatttatcttcttcaaaaatttctactttcccttaattagtagcatcaccatttatctaatcttctaagcaagaaatttcagtaactctttactcttcactttcttcaagatctcttaatagatgcagaaaggcatttgacaaaattcaacactttttcataataaaaaatctcaacaaactacaaacagggtgagactatctcaaaataatgaaggccatatatgaaaaactcacagttaacattagacttaatagtgaaaaactggaagtctttccttaagatcagaaacaaagc

SEQ ID NO: 604968 - DNA, 565 bp, Homo sapiens
cgagtgacatggcctctctgtgcctcagctttctcatctataaaataagataacaactaatagctaatttgtggtgttacagtgataattagatgaatttacaagagtaaagtgcttggggcagcattaggtaaggtttttctaagtattatcgatgcttccaatgtctcctcagagctgcatattttttccatttgcaacaactgttactttgatattttaaccagaatgtttgaagaaataaaacacatwatgtctaagacttatctatttatcttcttcaaaaatttctactttcccttaattagtagcatcaccatttatctaatcttctaagcaagaaatttcagtaactctttactcttcactttcttcaagatctcttaatagatgcagaaaggcatttgacaaaattcaacactttttcataataaaaaatctcaacaaactacaaacagggtgagactatctcaaaataatgaaggccatatatgaaaaactcacagttaacattagacttaatagtgaaaaactggaagtctttccttaagatcagaaacaaagc

SEQ ID NO: 604969 - DNA, 629 bp, Homo sapiens
atcttagaactaagtaatgctttatttcctcaaggtgattggaaaacacagttctaccagactaaagggagatgtgtattgtaactcaacaggaagacatagctttacttgtttttctttttttgaagcagaattctaagtatttatttttaaattcaccaatttttacataattagaatcttgaggcttccctacctgtagtaaattagatcctggatacctatgtgaatgtttttcttgtctagctaagaaaaggcctaaaaatgaataagaatcattgttgcattctcaccgtaatgattaagtaggagaatctcctataatgcttagtagatagaggcaaacaagtctaatagagtgcaaaaaatctccttgttttcaggggcctgtggagttttgtcatacctccaagatggaatgtttaatgttgctagacagatgtccacaagtgtttagaaagagctgctattcagtgtttgycagtatgtgatttagagctatagatgatttattgagaagtcaggatcctgggacatactttgattattttaaggatggaggtgggagtgtaatctacattttggaaaaagtttcccaggtgattgttatgcatctgaaagtttgaagc

SEQ ID NO: 604970 - DNA, 520 bp, Homo sapiens
attttcaaaattgcttagttttaattttaaatgtatgcattatgtaaaataacaaatagaagtgtgatctctatttttgcaagtgattataaagtaaaagatcttgaaataatgttttcatttctgtgaggtctttgtgtgaatcaaacttacatgattaaatgaagaattattttaatttcagattgagaaggtattgatttgagtattattagtaattaatctccttgtctaggtttcttcacatacaaatttccaagtattgttcaaaggaagtctgtaagatttaggccattgttttacaaaatacaaatatttggcttggtgagaatgtcttcctatagataactaagaaacttttagacttgtggatgttctttaaattactgtctaatgaatgcacagtaaaatcaaagatcaaccaagtatagcaaattgcagcagcatattttagaaaggatgttatataagaagcaaggatacctgwatcctagtcttggcttcaatagttactagctcc

SEQ ID NO: 604971 - DNA, 563 bp, Homo sapiens
aataagttctggttcatgaagaacttacctcaagcagggcaaacatacatttagacacatcagtatttctctaaatgaccatattaaacatatctataatagtacaataagtgctaaaataccaagcagaagcaaaatgttgtagagtctagtgtagatagtatcactatagacaaaaagttatcaaatgcaaaaagtaagtttagagatacctttcttgtgcagggcatggaggacactaagaattctttggcttaaggctctaatttaacaaaaaagtgaaaggcagttaaactgttaacataagttgcagataagaaaaattgataatttgagactgggttggataggcagatcaaagtagaaagctggtagcaaagaagaatttgttcctaagagaaactgttctaggtaaaaagaaaggaataaagaaaacaagacgtgctaaagatgttttaaaactactattaaatagccagaactattagatcaaagattcactaaatatgaagatgyaaatcctaaaaatgaaaagtgacagggagggaaatgggatgagttag

SEQ ID NO: 604972 - DNA, 615 bp, Homo sapiens
ctgaagatacttatctaagctattcaggataaatgaaaacatttagacttacctatgaaaaatgaacaagagaagcatgccaaataccttaacataatgtcaccaatcttagtataaaccaaatttactctaaatacattttctatttgatcagtcaacaaaaaattatatattctragagttctttaacaaaagcattttaattgatttctcaacatctattcattgccaatttaaataaatcaatcacaatagtcttgccaccaacccctttacctctaccccaccaatgataatttcaggagtggtcaggtgcatgccaacttaggctaccaggatctaaggaaaggctttctaggggatttgaaaaaagaaactttctggctctaaatagagacatgtaaagccagtgtctgtcacccccagagtcacaaacaaaaaagcagagttccaacttccactgacagtcttataaccgcaagaaatctaagccctccaatgacaccattactgtgagtggcagaaatgagaagcagaaagcacctggatgtttgacgacttcttgtatgaactatatcgatgtttgacgacttcttgtatgaactatatcaagtt

SEQ ID NO: 604973 - DNA, 615 bp, Homo sapiens
ctgaagatacttatctaagctattcaggataaatgaaaacatttagacttacctatgaaaaatgaacaagagaagcatgccaaataccttaacataatgtcaccaatcttagtataaaccaaatttactctaaatacattttctatttgatcagtcaacaaaaaattatatattctgaragttctttaacaaaagcattttaattgatttctcaacatctattcattgccaatttaaataaatcaatcacaatagtcttgccaccaacccctttacctctaccccaccaatgataatttcaggagtggtcaggtgcatgccaacttaggctaccaggatctaaggaaaggctttctaggggatttgaaaaaagaaactttctggctctaaatagagacatgtaaagccagtgtctgtcacccccagagtcacaaacaaaaaagcagagttccaacttccactgacagtcttataaccgcaagaaatctaagccctccaatgacaccattactgtgagtggcagaaatgagaagcagaaagcacctggatgtttgacgacttcttgtatgaactatatcgatgtttgacgacttcttgtatgaactatatcaagtt

SEQ ID NO: 604974 - DNA, 495 bp, Homo sapiens
actcatatgatcctgtgaatgagtgttttcttaaattttgcatcctgagcatctctcttccctggttctgaccttattgtgaggttggctttttgtgtcgtttttggcatgtccccctcaattatgtgagcacaagatgttctaggctcatcttgtacttgttctaaccttaggatcagttgcttgtggaagagtcctggtttctgttagcagggaatggaactgagaagtcaaaatctaggcacttactgtgttccttgatttgggggcattggtgatgatgttcataggccctcttagtgagcagagcgaaagaatatgggagggggrtggttaccctcatgctgttcttgtgatagcgagttctcatgacatctgatggttttataaggctttttctcccttttgcttggtgcttttctcccctgccaccatgtgaaggaagggtgtgtttgcttccccttctgccatgattgtaaatttactgaggcctcc

SEQ ID NO: 604975 - DNA, 607 bp, Homo sapiens
cctccctttgtcttgtgaggttttaactactgtaattgcttgtagtgtgaagtagtgttttttcatgtatctatttttattctgtgtctctctgcttttctgctttttttgttttgttgttaactcacttgattcctgttgggtatttttcctgtgaatagtattgcctcgggaaagcacacactctcacacacacacatacacacacatactaataatatgaaggctaaatagggtagaatttattctttaaaaaaaactaatggtaaaatcttcagcagatgactttctaatccatactgtatttaattggctgtattgaaccatactacaaattaagtcttctctgtaatttattctgtcagacagtaaccctccaaacaatttgatacttcatttaaacactggtaaatggctcatggaaatacaaagaaaaaaagatttaatgatgatcagataagaaattctctgttcacagratgaatcctgtgtgaaatgttatgaattaacctgaatcatttattcattgaacatgtattgagcatccaccatatgtagggcttatcttaaggtgacttggtctttctttcttttcttcctccccatt

SEQ ID NO: 604976 - DNA, 427 bp, Homo sapiens
ggctctgtgtccccacccaaatctcatgttgaaatataattctcaatgctggaggttaggcttggtgggaggtgatttgatcatgggggcagtttctcatggtttatcatcatccctccttggtactgcatagtgacagatttctcacaagatttggttgtttaaaggtgtgtagcccctttctcccacttcttcctgcttctggcatgtgaagtgccatctccmccttcatcttccaccatgactttaagtttcctgaggcctcccaagaagctgagcagatgcctcatgctttttgtacagcctccagaaccatgagccaattaagccccttatctttataaattacccaatctctggtatttcttcatagcaatgtaagaacgaactaataatacaaagaaaggatttattgccagcaggtctt

SEQ ID NO: 604977 - DNA, 561 bp, Homo sapiens
tcctccatgaggtagaactcgtcgcccgtggccagctgccgcttgcacacgacgcaggcaaagcagtgcaggtggtacacgaagtcctgggcgcggcgcaccacctgcgtgggcgggatgcccagctggcacgcggcgcacttggtcccgaagcgcctgcgggacgcacagggccgggctcagcgcggaagcgcgaggctcatttcgccccgagcgggttggagagmggcaagcggctgcctgggaaggcggccccggaggaaggctctgtccggccctgcagggtggtcgccagcctggccgccggggcagagctgcccactcccactgagaagggaacctcaatctcagaaagacctcggggagcccagccgccattgcctgcaggacccatgctggatctgggaaggtgaatccggagggagaggacccatctggggccagtccctcacaccccacagctggagccatgaaggccactgggccagagccgctgggtgccagcattaggaactaaaacatcaccaatttcggaggaactaagtccagtagaatcctaca

SEQ ID NO: 604978 - DNA, 446 bp, Homo sapiens
aggcaagaagagattgttacttgccccaattctcaaaacccagtaagcagcagagctggatgtgaagctgcctggctgggtctccacctgcaaggagggtctgctgagcatgggccatgggcgggggaaccagttgaacagcggtcagggtagactcagatgaagtggcattcggatggagacctggaaggcaaataggaacgagcccggtaaagggagcgggggtcacacagtccagacatgactggagcaagactcgcctgtggtcgctggggtgtggcgcgatgaggctggggcgggcgcagtggagctggggggcctcgtggagaccagccttgctcccaagctggggtgtggcgcgatgaggctggggcgggcgcagtggagctggggggcctygtggagaccagccttgctcccaagccggggatggccatcggggcttc

SEQ ID NO: 604979 - DNA, 392 bp, Homo sapiens
tcaccatgttggccaggctggtctcgaactccggacctcaagtgatccgcccacctcggcctcccaaagtgctgggattacaggtgtgagccaccgtgcccagcctgggagtggggttagttstaagttggtgagaggcaagcacagctctcgagggacatcctgcccggaagacgtactcgtgggggcctcagctggcccttggcacagtcattcagaaagtgaatgtgaaggcttgctctgcacccagccccaggaacccgtggggcagcaacctgttcttttgtttgttcgtgttaggctcggagctcccagagagggtctagcatccttctacagaccgacccctggagacagcccccaccaggatacatccttgagaataagcccca

SEQ ID NO: 604980 - DNA, 505 bp, Homo sapiens
tccactaattcccttgatggtcggtttaggactttctgcctccatgattgctctcggtactggaatagcaggcatttcaacgtctgtcatgaccttctgtagcctgtctaatgacttctctgctagcatcacacacatatcacaaactttatcagtcctccaggcccaagttgactctttagctgcagttgtcctccaaaaccgccgaggccttgacttactcamtgctgaaaaaggaggactctgcatattcttaaatgaggagtgttgtttttacctaaatcaatctggcctggtgtatgacaacataaaaaaactcaaggatagagcccaaaaacttgccaaccaagcaagtaattacgctgaacccccttgggcactctctaattggatgtcctgggtcctcccaattcttagtcctttaatacccatttttttccttcttttattcggaccttgtatcttccatttagtttctcaattcatccaaaaccatatccaggcc

SEQ ID NO: 604981 - DNA, 477 bp, Homo sapiens
gccttggctactctaagtactttcctctctcatgtgcatattaaaattagcttgtaaatttttacagaaatcctgggattttgagagggactatatggattctacagatcaaactaggaagacttgctatttaacaatattaagtgtttagatccatgaacatggcrtaactttccatttatttggtctttaatttctcacagtaattttttgtagttttcagagtggaggtcctacattaccttttagcagacttgtttctaagtcatttatgtgtgttagttctagtaagcatggtacttttaaacatttcattttctacttgttttttgctattcaatagaaacatttgatttctgtacattgacctttattcgacacttttctaagtttactgagtaaactgaatagtttatatattattttgacatcaataaaaataatgacatctacaaataaagatggtttacttcttct

SEQ ID NO: 604982 - DNA, 483 bp, Homo sapiens
gaatagtttatatattattttgacatcaataaaaataatgacatctacaaataaagatggtttacttcttctttgacatacctaatacttatttattttattgctatattgctctggctagtactatacttccagtacaacattaaataaaagtggtgatagtgaatttccttgtcctgtacctgacctctgggaaaaagcacttgatattttactattagaggtcttttacaaaaacaatttattaggatgtgttctttcattmctagtttgctgagaattgttatgaatagttattatattttattaaatgcatttgttaaatctgtggtgataatttagaatgtttcatttttactatgttaatgtgttgaatcacatacattttgaaaagattacacactactggaataaaacctgcatggtcatgatataacattttatttatgtacacacacacacacacacacacacacacacaca

SEQ ID NO: 604983 - DNA, 455 bp, Homo sapiens
acggctacaccataggcaatgtgccaggggtaacctttatttatttttttttttagagatggagtctcacattgttgcccaggctggagtgcagtggctatgcacaggcataatgatagctcactacagcctggaactcctgggctcaagcaatcttcctgtctcagcctcccaagtagctgggactacagacaggtgccactacrcccagtagacttaatttttaagagaagttttatgttcatagaaaaattgagaagaaggtacagagttctaccatatctccccacccatgcacagtctcttccaatatcaacatccggcacccaaatggttcatttgctacagtagataaatctgcattgacacatcattttcattcaaagtacatagtttccattggggctcacacgtggtgtttaccttctctgggtttggacaaatgtatgatggca

SEQ ID NO: 604984 - DNA, 599 bp, Homo sapiens
ggtggcatgcacctgtaatcccagctactcaggaggcggaggcaggagaatcacttgaacccgggaggcggaggttgcagtgggctgacatcgagattgcgccattgctctccagcctgggcgacaagagtgaaactctgtcaaaaaaaaaaaaaaaagaaaaaaaagaaaagagtttgagaccagcctagccaacatgtttggcaaaaccccatctctactaaaaatacaaaaattagccgggtgtggtygtgggcacctgtaatcccagctacttgggaggctgagtcaggagaattgcttgaacccacgaggcggaggttgcagtgagctgagattgtgccagtgcactctagccagggcaatagagcgagactccttctcaaaaagaaaaaaaaaaaaagaaaaaacttgaaggagactaaaggtcagggttggaggggaaaataaaatgtggatgctgtcaattaattctggttgtagctatctactagtctttatagaataatataaataaccaatgcttacttagcatttgctgtttactaatatatttacatgtattaactcattttatcttcacagtaacactatgaagt

SEQ ID NO: 604985 - DNA, 599 bp, Homo sapiens
ggtggcatgcacctgtaatcccagctactcaggaggcggaggcaggagaatcacttgaacccgggaggcggaggttgcagtgggctgacatcgagattgcgccattgctctccagcctgggcgacaagagtgaaactctgtcaaaaaaaaaaaaaaaagaaaaaaaagaaaagagtttgagaccagcctagccaacatgtttggcaaaaccccatctctactaaaaatacaaaaattagccgggtgtggtcgtgggcacctgtaatcccagctacttgggaggctgagtcaggagaattgcttgaacccrcgaggcggaggttgcagtgagctgagattgtgccagtgcactctagccagggcaatagagcgagactccttctcaaaaagaaaaaaaaaaaaagaaaaaacttgaaggagactaaaggtcagggttggaggggaaaataaaatgtggatgctgtcaattaattctggttgtagctatctactagtctttatagaataatataaataaccaatgcttacttagcatttgctgtttactaatatatttacatgtattaactcattttatcttcacagtaacactatgaagt

SEQ ID NO: 604986 - DNA, 599 bp, Homo sapiens
ggtggcatgcacctgtaatcccagctactcaggaggcggaggcaggagaatcacttgaacccgggaggcggaggttgcagtgggctgacatcgagattgcgccattgctctccagcctgggcgacaagagtgaaactctgtcaaaaaaaaaaaaaaaagaaaaaaaagaaaagagtttgagaccagcctagccaacatgtttggcaaaaccccatctctactaaaaatacaaaaattagccgggtgtggtcgtgggcacctgtaatcccagctacttgggaggctgagtcaggagaattgcttgaacccacgaggcggaggttgcagtgagctgagattgkgccagtgcactctagccagggcaatagagcgagactccttctcaaaaagaaaaaaaaaaaaagaaaaaacttgaaggagactaaaggtcagggttggaggggaaaataaaatgtggatgctgtcaattaattctggttgtagctatctactagtctttatagaataatataaataaccaatgcttacttagcatttgctgtttactaatatatttacatgtattaactcattttatcttcacagtaacactatgaagt

SEQ ID NO: 604987 - DNA, 612 bp, Homo sapiens
acaacaacaatggaagcagggaggagtatggctggcactgaaaggattctctgcagtttctaggaaacatgcagtttcaaagaagtcaggtcaaatacatccagcctatctacactaggtaacagttgggcaattccctttgtcatctggcttagtcactgaatttcctttttggtttctatttcctacagagaactttcaaaaatccccctttctgttattccatattttgtattcaaattgtctcctttttcgagcagggaaaatggggtgggaagaacaaaaaccccaggactgagtgaagaaaataaatgagaaatcaccacagtgaaagtaaaagacgagagttcgaactcagcaagttctcatcgaagcagctttcttttttcttttcttttctttttttttttttttttgagacagagtctcgctctgtcacccaggctgaagtgcagtggtgcagtctcggctcactgcaagctcygcctcccaggttcaagccattctcctgcctaagcctcccgagtagctgggaccacaggcgcccgccaccatgcccaggtaattttttgtatatttttagtagagacggggtttcatcgtgttagccag

SEQ ID NO: 604988 - DNA, 547 bp, Homo sapiens
ctgggattacgggtgtgagccactgcaactggtctgtttctttagttatttttaaatgtacaatctaaaaaaatgtacaattattgactatagtcttattcattctttattttttatagttaaaactttttttatagtcatacscattaaccatccccacctcccccaatttccccactactcttcccagtctctggtaaccatcttgtactctctatctccatgagttgaattgttttgatttttagatcccacaaataaatgagaacatatgatgtttgtctttctgtgcatggcttatttcacttagcataatgacctccagttccatccatgtattgcaaatgacaggatctcattcttttttacggctgaatagtattccattatgtataagtaccatattttctttatccaatcatctgttggtggacatttaggttgcttgccaatattggctattgtgaacagtgctgcaaaaaacatgggagtgcagatatctcttcgatatactgatttcctttcttttggatatatactcagcagc

SEQ ID NO: 604989 - DNA, 627 bp, Homo sapiens
ctgcattttactggcctaaggaagtcacatggccagcccagatttaagaattggaaaaatagactcatctcttgataagaggagttgcccagacacattgcagagagcatggaaatagggaaaatataaatttgggccaccatttctgtcaatcttccccattgtccaatgatttttttctttcttccctatagtatcttagctactctcattcttaactgacaataataataataataatagctaacaatttactgagaacttgttgccagacactatttttagcactttacattaataatttattttttacaagaattctttgaggtaggtacaattattcttggtatattacaatgaagaaactgaggaacaggaaggtgaaacaatttacctttgcaccrggaaacaaaaggcctcagaggataaattctgtgatgatgatgataatttaatagcaatctctggatcatctgagaacatgaacacctttacagagctcctgtcacaccaaaaggcatttcttttccacaagattcagaggctaaaccacttgaggaagtgaagttgtcctatcattgttaaagagatatttgtacatttaccatctaagccagaaaacaaaaa

SEQ ID NO: 604990 - DNA, 589 bp, Homo sapiens
tttatttgatcaaagaacctcaagtgtagattaaaaccacttaacctcttactgtaggtatcagacaaagagctattctaatagcattaggaattctggctgtgctgagccagtttatggaattttttggaattaatagattgcttgagggggccttttcagacaataaagaataggcttcctaataagagagagttattaataaatggactgaatgtccacacttatatttatttttctttttaccagtgtgtatttattatctgtttttatgtttgattccctacctagagagtttcttgagagtagtgcccctgttaatttgtcactgtattgtagaactcrttacttaataagtaaatcctagtcacctcattctttctagattctcagcttcatctcctcaacttcgaaagtgtgttggctggctttatctatgctcacttcttgcatatcacagcctggaaactttttataacactaagatgttgcaatcggatggctttcaccttgtttagtgattattgttctttattttctgatgtcttgtatcttaaacactgttgttttatttttaaattattttagg

SEQ ID NO: 604991 - DNA, 508 bp, Homo sapiens
cccaaccaggaggcaaaacctagggttctcattcctaataattaaatgtgatgtggaaaattgctaactggtatccatataggctacacatgggctgttggaaataaacattctctggtggcagaaaagaataagactgataaatataaaaacaaatatgctctaatatgcctaaaawctagttgctatatgctataacaatgccatttcaattttgactgaattgaaagtaaaagtaatgagacccctcaggtttttactataggttagattactaatctttttgaaatttaatatcccaatatgtaaaatgggagatttggatgagattatctctaaactcctttaaagacaagaatcttggattccaagagtcagtttagtgaaacaaaatataacaagtcatggacatgactgaaaagtttattgaattgattgcagttttactatactgattaattaatatgataaagaccaataaatccatctgtttctacaagcccagcta

SEQ ID NO: 604992 - DNA, 568 bp, Homo sapiens
aatccatttatttgccttttccagcttctagacctgcattcccgacatttcttggctgcttcttccatcttcaaagtcaacagggtaccatctttaaatctatctctgctttgtcattacatcaccttctctttttctgtctctatggtcaaatatctctctgctctccttttataggaacacttatggttacatttagaaatctccaggataatctcccatctcaaatttcctgatttaatcacatctgcaaagtcacccttactacataaggtaacattcacagtttccaaagattaagacttggatatctttgaatctattaatcaatttcycacaaatccatttaaattacttgttcattgacatttcaatttgcttgattctcccaatcttactgtgttttcagtagtttttattctttttttattattcatatttgatcttcatttgggagatcattgtatttttcccatcaatttctccttaaggtctgagctcatggattttttaaattgttatgtaatatttaaaacctttacaaacgaatgtttttattttaaaatat

SEQ ID NO: 604993 - DNA, 637 bp, Homo sapiens
tcaccctactcctcttgcttaaaacaaggaatcgatattttcccttgggttatagcaccaactttagagaattgtgctgtattgattttctttccttttttttttttaaatgcttttactcttcaaaagaccagcttttcagagctgttatatgaaagccatactctaaggaatgtgttagcttctcaatattttaagactttgacaattttatccatatattacagcaaataattaaaagttgcattcctgaaccactacattctctagtttccctctgcccacccagtcactaaccactaacaatttccccacagagctttactttctcattacttcattgattttcactgatggccattataataaatgataagtggaaaaaacacttttgcatttcttctaaagatactcctgatttcatttactatatttacatatatttcctatatgttaattattcttaccccaaacatttgaattgataagtttatcktaggattcaaggccaaggagggaaaaatgggtttctgatgaacgagtatgtagtctttagtaacaaaaattatatatttcagagtttatagaagtgggattcatgtgcatacattttgtgtcatcattgaatttaagaaaa

SEQ ID NO: 604994 - DNA, 441 bp, Homo sapiens
gtatttctgtctctaggtctatattagtctgtcctcacactgctaataaagacattccaaaaactgggtaatttataaaagaaaagggtttaatggactcacagttccacatrgctggggaggcctcaccatcatggcagaaggttaaggagaagcaaagccatgtcttatatgatggcaggcaagagagcttgtgcaaggcaactctcgttcataaaaccatcaggtcttgtgtgactgattcactactacaagaacagtatgagggaaactgctcccatgattcaattatttcaaccttgccccacccttgacacatgggaattattacaattcaaggtgggatttgggtggagacatagccaaaccatatcattctgcccctggcccctcccaaatcttacatcctcacacttcaaaaccaatcatgacttcccaaca

SEQ ID NO: 604995 - DNA, 441 bp, Homo sapiens
gtatttctgtctctaggtctatattagtctgtcctcacactgctaataaagacattccaaaaactgggtaatttataaaagaaaagggtttaatggactcacagttccacatagctggggaggcctcaccatcatggcagaaggttaaggagaagcaaagccatgtcttatatgatggcaggcaagagagcttgtgcaaggcaactctygttcataaaaccatcaggtcttgtgtgactgattcactactacaagaacagtatgagggaaactgctcccatgattcaattatttcaaccttgccccacccttgacacatgggaattattacaattcaaggtgggatttgggtggagacatagccaaaccatatcattctgcccctggcccctcccaaatcttacatcctcacacttcaaaaccaatcatgacttcccaaca

SEQ ID NO: 604996 - DNA, 509 bp, Homo sapiens
tgctgtggtttgctgggggtccactccagaccctaggcttgtacattgaggtatcaacagggaaggccacaaaacagcagcctgctccttcctctggaagctccatcccaggggtatactgacctgttgtgctcaaacacacttataaggggtggttggggaccctggttgggaggtctcacccagtcaggagggacaagataagagacccacttaaagaaatagtctagctgtgttttggtagagcagctgtactgttttggcaaccccttaagcccyccattggtttgggctctccaaggcccgcagggtggaccggttgagatgctcaaacaataaagatggtggcccaccccaccccatgggagaaattagaattgcatcccagggagaaattaaaactctgttggccatagaacacctgcaggaggggcaagaggccgcagctaggtggatccaccctgtgaggaggagaggatggagtccagtttagcagcctggccacccct

SEQ ID NO: 604997 - DNA, 594 bp, Homo sapiens
gtgactggcctctccttctgggggcyccatccagtctcagtcaggctccactttgttgctagtggctggttggaatttcaagccagtgggtcttatcttgtgaggtgccatggaagtggggcctgcagaccaatgctgctcagacccctggattcagtcctcttcctaggggtatgtatggacctgccttgcctgagttgcagtccctttgtcaaataccccagagctggaatatgtaaagctctgagggttgcaaaggtttgtgggagaagcatggtttcccagggccacacattcactcaccagttcccttggctgggagtcgggggttcccctggctctgtgttcctcctgggtgggccatcgccccaccctgcttttcttcattttctgtgggtgaagttgtttccctgatcagttccaatgtgagtacctggatatttccattgaagatcctgtattcactcgcccctttcattcctctccatgagtgccaggtaccacagctgcttctaattggacatcttgccctggtatctatatatttatttttctagttttatatttttataagagccacaaacataagaagta

SEQ ID NO: 604998 - DNA, 612 bp, Homo sapiens
gcctggccaccccttgacaaaacagctgtatctgctggggagccacctcttttctggttggcttggactctccaaagtccacaggctggaatggctgagttgtccaaacaacaaagttcttggcccaccccacaccctaggcagtccatcccaggaagagatcagagctctgtttgtagaatacaggcagttgggggtggctagaggccccagatgggaggtcccgcctaatgaagaggaatggatcagggtccaacttaaagaagcagtctggtaatgttctggcaaagcagctctactgcgctcagggggacccttcctcatccagaccatctggaattgccaaagcctgcaagctagaatggctgtgtcgaccaaacagcaaagatggtgactggcctctccttctgggggccccatccagtctcagtcaggctccactttgttgctagtggctggttggaatttcaagccagtgggtcttatcttgtgaggtgccatggaagtggggcctgcagaccaaygctgctcagacccctggattcagtcctcttcctaggggtatgtatggacctgccttgcctgagttgcagtccctttgtcaaatacccc

SEQ ID NO: 604999 - DNA, 568 bp, Homo sapiens
cctacacttgtaaataattgtgtttattaacgataaagaaatcaaaggaagattaaaagtataacaaatctgtgattatttttagatattagtaagaataattcttagttacctagagtctgagttaaaattaagttcgtttgaaatgctgcataagttactggagggcttccagttttgcaaccaaaaagctcattgmgttacacattatttgaatattgcggtaaagaaagttaacatgcttaattaaaatgtctgaactgtgatattagtagttatttattgagctgttatttcagaactttacaggaaatacaatttatatcttaggcaataaaactccagcattaaattcaaacttccaactacctctgactccagcagaaatttaactttcttgacaaacccaattaattttgtaaatgcaggcatatggaaatgagcccaggactgtattagtcaaaattatcaaactgtgagcaagaaatttaataaaaattaggaacataattcacaatattggtggtcttaagtcttaagagttctgatgttcactatgtgaatagac

SEQ ID NO: 605000 - DNA, 657 bp, Homo sapiens
gctgcataagttactggagggcttccagttttgcaaccaaaaagctcattgcgttacacattatttgaatattgcggtaaagaaagttaacatgcttaattaaaatgtctgaactgtgatattagtagttatttattgagctgttatttcagaactttacaggaaatacaatttatatcttaggcaataaaactccagcattaaattcaaacttccaactacctctgactccagcagaaatttaactttcttgacaaacccaattaattttgtaaatgcaggcatatggaaatgagcccaggactgtattagtcaaaattatcaaactgtgagcaagaaatttaataaaaattaggaayataattcacaatattggtggtcttaagtcttaagagttctgatgttcactatgtgaatagacacaggctgactattcagtccacagcccattttatgggaaatgactcaccacatacaagtgtgaggcccctctggccctgtgtgtcccatgtgatcctgtcaacctggccatagctatttaaattgagtcagtcaaatcttccttctagaattgagtttcagatacattaatctgtctcttagcttaaacttttatggagctgaaggagggccactttcagcacatgcatagagaag

SEQ ID NO: 605001 - DNA, 601 bp, Homo sapiens
attttgggtttttttaatttgttgagaattattttatgggtgactgtgtgagcagttttagagtatgtgccaygtgcaaatgagaaggatgtatattctatggttgttctgtggagtgttctgtagatatctgttagatccatgtggtcaagtgttgaattcaggtcctgaatatctttgttagtcttccgtcatgatgatctatctagttctgtcagtgaggtgttgaagtctcccacacttattctgtgattatctaagtctctaagtctcttcataggcatctaataacttttttaaatgaatctggatgcttcagtgtctggtgcatatatatttagaataactaagtcttcttgttgaattaaaccctttatcattatgtaataaccttctttgtctttcctgattgttgttgatttaaagtctgtttgtctgaaattagctccatctctttactttgagcctatgggtgtcattgcatgtgagatgggtctcttgaagacagcataaaattggatcttccttctttatctagcttgctactctgtgccttttaattgggatatttagctcatttacattcaaggctattattgat

SEQ ID NO: 605002 - DNA, 619 bp, Homo sapiens
aagtcttcttgttgaattaaaccctttatcattatgtaataaccttctttgtctttcctgattgttgttgatttaaagtctgtttgtctgaaattagctccatctctttactttgagcctatgggtgtcattgcatgtgagatgggtctcttgaagacagcataaaattggatcttccttctttatctagcttgctactctgtgccttttaattgggatatttagctcatttacattcaaggctawtattgatatgtgtggattcggtcctgtcatcatgttgttagctggttgttatgcagacttgattgtaaagttgctttatagtgtcaacagtctgtgtacttaagtgtgcttttgtgatggccagcaacagtctttcatttccatgtttagcactcccttaagaacctcttgtaaggctggtctggtggtaacaaattctcttagcatttgcttgtctaaaaagaaagttatttctcttttgcttataaggcttaatttggctgaatacaaaattcttggttagaatttctttttttaagaatgctgaatatagaccctcagtctcctctggcttgtagagtttctgctgaaaggtccattgttagcctgatgg

SEQ ID NO: 605003 - DNA, 619 bp, Homo sapiens
aagtcttcttgttgaattaaaccctttatcattatgtaataaccttctttgtctttcctgattgttgttgatttaaagtctgtttgtctgaaattagctccatctctttactttgagcctatgggtgtcattgcatgtgagatgggtctcttgaagacagcataaaattggatcttccttctttatctagcttgctactctgtgccttttaattgggatatttagctcatttacattcaaggctattattgatatgtgtggattcggtcctgtcatcatgttgttagctggttgttatgcagacttgattgtaaagttgctttatagtgtcaacagtctgtgtacttaagtgtgcttttgtgatggccagcaacagtctttcatttccatgtttagcactcccttaagracctcttgtaaggctggtctggtggtaacaaattctcttagcatttgcttgtctaaaaagaaagttatttctcttttgcttataaggcttaatttggctgaatacaaaattcttggttagaatttctttttttaagaatgctgaatatagaccctcagtctcctctggcttgtagagtttctgctgaaaggtccattgttagcctgatgg

SEQ ID NO: 605004 - DNA, 597 bp, Homo sapiens
acattcaaggctattattgatatgtgtggattcggtcctgtcatcatgttgttagctggttgttatgcagacttgattgtaaagttgctttatagtgtcaacagtctgtgtacttaagtgtgcttttgtgatggccagcaacagtctttcatttccatgtttagcactcccttaagaacctcttgtaaggctggtctggtggtaacaaattctcttagcatttgcttgtctaaaaagaaagttatttctcttttgcttataaggcttaatttggctgaatacaaaattcttggttagaatttctttttttaagaatgctgaatawagaccctcagtctcctctggcttgtagagtttctgctgaaaggtccattgttagcctgatggggtttccttgcaggtgacctgccccatctctttagctgcttttattttttctttcacattgaccttggagaatctgatgactatgtgtcttggggatggttgtcttgtgtagtatctcacagggattctctacatttcctaaatttgtcaaattctctagaaaagttgaggaaattttctttctgttcctctctttgagggataccaata

SEQ ID NO: 605005 - DNA, 584 bp, Homo sapiens
ccacctttttgtatctgagggtcccacagggctgactgtggaacttgagtatgcacagattttggtatccacagggggatcttaaccaatcttctgcagatagggaggaatgattatagaaaatataaagaagaactagatggatattttagaactaaaagatgcaataacaaattttaaatcttactagttgggctcagtagcagaatagagaggacaaaaaaaaaaactactgaagatagaacaatagaaattatcatcgtccccccttatgcaaggttttgcttacccatggtcaactgcaatctgaaatattaaatagaaataccagaagaaacaatacacaacttttaaaacatgtgtggttctgagtagcatgatgaaatctcacaccatcccactttgtcccactcaggacatgaaatcatccctttctcaaagcatatccacactgtgtattctacgtgtccattagtctcttagtggccatawttgttgtcacatcaactgttgtggtatagcagagcttgtattcaagtaacccttatttatttactattgttcccaaggtacaagtagtaatg

SEQ ID NO: 605006 - DNA, 480 bp, Homo sapiens
ttactgttggtgtttgccttatttgaacatggtttgaatagctggctacatttgattggccaaagcwcggtgattggcacaagtataggctatggtctgttacatctccacttgttatagttcacaatgtacagagaaccctttaggctgaacttagattatataaggatgcagctttaggctaaacttgatttaataaggtgaaagttttcaatttaataaagaaatgaaataaatcatatgccgagattactaagattacagtaagaatgaatgttctatttgtgaaattgtaaagaaggaaaaggaaatgtgcacatagtctatacagggtttgatactgtctgcctttcaaatatccatgaggggtcttggaacgtaacccctgagaataagggggaactatggtatatgatctgaaaagcaggggaaaaatgattgagaaacctcaggaacatgtggtgcgataatgaaagagct

SEQ ID NO: 605007 - DNA, 467 bp, Homo sapiens
ggctgaagtacactggtgcaaccatggcttactgcagcctccacctcctgggctcaggtgatactcccacctcagcctcccaggtaactggaactacaggcatgtgccaccacacctggctaattttttgtattttttggagcagtggggtttctccatgttgcccagactagtctcaaactcctgggctcaagcaatctgcctgcctkggcctcccaaagtgctggaattactttgtggtaatactttgtggtgtgagccactgcacccaaccctaatcatgttttctgaaaacataaccagccattagctacttaaaacttgtaatgttttatttataggaagggtgaactatggagctccagctgccttgtgattatgaatgagaataaaatattaattctaagaaaataatatgcaattatgtgaaagcattcatataaaccacagggagaaaagtgacaagt

SEQ ID NO: 605008 - DNA, 522 bp, Homo sapiens
aagttaaatacattgttgaatgctacaaaccaagtagattatggagctggggtttagaacctactgacttacatacctctactgcataatacatagtttttttaatggctgaatgtttgattggtggtaaattaataggtgctagatcccatcaaaagaatactttatcatataagaacatgaccagaattaacagagttatatcattttgatcactacagattgaaaatcctggagatggactatttgctcctttgccaacttactcatactgtaagcagattagtgctcaggagtttgatgagcaaaaagtttctacctctcaagctgcaattgcagaacttttagaaaatattattaaaaacaggagtttacctctaaaggagaaaagaaaaaaactaaaacaggtaagagaatgagcaagttctcaatcatgtaaayattttctaatgtgctgttcctggttgttaataacatttagaatctactttcttattttaatattttagattttaagtttga

SEQ ID NO: 605009 - DNA, 446 bp, Homo sapiens
aatcttaatgtttaatgactgttctcatttctcaatgtaatttcatactgtttctctataaaatgatagtatyccatttaacattactgatttttattaaaaacctggacagaaaattataaattataaatatgactttatcctggctataaaattattgaaccaaaatgaattctttctaaggcatttgaatactaaaacgtttattgtttatagatatgtaaaatgtggattatgttgcaaattgagattaaaattatttggggttttgtaacaatataattttgcttttgtattatagacaaatatataaataataaaggcaggcaactttcatttgcactaatgtacatgcaattgagattacaaaatacatggtacaatgctttaataacaaactctgccagtcaggtttgaatcctactgtgctattaactagctagtaa

SEQ ID NO: 605010 - DNA, 556 bp, Homo sapiens
agaaatcctgtaaacagaagtagctctaccaagctgtcttttgtggaggagatttacatctgtagagaatctgcattgatgcaggcaggccttctcttgtccagatctaggaaagattaactgagagtcagaaccctttaaaggtctgaaagaaacatttaccatctattctctttgagggttactacctgtgaggtttcatttatctaacaagaccatctttgctagccaggcctcctcttctcttctctctcccataacatgtcttgccaatataacctgatttaaccaccatcatctgttttgggccatgctctgagcccctattttttctgtatcctccagatagtatatgagcttctgaatttcatcactcygtgactctccccgtgtgcatgctaatagatttatatgctttctccaagctggcttttgtcatgtgatttttcagtgaaccttcacaaggtagatattttcccttggctcctacattaacatatacttagaagttactcaaaagatgttaaatgaaataaatggaagactgggtttgtgt

SEQ ID NO: 605011 - DNA, 556 bp, Homo sapiens
agaaatcctgtaaacagaagtagctctaccaagctgtcttttgtggaggagatttacatctgtagagaatctgcattgatgcaggcaggccttctcttgtccagatctaggaaagattaactgagagtcagaaccctttaaaggtctgaaagaaacatttaccatctattctctttgagggttactacctgtgaggtttcatttatctaacaagaccatctttgctagccaggcctcctcttctcttctctctcccataacatgtcttgccaatataacctgatttaaccaccatcatctgttttgggccatgctctgagcccctattttttctgtatcctccagatagtatatgagcttctgaatttcatcactctgtgactctccccgtgtgcatgctaatagatttatatgctttctccaagctggcttttgkcatgtgatttttcagtgaaccttcacaaggtagatattttcccttggctcctacattaacatatacttagaagttactcaaaagatgttaaatgaaataaatggaagactgggtttgtgt

SEQ ID NO: 605012 - DNA, 435 bp, Homo sapiens
cttcagcgcctcaggctcattatcctcactgcctgaaagtcatgtatatctcatctcgtcttccccttgtctgctgttccttctccacacccagcagagatccactctttactaaactttcttaacaactcaagataaaaactctttccccttctcttcccctgcttcttcctctcctaattaactgataaacaatttcagtgatactcacatgttcacttaacatttcttaaacccttactttgtgccaggtactatgttaartgatggggctagaaaaatgaacgacaccttccctgctctcaaatagctttttaactaatggagcaagacaggcaacacctaaacagatctatatagtgtgatgaagttggtggtagaggcaggcacagatcttttgagagtaaatgggagaggccccatttcttatacaag

SEQ ID NO: 605013 - DNA, 585 bp, Homo sapiens
cttttttaattttttttattttgagacagagtctctctctgtcacccaggctggagtgcagcagcatgatcttggctgactgcaacctccacctcctgggttcaagcgattctcctgtttcagcctcccaagtagctgggattacaggcgcatgtcaccacgcccagctaatttttgtatttttagcagagatgaggtttcaccatgttggttaggctggtctckaaagcctgacctcgagtgatctgcctgccttggcctcccaaagtgctgggattataggtgtgagccaccgtggccggcctatctagttgtcttagcaggattttcacaaactagttgcaaactattttctatactccttaccacacactaagccacttaacctgcaccagacacacttgggatgtttttatttccttatttctgtttccccaaatcttacttgttgcatcctcacctcaataaaaattaattgttccctgtataactttaccatcagagtcccctctcaccttaagcaaacctaatttataaaattccaattttatgataaaagcattgtttttaaaaatgtttacaacc

SEQ ID NO: 605014 - DNA, 585 bp, Homo sapiens
cttttttaattttttttattttgagacagagtctctctctgtcacccaggctggagtgcagcagcatgatcttggctgactgcaacctccacctcctgggttcaagcgattctcctgtttcagcctcccaagtagctgggattacaggcgcatgtcaccacgcccagctaatttttgtatttttagcagagatgaggtttcaccatgttggttaggctggtctctaaagcctgacctcragtgatctgcctgccttggcctcccaaagtgctgggattataggtgtgagccaccgtggccggcctatctagttgtcttagcaggattttcacaaactagttgcaaactattttctatactccttaccacacactaagccacttaacctgcaccagacacacttgggatgtttttatttccttatttctgtttccccaaatcttacttgttgcatcctcacctcaataaaaattaattgttccctgtataactttaccatcagagtcccctctcaccttaagcaaacctaatttataaaattccaattttatgataaaagcattgtttttaaaaatgtttacaacc

SEQ ID NO: 605015 - DNA, 585 bp, Homo sapiens
cttttttaattttttttattttgagacagagtctctctctgtcacccaggctggagtgcagcagcatgatcttggctgactgcaacctccacctcctgggttcaagcgattctcctgtttcagcctcccaagtagctgggattacaggcgcatgtcaccacgcccagctaatttttgtatttttagcagagatgaggtttcaccatgttggttaggctggtctctaaagcctgacctcgagtgatctgcctgccttggcctcccaaagtgctgggaytataggtgtgagccaccgtggccggcctatctagttgtcttagcaggattttcacaaactagttgcaaactattttctatactccttaccacacactaagccacttaacctgcaccagacacacttgggatgtttttatttccttatttctgtttccccaaatcttacttgttgcatcctcacctcaataaaaattaattgttccctgtataactttaccatcagagtcccctctcaccttaagcaaacctaatttataaaattccaattttatgataaaagcattgtttttaaaaatgtttacaacc

SEQ ID NO: 605016 - DNA, 566 bp, Homo sapiens
gatctgacttggaggttaaggcaagaatgtgctctaaatgctcaaggcagagactgaaaaccttgcagtgattagtagctcaggcagctccggacaacttcatatgagatttttttttagagtagcttttcagtatccccttcttttrctgatgaatgttgaagctggagactcatttacaaatccccgttcaacattactgtctcccagacaaccttcattaataatgtgtctctgaagcaggccttagcagctaaagcaatcattgctctaatccttttgagcagcaaaggaagtggaaaaataggcagctgctttacaacttaatcaaaaatatttactgagcacttgtaatgcacaaggtactgttaggtgaaggaagaagaacacaaagatgtgcaggatttagtctctaccttctagagattacaataggagaaagtcactgatgaaaaaaatacaaggcagtacagaaaggaaaaatcatcatggactggggtcagaagcaaagattttggtctctgaggaatgagtaggattttactaagtagatatgaaaaggaaag

SEQ ID NO: 605017 - DNA, 575 bp, Homo sapiens
ttaaggcaagaatgtgctctaaatgctcaaggcagagactgaaaaccttgcagtgattagtagctcaggcagctccggacaacttcatatgagatttttttttagagtagcttttcagtatccccttcttttgctgatgaatgttgaagctggagactcatttacaaatccccgttcaacattactgtctcccagacaaccttcattaataatgtgtctctgaagcaggccttagcagctaaagcaatcattgctctaatccttttgagcagcaaaggaagtggaaaaataggcagctgctttacaacttaatcaaaaatatttactgagcacttgtaatgcacaaggtactgttaggtgaaggaagaagaacacaaagatgtgcaggatttagtctctaccttctagagattacaataggagaaagtcactgatgaaaaaaatacaaggcagtacagaaaggaaaaatcatcatggactggggtcasaagcaaagattttggtctctgaggaatgagtaggattttactaagtagatatgaaaaggaaaggcatttctttattcattcattcaa

SEQ ID NO: 605018 - DNA, 352 bp, Homo sapiens
cacgctagcctgggcaacagagtgagactccatctcaaaaaaaaaaaaaaaagtttgtggtgatttgttacaccagcaayaggaaattaatacaaacagtaatcctgaagtactgataatctttaaagcagaaggtgtagggagttgctagtccagacaggtggatgctaaaaatttagagcagtagaagctgtttgcctggttgacactggacctgccgggtgagaaaacctcccctcatcatcaagttcttcatcagctccatgagcttattcttttgacaactctcgccctgttcacggaaataaatctgaaagctggtgaccaaatcagctttttgtaatgccagtat

SEQ ID NO: 605019 - DNA, 352 bp, Homo sapiens
cacgctagcctgggcaacagagtgagactccatctcaaaaaaaaaaaaaaaagtttgtggtgatttgttacaccagcaacaggaaattaatacaaacagtaatcctgaagtactgataatctttaaagcagaaggtgtagggagttgctagtccagacaggtggatgytaaaaatttagagcagtagaagctgtttgcctggttgacactggacctgccgggtgagaaaacctcccctcatcatcaagttcttcatcagctccatgagcttattcttttgacaactctcgccctgttcacggaaataaatctgaaagctggtgaccaaatcagctttttgtaatgccagtat

SEQ ID NO: 605020 - DNA, 613 bp, Homo sapiens
gaaagtagcagtatgagcactttgagggctaagcaatgggataatatctttctaagggaacagttaaatcaacttcatttggtcttccatggacatgagtttcaagtggctttctggcctttcttctgttggcctctttgctattatgtgaagacttcatttatactcaatctaattcagctaccatgggccatatcaccagtgcccattgtgttctatgcatcctaatattttcattaatctgaaggggagagggttttaactttgaaggatactcargaggactttcttatgaactcagatggaaagtgtcctgaaatttgtccttttaaaaatatctgtgcatttttttgtgctatgacattcttacatgtatcattctgtgatcaaatctccagcttactataaatgatacctacattctaaagagccaattctagttgtaccagcatggccttagagaaaagtaagggaatacaatttgtatttatcttctatttggtcggagttaagtatttaaaacagtaaggtagatctcagatccaccaccattaaaaataaataaataaataaataaataaataaataaataaataaataaaatagtaaagta

SEQ ID NO: 605021 - DNA, 515 bp, Homo sapiens
ctcaacaacattgtgtttgtctcatgatggatgctactcagccctgagaccgcaactcaactcaaaggaattgccctgagattttgagactctgtgggagggcacatgatggaacctgttgctgatcagatacctaaaacacaaaacacataaaaaatcatgtagaatgtaccttaaagttctttgagtattcagccatttggagtgacagataaaataccagtaaggaaacaatgtttgtctaccacacagaaaaagagaaacttgaaatttgggctcatcagtggctcagaatctcactcttctaaatatgaagttaacctgaccattgtgaaaagccatagcttggaacagaagaaactctaattaaacagagtctagtaaaattaaaacagggccctttacctcattgactttacttacaatctcttsttggtaaatatgaaaacagatgggttctgctttattgctaggtaacagtgtattgctatctatgaaagtcaaggcatcactcc

SEQ ID NO: 605022 - DNA, 572 bp, Homo sapiens
tgaaaaacaagactattaattagagttttcgtctaaatggacaaaagggatgctgacaaagtgagtgtatagtgttaggtaagtcataggtgaatcagtttccttaatctatcctctcccaccctgccccccccattttaggacctaacactgagtcacagatgaagtttcatgttaatcccatgtaaggcacctgtgaggtaaaaatcagcggacctgagtcacaatgggatgacatagtttgtggtagactattgatasgcggaggagtgggttttcagcttagagcacggtgataggctgcaagtttacctgctgactcgtgaaggtactgacagatttgaagacttgattttggaaactttatgttaaagttatgtcagttatttttgggtgtagcaactgaagacagtttagcccatatatgtgttagttttatctcttttaagattacaaagtttttgcagacaaggagcctataatatatttgatagtaatttaagtacttggtttaattcagtatttttcagtacctggaagaatgctttgtacatggtaggcaaaaaatatgt

SEQ ID NO: 605023 - DNA, 607 bp, Homo sapiens
aatgaatgaatatgttatactgccctgtgtttaaaatggattaacttttcttcatggtaaaatcttgacacagtgtgatcagtcttttcagtttaatactgtggtttatcaaatcttaagatgctatcgactataagaaacaccatcattgttttatgtaccacctagcaagggaaaatgctgccaattttttggtaatttgtagtaatatgccataattatatgatgcatcccaatttcaaagatgttaaagtgtttaaaaaaattgtcagaatcaatgtaacatggaagtaggctacatttaatagttcacttaagttttaaaagctgattaaaatattttaaaaagctggagaagggatcaagtccagttattaatgctttgggttttagttccatttaattttcaatttgctttttttgatattaggaaagtctcacaataataaacaatcatagctgttaaaactgataatccttggtttttagtacccagatcctgacttatttacctgtttctaataagattatgctttataatgtgarctattgtattctaaacttagaataagtatgtctggttcaagttgagtttcaaataaaaaca

SEQ ID NO: 605024 - DNA, 545 bp, Homo sapiens
ggagggtgtacgtcccggagaaatgattttgaatcccagtaccccccctacttttctttatgtagttggcgcgctttccctaggcactcggacagtttcgttgtctgttggatttggtttttagtttttggttttttattctgttgttagtgttaaagagggagaaagcatccttccgtgcccaasttgcgatactgagaattcaccacacggcacgcactggctcttggccgttttaaaagcatagcctctgctttgcaaccaaggtgtacagcaacgtgcgcatcacattaaaaagatgccttcgtggcattgtcctgctggggtcaggctcttcacagagactgaccttccgtgatgcagagctagagccgagattttaaagatggtaggttaacaccataaaagacaacaattttgaaagcagttgggtgaaagcagtatgtaagttagtaatatttaaataaaactatcctggaggaattgttactgagttaattgttgctgtaataaacactaagaccttggaggaaaaacgacgctgt

SEQ ID NO: 605025 - DNA, 551 bp, Homo sapiens
tggctcatctgtggcaaatgtactgagcacaygctgcccatttttgctctgtccccagagcagtcaccctccaccctgtatttagaaggatagttttatttctcttgaaggaaaaatgcctttggtttctgtgaccactccattctgtctcccatcagatcatctgggaggttttgttgtctaatgtctgttggttaaatcttctatcatccctgtcctgcctggctcatcaggaatctgcaggagtctgaagaggaggaagtcccccaggagtcctgggatgaaggttattcgactccctcaattcctcctgaaatgttggcctcgtacaagtcttacagcagcacatttcactcattagaggaacagcaagtctgcatggctgttgacataggcagtgagtactccattgtgaaggtgataaagctccagttcatggcccaggtagaccccataatctttgggccttgtgccccttgttgggctgagatttgccatcactgtgggctgaacctatatatcaatgtagatttcaatcactctggagtcga

SEQ ID NO: 605026 - DNA, 551 bp, Homo sapiens
tggctcatctgtggcaaatgtactgagcacacgctgcccatttttgctctgtccccagagcagtcaccctccaccctgtatttagaaggatagttttatttctcttgaaggaaaaatgcctttggtttctgtgaccactccattctgtctcccatcagatcatctgggaggttttgttgtctaatgtctgttggttaaatcttctatcatccctgtcctgcctggctcatcaggaatctgcaggagtctgaagaggaggaagtcccccaggagtcctgggatgaaggttattcgactcyctcaattcctcctgaaatgttggcctcgtacaagtcttacagcagcacatttcactcattagaggaacagcaagtctgcatggctgttgacataggcagtgagtactccattgtgaaggtgataaagctccagttcatggcccaggtagaccccataatctttgggccttgtgccccttgttgggctgagatttgccatcactgtgggctgaacctatatatcaatgtagatttcaatcactctggagtcga

SEQ ID NO: 605027 - DNA, 551 bp, Homo sapiens
tggctcatctgtggcaaatgtactgagcacacgctgcccatttttgctctgtccccagagcagtcaccctccaccctgtatttagaaggatagttttatttctcttgaaggaaaaatgcctttggtttctgtgaccactccattctgtctcccatcagatcatctgggaggttttgttgtctaatgtctgttggttaaatcttctatcatccctgtcctgcctggctcatcaggaatctgcaggagtctgaagaggaggaagtcccccaggagtcctgggatgaaggttattcgactccctcaattcctcctgaaatgttggcctcgtacmagtcttacagcagcacatttcactcattagaggaacagcaagtctgcatggctgttgacataggcagtgagtactccattgtgaaggtgataaagctccagttcatggcccaggtagaccccataatctttgggccttgtgccccttgttgggctgagatttgccatcactgtgggctgaacctatatatcaatgtagatttcaatcactctggagtcga

SEQ ID NO: 605028 - DNA, 551 bp, Homo sapiens
tggctcatctgtggcaaatgtactgagcacacgctgcccatttttgctctgtccccagagcagtcaccctccaccctgtatttagaaggatagttttatttctcttgaaggaaaaatgcctttggtttctgtgaccactccattctgtctcccatcagatcatctgggaggttttgttgtctaatgtctgttggttaaatcttctatcatccctgtcctgcctggctcatcaggaatctgcaggagtctgaagaggaggaagtcccccaggagtcctgggatgaaggttattcgactccctcaattcctcctgaaatgttggcctcgtacaagtcttacagcagcacatttcactcattagaggaacagcaagtctgcatggctgttgacataggcagtgagtactccattgtgaaggtgataaagctccagttcatggcccaggtagaccccataatctttgggccttgtgccccttgttgggctgagatttgccatcacygtgggctgaacctatatatcaatgtagatttcaatcactctggagtcga

SEQ ID NO: 605029 - DNA, 532 bp, Homo sapiens
tcctattcttatgctgaggagcctgaggtccctgtgtgaggattagacagtggattgttatgtgtgtaggggaatcagcttaatgtgtctgtccatgtctgaatttattgcagaaattgaaaagaaggggaaggggaagaaaagaaggggaagaagatcaaagaaggaaagaagaaggggaagaaaagaaggggaagaagatcaaaacccaccatgccccaggtgactttcagcaattgtggatgcttaattctgtgttaacacctggaggcaacagattcagggaaaccagaktgtgtttgatgtcatgttttcaacgaaggctgaattactcctactgtcattgctgttggttttcattgcagtagatgtttaggtttccatttcttcctccccttatcatttcctaacgtaccataggttgaccatacttcaaaagctgtactctcatggccactgcatcgaattttgagcatattttatggaaaactattgagctcactcttttcatgatcacagtttgctgtgtgtc

SEQ ID NO: 605030 - DNA, 575 bp, Homo sapiens
ggaggcttgaaatcttctgatgcatagaggactgtgggacaagtttgtctgcttctaagagaaagaattaggtttgaaatgcaaaccgtgacaggacaccaagcctgtgcctgggaatcagatctggcaggatgggggagacagctgccaacgtccagagagaggctgcacaagcctccagtgatatgggaagcgaaaggtcttttcaatatttggccacatgttgatggtggccctccagatcagaaatgcattgcctgatggatcaggaaaccatgccagggcattctgttaaagataaaacatgagagttttcagttgaacggtgacccatgcctagatgttcatgtctctgttgcacattgggctgactgtgcttgcagactgtgaagtgggaaatatctgaacgaacacttctgtatttacagaaaatgacaacgatgacratgaagatgttcaagttgaggtggctgagaaagtgcagaaatcgtctgcccccaggtaacactgaatactcaggaacaattaatggatggtaacatatgaggaatatctaggaggcacaccctctctgg

SEQ ID NO: 605031 - DNA, 547 bp, Homo sapiens
gtgccttttcccattaaatcctcacagcaggtgtgcagaggagctcaatatcatccctcccagccacacttagtggtcacttctgcttctcagcctgcatgtccttgctatctgaamtcctcttctcctgctaaagcccctgcctagagttctcttcaatttgggaagaaagttgtattatttgtatattttgaaaatagcttaaattaagaaaaatcctgaattaatctttatagaaattctgcagatgtactttgtttctgtgttgccttgtccactggtctcactgaagccacttcacaataataataacagctaacatttaatgaacaccaattcaagctttgcatgtattaactcattgaatactcacaacaactcactacagtagtactaattttatccgcattgttcagatgaggaaattaaggtattgagagcttgagtcacttgccaaagagcatacgtgacttgctataaagggcagagccgggatttagatcccatccatcagactctagagtctgccttcttaactagtatacac

SEQ ID NO: 605032 - DNA, 577 bp, Homo sapiens
aactgttcacaattttcctaggctttcataacaacatggaaactatttttgctgagcctaaaagatgtggtacaggtcacaaaatcttcaaattgatttatgctcaaatcaatgaattttgagctaatattcccctaatggctttttataaggttctatgttcagtatttgtaaagcactatgctatgccatactttgggacagaacaaataaatgtatgcctgtgaaaaatacttattgaacacaccagtgacaactgaaactccaaaatgttcttatactttcactggtgattcwaaaatagaggtttgtgggtttcttctgatttgaataggagcataaatatgttacaaaattcagctctttccaatttattctgagataagcagtagatgattacctaataatggaaactgtttaatatgaaacgtttagagaatacctaatggatactttttaaattaaaaggaggaaaaacacctcctccgacttcttctgctgttgcaagtcctttggaggcactgagggagggaagtagcattgaaaattcaagcgagtcctttatgaatctgcagca

SEQ ID NO: 605033 - DNA, 627 bp, Homo sapiens
gattacctaataatggaaactgtttaatatgaaacgtttagagaatacctaatggatactttttaaattaaaaggaggaaaaacacctcctccgacttcttctgctgttgcaagtcctttggaggcactgagggagggaagtagcattgaaaattcaagcgagtcctttatgaatctgcagcaaatcttcacatcccaaatgtttaacgtgctttcctaggtgtattaggtatctgcttctgcataacaaattcctccaaagtcttaaggcttaaatcagcatttatgaggtcatagtctctatgggttaggaatttgggtacggctaatgagattctctggctcagggtctcacacaagatggcaatctaagtgtcagccagggctgcagtcatctcgaggcttgacccagaatggatctgcttctgagttcaatcacagggctgttggcaagcctcagaagatccatccacttccaagctcactcacgtggctactggcaggactcrtatccttactggctattagatggaaacttcattttcttcctacatgggcttcccccaaccaggacagtttgcttcttccacatcaaggtctccaagcagaagaggatgaggaatggtg

SEQ ID NO: 605034 - DNA, 597 bp, Homo sapiens
atatgagaccaggagttctgagatcagcctggccaacatggcgaaaccccatctctactaaaaatacaaaaattagctgggcgtggtggtacatgcctaaaataccagctacttgggaggctgaggcacgagaattgtttgaacctgggagacagaggttgcagtgagccaagatcgcaccaccgcactccaacctgggcaacagagcgaaactgtctcaaaaaaaagaaaaaggcggtatttctaggtattctgttccttctacacaactattttgaggccagtgccatgttaattattgttgcttttaatatgtcctaatatttaacmattagggctaaccattttgctatttcatttttcacaaaattattgatttcacctgaaaattttctaaccaaattttacacaaatttgttcaagttaaaagaaatgctacttggatttttagtgggattatacaaaatctattaataagtttaatagaaactgacatctttatatttactcttctcatctgagaacatggagatctatttatttgagagattttaaaaaattatttttggccaggcacagtggctcacgcctgtaatc

SEQ ID NO: 605035 - DNA, 579 bp, Homo sapiens
ctgtaagttgttttggacagtatggccattttactgatattgattcttcctatccatgagcaggaaatgcttttcccatttgtttttttcctctctaatttctttgagcagtgttttgtaattctcattgtagatatatttcacctccctggttatctgtattcctggtattttattccttttgtggcaattgtgaatgaaactgtgttcctgatttggctctcagcttggctgttgttggtgtagaggaatgctaatgatttttgtacattgatttttgtatcctgaaattttactgaagttgtttatcagctgaaggagcttttgggctgagactatgsggttttctagatatagaatcatctcatctgcaaacaaggataacctgaattcctttcttcctatttggatgtcctttatttctttgtcttgcctgattgccttggccaaaaacttacctagtttcattaataatgaaggcttttcataaatttgttagtcaatgatcttggctacaaagaagaggaaatgattctgacttatttaagctgaaaaagaatttattttaaatatattaga

SEQ ID NO: 605036 - DNA, 608 bp, Homo sapiens
ttcaatttttaaaatgggcaaatgatctaaatagacatttcgccaaagcagacatacaaatggcaaagaggaatataagacaagtgttcagtactgctcatcatcagggaaatataaatcaaaactacagtgggatatcatctcaccccggttagaatggctattatcaaaaagacaaaaaataacaaatgctggcaaggatgtggcgaaaggggaatggtcatatactgttggtgggatagtaaattaggctgcctctatggaaaacagtatggaagtttcttcaaaaacttaaaattaatccacaatatgatctgctgagtatatagccaaaaaagaaaggaaatcagtacaccaaagagatattggaggaagaagcaaagcaagatggccaratagaaccctccagtgattgtccccactgcaggaataccaaattgaataaatatctttgcaagaaaacaccttcataagaaacaataatatgttgagccttcacagtgcctggttttaatatggtatcaaggaaagaggaactgaaaaggataggaaagactgtcttgcatcggctacactacccatcccccatcctgggaaatgcatggaaa

SEQ ID NO: 605037 - DNA, 608 bp, Homo sapiens
ttcaatttttaaaatgggcaaatgatctaaatagacatttcgccaaagcagacatacaaatggcaaagaggaatataagacaagtgttcagtactgctcatcatcagggaaatataaatcaaaactacagtgggatatcatctcaccccggttagaatggctattatcaaaaagacaaaaaataacaaatgctggcaaggatgtggcgaaaggggaatggtcatatactgttggtgggatagtaaattaggctgcctctatggaaaacagtatggaagtttcttcaaaaacttaaaattaatccacaatatgatctgctgagtatatagccaaaaaagaaaggaaatcagtacaccaaagagatattggaggaagaagcaaagcaagatggccagatagaaccctccagtgattgtccccactgcaggaataccaaattgaataaatatctttgcaagaaaacaccttcataagaaacaataatmtgttgagccttcacagtgcctggttttaatatggtatcaaggaaagaggaactgaaaaggataggaaagactgtcttgcatcggctacactacccatcccccatcctgggaaatgcatggaaa

SEQ ID NO: 605038 - DNA, 615 bp, Homo sapiens
ggacttttcttactggcagggcgacctgcagctgtggagaccttggggcccagggtggctgaggtcctggaaggcaaaggagcagggaagaaaggctgttttcagggcaagaccaccaagttgagccagcgggcggaggcacaggcacttctccaggactacatcagcacgcagagtgctaaggagtgagagcttagggtgctcacttcctgtttccacaggaatcttttggtcaataaaatagtttgactcagaaaaaaagaaaagaatgactatyaaaatggcacacagttttacggaaattcaagaataaggccttacagagattacaactcaaaagtagttctagatatatcaacattaacaactggtggaacttcacgggctccagtattttgccactaatgtgctaatgtgactagttattctgcaaacatctgcttctttctcctttccctgctaataggcttattattcctgtgacgtctgtacacaagtcatcactaaaaatggctcaacttacaaacatctactttttatgacctttcatatacatacagaatatatagaatctagatatttatatatctatatatttaaagtataaatatatac

SEQ ID NO: 605039 - DNA, 384 bp, Homo sapiens
cctttcatctctctcctgtataattttctggcactgtctgatttctaatatttgaaaaccgttgttttacatattacatctgcttcttgtttcatatgggactgaaaatacaatttttgttcctccatttggtctcatgcaaaatgccatgtaagcactttaaataaaatgtggtatatttgtaagtaaatatattataaaatatttcatatatatgtactttaagttctgggayacatgggcagaatgtgcaggtttgatacataggtatacacatgccatggtggtttgctgtacccatcaacccatcatctacattaggtatttctcctaatgctatcccttccctagccccctgttccccaacaggccccagtatgtgat

SEQ ID NO: 605040 - DNA, 568 bp, Homo sapiens
tgtaactttcctgaggcctcctcagccatgaggaactgtgagtcgattaaacctcttttcgtcgtaaattacccagtctcaggtggttatttatagcagtgtgagaatggactaatacaatgtgtgatattcagaaagtccaacatccaaaccgttagagctctagatggagaaaatagaaaaatgatgatgacgtcatcaataattgcaaataattagaaaaaattcagaatggaaaaatgtggaagaaccccacttaagtgcccaaaacaataaataaaaaaatataaaccaagactaatgtttgcaaaattttgtaataccaataataacaaggccttgagatttaaaacttattgagactcagaacgtcgtcctagttgagcaatttgcaagatacaagagatgaagtaatgctttataaatttttattggaattattttcaacctagaattgtacacccagccaatccattaactagatgcrtatgtacaatggaaactttaagacacattttccaggcaccttgtggtatgcagaataatggacttctaaacatatccatgt

SEQ ID NO: 605041 - DNA, 601 bp, Homo sapiens
acaaggttgggaaagttatcctaaaggatatcctgaaatgcattttccaaataggttccattctccccagctctttcatgtacaccaatcagtcaaagatttggtctctttatatacagagttttcttccttctttttcataatttttcctctattcttgtctgcctgtcttatttcagaaagacagtcttcaaactctgagattctttcctctgcctggtctatactgctattaatacttgtgattgcattatagaagtctcatattgtgtttttcagctctatcaggtcagttacgttattctctatcctggatattttgtttttcagctcttgtaatattttatcatgatttttagcttccttgcattgagttagaacatgatcctttagttcagtggagttcatttttatccatatcctgaggtctatttctgttattttagccatatcagcctcaccccatttcaaacttttgctggagaggtgatgtggtcttttgcaggagagrgggcatcctggctgtttgaattttctgtgttcttgtgctgattttttctcatctttgtgaacttaactaccttcaatctttgaagttgct

SEQ ID NO: 605042 - DNA, 513 bp, Homo sapiens
agattttgctaacataattaacaaagttgatttagtcgatatatatagaattgtgtatcccacaagtagcaaatakacattttcccaagcaaagcacacacgggtcatgggtcatttaaaaaagtgactatgtaattggccataaagcaagtcaatgacagtgtgacaaacattaaagcataggtaatatatgggtagcagagtctctgatcataatgtaactaagttagaagtcactagtataaagtatgtttttaaaagcaccatacatttggaaatttaaaaccagacatctcaattacttacaagtcaaaggacaattaataatggaaattaagtaataatacttaggactgagcaataactaaaatactattttcaaaacttttggggagatgtaaaagtgatactttatgccttaaatgtttatatttttaaaaagaaagtaaaagctgaaaattaatagaaaaagaaaatgtaatgtaaaatcccaaaataaaataaagttggaag

SEQ ID NO: 605043 - DNA, 559 bp, Homo sapiens
aatgggcaagttgagatgtcaagtgacaaacaggctaaggtgagtctgccagcaaaagggggcagggaaggggccctataagccaaatctgcccacaggctcacttgatctgaccttcctcgtgtctagcccaattgctgtgacattgctgaaggattagatacgtggaggggaggggtaaaccaaactgtcacggtacaagtcagagctgattaaattccttttcttttgtggggtatttttttgtttttttttgtttgtttgtttttgatgttgtttttgatggagtttccctctgttacccaggctggagtgcagtggcatgatcttagctcactgtaatctccacctcccaggttcaagtaattctcctgcctcagcctcctgagcagctggggttacaagcgtgtgccaccacacctggctaatttttttttgagacggagtctcgctctgttgcccaggctggagtgcagtggcacgatctcrgctcactgcaagctccatctcccaggttcacgccattctcctgcctcagcctgccgagtagctgcgactc

SEQ ID NO: 605044 - DNA, 596 bp, Homo sapiens
tcaaccacaggagagccagccagtaggggattgtggcaaacagactgtgaccctctcgccctcactgcctggtggtgaatcacccttgggtggaatggccacagggagcccaggtccccagaacaggagcaggccctaggtgtgtggcacctcttgggctgcatgccgtgggcctgctgatgctatcgcaggtcaagagggctgtgtctgcactgggaagttgcaggggttcctgggggaagactgccttgtctggtcttgccccatgaggcctggctcagggctggtgaagcatctaggtagatgagaagcaggaactagcacaggagtggtcccggtgggcccagttccctcacagccagcagcaggactgaggctgggcctgtaaccagcatccccagggcctccaaggaggggctgcwgcagaactgcagagtccatcgggagggctgctggggctctaacccagagcaagaggccgaggacccagggcagtgcctaaccaggggcagccacggccgcagctgcagccatctgctggcacgttggaggagctggagatggaggcagctggcagtgccgtgcagaaggtctga

SEQ ID NO: 605045 - DNA, 596 bp, Homo sapiens
tcaaccacaggagagccagccagtaggggattgtggcaaacagactgtgaccctctcgccctcactgcctggtggtgaatcacccttgggtggaatggccacagggagcccaggtccccagaacaggagcaggccctaggtgtgtggcacctcttgggctgcatgccgtgggcctgctgatgctatcgcaggtcaagagggctgtgtctgcactgggaagttgcaggggttcctgggggaagactgccttgtctggtcttgccccatgaggcctggctcagggctggtgaagcatctaggtagatgagaagcaggaactagcacaggagtggtcccggtgggcccagttccctcacagccagcagcaggactgaggctgggcctgtaaccagcatccccagggcctccaaggaggggctgctgyagaactgcagagtccatcgggagggctgctggggctctaacccagagcaagaggccgaggacccagggcagtgcctaaccaggggcagccacggccgcagctgcagccatctgctggcacgttggaggagctggagatggaggcagctggcagtgccgtgcagaaggtctga

SEQ ID NO: 605046 - DNA, 596 bp, Homo sapiens
tcaaccacaggagagccagccagtaggggattgtggcaaacagactgtgaccctctcgccctcactgcctggtggtgaatcacccttgggtggaatggccacagggagcccaggtccccagaacaggagcaggccctaggtgtgtggcacctcttgggctgcatgccgtgggcctgctgatgctatcgcaggtcaagagggctgtgtctgcactgggaagttgcaggggttcctgggggaagactgccttgtctggtcttgccccatgaggcctggctcagggctggtgaagcatctaggtagatgagaagcaggaactagcacaggagtggtcccggtgggcccagttccctcacagccagcagcaggactgaggctgggcctgtaaccagcatccccagggcctccaaggaggggctgctgcagaactgcagagtccatcgggagggctgctggggctctaacccagagcaagaggccgaggacccagggcagtgcctaaccaggggcagccacggccgcagcygcagccatctgctggcacgttggaggagctggagatggaggcagctggcagtgccgtgcagaaggtctga

SEQ ID NO: 605047 - DNA, 504 bp, Homo sapiens
gtaaccccagctcctgggtaggctaagacaggagaatcatttgaacccaggaggtggagcttgcggtgagccaagatcacgccactacactccaggctgggagacagagtgagactctgtctcaaaaaaaattttttttttagttaaaaataygttaaggggagaaaacttcagtagaaacttgtcattagcagtaaattattctttggtgtttttggagttaatattttctaaaatggttgccgattgatcaaaataactatttttatacttttgcatggcttctgtgtattgcaataatttaataataagtaaaaagactcccccttaaaagaaaaagtgctcgttagtgattgtaattccatgttgtgtggcatgttccttacatgttttgaaaaggttatggattcactcactgtagcatcaaaagtataaaggtgagaggtgagattctttgttgcaagtgctgagaaataatcatttaaaggtcaattgcactcaaaa

SEQ ID NO: 605048 - DNA, 336 bp, Homo sapiens
aacgatctttggtaattggtaatgattttaatgaaagtgagtacattcatagcagttattggaatgccactgcacaaaagtctgtcattacagtcacaacttatgtcctgcaaaaatacccttgagatgtaaaataggcacmttgttcacaatctttcaattctctaaatgttattactcccatgtttactgggaaggtacagttaagaattgtcctctaaatttgttccctcaaaggcttttgtttatcttcatttatatattgactgactttctttgggatccttggttcataaaaagtattgcacttctcaattttaaactggattcaggagg

SEQ ID NO: 605049 - DNA, 602 bp, Homo sapiens
tgggcgacacagctagactccgtcgtctcaaaaaaaaaaaaaaaaaggaagcagaagctcagagaagcctaagggtacagagcggggaaacgtgagagactgctctgctctggattcgaacccagctcagagtctaaggcctggcaccttccctgagtcccacagcctcccagcamgcgcatgcgccctttaaactccagcagctcgctatgggtggatctgcggctattattgttgtgtgttcattatcactgcggtgctaaaggacgtccttgattcagctgggacgccgacctccccactgtcggcgcgccatcggtcctgaaaactcagggcccgggcggccccgcgcggctgcggcggaaaagacaacccccggggcgcggggtcggcgtggcggcgccccctggaggcagtgctcggcattgcccgacctggggaggaacgaccctgaacgcagcttcctctgaagcggtggctggtggtcagcaccgggtaggccccaatggctcccagacagcggtcccagagggcagggagaaagaaggaaataaagagaagaacacttatcaagtgtctcttgtatactgggcaaagggctg

SEQ ID NO: 605050 - DNA, 310 bp, Homo sapiens
atatatttaggatagttaggtcttcatgttgaattgaaycctttaccatatgtaatgcccttctttgtcttttatgacctttgtttaagtctgttttgtctaaaattaggatcgcaacccctgcttttttttgttgttttccatttgtttagcagatatttctccattcctttattttgagtcaatgtgtgtcattgcatgtgagattggtctcttcacagcataccaatggatcttgattatttatctagcttgccactctgtcttttaactgggggatttagcccctttacatttaaggttagtattg

SEQ ID NO: 605051 - DNA, 498 bp, Homo sapiens
tggaatgggttaagactatggaggactattgggaaggcatgattggattttgcaatgtgagaaagacaggagatttaggaggggacagggcaaaataatatggtttggctctgtgtccccacccaaatctcatgttgaaatataattctcaatgctggaggttaggcttggtgggaggtgatttgatcatgggggcagtttctcatggtttatcatcatccctccttggtactgcatagtgacagatttctcacaagatttggttgtttaaaggtgtgtagcccctttctcccacttcttcctgcttctggcatgtgaagtgccatctccmccttcatcttccaccatgactttaagtttcctgaggcctcccaagaagctgagcagatgcctcatgctttttgtacagcctccagaaccatgagccaattaagccccttatctttataaattacccaatctctggtatttcttcatagcaatgtaagaacgaactaa

SEQ ID NO: 605052 - DNA, 562 bp, Homo sapiens
gtcatgctggaactgggatgtgaacccttgaggagggaagcctgtcccatctggagcagatacctgtaaggaggtgtgaagaggttggcttgggagtaggaagagaggttggaaactggaaccaactgctgctggaagcaactagcactttaaggtaatgagctattcctggggtaacagaaactagaatagcaaacaaatggggagcagaaagtccttctccctcttccagtcttccagtctggcagaagctagcaggaagccagctaataacagagaaatgtgttttcatagtccgaatcccagcatagcagaacacagaaaggatggttggtttggaaccagagaygctaatagcttaatacctggcacagtccactcctttggctactcagcctccacacctacccttttttgcatatttgaacttagtcacagttactcccgaatattctgtaagttatataccacattgtaatgttaatcaccaatatccttccttatatgaaataataaagggaagagaggagagagaagatgtgtctgtatttatatacatgtg

SEQ ID NO: 605053 - DNA, 570 bp, Homo sapiens
ccactgcactccagcctagatggaaccttgtctcaaaaaaaaagtagccttcaaccaagtactaacaggaattggtgcataaataacctagctcccttgcaccttgggtaaaataactctgaggtacatgttcagtactggctcctagaattttctcagtgaaagtatgctcaattttcccacaaaagtaatttattttgtagaggccctttattggcttttttccccctccatgtttcatattccctctcctttaccagtgtgtcttgtattatctcaaaaaataaaatattagcttctgaatatttgtctcgcygtttccttctggggaaaaaaaaactaagataataccattgctttaatggtacatgttaattggttataagacacatttttacacatattttaacatttctgagatcttgatgaactttacagctgatgctattttatagtttaacagactgtacttttttctttcttaaaggcacaaaaataatggtgcgtcttataatccatgacatcttagagttagtgaattacatatggtactatctgttggaaaaactt

SEQ ID NO: 605054 - DNA, 488 bp, Homo sapiens
caaggtagtgggtcattgctataacatacctgagaaagtggaagctactttagaactgggtaactagcagaggatggaacagtttggaaggctcagaagaagagaggaagatgagggaaagtttggaacttcctagagactttttgaatatttttcaccaaaatgctgatagtgatatggacaatgaagtctgggctgaggtggtctcagatggagatgaggaacttattgggaattggaacaaaggtgactcttgctatgctttagaaaagagactggcagcagtttgcccctgccctagagatctgtggaactttgaacttgagagagatgattagggtatctggcagamtgaatttctaagcagcaaagcattcaagatgtggcctgggtgctcttaacagcgtacagcaatatgcattcacaaagagatggtttgaaattggaacttacgtttaaagaagaagcagagcagaaaagtttggcaa

SEQ ID NO: 605055 - DNA, 540 bp, Homo sapiens
aaacttttagtggtgatgcatagctttattatattgattgtggtgatggtagcaggagtgtatacatatgtccaaactcagcaaattgtatacatttatcgtgtgcagtttttgtatacccattatgcctcaacaaagctaaagagaaattaatcctctccttttatgtgctttcctagctgtgagtttcatagtatttgcttaatgtcttaccctgtcttactcttgcatgtgtatgcttcctcactagacccctgctgaccaggtttcattcaccttccaaaagcatttcatatgcattgtttaaacatgttgagatcactttttcttccttttccttcttccaatcctccatccccaccacactgccaagacctcctgaagagattatgttctatccaaaacctagcctattcctttcagctacaggagaattttacgaaacaggtggtaayactaataaattctatccaatagaactttacagtttataaggtgctttcactttcattatccattttatcattcatttttaaacac

SEQ ID NO: 605056 - DNA, 572 bp, Homo sapiens
tccacgtccaggcagctttgtcctgcaaccattctgggccaagacactgtcctttctcatttgttaccctgcaatatcttcctatcagacctccctgctccccatcttgtcccctgaaatctaccctctccatggagcagccaaagtaaggttttaaaaatcaagtcactttcttactaaaaacccttccaaaaacctatggcttcccactgcccttcaaagaaaagcctaactccttactgcatcttacaaagccctatgtgacctgacttgcactggcttcttggtctcggttcctactacttgcctcctcactcactcagctccaactacactgactctctgtttctctaacatggtgggtctcaacgtgtactccctggaccagcagcctcrgcatcgcctgaaatcagttagacatgcatttctccagccccattccagacccactgaatagaaactccagaggaaacctgagcactctggtttaacaggccatccaggcgattctgatgcatgcttgagacccagtgatctgacagagaggctcatttctacctcaggacctttgc

SEQ ID NO: 605057 - DNA, 572 bp, Homo sapiens
gcatttactatcataatcccctttgcacagatgagaaaattgaacctcatacaggtgaagtgatatgcacaaagtaatagagcacttctgctcaaaaaaataaacaaaaaaagaattgaggatcctggttctttccactatgccacccttcccccaggacgttatgcagaggccattttcagctttaggtaaggaaacactagccaagcagcatcgctgtctgaaaacacagtgggctgtcccaggaagcagtgagctctctgttgttatatgcatccaaacagaggccggaaaatcatttgtctgagatgaggtagtgatttctgcgaatagggatattacactgatgacttctacgtttctggatgtaacatctcatgattctattcccagttacgtggacttgggaccatscttctcctctctagacctcatttttattccatggagttatatgatcattaaggtgccttgtaggccttgcattaaaaggttcctagttttaaagggcagagatggaggccaaggacactgagcactggctaggatttctctcactgagggtcctgttt

SEQ ID NO: 605058 - DNA, 583 bp, Homo sapiens
aaggatgctttctgcagtggagggggagtttttatttttccataaatcacttccagccttcagataacaattttatagtctgttaaggtcctaagacagaatttacgattctagggaatggctccttcatcctgatgtggccctttcttctgcctttcaagcatcccacccacccctttcttgaaggatctgggaaagggaatgggargggagggagctgaaccgatgacttctaccactgaatgcagacaccctgtgctttatatcttcaaaacactctaacatccgtcatgtcatttcaccagcatgaataggctggaaataggctgagcaggtcttactagtcccattttccagatgagaaaactaagacccgtaatagaagcaggatctaaactacttcttctgattccaagtttctttccaacatgctatgatgcccccctaattactgtatggcctcatgtctattcctgcgcttagaagtaacccaggtttgaagggctgaaattgtcaaaatacagcccaagaattaaagtaattgtcttagtaatgatggaggagaactgctgtcctccttccc

SEQ ID NO: 605059 - DNA, 583 bp, Homo sapiens
aaggatgctttctgcagtggagggggagtttttatttttccataaatcacttccagccttcagataacaattttatagtctgttaaggtcctaagacagaatttacgattctagggaatggctccttcatcctgatgtggccctttcttctgcctttcaagcatcccacccacccctttcttgaaggatctgggaaagggaatgggaggggagggagctgaaccgatgacttctaccactgaatgcagacaccctgtgctttatatcttcaaaacactctaacatccgtcatgtcatttcaccagcatgaataggctggaaataggctgagcaggtcttactagtcccattttccagatgagaaaactaagacccgtaatagaagcaggatctaaactacttcttctgattccaagtttctttccaacatgctrtgatgcccccctaattactgtatggcctcatgtctattcctgcgcttagaagtaacccaggtttgaagggctgaaattgtcaaaatacagcccaagaattaaagtaattgtcttagtaatgatggaggagaactgctgtcctccttccc

SEQ ID NO: 605060 - DNA, 565 bp, Homo sapiens
gggatctcattactcttttttattccattcattcctttattcacttaatttcttttatctgaacaacagatatttactggacagccatgatgttaagcctgggaacaaaatcctgaatatcacatacttaaacatagtagttaagagaaagttctaaaatcagattgcctaagttcaaattccaactccattatctagtcgctgcaacaccctgggcaagcacataccctttctgtggctcaatttcctcatatggaaaatagaactaataatactttsaagctggcatattacaagcatttatacatagaagccagtgatatacgcaagtaaacagacatctacaatgcaatgaagtaagtgtacagaatgctgtgggagcctctaatccatttggggtggtggtcagggaaggcttcctagaggcagtgacctctaagtgagacattatagccaaagaggagttgtccaagcaaagagaaagagaactactttagtatgaggaaatggaattgcagacactatcctgaaataaagagaaagtgtatactgttcaaagaattat

SEQ ID NO: 605061 - DNA, 565 bp, Homo sapiens
gggatctcattactcttttttattccattcattcctttattcacttaatttcttttatctgaacaacagatatttactggacagccatgatgttaagcctgggaacaaaatcctgaatatcacatacttaaacatagtagttaagagaaagttctaaaatcagattgcctaagttcaaattccaactccattatctagtcgctgcaacaccctgggcaagcacataccctttctgtggctcaatttcctcatatggaaaatagaactaataatactttcaagctggcatattacaagcatttatacatagaagccagtgatatacgcaagtaaacagacatctacaatgcaatgaagtaagtgtacagaatgctgtgggagcctctaatccatttggggtggtggtcagggaaggcttcctagaggcagtgacctctaagtragacattatagccaaagaggagttgtccaagcaaagagaaagagaactactttagtatgaggaaatggaattgcagacactatcctgaaataaagagaaagtgtatactgttcaaagaattat

SEQ ID NO: 605062 - DNA, 586 bp, Homo sapiens
gcacactgtttttctaatcactatgtgttgtccctcacctgaatctacccctctgacttccgctcatctttcaaaaattagctcaggcatcatcttctttaagatttccgtgggactcaacctctgccatgctctacctcataccctcatctgtgtttctttatttgtgatgacacagtattgtcattatccctttgcttccctggcttcccgagagtccataaaaccctgatggcagagactgtttcttttatttctgttctccaaactgggagtagaggtgctcaataaatattgctacataaataataatttatgtgcaataatttatcacataattgcaatgtatacagcacttcatatttttctygggcttatcaagaatataaggtagatatttgtgggtatttgtatcctataacagaaacaatgtttggccatatccccgagttaaaaaattaaactgtaggtgctgaagctcaagtcctatgtctttaaactgcattcagtgaaccccaaataaatagcatttttccctgcctaggttttggaaaaaataaaaaataaataacagtaaagagagaaa

SEQ ID NO: 605063 - DNA, 510 bp, Homo sapiens
tggcacaagcccctaggctcaaggacaggataaaagccttcctgtctctcccatgatttctacttcatttatggcttagctccatggagttgctaaaagaaagggtcacgtttagaaaccaaatttactgagtagacaaaggtagatttaggcaaaaacgtgaatgctctgatgactcaggataatgtagaaaactgggtagtggtgggctctgcttagaagaaaaaggggcttctgggatatgtttttcaagggccctagcacagtgaagaaatgtagttgtcagaaatgagcttttggaaggtactgctgctttaagaaaaygcaagggctgggagcagtggcttatgcctgtaatcccagcactttgggaggctgagacagatggatcacctgaggtcaggagtttgagatcagcctggccaacatggtgaaaccccgtctctactgaaaatacaaaaaattagccaggcgtagtggcgggtgcctgtaatcccagctactcaggaa

SEQ ID NO: 605064 - DNA, 607 bp, Homo sapiens
ccttttactttttgggagctgtaaaaagtcctgctgtttggataagaaatatctggagttgtttataggatgcagaaattgttttaatagtaattgatgatagccgacatttattgaatcattactacaagccagattctgtatatagaaaaattccttgctcttgctagcttatttccctgtcgtttatttttcctctccctgaatcacttcyagtgatccttttcaaccaactagataatgtcctgttcatctcagggcaaaaaggggctctggaaatcacgtagctcaatgtctgcccaatgtcagagcttccttcacaatctccctggtatgtagacatccaaattttgctaaatcaatctctatggcatgttgcttgctacctcataaggcagttgctagaccataagttctgaaatgttagggcccatatttgttgtgttcactttggaatttcctgtggccagcatagtacctggcaacatagtggaatgtcaataagtatatcttaaaagaatgactgaccatacaaaccaacatttatttagctctaatttttattttccttgtctgtaaaatggtggtaacaatactaacctcagaa

SEQ ID NO: 605065 - DNA, 581 bp, Homo sapiens
atctaccctatagggttgtggtaagaattctgtgtataagcctgtcacatagtaagcaatatggagatattagctcttattagtattattattttgccttctatgatctcacttaattctcaccaccaccttgggagctaagcagggaagtctggcctcctcattttatagttcaggaacctgtagcttaatgatagagaaattgtggggtgagagatgggatcagggaatttggctcccctgaaactaagggacagttttgaaattggtgtacacttagacctttgatgagtacaggtgacattgaaaatgtcacaaaattaatctctcctcattataaaccattgcactaagacacagcagtagcaagaaatgaacacattctcagtatagtccaagaaaatcccttttctcaagaatgttgcctatataaagaatggccattaaatgtcaatgagggacactggatggtgtttatgagccctaactgaggccctggttcaggaactggggcyttaagagagagagagagaggagtagagggtggagggcagcaaagaaacagaggggaaacctgagct

SEQ ID NO: 605066 - DNA, 628 bp, Homo sapiens
tttcaataagctgagttgtttgttgaaaacaaattcaatttagaattaaaaatttgaattttagggctttggccttctcttgattcaacaatgcctttgcctgtagctccttacaacaaattgtatgcaatgtgtcatttccagatgtctctacccacacttctatggctgccaggtgtcctgtrcacacagactgcccagttgctcaaccctgagtttaggcccatggggactccgcttattgcaaattaagagagactcaggagacacactggcaccttgcccacaggtgtcatttacctgtgctggtcctgaccaacaagttcagtttagtaagctcaatccttacatataccaatattcactcgtataatcattccatgaccccttgctgagtcctactatggatcaggcattaggggcaagagacagaggtcaggtaaaaaggtaacctaggcatcattcctgccagaggtgcccttcatctagcagagatgacaggtgaaaaacactccctctttgaccttagtaagactcctctgagccctctccctgagcagtcctcaactttggatctgtctctagcttaccgagcccagttttagcaaagaatcctgctaagtcagtt

SEQ ID NO: 605067 - DNA, 469 bp, Homo sapiens
gaattcatccagaagccagaggataagacattcatttactcccagtgtttctttgcctctccagggacagaacaggatgaagaatagaaaacagtagatctggagtggctaacaaaagtaacccggtgtgtcagttggtttaggctgccataacaaaataccataccctgggtggcttaagcagccgacatttatttcttacaattctggaagttggaagtccaagatgtgtgtgccagtgggattggttcctggtkagggccctcttcttggtttacaggtggccatcctctcattgtatcttcatgtgtgtgtgtgtgtgtgtgtgtgtgtgtgtgtgtgtgagagagagagagagagagagagataaaggcactaatgacctactcacctccatcccaagtcctcacctccaagaatcatcacattggagattaggattttaacatatgaatttggtgggtaccca

SEQ ID NO: 605068 - DNA, 469 bp, Homo sapiens
gaattcatccagaagccagaggataagacattcatttactcccagtgtttctttgcctctccagggacagaacaggatgaagaatagaaaacagtagatctggagtggctaacaaaagtaacccggtgtgtcagttggtttaggctgccataacaaaataccataccctgggtggcttaagcagccgacatttatttcttacaattctggaagttggaagtccaagatgtgtgtgccagtgggattggttcctggttagggccctcttcttggtttacaggtggccatcctctcattgtatcttcatgtgtgtgtgtgtgtgtgtgtgtgtgtgtgtgtgtgwgagagagagagagagagagagagataaaggcactaatgacctactcacctccatcccaagtcctcacctccaagaatcatcacattggagattaggattttaacatatgaatttggtgggtaccca

SEQ ID NO: 605069 - DNA, 686 bp, Homo sapiens
ttgcctttgccacagtactcttccatctgttctgtccagctatctccctcactccctttctccccatgcttaagttgaatgcatccttagaaaatccaattaggtgtctcctctgccaagaagccttccacaattccatgggagctgagtgtttggtctcacccgctctgtgctccctaatgtccataatgcccacatggcaggcagaatgaccctcaagatctcacgccctaagccttggaacatgtgactgtgatgagatctcactctcatgactgcattatgttacaaaacacagggagcttgaaaaagggagattatctgggtgagccagatctcatcatgtaaagccttaaaaatacagttgtgttctcaggctggtagcagaggaaggggaagacagagagattcaactggcttgaagatggaaaaaatggaccacttgagaagaaatgtgggcaacctctaagaacattggtgcccccctggcttgacagccagcaaggaaccaaggaccacaratgcaacccgaaggaactggattctgccagtgatctgaactagcttggaagtggattctacttctgaacctccagataagagcccagccaaggtgacaccctgattttgcctggtgagtccctgagcagggagctcctctgagcctgtctggactgagaacctgc

SEQ ID NO: 605070 - DNA, 540 bp, Homo sapiens
acactcagaatgcaggaagacacaggaaggacatatggaagggcttcatgtgggcagtgacacaaattgaatactgaaagccaagtaagttctgaaagcatcagcagtatgagtgagaaacagtgactgactacagataataatcttacaattgccaagggctgagctcttctgatgtgcstggcactgtgctatgtgtatacactccttttctcatttaatcttcacaactactctttgaggcaggcactatcattgccattttagagatggagaaactgagacttcgagaaatgaagtgacttgcccaagttcacagcatggtttaagtgtcagtgctggggttgaaatccagacatgtctgcaaccaaatcacattctcaaagcaccttctaggttgccagtagcctattatgttttccatgaatgagactgagaaaaagaaacctgacctcaacttctctagggcccttacaatactaattattcaaggcctggtcatgttgaacataagtataccagattgttagtcatacctgt

SEQ ID NO: 605071 - DNA, 556 bp, Homo sapiens
ttcgtaattacgtgcttctccccaatcacgtagcattatacaccacatcaccacactgctgaaaaaagccccaaatgctaattagtcctcaaattatcattgatttgatttgatgttgaacaagctttgccatttatatttaggcaagaacttcagattcaagatgctctctttcagattgcgatttttaaataactcagtggggcctgtcttgcttgttcagtgtgtttatgtcaagaaatcagactggctgctctccctggctgcagatgaatgccaggttgattgagtgcaggagaggaattatcctctcggccagagctcaaagcctgggaccccctgaatgcagaaacccccatcgtgcaggaggacttgaggaggaraaagatgaaggaaggagtggaagaagacggtctggaattgcaaacagattccacctgaagatggagaaactgtgttattgagtcacattcagcaaatgcttcttagtcctttctgagagccaggctctttcacaggcatcatctcctttaattctgacagcaacccagtgata

SEQ ID NO: 605072 - DNA, 547 bp, Homo sapiens
tggaaaccaaggcccagaaacttgaggtaatgtcactgttcacagcagtgagggagagaagctgaagtttatatacaggtcctctgaccaggtcccctgaaaggtgatttcatgccttctccttggtcacttattgtcttctgggtccgcacttycctgcagcccaccttccaaacccctcagcccctatccccatcccagacactctgccagatccctggcaagtaagacaattacaaaaatccctcttggctttgatttttaaagtactaaattatgtgtgtgtgttttaaaattttccccatgtgaaccatgctttaaagggaccatatcactttttaaagagagggaataatctgaaaaccataagtattgagaatcccagaacataaaattttcccattactaactagtgcctattattcctgtcatttgattaaaattttccacaattcctatggataacctttttgaatacatccttaataatcagtgctagggcaaaatttcaccaaagtctgtatttatcctgttaatttccacgttg

SEQ ID NO: 605073 - DNA, 252 bp, Homo sapiens
tggtttcagaccactgcaataaagcaagtcccacaatttttggggtttccagtgcayataaaagttatgtctacactatagtagtctgttaagtgtgcaatagcattgtctctaaaaactgtgcatacataaattaaaaatacttgttgttaaaaattgtgaagaatgccatcattcttcaaagaatgacccgttagcaacaagcagaaatacaacttgaacaacctttggccaaaaaggagaagaattaat

SEQ ID NO: 605074 - DNA, 605 bp, Homo sapiens
aaaaagagacagaggtcatggattactcctattctggcctgagtaactgaatgaattatggtgcaatttagtagataygatccagtcggggaaaggtgaatttatggagggtgggaggagagaatatcaagggttctgttttggctgcattacctacaaggtgcttcacatctgaatgaacgtggaaaataggcagatggaaatgagtctgaaagtcaaaggagctgaagaaataaatttggttatagcacttagatgtgtttaaagccatggaacagaataaaccaccccccaagaggaatgtggaccaagaagagatccaaggttcaccccatttgtctttgtgttttccactgtgacatgcacgggatcaggcatgtagtcaatgttcaataaatgatttttaaattggatgtaaaatctttgtaccagaaggaagaataagatgcagatgcaaacatccaggacataccaattccctcagcatgctggggtctaggcttgcatcttgttaatcatcatggtcatattctgttctggcgtttgaaggttttctgggttctgatctcaaaagaaagaattctatgctttgctggcatttgctt

SEQ ID NO: 605075 - DNA, 609 bp, Homo sapiens
ggtcccagctactggggagggtaggacaggagaattgcttgaaaccaggaggtggaggttgcagtgagctgagatcacgccactgcactccagcctgggcggcagagctagactccatctcaaaaaaataaatgaaataaaataaaaaataatataagtagaaaaaaatgtatttgctctgacaactaaaatcttgaaggagtatccagcatttgttctggctggagacagagatgctcaaaaagtgtcaycggggttctttctttctctgctcttctattctttgcaggttcatcacattctcccctacttccattgggtcagcacaaacagctacaggcacctccagtttatatcattcttatagttcacgaccaatggaagacagcatctttcaaaaaagttcccttgaaaaagttccaagaaggctttacttggcctaccttgggcctagcttgtctcctactgtgatagaggagtcagaactaggactgaaaaggggtggtgtgaggtcatcctttgctaaatctcctgggatggggaaggatggttccccagagaaatgaatgctgagcgaacatcagtatatgtcaatctcataaggattag

SEQ ID NO: 605076 - DNA, 580 bp, Homo sapiens
tagataaggtgttcttgtgtgtgaaatggaatacatacttctcagcattgtcttccataagcagaaaaacttggtacataggaggtgctagaaaaggataaatgtcgagaatgtttgttgaaatctcaatgtttttccagayggcagattcaaagggttgtgtgcttgagggctatgctggtagaacagctgggtggatgccagtatctttttctcaatttctatccatacattctgggctccctgtggacccagctaatgttagtgtattattcacataagcatcatttattggataaaaacaatgtgcattaatttgaagcaaaaaataattaagaattgagggagaggagaaatgtgtcatatgacagtcaagtttattttttacaactattttcttatgatttccaaaattaggctcatctctctcataatagtctatcagttaaaaagaaagcatttcagaggttatctgctctgaagccgtaacaggaggatggaaaaactgtggcccaggaaagtcgcatgcttctccaaaattgacacctacttagaagcaaaacttggactgaaacccaat

SEQ ID NO: 605077 - DNA, 609 bp, Homo sapiens
ggtcccagctactggggagggtaggacaggagaattgcttgaaaccaggaggtggaggttgcagtgagctgagatcacgccactgcactccagcctgggcggcagagctagactccatctcaaaaaaataaatgaaataaaataaaaaataatataagtagaaaaaaatgtatttgctctgacaactaaaatcttgaaggagtatccagcatttgttctggctggagacagagatgctcaaaaagtgtcaccggggttctttctttctctgctcttctaytctttgcaggttcatcacattctcccctacttccattgggtcagcacaaacagctacaggcacctccagtttatatcattcttatagttcacgaccaatggaagacagcatctttcaaaaaagttcccttgaaaaagttccaagaaggctttacttggcctaccttgggcctagcttgtctcctactgtgatagaggagtcagaactaggactgaaaaggggtggtgtgaggtcatcctttgctaaatctcctgggatggggaaggatggttccccagagaaatgaatgctgagcgaacatcagtatatgtcaatctcataaggattag

SEQ ID NO: 605078 - DNA, 609 bp, Homo sapiens
ggtcccagctactggggagggtaggacaggagaattgcttgaaaccaggaggtggaggttgcagtgagctgagatcacgccactgcactccagcctgggcggcagagctagactccatctcaaaaaaataaatgaaataaaataaaaaataatataagtagaaaaaaatgtatttgctctgacaactaaaatcttgaaggagtatccagcatttgttctggctggagacagagatgctcaaaaagtgtcaccggggttctttctttctctgctcttctattctttgcaggttcatcacattctcccctacttccattgggtcagcacaaacagctacaggcacctccagtttatatcattcttatagttcacgaccaatggaagacagcatctttcaaaaaagttccyttgaaaaagttccaagaaggctttacttggcctaccttgggcctagcttgtctcctactgtgatagaggagtcagaactaggactgaaaaggggtggtgtgaggtcatcctttgctaaatctcctgggatggggaaggatggttccccagagaaatgaatgctgagcgaacatcagtatatgtcaatctcataaggattag

SEQ ID NO: 605079 - DNA, 638 bp, Homo sapiens
aggaggagagacattttcatgaagaggctttggaatgagaccaacctggatttgaatcctgctatgccacttcctacctatgtgaccttaggcaagttacttaacctctctgagtctcgstgttctcaactggcaagacaagcagagctgctcagctcagaaggttgttgttgaggattgcactaattaatgttatagcaagggagctcctgaacacatagcaggtgtcttaaagtgacccttgtgttaaagaataaggaagatcctcaagcatcagtgattaaaggggtaagagaggaaattagtggtccagtgaagaaaattgtgatggtattgctgacaatcacttcattttgaactgtgccagggacataattggtataactcaatttcctatctgttgggagtgtggtgtgagcttcagatgaaacgagggctcatattgacaacagagaatgagaaggcatttggaagaataaaaagaatgcagacctgagctgtctcaccctccaccccctgcctcagtcttctcttctacaaaatgcggagaagaactagataatccgaaaagccccttctggatataaaactctgcatatcaagaagaaacataatggtgggctgagttcagtggactt

SEQ ID NO: 605080 - DNA, 638 bp, Homo sapiens
aggaggagagacattttcatgaagaggctttggaatgagaccaacctggatttgaatcctgctatgccacttcctacctatgtgaccttaggcaagttacttaacctctctgagtctcgctgttctcaactggcaagacaagcagagctgctcagctcagaaggttgttgttgaggattgcactaattaatgttatagcaagggagctcctgaacacatagcaggtgtcttaaagtgacccttgtgttaaagaataaggaagatcctcaagcatcagtgattaaaggggtaagagaggaaattagtggtccagtgaagaaaattgtgatggtattgctgacaatcacttcattttgaactgtgccagggacataattggtataactcaatttcctatctgttgggagtgtggtgtgagcttcagatgaaacgagggctcatattgacaacagagaatgagaaggcatttggaagaataaaaagaatgcagacctgagctgtctcaccctccaccccctgcctcagtcttctcttctacaaaatgsggagaagaactagataatccgaaaagccccttctggatataaaactctgcatatcaagaagaaacataatggtgggctgagttcagtggactt

SEQ ID NO: 605081 - DNA, 479 bp, Homo sapiens
cttgccatccacattgcagcaaaactttggaaccctgaattttggattcataatctcacaactgagaagggtccctcctcactcttaaaaatgtgcactcattgaaacccttagggtaaagctaaccaggtaagtctctccccagaaaacggcatccttgatgtgaacagcttttcccatgatcacagatcaagacttctactatcataagactcttatctttgaatattttttcttgtttatgcttctatgaacaaaacaaatgaaaagggggtctgttgtgtgcacttatagggtatacttttatttgtgaaggattttgcagccagccttattcatggataaccttatactttataaggtaaaagatgaaggcccaatgtaggtgagaaactttaatggtacatacgttgcctcatcatcagtcagaaacataacattaattcactcttcttaaytcacatcatgaattaaagaga

SEQ ID NO: 605082 - DNA, 634 bp, Homo sapiens
tttttaatggaatgtaagagagtagaatagamtaggttgtatagaatagaaaaaaataggttagaatggaatagcatgaggaaacaatggcaacgtgaaaaattagaagagaataaaacatattaggttatattagagtgcatctcatatagcatagttaaatattatttcagttaaacttttattttagttgtatatgttattgcgtgcacatgtgtttttattgcatctcagtgtaggttgattattgtaagtcaaggtccaaagtttgaaaaccactgacaaaaaaatagctcatacttatgtaccacttcttatttatcatatatttctttaaaacactttgattgtattgattaaactaaaggtaaaatctcctatggcttcttatttatggttgaataagtgaaggcatcaagagatgacctgtatagtcatttagcagataaagggctgtgttggattaaaccccagataagctgtgctcttagccactaatctaaggcttctgacaaaaatggcagcagacccaggattggagactagccctctgattcacagtgtgatacaatactgttttacttaatcagttacctcttctgttagagcaaatcccaatcctaaatcagaattt

SEQ ID NO: 605083 - DNA, 535 bp, Homo sapiens
tctactcttctaaggcccatctttctcttcaaaaatcacttttctgtgatttacctgcccattttctttcctctttttaaaattttcttttttttatttattttttttggggacaggctgatatttattttttatttttttatttatattttatttttttctgtcacccaggctggagtgcagtgacgtgatcatggctcactgcagcctctacttcctyggtgcaggctcaagcaatcctcccacctcagcctcccgagtagctgggactgcaagtttgttccaccacacccagctaatttttattttttaaattttttgcagagatgaagcctcactatgtttcccaggctggtcttgaattcctgggctcaagtgatcctcccagctcggcctctcaaagagctgctatcataggcacgagccactggacctggctggtggtccatttttttgagtgtgcagcagagctaatcttggggaacatatagttgatgagaatggcaattttgattagccaatttcccatttcact

SEQ ID NO: 605084 - DNA, 623 bp, Homo sapiens
aattcacgaagttttggtttccttaataatcatacagaagtaaaaactagcagcttgcaggtttattgtcaaaaataggattagggtacgtgaaagtaccaagaaatgccgtgttatgtaacagttattcaggaagctggctactactgttttacgctcattgtatttcctaataagtcatggtgttattacttgtctatgaggagaggtgatagagtagatgagcatttatttggtaggggactatcgatcaggccataatacagtgaatatcatctgtgaatcctctgcatatgagggggtgtccttatgaatctgaggactctgactaccacttgccaggcatcaaactacacaaatcaataggctgaggacatctgccacctttcaaagtcctcatgttcgaaaaaatccatttatgagatggagagggttgkccctccaagggaagacactcagagaaagagatccagttggatgatccttttaattatatttattgacccttcaactggaagtcacccagttcccagacaaggatgcacaagggagattttaggctgcacttttaatggaagtgaaatgctgcagggtaaagcagagagcacagatgtttgcaaagc

SEQ ID NO: 605085 - DNA, 525 bp, Homo sapiens
aagagttgaagtgtattattcaagctcagacagtccacgacagagtcaggatccatctccacgcctgtccctcttgctggtgctctacataaacgtgcaatcttatatttcacatttctggagcaaactgggactgggaaggacatgaccatttcttttggatttgtgagaatgtcttggcaggaaacaacagagaactcagttgaactggaataaatcataatgggatttatcatctcacatgaacagaactctagagggatgtcacaggaagatcaatagctcaggaatgtaaggactcaggttctgttttgctgtcctgtgtgttggcttcctctaatggccaattctccccatcattgccagatggttgaagtaattacagaagcactccaaaatacattatccagcaatggaagaggaaggagttctgacttaagaaaattatcagggaggaaaactcacrgaaaccccccagtcaacattctctgacatctcattgacaaaactggctacctatacacc

SEQ ID NO: 605086 - DNA, 606 bp, Homo sapiens
atgtactattatgaccataaaactctgtgaatgttgagaaccgctgacctttacttaatgcttattctatgatagactctgtgcaaattctccatgttgtgtctcagtgaatcctcacaggaaaaccctggaggttggtactatttttatcaccatttagacgtaaaggaagtaaagttccagaaaggttaaataatttgttcaagtaagtggtgtcaaagcttggcttctgtctaatgaacgagtcttaggatgatgttaaaaatggatttctagttaagtagaaaatagagggaaagcatgatttgccctgagtgtggggtctttgctgccaactgagagcttgcatgtgtgttaaggggtgaggggatctactttgcctttgcagaatggcaggctatccacaaaacacaagatgaacaaaacaaatgaagcccaagactttargcaatttttcttttacttgtgttagtcaaaaataagaaattacagttcaagttttcctgtagtcttaattataggcctctgagctgtgaacaatattccaaatactaacaatagagaccatccaaaaacaaattctctagagatcccccctccccccaa

SEQ ID NO: 605087 - DNA, 620 bp, Homo sapiens
gttcacgttgtactggggggcatttgccaagcaaagtaggatttcacaacagaagaatttgctgtcccagaacatgtctcttgggagcctgagtgagaacactggccttcctgagccagggatttgtttaacaacagtgattcataatttcaacaaccaaaatgaatgtggaagcatgatgcgtgaagaccctgattatgagggacartcgtgctgccctgttctccctgacccctcttcaggagagccagctgtccaggggaaaggtatcacatcccccacatgccacaaaagtgctcctgcccagtggcagacctatgctcaactttccttgggatgattttctcattagattagagaaaaggcagttgtcaaaaagccatttcacatcagcgctccaagaggctttctgagtttgtgcaaagattatttgggtatttgaactactctgatataatgtttttggggcatttctgttcctccattttccctttgataagggtgctaggtcgtgttctctcttctgctggagatgcgattcccgtctgtccttattctgcccaggtgtggtacgagattctacccctatctactgggttgaacagaaaattaaaacgccc

SEQ ID NO: 605088 - DNA, 620 bp, Homo sapiens
gttcacgttgtactggggggcatttgccaagcaaagtaggatttcacaacagaagaatttgctgtcccagaacatgtctcttgggagcctgagtgagaacactggccttcctgagccagggatttgtttaacaacagtgattcataatttcaacaaccaaaatgaatgtggaagcatgatgcgtgaagaccctgattatgagggacaatcgtgctgccctgttctccctgacccctcttcaggagagccagctgtccaggggaaaggtatcacatcccccacatgccacaraagtgctcctgcccagtggcagacctatgctcaactttccttgggatgattttctcattagattagagaaaaggcagttgtcaaaaagccatttcacatcagcgctccaagaggctttctgagtttgtgcaaagattatttgggtatttgaactactctgatataatgtttttggggcatttctgttcctccattttccctttgataagggtgctaggtcgtgttctctcttctgctggagatgcgattcccgtctgtccttattctgcccaggtgtggtacgagattctacccctatctactgggttgaacagaaaattaaaacgccc

SEQ ID NO: 605089 - DNA, 620 bp, Homo sapiens
gttcacgttgtactggggggcatttgccaagcaaagtaggatttcacaacagaagaatttgctgtcccagaacatgtctcttgggagcctgagtgagaacactggccttcctgagccagggatttgtttaacaacagtgattcataatttcaacaaccaaaatgaatgtggaagcatgatgcgtgaagaccctgattatgagggacaatcgtgctgccctgttctccctgacccctcttcaggagagccagctgtccaggggaaaggtatcacatcccccacatgccacaaaagtgctcctgcccagtggcagacctatgctcaactttccttgggatgattttctcattagattagagaaaaggcagttgtcaaaaagccatttcacatcagcgctccaagaggctttctgagtttgtgcaaagattatttgggtatttgaactactctgatataatgtttttggggcatttctgttcctccattttccctttgataagggtgctaggtcgtgttctctcttctgctggagatgcgattcccrtctgtccttattctgcccaggtgtggtacgagattctacccctatctactgggttgaacagaaaattaaaacgccc

SEQ ID NO: 605090 - DNA, 503 bp, Homo sapiens
cgaattacagtgggtttattgaaatgtaaccccatcataactcaaagagtatctatagtcaggcacaccaccatttatctttaagtacaaatgcatgccctaacaacatacaggaatgatacaggggaggaatatctacaactgctcccttctttgctaacacagatatttgaaaaactatgacaatgcagtrgtaatcaaaagtcattcctcaatagactcctactgtctatctatcttatatatctgtgtatctatatacatgtatttattttatcatcaagtttctttgaagagcagacactgagttgaatcaagaaaaatgacctggttttgttccagccctctggacgccaggttgaggacaggcatgctgggtaataactgttttccactgagtacatgctaggtcacattgaagcctacctggcagcaccagccttggttcctgggctctctattgcaccaagacatttgtacaggtgttagggcaggcctggtgt

SEQ ID NO: 605091 - DNA, 635 bp, Homo sapiens
atggttgaatgtacatagaagcagtatgtctaaaaattcaatatagaattaaggtgttgctcttgagttgggtaccctgaggcatgggctgaagagaagcctgaggaagaagccagakgcaggtcctctgaagagttgatctcatggggcttagcagagaggaagccaggtatgagggaatgggatgaaaactataaaaactggaacgccaggtggcagggagactgactcagaggactgcaagagaaagaaattcccccaaattcctaaatgtctgagcgcacaactataatacgtaggtaacttgaggtttctatcagggatggggaggcagctgttaagggtccaagttgcctgggattccataggggtgctatctggcctcttttcagaaactatttaagcaatatcattttgttaagagactttactatgatattttaaaaataaactttattctttagagcagttttaggttcacagcaaaactgaacagaaagtgcagagagtttccatatactcctgccctcctgtgtatgtatagcctccctcactattgacatctcccatcacagtggtgcatttgctacagctgatgagcctacactgacacattgttatcacccaaagtccat

SEQ ID NO: 605092 - DNA, 552 bp, Homo sapiens
aacactagtagagttaattggatcaccaggtcagccattggctttattcagttgtatttgcctctctcattcctaccctcccccacaaaaatcttttcgtgtgtgacacactttttttgacagataaaagtgtgtgtatttatcatgtacaatgtgatatttttttttgagacagggtctcaccctgttgcctaggctggagtacagtggcacgatcattgctccctgcagccttgacctcccaggctcaagcaaaccttccaactcagcctcccaagtagctaggaccacagacacaggccaccaaacttagcgaattttttaaatttttgtagagatgcggtttcactctgtggtccaggctggagtgaaggggcactatcatggttcactgcagccttggcctcccaggctcaagcaatcctcccacctcascttcctgtagctagggtgacaggaacacaccaccagactcagagaattttttaaatttttgtagagatgaggtcacactgtgttgcccaagctggtctcaaactcctgggctcaagc

SEQ ID NO: 605093 - DNA, 593 bp, Homo sapiens
agctggggaaactcttggcataccgtgagctctggacttactcctgccccatttccccagtcacagaaggtagttctgtcccattgtttaagaragacctttgattggcttcctgtctctctcctccacatctaatcagtatctagtcccattgcccctttctccagaatacctcaattcctcccactgccaccacagccttgcacctagaccactgctacagactttaaatttttctgtttcaattcagcctacctccagttcactgcctagagcagccagatttagctttttaaacatgcacatcagatcctggccatttcattgcttataccttgctgggatttctaactgcccttgaaataaaatccaatctcttatttacttataagctggccacttcactcagaccccaagctccatgaggacacgaaccagatctgtcatttcagtgcatgctggcagtgtgcagcaaattgcctgacacctaggaagtactcacaagtaagtgctgcacaaaggaaatactctacaccattgctacaaggaataaagaaaaatcatttgctcctagcttggtcatagactttctt

SEQ ID NO: 605094 - DNA, 593 bp, Homo sapiens
agctggggaaactcttggcataccgtgagctctggacttactcctgccccatttccccagtcacagaaggtagttctgtcccattgtttaagagagacctttgattggcttcctgtctytctcctccacatctaatcagtatctagtcccattgcccctttctccagaatacctcaattcctcccactgccaccacagccttgcacctagaccactgctacagactttaaatttttctgtttcaattcagcctacctccagttcactgcctagagcagccagatttagctttttaaacatgcacatcagatcctggccatttcattgcttataccttgctgggatttctaactgcccttgaaataaaatccaatctcttatttacttataagctggccacttcactcagaccccaagctccatgaggacacgaaccagatctgtcatttcagtgcatgctggcagtgtgcagcaaattgcctgacacctaggaagtactcacaagtaagtgctgcacaaaggaaatactctacaccattgctacaaggaataaagaaaaatcatttgctcctagcttggtcatagactttctt

SEQ ID NO: 605095 - DNA, 497 bp, Homo sapiens
gatgctggattttgacatttatactcattcaaattaagaacatagtatattaagttgacaaagaaagtaaagtcatcaggctttcagctgaacaatgcagtagactgctcagctgagtgcattaaccaaaatagtctaatgtgctatttacctgcacatttttaaaaaagattctgggatgatatatgatggaaatcatctaaagaaaaaaaaaaagaacgyacaaaatttccaagggcaaaattatttttattttataaacctaagaagagtttatgtgttttgcatggggattctgggagggggatatgagaaagaatgatgcatgttcagaaatactgggaatcacaatggaaagttatcagaatggaaacttgtcaataatatcaatcataagttacctatatattttatcaatctaagtattcactgtaaaggaaatcttgacatatataagggaggatattaagcattaaaacttgttaaaaacataggaa

SEQ ID NO: 605096 - DNA, 618 bp, Homo sapiens
gtgatatggtaatttaatatgtcagtaaggggagaattggtgatattctccatcactggtttattttctctcatgccattgctttactttttaagagaattcatgaaagtcgtgttgaggaaggtagtgctcctcagatcaaagtcaaattagtgcttcagccacaagaacaagatttcctctcctcttcyaagggggagacagaagtcagcctgaggctgtcagatggataactgctcacaaatggaccaactcagagtctctggcaacaaggctgaggcagaaacaatacttgattaaacaagtgccagatagcagcacgtaactgtgggaagttagaagtagcagttatgatactgctaagcaaaggcactttgttagcattaagcattttccacttcaactgaaatataaacccacgaggagaaacaatccattctttattatttctaaaagtaactttctgtctggaaaacaatttactgccaccagaaatgtcttcttttagaaaagtgtataattggctgccatttgacattatgtggcattattaaagtctggaaattctcataatgtgcattctttttgttcttgccactgagcaacattttcacaatc

SEQ ID NO: 605097 - DNA, 602 bp, Homo sapiens
ttgacttgctgtggcctcataggcagtccttgaactgctcatttgtgttgggaaggaaagcctctaagatgacccagctttccctggagaacatggtcattaagcttcctctattcttctcttctaggagcgctgcatactgtgagtgaaatcccataatgacagtagaaatgttacttagtgaataactggtctttctattagtttttgaagtgaggaaatgggggcaygtttctttctagtctttctgaagctctgagtccttgtggtgtgtgaaataaaaccaaaacacagcttgtggtcttttctttcttagattgacaatgagggtgttgtgaattgtgagatttcaagagggctctcttgtaatatacatttggggtagggtctaatttttgaagatttatcaatctggtgcttgaagaggcatatcacaggaaatgttttgtaccttacaactcttttttcctggctatgatttattggagcatggtactacaaatcatgctttttgactcccctttctttttctgaaataagtgactcattctgtagggccaagctcgtgcttttttctttttcttctctttttgaattttcac

SEQ ID NO: 605098 - DNA, 574 bp, Homo sapiens
agcttgtcttcagttctgagaagccttccccttgtgacaatcatctttttcctcttttgatgaaccagatttttaataccaactttgcataagcaaatgcactgcagtcatgagggcagagctttctgcggtggcagggtagccaagatgaaaggggaaatgtgaccagattttcccatcaaaatcaaatctatcgcttgtgtatttgcatgggcaaattttaaaatgggcaaagagcccatttttacctgggttctttctacatacttgggctgtgtttcacaattctcaagtccaaaggaacaaagggaaaatggtgacctataaatcagattgctttctactttttgtcagtttcacagaggaatctagtttcttactgatcaaatatcttacatagcaattccatgttgaacaactactaacccaacatttccttctgaaggcctactaaatgtccagaaattgtatgattcatatccaagaagatacatggcctcttaagtgcaaagatcacccaasacagctgagttctgctccaatctctaccactgctcctgccatccatgcagcc

SEQ ID NO: 605099 - DNA, 572 bp, Homo sapiens
aggtttgatcatacataatgctattgtggtcatatctctttcaaacattacagattatatttactgatattttgtttaggatattcagtgcccttggaagagctcacacgctaattatcctttcttacacggacttgtatacttgagtaccaagggtataactacatgaatgaatacgggtgacatccctctttttctatcccacttttgtttacctgaaaatgtctttatttaaaagaaaagttgatgagagaacagttcagtgggtctatagctctaggttgagagtttttaattctcagcacattgaagatattattctatattcttctggcttccagtgtttcaaagaaacttggtgactctcagtctaattgttttaccttgtagaagatctgtgcattctttttctttttgatatcttctcctttctttgagattgtttaatttcaataaagtagtctaagtatggatttctttacatttatagttctcttyatataatatcaatattacatattacattataggtgtaacgtacatatatatcatatataataataacaggcaat

SEQ ID NO: 605100 - DNA, 573 bp, Homo sapiens
cgccttctgggttcacgccattctcctgcctcagcctccggagtagctgggactaaggcagccgccaccgcgcctggctaattttttgtatttttagtagtgacggggtttcaccatgttagccagggtggtctcgatctcctgacctcctgatctgccctccttggcctcccaaagtgctgggattacaggcgtgarccaccgcacccggccacacttgccatatttcaagcactcagtagccacacattgtctgtgtcacctttagcctcctctccctggaggggaagaattggattagatcaatgtaagatttctctggaactaccattttgtgatttttccagggacttttcttgggtttggactactaccttgagtgcagttcttgaaagtttctgtgaacagagatgtatgcgctctctctctttctctctctctctctctctctctctctctctctctctctctgtttctgtctctgtctctctccatccaacatagtgtacctctcttatattcaccttgtatgttggaaccaagtgcttgacaaagaatatggtaatgtattca

SEQ ID NO: 605101 - DNA, 542 bp, Homo sapiens
ggattctgatgttgctggtccatgagccatttgggggacactgccccttgctgaatggcccacattgaaatcccccacaaccaggtacctaaaacaaygcacatgtgcacgcacgtgccccacctccccaccaaacacacacacaatctgcttttatttaaggcaggggatttggtaggttcatttcaacagggcagtaacacttatcttctttacaagacatctcagctgcctttaaggaaatagcagggagagttagagagccattaggatagactgttgagaacattcctgactttatttatttatttttttattatactttaagttttagggtacatgtgcacattgtgcaggttggttacatatgtatacatgtgccatgctggtgtgttgcacccactaactcgtcatctagcattaggtatatctcccaatgctatccctcccccctccccccacccccccacattcctgactttaaaaccccaaacaaaggagaagctgttaatgcagacatacattctatgcctgctaggaaa

SEQ ID NO: 605102 - DNA, 542 bp, Homo sapiens
ggattctgatgttgctggtccatgagccatttgggggacactgccccttgctgaatggcccacattgaaatcccccacaaccaggtacctaaaacaacgcacatgtgcacgcacgtgccccacctccccaccaaacacacacacaatctgcttttatttaaggcaggggatttggtaggttcatttcaacagggcagtaacacttatcttctttacaagacatctcagctgcctttaaggaaatagcagggagagttagagagccattaggatagactgttgagaacattcctgactttatttatttatttttttattatactttaagttttagggtacatgtgcacattgtgcaggttggttacatatgtatacatgtgccatgctggtgtgytgcacccactaactcgtcatctagcattaggtatatctcccaatgctatccctcccccctccccccacccccccacattcctgactttaaaaccccaaacaaaggagaagctgttaatgcagacatacattctatgcctgctaggaaa

SEQ ID NO: 605103 - DNA, 349 bp, Homo sapiens
tctcttgagcataattttaatgctggcatattctgatttttttaaatgactagaaacttaaatatatatcagaactaacactttcatgttcttcttacatgcctgctttttggaaccaagtgattcttaattggatattatatttacttgacatgaatagtggttttataagacaaattttgcttacagcaatatatggtaaatgataatgcaaaacaaagtgtgcttgattttctcagtggagaggaaatagaaggatattggggaaaaaaaactagtagattctatggcwcagtgggcattcaataaatgggtattgaattagagattgactaattattggatagta

SEQ ID NO: 605104 - DNA, 569 bp, Homo sapiens
gggagacacctcccagcaggggttgacagacacctcatacaggatagctctggctggcatctggcggatgcccttctgggatgaagcttccagaagaaggaacaggcagcaatctttgctgttctgcagcttcctctggtgatayccaggcaaacaaggtctggagtggacctccggcaaactccagccaatatgcagaaaaggggcctgactgttagaaggaaaactaacaaatagaaaggaatagcatcaacatcattaaaaaggacgtccacacaaaaaccccattcaaaggtcaccaacatcaaagaccaaaggtagataaatccatgaagatgaggaaaaaccagctcaaaaagtctgaaaattccaaaaaccaaaatgcctcttctcctccaaaggatcacaactccttgccagaaagagaacaaaactggacagggaatgaatttgacaaattgacagaagtaggcttcagaaggtgggtaataacaaactcctccaagctaaaagagcatgtgttaacccaatgcaaggaaattaagaaccttgaaaaaaggttagaggaa

SEQ ID NO: 605105 - DNA, 569 bp, Homo sapiens
gggagacacctcccagcaggggttgacagacacctcatacaggatagctctggctggcatctggcggatgcccttctgggatgaagcttccagaagaaggaacaggcagcaatctttgctgttctgcagcttcctctggtgatacccaggcaaacaaggtctggagtggacctccggcaaactccagccaatatgcagaaaaggggcctgactgttagaaggaaaactaacaaatagaaaggamtagcatcaacatcattaaaaaggacgtccacacaaaaaccccattcaaaggtcaccaacatcaaagaccaaaggtagataaatccatgaagatgaggaaaaaccagctcaaaaagtctgaaaattccaaaaaccaaaatgcctcttctcctccaaaggatcacaactccttgccagaaagagaacaaaactggacagggaatgaatttgacaaattgacagaagtaggcttcagaaggtgggtaataacaaactcctccaagctaaaagagcatgtgttaacccaatgcaaggaaattaagaaccttgaaaaaaggttagaggaa

SEQ ID NO: 605106 - DNA, 526 bp, Homo sapiens
tgtgaactttcatgtttgtatcagctgcactggtgtttttccagagtctgatggttttcttcagagaacacaatcaatttaccaatctagcccagaggctgccccccatttcctctgtttatatacgttaatcttaaagcaaagaaggctgctgaattatttaagaaactgaaggaggcaaaaatcatcccagagttaaggattaccgattttctccttgttctccaaaayagtcgccatgaacacatcagaccagtgctaagtaagataacttttctttgttcctaatcgggtttggtttggactctttccttgcatatgggtgtggcttgtgggctgctaggtggtcacttgccagctctgagattgtgaaaatactaagggggatttggaatttgggaggctttattaaacaaggatttggactagaaatggacaagttgtgatacagggaaatggagctggcgggttcagttggcaaatgtgatgctctttcatgatcttagtgctgtcccatttattttgc

SEQ ID NO: 605107 - DNA, 562 bp, Homo sapiens
agagcatgataatgtcatcattattttttgtgagcagataaaatgagttggatttgcttagaaattagtggagaatagatttctattkcaaacaactaattagtcagctgaaaatattgttcaaaatgcattttatggctcttatatattatcctcaaggaactataaattaggtgcctcaaattgaacatgcaaacaagacccatatcaactcactgtattagttagacttgactctctaattcttttgtaccttctgccaagcccttcctcaatgaagtaatagaaacagtgttccatgaaatgaaaccctaaaatgttcctcataaaaatataacagggattaaatgcttttaatgtaaaaatcagtattcaaaaaagtttcttaggctgggcacagtggctcactcctgcgatcccagcactttggaaggccaaggcaggcagatcgcttgaggtcaggagttcaagaccagcctggccaacagggtgaaaacctgtctctacgaaaaatacaaaaaattagatgagcatggtggcacacacctataatcccagctac

SEQ ID NO: 605108 - DNA, 553 bp, Homo sapiens
tatcattcctccatttaattgttttttcacctttgtcaaaaatcagttgaacatacttgtgcagatctatttctgggttctatgttatgtttcatttctatccctttgccagaaccacatagacttggttactatagcttatagtaagccttaaaatcagatagtgtgagtcctccaacatacatctctttccaaattggttttgctgtgcttttttgcctctctagttaaattttagtggcaacttacctatatctatgagacatcctcctgagattttgattggtatttcactaaattcatagatcracttggggagaattggtatattcactatattgaattggtatcttaactatattggtatcttaactatatcttaactgtatcttacctgcagtgaaatatattgatatatcatggtcatctatctatgaacatgatctatcaggccacttattaattctttgattgctttcatcagcctgtaatttttagtatgcagttttgcaactctttatggagtgttctacaaatgggaattagatccatt

SEQ ID NO: 605109 - DNA, 359 bp, Homo sapiens
ttatctaaagctcatgacatgctgatcagaaatggagactatatctactaccayaatttatattactctaagtaaaaatagcttcccatggccagccgtggtggctcacatctgtaatcccagcattttggaaggctgaggcaagagatcacttgagcccaggagttcgagaccagcctaggcaacatagtgaaacctcatcgctacaaaaaaactttaaaaattagccaggagtggtggcttgtgccgatagtcccagctactcaggagagactaaggtgggaagactgagcccatgaggtcggggctgcagtgagctgtaatcatatcactgcactccacagactgcgcaacagagc

SEQ ID NO: 605110 - DNA, 622 bp, Homo sapiens
ggttaatctgcatcttattcaagacaggagaatatttccctgatccctaatgaaaatttaataagccagtccatgctctcgactgagttgtgaaaaatgtgcctaaaatgcagaacacttgataatattcaatgtcatcacacacaggcaggtacagaaaaattataagacaacatttgtaaaataagaagcttcaacccattcattaggagaaaaaatatcagaaaagctatgactgggccgggcacagtggctggtcacatctgtaatcccagcactttgggaggccaaggcgggcagattgcttgaggccaggagttcgagaccagcctggccaacatggcaaaagcccgtctctactaaaaaaaacaaaaattagctgggtatggtggcatgagtctgtagtcccagccacttgggaggctgaggcaggagaatcgcttgaacctgggaggtagaggctgcaatgagctgagactgcaccactgtactccagcctsggcaacagagtaagaccctatctcagaaaaaaaaaaaaaagaaagaaagaaagaaagaaaagctatgactgatacatttatgtctccagagactcttacggcaacgcatagataaaggaact

SEQ ID NO: 605111 - DNA, 325 bp, Homo sapiens
gttgttcaaattcaaataatttctcactaggcatgaaagaaatgtttatagtttagaaaaaggtagatgcctggttaaaatgttcctgaaacaagaacatcttacaaatagatccccctgcttttggagtattccttttacaactgtgatgctatgggctccaaaatcattcctacttatttttcacaaaaagtgatctgttgagtgagtatattatatatttttccttggaaacatagggttgtttggttttgtgggtcttttaaaatggaaaccagtgggatttgcyttataaccaactttatattatctgtttttcctaagt

SEQ ID NO: 605112 - DNA, 581 bp, Homo sapiens
tctattaaaaactgactaaataaggaaagcctcaataaattttaaagactcctatcataatctgcatttgctgatctcaatgagattcaattagaaatcaatgtcacccatatccataaaacaaattgagccaattttaaaatttttcataaagggaaacccaagatcagacagttttacatggttgttcaaacaaatatttaataaacaagtaattccagaatcaaaatgtacttctttttgtgttttggtcaagaaataatttttaactataaatgtaarctattttacattttcttagaaaagttgtgaagttttgcccatcatatttaaattgctgttacatttgaaattgatgtgaagtatgggtctaattttctagtttttcatatcttaatattctacagtgccatttctgttgtgtatcagattttcatatatagtttatctgtttctgagtttcctatctgctgcgttgattacttactaccactatgccaatatctactaaaataattaccagtttttaatgcttgtaagtagccaagtctcttccacccttaactccacaccttgccacc

SEQ ID NO: 605113 - DNA, 581 bp, Homo sapiens
tctattaaaaactgactaaataaggaaagcctcaataaattttaaagactcctatcataatctgcatttgctgatctcaatgagattcaattagaaatcaatgtcacccatatccataaaacaaattgagccaattttaaaatttttcataaagggaaacccaagatcagacagttttacatggttgttcaaacaaatatttaataaacaagtaattccagaatcaaaatgtacttctttttgtgttttggtcaagaaataatttttaactataaatgtaagctattttacattttcttagaaaagttgtgaagttttgcccatcatatttaaattgctgttacatttgaaattgatgtgaagtatgggtctaattttctagtttttcatatcytaatattctacagtgccatttctgttgtgtatcagattttcatatatagtttatctgtttctgagtttcctatctgctgcgttgattacttactaccactatgccaatatctactaaaataattaccagtttttaatgcttgtaagtagccaagtctcttccacccttaactccacaccttgccacc

SEQ ID NO: 605114 - DNA, 581 bp, Homo sapiens
tctattaaaaactgactaaataaggaaagcctcaataaattttaaagactcctatcataatctgcatttgctgatctcaatgagattcaattagaaatcaatgtcacccatatccataaaacaaattgagccaattttaaaatttttcataaagggaaacccaagatcagacagttttacatggttgttcaaacaaatatttaataaacaagtaattccagaatcaaaatgtacttctttttgtgttttggtcaagaaataatttttaactataaatgtaagctattttacattttcttagaaaagttgtgaagttttgcccatcatatttaaattgctgttacatttgaaattgatgtgaagtatgggtctaattttctagtttttcatatcttaatattctacagtgccatttctgttgtgtatcagattttcatatatagtttatctgtttctgagtttcctatctgctgcgytgattacttactaccactatgccaatatctactaaaataattaccagtttttaatgcttgtaagtagccaagtctcttccacccttaactccacaccttgccacc

SEQ ID NO: 605115 - DNA, 581 bp, Homo sapiens
tctattaaaaactgactaaataaggaaagcctcaataaattttaaagactcctatcataatctgcatttgctgatctcaatgagattcaattagaaatcaatgtcacccatatccataaaacaaattgagccaattttaaaatttttcataaagggaaacccaagatcagacagttttacatggttgttcaaacaaatatttaataaacaagtaattccagaatcaaaatgtacttctttttgtgttttggtcaagaaataatttttaactataaatgtaagctattttacattttcttagaaaagttgtgaagttttgcccatcatatttaaattgctgttacatttgaaattgatgtgaagtatgggtctaattttctagtttttcatatcttaatattctacagtgccatttctgttgtgtatcagattttcatatatagtttatctgtttctgagtttcctatctgctgcgttgattacttactaccacyatgccaatatctactaaaataattaccagtttttaatgcttgtaagtagccaagtctcttccacccttaactccacaccttgccacc

SEQ ID NO: 605116 - DNA, 512 bp, Homo sapiens
ttcacaataagagtgatagaaattgtgataagtacttggattcatgatgtattttgaagttacagttagtagccctttgctgatggatatggaagcgtgagggagatgaatcaaagatgactcctaaactttgagccagagaaactgagtgagtggtgtcatttactgatatgaaggaagctgggtgggacatattcttcaggataaaatatttggtgtcagggttcatcagtttcagcatgtgatttattaatatttacatagtctttgggtgctttggatatttggrttccagtcctttatgtgaatttctgtttgaaggtggaaacagcttctaaaaaaaaaatgtaggcattttacatcatctggcatttctaaaatctgaaagcatgtaactattaagaaatttattataatacctccaatttagcatttctgaaactaaatgaataacctttccttcccaaatctgatcatcttcgtatgtctgaaaatggaattagtatccacct

SEQ ID NO: 605117 - DNA, 600 bp, Homo sapiens
gaaacaagcagagaacagacactagaacatgcctaagaccctgggaatactacaagagtgttaccaaaccatgctccaaaaactcgagtgtgatataagatgtaaaaagtgtttcccacagtccctcttactcctttataatttatttatttaattcctcgtaatttagctgaacatattgagtaacagagtctggaaataaccactatcctctttttgcttttaaarcaaaatgccagttaagaccttaccagtgtatagagatttggaacaggcctgtaggattgctcagtagctaaaagggctgtcacgttggtgtgagcagagtaataggaatatgtacatgtggtctttcccctgaagggtgttattaaagaagcatgtgttttctgatgcactcttagagctctaacatgttagagctcaaatatgttttgttaatattagagttggcatgaggttggtttaaccttattacagtagttaaaatcagtgactgaaattttgtgtttcatatgataatttagtttaaataaaaaaactgctgtttgctttgttggcttttgaaccacctgtagatagtgttttaatattcactga

SEQ ID NO: 605118 - DNA, 568 bp, Homo sapiens
cctttgcctattctaaaactaggttattttgttgagttgtaagagttctttctatattctagttataagtcccttattagatataggattttcaaatattttctactgtcttgtacattgtcttttcaatttcttcatgttgtcctttgaagcacaaaagttgttagttttaatgaagtttacctatcttttcttttgtgcttttggcatcctatctagtaccatggcgacctaccatggttcagaccaatgggaaccaccccttttgacacttatagctgtgtgggttatcttagaaaagcagggctagaccaggtgcggtggcttacgcctgtaatcccagcactttgggaggctaaggcaggcggatcatgaggtcgagagatcaagaccatcctgsccaacacggtgaaacctgtctctactaaaaatacgaaaacttagctggatgtggtggtgtgcacctgtagtcccagctactcaggaagctgaggcaggaggattgcttgaacccgggaggcggaggttgcagtaagccaagatcgtgccactgcactccaacctggag

SEQ ID NO: 605119 - DNA, 572 bp, Homo sapiens
taaactgtcttttataatggcataattattttactgttgctctttgttattttcttgcagatttgaattactgccttgggtcacttgctttcagccagaatctgtccactcttttttagtatctttcactggttgattctcttcttcccacccagagttcatgttccctagratttagtctttggcttttttcactgtctttaagcaaaaatttgttttctcatggcttcaatttccatgtagttgacaaggaccaaatttatgtattaatcttcagtcttgatttctcttttgatccccatatccatcaacttactatacaactcctcctatatatccctccccgtggggtacctaacacaaaatgtcaaaccaaattcattacctttcctaataaaatttatgccatgggattcccccatccaccccagactacgtatctacacatattcctttattgcttttcttccttgtcttccctagacccagtgctcactatgttcttcacaacatctctgttcttccaaagctcctgtccctcctttcatactcacctctccatcttgattctc

SEQ ID NO: 605120 - DNA, 567 bp, Homo sapiens
catgcatcctggaaaaaaaggagttccagggttctctaaccgtttcccagtctttgcaatggaaaaaaaagtatgtgacctaagggctragatagacattttctaacctttatgttaagggaagattttgccagctcagctcttctcactggggtgctcagataagtgactcctgggcagttctccagcagcccctgatgctgagtttggtctgtgaggacagcaccactggatggctgcctgacttctcacacagcagcggctccagtttggattcctagaaattatgcacctccaaatgtgtgcagagctctaggcttctgaaagcttaattgtgttccttgagggaagcagcagtacccctgttttccatggtcctccttgctaattatggacctgtttagcgtccttccccccttttctggctagcacttgttcatctattcagcaggcacttacgaagcaccacgaatgtgacaggcaggtgtggggccaggctctgtgaggagtgaaggggggtctgcccttgacgggctcatggtcttgcaggaaggtggaccagtgact

SEQ ID NO: 605121 - DNA, 567 bp, Homo sapiens
catgcatcctggaaaaaaaggagttccagggttctctaaccgtttcccagtctttgcaatggaaaaaaaagtatgtgacctaagggctgagatagacattttctaacctttatgttaagggaagattttgccagctcagctcttctcactggggtgctcagataagtgactcctgggcagttctccagcagcccctgatgctgagtttggtctgtgaggacagcaccactggatggctgcctgacttctcacacagcagcggctccagtttggattcctagaaattatgcacctccaaatgtgtgcagagctctaggcttctgaaagcttaattgtgttccttgagggaagcagcagtacccctgttttccatggtcctccttgctaattatggacctgtttagcgtccttccccccttttctggctagcacttgttcatctattcagcaggcacttaygaagcaccacgaatgtgacaggcaggtgtggggccaggctctgtgaggagtgaaggggggtctgcccttgacgggctcatggtcttgcaggaaggtggaccagtgact

SEQ ID NO: 605122 - DNA, 560 bp, Homo sapiens
agaaatgcaaaatatttccacaattgtgtttgtgtacaaactgacctgtcaaaaccaaaactatatttaggtactagattataatcaacacccccagtggatgctattggtgccttgcccagggcccctttaccaggcggatgcactcatctcccagctttgagtattgctcaccgcagccacctgcttcctgaagaattgcccttgcagagcagaagccaccatgctaggaagttatccactccctcggcatcacatagccaataaccrattgctgtcagggctgtgttagttatctgtttctcaaaataaattactccaaaacttagtgccttaaacggacaatgaatatttgttatttcacagtctgtgtgtgtcagagatttgggagcagcttagcagaatggttcccgtttgggtttctcaggaggttgcccacagactgtccatcagggctgcaagtgacctgcaggcttgactgaggcaggtggccttgcttctggggtggctcactggcctggctggcaaggtggggctggttgttggcagaatgctcagtc

SEQ ID NO: 605123 - DNA, 603 bp, Homo sapiens
atgaatccatcattagtatgtatttgctctattgggcatctcttgctgttgagggaccctcttttggaagagctgccgcttcaaagggctccaaggracgtgcagttttttgtgagttgttcaagtccccaccataatagtgaataggtcttttgtagtgtatttgaatctgcaaattcacacagtgaattctgtgaatcaaaaagcagattcactgctattttctcaaattgcagctttctttgtgggcttcctctgaattgaaataaatccatatcttgggtcataaaaaccaaatcacaagggggaacatacaactgggaaataagcctagaaagaattggcaaaatatcactggcaatcaaaaatgtaaattaaaataattaatttccacttttgcctatgagagtaataaaaatgcattagtctttcagccacccagtgctggttaggtgtggtgaaactgccactctcatattgctggtggcactggaaatggatacagctcatttataagtcaattttacctcaaatccaaaaagttgcttatgctttttaattacataactattccaagagatctacgtgtgcatgaaacaaagc

SEQ ID NO: 605124 - DNA, 610 bp, Homo sapiens
actttctgggtaattctgtgcaaatgactattcattgcctatttgcttctctcaaccacagcaagggaaaatattaacccttactgagaaacaaaatgtagcatatctgacacttgcctaaaaaaaaaaaagtgagtaaaattaaaaacaaaattaacaaacctcaccacatatgtacatacaaatatgttattttcaatatacaacaaaatgaaatttagaaattcacaaastataagacagggtatcgtctccaaggagcacttcacaatattatcttagaaaacccattcacaatctcgtgctacacagctttataatcaaccgtttcagagaatgtgctgcttttaatttatgtctattgtaacaattattccatctaacttttatcaattaacagcattttcctgcttcagaatcttctctaataacactctgtatttcaagcctttcccaacaaagaggttttatttatttattttttttactctgtactccaaggagtattggtttctgcctagaattataggtatgacacataaaacaaatgtattcctttaagacatgtacaaacctaatgtttataaattagcactactctataaatgca

SEQ ID NO: 605125 - DNA, 392 bp, Homo sapiens
cattagcatatgtaaattttgtcatttttttwattttattttaccagagtgtaatttctacgggtgggaaggtagtgtggggaccgactgactttttcctttgtattgttctgtcatttaactttgtacaacaaacagtgtgactaaaaaaaaattccctgtatgtttcatcatttacttaccttcttggttttcccaatcaggtttttaaaaataactgattctaatttccaaatactttaatactacaggcccatgcctcagggtggagactcataattatacaggttctcttcaagtatttcaatagatcctcagtctttctttgttcacagcttagcttagagtccttacttttttttttttttttttggtgaaaggaattgaatttg

SEQ ID NO: 605126 - DNA, 643 bp, Homo sapiens
ttgagatctgatggtttttgttttgttctgttttgttttttgacagagtctcgctctgtcacccaggctggagcacagtggcatgatctcggctcaccgcaacctccgcctctcgggttcaagtgattcttctgcctcagcctcctgagtacctgagactacaggtgcctgccacgrcgcctggctaattttttgtatttttagtagagacagggtttcaccatgttagccagggtggtctctatctccttacctcatgatcctcccgcctcggcctcccaaagtgctgggattacaggtgtgagccaccgtgcccagctgagatctgatggttttataaggggcgtttcccccactttgcttggcacttctccctgccgccatgtgaaggacatgcttgctccctcttctgccatgattgtaagtttcctgaggccttctcagccctgtggaactcttcagccccgcggaaccgcaatttataaattatccagtctcacgtatttcttcatagcagcatgaaaaacaaactaatacaaggaggggtacaacaaaagaaaatagcaatgactatttatcccacttatatatgggagaggcctaagtataaattttccagaaaaaaattacaattttaagtttc

SEQ ID NO: 605127 - DNA, 621 bp, Homo sapiens
gatggaaagaatccatcctaacccttactcagtcattctggaagtctcaatcattggtttttaaccgttcttcttttttaatatgtgtgcttaagaccatcagtttccgaaacagccaagtaaaaagggctcccgggagaacctccgacctgccaccgggtggatggggcgggacctygggaagttcgcactgtttgcaggggggaaggagcttggcctctcatgtttctgggtggcaacctaggattcagtctgtgagatgggggcctgttaacaggaacccctttcgctttgctgagtttttttccttttacacccaataaatttcgtttttcttacccttctgtgtgtccacaagcctaatcttttcctggttatgtgacaagaacccaaagaacccggtttttagctgagctaaggagaaagtcctacaacattttcatctaagtacacttacctgcgtctcacatgttttgatatgtcaccttttaattaccattcagttaaaatattttctgatatccactggaatttcttcttggatctattggctatttacaagtacattgcttaacttccaaatatatggggattttccaattatctttttgttactgattt

SEQ ID NO: 605128 - DNA, 456 bp, Homo sapiens
gtttctattcagtctttaattttatttattaaattttattccaatctaggatattcatttggttctcagtttttctggtaccaaatttatccatcttgatttttaattscatttattaattgtagttattttaaagtctgtgtcttattattattcaagatccagttcatctgtggatatgtttctcatgtctttttttccctcttggttttctgtcaaaacttattttcttatacggcttgttattttgatagagtgctaatattctgaggctcttcagcatgttaacttcttccagaggtatttatttttgcttctggtaggcagagaggctagaagtcaattattttaatccagttgggaattgagataattctaaactgggcttcacttcttgtgagatatgcttctttagttgaccctttcttcaaacaaaagcttgtgatgtttttcaga

SEQ ID NO: 605129 - DNA, 456 bp, Homo sapiens
gtttctattcagtctttaattttatttattaaattttattccaatctaggatattcatttggttctcagtttttctggtaccaaatttatccatcttgatttttaattgcatttattaattgtagttattttaaagtctgtgtcttattattattcaagatccagttcatctgtggatatgtttctcwtgtctttttttccctcttggttttctgtcaaaacttattttcttatacggcttgttattttgatagagtgctaatattctgaggctcttcagcatgttaacttcttccagaggtatttatttttgcttctggtaggcagagaggctagaagtcaattattttaatccagttgggaattgagataattctaaactgggcttcacttcttgtgagatatgcttctttagttgaccctttcttcaaacaaaagcttgtgatgtttttcaga

SEQ ID NO: 605130 - DNA, 525 bp, Homo sapiens
catttccatttcacatatgaagaaggaagtgcatagagaatttcagaaacttgcctaaagctacacagaagtagagcytagatttgaaccaaggcagttttgctcagagaccatacctctctaaagtagaaggttactataataacataggcatcaaatagcctgggtcacaatgagcatcatagctggggagtcagagaagaacagattgctacaataaatattttgaagaaagatgcaaaaggtgatcaaatggttgcatggcatgaagatgaaggaagtgaaggaaaggtttcaagtacccagtctcaatacctggaaagtgatcgtgcactgatagaaatgtgaaattgagctggagttgatttagatgggttggggacgtattcttacatgaaactttgggatcctcagtgattcacagttcataaagtgtttgctatttcgggtaagccttataatagcctctggaggaaatagcaataagattattattgctaagtgtgaatggagtacagaaaataa

SEQ ID NO: 605131 - DNA, 558 bp, Homo sapiens
gctcctaagcactcattgttcaagggtcaactgtatttttttttttttttttttgacggagttttgctctttttacccagactggagtggtgcaatggcgcgatcttggctcactgcatccttcacctcctggggtcaaagcarttctcctgcctcagcctcccaagtagctgggattacagaagcccgccaccatgcccggctaattttttgtatttttagtagagacggggttacaccatgttggccaggatggtctcgatctcttgacctcatgatctgcccgccttggcctcccaaagtcctgggattacaggcttgagccaccgcgcccggccgcgggtcaactgtattttcctggaaaagtagatcaaactggaaaattgctcaaagatgaagacaatgacaacataatcatcactgctcatggcctcagtctctgtattgaaagaagagaactgtttctagccacaccagccataaaggaatcatgccctggaagcaggctttgtgaaagaggagactttgtcatgttcactgctgtatccacagtgccca

SEQ ID NO: 605132 - DNA, 558 bp, Homo sapiens
gctcctaagcactcattgttcaagggtcaactgtatttttttttttttttttttgacggagttttgctctttttacccagactggagtggtgcaatggcgcgatcttggctcactgcatccttcacctcctggggtcaaagcaattctcctgcctcagcctcccaagtagctgggattacagaagcccgccaccaygcccggctaattttttgtatttttagtagagacggggttacaccatgttggccaggatggtctcgatctcttgacctcatgatctgcccgccttggcctcccaaagtcctgggattacaggcttgagccaccgcgcccggccgcgggtcaactgtattttcctggaaaagtagatcaaactggaaaattgctcaaagatgaagacaatgacaacataatcatcactgctcatggcctcagtctctgtattgaaagaagagaactgtttctagccacaccagccataaaggaatcatgccctggaagcaggctttgtgaaagaggagactttgtcatgttcactgctgtatccacagtgccca

SEQ ID NO: 605133 - DNA, 528 bp, Homo sapiens
gaacatagtatctcttgattatactccatagccaccagccatttttaaaaataaaccaagataattcaagctctcagaatgcaaataataccaagtgtctggaaagtaggtcatattttgtttgttttgggtacaaagaaaaatagtgaaaaatacagagaagaaaataaagatacctccaaatcatatccctagaagtaatttttttgcatattggtggatacctttccagtattgttgaaatgctgtattcagatacaggcggagatttttgcacgaataaatcccagcacatgcgattttgtacttgctttttaattttgcagtgctgctggtacctttccatatcagtatgttccatcatcattccaatagttgcctcgtatcccattatatacatcacacctacagtttaattaaccaatyccgtattggttgtttccattttttatcattacaaaaacaaaacaaaacactgtggtaaatatccttgcatcttttcttatttatatgattatcaccttagaa

SEQ ID NO: 605134 - DNA, 611 bp, Homo sapiens
cttgttaacttgttaaaatgttaacttgttaaaaatgcaaattctcaggcctcaccagaacctactgaatcagaaacggtgtggtggggtccagcaatctgtgttgtaccaggccttccagggagtgctgatgttagagagccctggacracatcagacaggccgcttagccacgggtttccctttcggccttggcaggtgaggaacactggcaggaggtcccagataggagtgagttcagagttgtttttttcccaggttcgttccctgtgggattgtctaggactggctgcagcagggcaccaatgtcactgtacttctgaaggcagtcactgagcaacgtggccccttccttccagagccagtactcactccctctcctcaccctgtaggtctggggatggtaacagtcccagttacttgctccagtacactgctctcttcctcatggttcccctacactccactcacatctttgtaaagtgtccctatatttagccctcctctaatcctaattttgatgtgccatctgggatattcacctggttcacatccagatagaaagttgcttgtctgggtcatgggaatggagcatggcgtggccccacaag

SEQ ID NO: 605135 - DNA, 622 bp, Homo sapiens
ggagtgacaagcagctctcaggtgagaccaacagacactgtggctccgcacgtatgtcccaggctgtgttctgggctgggggaccagcaaggagaaggatcagctgtccgcttccagctgttctgagggatgatgctgtgggttttagaggaggcaggggtgcgggaggcagagaaaggcgccaggaagagtggtgaggagaactggaaaaacagaaagcgctggtgaagccagcaggcaagcaatgactccggcagtcttccttgcctctgaagcagaagggatccagggacagttagtggctyaggtcctgcggctccaggtgcccagacgtgcatttcctgtgtggagtggccggggcctctccttggtgtgcagcccagaaatgtggcaactttgggttacccaaccttcctaggcggggaggtagtccagtccttcaggaagagtctctggctccgttcaagagccatcacagtcccttgtattacatccctctgacgggttccaataggactatttttcaaatctgcggtatttacagagacaagactgggctgctccgtgcagccaggacgacttcagcctttgaggtaatggagacataattgaggaacaacgt

SEQ ID NO: 605136 - DNA, 577 bp, Homo sapiens
tcaggataacataacagctgctttctagccaagctgagttgaatggggccagtaatggggaagaggagaattgaaggatatggggataatgtccagatgccgtgagcccctgagaaagatgcagtgtctttgaagaaaaggccttaatacagaacctagatgagtctggaggacgtcacgttgataccgaagggaagtgctgggaagggaagagcgtggtccctttaaatgatactgaagagggaaagggaagtgctgggtaaaggagggcatggtccctggctagggctccacagacctaggtgaggacaggcatttcctgcccaagtgttgcatttcccaagaacaccctggcctgccacacccccatcctgtgcctatgaaaaccccctggagaccctagcaggcagacacagacacctcctgacatggagagaagcacctcagtggaggaacacacaggtggctggacatggagaggaacgcatggacaggcaccagcaggccaccaaccsgcagaacgatggggagttttgctggggcagttgaaggagagcccaggctgctgagtggcccc

SEQ ID NO: 605137 - DNA, 611 bp, Homo sapiens
tgaggataaaaatgtcaaaatgtgcctaattctcagtctgcccagctcgaaggtctcacaccaattaccatttatggtgtcggcttcacgagacgggaagcatgcccgggctgtgggcccaccaacagtgtggcagaggacaaagaacttgcacttgagttcctgctctaccacttacttgtgcacgatcctgtacaaattgcttcacttctctgagattcagttttcattgtctgctaagttgtgcttatagaattcctggtttggtggtaaggacataaacggttgttcacattgttatccagaatattcttcaacatcaaattgcatttgaaaacatgcctatacaaccttccagaccaaggctctgatgttctggtcaatacagagcattgatgagttaattgacagagctatccgtgggctgaattgcactaagctaggctccctctgcctcatttcccatcattgaggaccaggctgagaagggttttggggtgaggggtgttggtgttgtaggaatatatactattggtttggcatgcctgtaccctcctcccacaatcatgtratcaatttttataacttatattccccttcaagataatgct

SEQ ID NO: 605138 - DNA, 576 bp, Homo sapiens
tagaattccttgcatattaagatacgtttctaattatattcaaatagaaaccagatgttttgaacactktactttaaaatctcttcctgagttttatttagaatattttaggagagggtggcattcagctcactctttctctactttttctgtgtattcccaaagatttcatattctcaaatatttttcctgggaatttagaaatctgactccaagagaaaattgtgtataccaactgacctttcacaaggctcaactctgagtactaagaaaaggaaagggttaattttgtgggtagtggtatttctggagttttctgtaacatccttagaattagaaaatagcttcctagttgattaccctcttgtctctgtcaaatcttggctttcacctttcttataaatggaacaagccttctttgtgctgtatcttgcctcaagcacgcttgctactcatataatagggaactgcaaaataatacgggaacaattagccttttaaatttgttttgttttgttttgtttttttgagagagtctctctctgtcacccaggctggagtgcagtggtgtgagca

SEQ ID NO: 605139 - DNA, 575 bp, Homo sapiens
tgccttatgctgtggagtgctcagtcttttctctatgtaaatattggcaaacaccatactattggcctgtcccgggcacccacrtgccttggtccagccctggtttcctccagtatgactgcaaaatttcctctccatccgggcctccgtatctgcatttccggtgctgggatcagtatggctcccacttgggtggctgaattctatctgttggaggcagggtggcctcctaactttcatgatgtgccagggttctgtccccactgttgtgaaaagctactgctggttggagacagagctggcctcccatcgtgtgaaaccacggtcctgggaacacttcttgtgaaacaccaagaattcaaactgcttcccccttcctgggggcatccagggtaacccgtacaacatgtaattcttaatattgcgtgagctccactttggtgcttttattttcaaatacagaaagagcatacacttgaactaccacacagtcactgtttctacaaggctgaggcacaatagccatttggatctgccatctatttctacataacgagatgtgccaaaacttagtc

SEQ ID NO: 605140 - DNA, 575 bp, Homo sapiens
tgccttatgctgtggagtgctcagtcttttctctatgtaaatattggcaaacaccatactattggcctgtcccgggcacccacgtgccttggtccagccctggtttcctccagtatgmctgcaaaatttcctctccatccgggcctccgtatctgcatttccggtgctgggatcagtatggctcccacttgggtggctgaattctatctgttggaggcagggtggcctcctaactttcatgatgtgccagggttctgtccccactgttgtgaaaagctactgctggttggagacagagctggcctcccatcgtgtgaaaccacggtcctgggaacacttcttgtgaaacaccaagaattcaaactgcttcccccttcctgggggcatccagggtaacccgtacaacatgtaattcttaatattgcgtgagctccactttggtgcttttattttcaaatacagaaagagcatacacttgaactaccacacagtcactgtttctacaaggctgaggcacaatagccatttggatctgccatctatttctacataacgagatgtgccaaaacttagtc

SEQ ID NO: 605141 - DNA, 575 bp, Homo sapiens
tgccttatgctgtggagtgctcagtcttttctctatgtaaatattggcaaacaccatactattggcctgtcccgggcacccacgtgccttggtccagccctggtttcctccagtatgactgcaaaatttcctctccatccgggcctccgtatctgcatttccggtgctgggatcagtatggctcccacttgggtggctgaattctatctgttggrggcagggtggcctcctaactttcatgatgtgccagggttctgtccccactgttgtgaaaagctactgctggttggagacagagctggcctcccatcgtgtgaaaccacggtcctgggaacacttcttgtgaaacaccaagaattcaaactgcttcccccttcctgggggcatccagggtaacccgtacaacatgtaattcttaatattgcgtgagctccactttggtgcttttattttcaaatacagaaagagcatacacttgaactaccacacagtcactgtttctacaaggctgaggcacaatagccatttggatctgccatctatttctacataacgagatgtgccaaaacttagtc

SEQ ID NO: 605142 - DNA, 481 bp, Homo sapiens
tcccagctccttgggaggctgaggcacgagaattgcttgagcctgggaggcagaggttgcagtgagctgagattgtaccactgcactccagcctgggcaacagagtgagactctgtctcaaaaaatgaataaatacataaataaaaatagaaagaaagaaaatgactttgacattttaaagatctgtgtacagtttcaactccgtctcagccctgagattcatttatgaattgcttttgtggttattattgttgctttctactttcgccctttaagtttttttgtttatttatttcttttttttaagggggattcagacactattacctcaaaggagcagcgctgcyttattctttttgctagatacaaatcgttaaccctattcaccaaacagcaattaattgtcaataaaacacatccacactgtgaactctggtgtcaacgtaggcttatcaattgtaacaactctgagggggatgtt

SEQ ID NO: 605143 - DNA, 577 bp, Homo sapiens
gatatatgaatttaatgacctttaagtttcctttacactggtggttctcaattctggtttcttactaaaatcatctggttagctttttaaaaagtgctccctgatttaactgatttgaaggtgagtctttgccatgggcatacatgtttgaagttccccagccaattctcatgtaagtcagagttaagaaacactactttatacacattctgagattcaaactataggcctagcaagagctgtttaaagcaaggagaaatctactttgtgatctctgacttgttaattattacatgcaagtttctacttcaactttaaaacaaatgagaacctgcaaactgactttatgtattcatctacattcatttattcacctagggttcatgatctataagcatctcccttgtcatgtttgtattctgaacatcaatcaccaccatctattgatatatatatttttttcttacaagaaactgtattaggcaccrtggggtataatgatttaaattgcaaggtctctgtcctcacggactctataagtagaatatatgaaaggtgactacatgatcaaggcaaa

SEQ ID NO: 605144 - DNA, 598 bp, Homo sapiens
tgttttagacaggatacagaaaataattaaccatgaaagaaaaagaaagccctgataaattagacctcaaaatttaaacttctgctcatcaaaagacatcackaagagaataaattagcaaggctcagattggaaggaaatacttgcaaaatatacctaataaaatacttgtttatatatttacatacatatatatttttatatatggctcatacatataaagaacttctatacttcaataagaaaaacacaaataatccaatttaaaaatgggaaaataactgcaatgaacactttacagagaaaattatataaatgaccggtgagcatatgaaaatgatttcgacatattagtcatcaaggaaaaggcatattagattactattaaacatcaccacaaacccaccaaaatggctaaacctaaaaagtcagactgcaccaaatatgggtgaggatgtagaacactaaaactctcacattttgttggtgggaatataaacaattactttggaaaagatctggcaatttcttcaaaaattaagagtacacctatctatgaccagaatcctacttttagatgttgacctactataaatga

SEQ ID NO: 605145 - DNA, 482 bp, Homo sapiens
gaatggataaacaaattggtaaaatggaatacaactcagcaatagagaactaccaatgaactcaagaacagactgatctcaaaaacattatgctatatgaaaggagcctgacacgaaagagtatatagagtatggttccatttatataaagccctgaaagaagtgatttactcttggtggggtagggatactgggaggggcctgcaggaactttctggggtaatatagattcgggtgcaacaggcagatacatttgtcagaactcacggaaattcactcataaaagttgtgtgtyttatcatatgtaaattttacctcaaaagaaaaaacaaagaatcgtaaaatttaaattctggtaataatgcacacgttcaagtatttaggaggatatgtactaatgtctataacttgctttgaaatgtgtccaagccagaagtggtggctcacacctgtaatcccagcgctttgggaggtcaaggtgg

SEQ ID NO: 605146 - DNA, 482 bp, Homo sapiens
gaatggataaacaaattggtaaaatggaatacaactcagcaatagagaactaccaatgaactcaagaacagactgatctcaaaaacattatgctatatgaaaggagcctgacacgaaagagtatatagagtatggttccatttatataaagccctgaaagaagtgatttactcttggtggggtagggatactgggaggggcctgcaggaactttctggggtaatatagattcgggtgcaacaggcagatacatttgtcagaactcacggaaattcactcataaaagttgtgtgtcttatcatatgtaaattttacctcaaaagaaaaaacaaagaatcgtaaaatttaaattctggtaataatgcacacgttcaagtatttaggaggatatgtactaatgtctataacttgctttgaaatgtgtccaagccagaagtggtggctcacrcctgtaatcccagcgctttgggaggtcaaggtgg

SEQ ID NO: 605147 - DNA, 587 bp, Homo sapiens
gatgacattaagattgctaatcagctaactttatgacagattattctggattattgatgggggcacaatataatcacaagagtcctaaaaaggggaagagggaggcagaagagaaggttggagtaatttgatgtatgaagaattcaaccctccattaccagttttgaagatggaagacagcaatgagccaaaaaacataggcaacatctagaggatggaaaaggcaaaaaaacagattctcctctggarcctccagaaagaaatgcagccccgatgacatattgattttagcccagtgagatttgcatgagatttccaaccacagtactacaagataataaatttgtgttgtttttaagccactaagtttgtggctacctgttatagcaatagtaaaaaatgaataaaaagagaaattacataccaggcatacaaagaagcaggaaaatgtgaccaataataatgagaaaaataaaacagtagaacaaaaaaataaataacacatagatgacagaattcgtagacaaaaatattaaatattcataactgtgttccatgtgttcaagaaggcagaagggagatttaac

SEQ ID NO: 605148 - DNA, 587 bp, Homo sapiens
atcagttgtttcctggttttttccttggcccctactaggtaccctgattcaaacaaggctgttcattggttagtttctcagagaaggatattgtgtagaaagctcagggaaaaaaaagtgtgtggtatgttggcatcatggcactactggaactggaaggactgtggcactgggatctagtggtgggtgccccgctttctggatggcagggaaaggttctctgatgcttaaatgagtccttttttctgtacatttgggatatttcataattaaaaattaaaaagtaattatctataagcaggagaaaattttatcttataatatcaataaataactcttagaatactctcaagattaattttgagaggaaacttataatcattaacttttatattgagcaacaattctataaaaacacaacagcctaaatcaattcaaaccttaaagtaaaaatgtttgcaacatatatgacctattttgtaaaggggcagaatccacaacaaagaaccctagtaaatcaacaagaaaaaaaaatgtttcaacagataataagtaaaaaacaaaakggaaatttaaaagagaagaaa

SEQ ID NO: 605149 - DNA, 456 bp, Homo sapiens
ctcattattctctttcatttctttctccctgcctcccttccctttttcggttttgtttttgcttttcgaaggagggccaatttaaaaacaaaatgaaaaaagcacatccattactatctgaaggcactggctactacgaatcccttttctttgtgcagcccttttggctttttgcaagacctccctatgtaccatctcacccgtttcttatgatattgttcaacctttaacccactgacctgmcttctatccccacagctcccccagaacggcccttgtgaaggtcaccaatgaacccggcccccattgcagtcttttaactttgcccctcagaagaaatcaatcatgccggctactacttggctgaatatgtgacttggatcccgtaacgttgcacacttctctttttcttctaattttctgactactcatttcctctcaaccccctttgctggc

SEQ ID NO: 605150 - DNA, 572 bp, Homo sapiens
acctaaactcagttccctcatctataaaatggggttaataatatttagctagcagaggaytcaatgatgcaagatattagagtatttggcacatattaggtgccaaataattataggttttattattattctttttagtgttcctagtaaagtcactcatatcatagccccagatctttaacttcttatatccctaggcaatacatacattcactttaaaaagactttgtctgtaaacttctgcttccagccaccagaaagtaacaaggatagaatttattctcctactttaaacaactcaaaaatcaaacaaaatatatgaaatgacggttttcagatactgtacaacaaaaagtacaggatagtgatcattgagagacgggaaataaatgaagtgaaacttatgatagtcccagccactgtctagaaggtttccagggcttaatgcaaggaagagaaaccagaacagagcctgaggtctgtctgaattagacatctggggaaaccaatgcccctggaaatttcagggcagagtacaagagaggaaggagccaatcagagagagagagctt

SEQ ID NO: 605151 - DNA, 601 bp, Homo sapiens
cctactgtagtggctagtttgctcctaacagaagtaaaacattcaatttctggctctatctggggagtgttctgctggagagagactctgctatgaaagcagagaggatgatcctgttttaaaataaacatgcaggtattttctgcaggacaaayttggggatgatttatggagaagttaaactcactcttcaggaaatcttgaggcctggctggaaccacttagggatcctactttctgccctgtgtccctctcctctcaaacggccacactgatacccactaatcccagagctcaagagcctgagttgctaataatgctttattgagagagttttgtccatagacccatgctgatctcaggattcccaaagatccagtatgagactattcaccccatccatctgaactcacctatgtttgatttttaaggtgtctgtgccttcagttagaataaaggtgacagaaactcctctgcgttatgctgacctcccatgaactctgtcccctgagtctactttgcttgggctaatgaaggccaaagacaaggaccagtaccatgtcagaagattaacagaggcttggggtccttcatcattggt

SEQ ID NO: 605152 - DNA, 601 bp, Homo sapiens
cctactgtagtggctagtttgctcctaacagaagtaaaacattcaatttctggctctatctggggagtgttctgctggagagagactctgctatgaaagcagagaggatgatcctgttttaaaataaacatgcaggtattttctgcaggacaaacttggggatgatttatggagaagttaaactcactcttcaggaaatcttgaggcctggctggaaccacttagggatcctactttctgccctgtgtccctctcctctcaaacggccacactgatacccactaatcccagagctcaagagcctgagttgctaataatgctttattgagagagttttgtccayagacccatgctgatctcaggattcccaaagatccagtatgagactattcaccccatccatctgaactcacctatgtttgatttttaaggtgtctgtgccttcagttagaataaaggtgacagaaactcctctgcgttatgctgacctcccatgaactctgtcccctgagtctactttgcttgggctaatgaaggccaaagacaaggaccagtaccatgtcagaagattaacagaggcttggggtccttcatcattggt

SEQ ID NO: 605153 - DNA, 601 bp, Homo sapiens
cctactgtagtggctagtttgctcctaacagaagtaaaacattcaatttctggctctatctggggagtgttctgctggagagagactctgctatgaaagcagagaggatgatcctgttttaaaataaacatgcaggtattttctgcaggacaaacttggggatgatttatggagaagttaaactcactcttcaggaaatcttgaggcctggctggaaccacttagggatcctactttctgccctgtgtccctctcctctcaaacggccacactgatacccactaatcccagagctcaagagcctgagttgctaataatgctttattgagagagttttgtccatagacccatgctgatctcaggattcccaaagatccagtatgagactattcaccccatccatctgaactcacctatgtttgatttttaaggtgtctgtgccttcagttagaataaaggtgacagaaactcctctgcgttatgctgacctcccatgaactctrtcccctgagtctactttgcttgggctaatgaaggccaaagacaaggaccagtaccatgtcagaagattaacagaggcttggggtccttcatcattggt

SEQ ID NO: 605154 - DNA, 594 bp, Homo sapiens
cactttattcttgttcctctcaaaagacagagcatagtccaacctagtggatatattttcagaactcagcaagttagctttcctgagactgactgccatatcatcacttaacttctcttttcccatctaacttcagggcaccacagaaccactcaggaggttcacactctcatctaccaactccatgagctcagctgtaggagatttgttctgggcattcttaggmataaggtacagcctcattcttccaccaaaccttgatttctctttcttaagatggacttgaaaaactgttactaacctacttggcctccacttcatttctttgttcctttatcaaaaatattatacagtgttaccagttttctcatttatagaatcagctgagttagtattaaaatgtggaagaaagattggatttttttaaaagtgtttgtaatgtatggtattgtccctaaggcaggtagtaggaataagtcaattcttgttctactgtagttcaaaactaattccattttagggctaataccatatatttaattaggctgaaaaatagaatatttcctaattttccacaaaagagaacatgtttcc

SEQ ID NO: 605155 - DNA, 537 bp, Homo sapiens
gatacaagcaattcatacattttaaattgcacactgttctgaatagcataatgaaatgtcacgctgtctcactctgacctgaccgggatatgaatcatccctttgtccagggtatccacgttgtctacactacctccctgtgaatcacttggtagccacctgggttatcagatccactgtaatggtacagcagtgtttgtgttcaagaaacccttatttggcttaataatagccccaaaatgcaagagtagtgatgctggcaatttggaaatgccaaagaaaagccaccaagtgcttcctttacgtgaaaaggtaaaagttcttcacaataaagaaagaaattgtatgctgaggttgctaaaatctaggataagaacaatttatctatgaaattgtgaagaagtaaaaagaagcttgtgcatagtatatatagtgttcagtactatccatggtttcaggcatccactggggatcttggaatgtatcccccaarggtaaggggagactactgtattcctaatagatttgtagcaatta

SEQ ID NO: 605156 - DNA, 400 bp, Homo sapiens
gaaggggacatttcaaggactggagctagcyggccagctcagacagtgtcaactgtaaatgagagacaaacccagggtatgggagacatggggagaggtaccaaaggaattaagctaatgaccaaaggagccattataattgccaagaaaacagaaaactgtgtaagaaggtatcagtggacaccttcttggctcagcagtaaatgacatttacacagccatgtaaataccaataccaatttaatgaaaagtgtgaaataaccatgttgagcaaatggtgcagagactaaatgggctaagtctttaacccaatagggaggcagtcaataatgtctgtctaatgttaaatcagaagatgacatcataggctgggcatggtggctcacacctgtaatcctaa

SEQ ID NO: 605157 - DNA, 568 bp, Homo sapiens
tactttttaaaacatcaaaagtaagttattaaaattcttatagcccttttagtgtagaaaaaggttaatttctcctttaatgaagaataggactattcactctagaggcacaaaattgcatctttatcataattattyatctaaaataagaaacttgtcaaattaatctactatagtgaaattttgtcttatttaattagaatttaaggaaatgatatctgtgaattaataaaatatttgaatttaatttttaattttatttttaaataatagattcttctatatagttatcaagatgcactaacatagaagaaagtataataaatgtctggaaattctgtaattatttacagtcactcttctatatgctgatctaggcaattaaggtgactaagaattattagtttcttcatgaggtttaaacttatacaagcacttatttttaataatatggcaaagtaatacaaatataaacttcagcgtagcctttgtcaaaattgtcacaaattcattctacagtcttggtatttctaaaataactttaaaaggaaatattttacaaaactta

SEQ ID NO: 605158 - DNA, 393 bp, Homo sapiens
atttgagtgacaatttcatagtgaaccatgatcaatattgtaagctacaatttatataaaacatggcatttgaacaaactgcactcacaattatatgaaaaaataaatggctgacataacaatatatccgctatgtgtcaaatagatagacaggcaatacagcttaaagttgtgcttataaatatggacattggtggctgtgtagaaactagatagagagaagagtgaaggcgctccaggtggagaaaaagtaagggaaaaagtctggagatggatgtgtgtgtttgtmctgcctgcgaagtggtcagtagggaaataggcttatataaaaacatctgactcttttccttaggcttatgttcacttggttatcaagaaaggtgatttgaattc

SEQ ID NO: 605159 - DNA, 393 bp, Homo sapiens
atttgagtgacaatttcatagtgaaccatgatcaatattgtaagctacaatttatataaaacatggcatttgaacaaactgcactcacaattatatgaaaaaataaatggctgacataacaatatatccgctatgtgtcaaatagatagacaggcaatacagcttaaagttgtgcttataaatatggacattggtggctgtgtagaaactagatagagagaagagtgaaggcgctccaggtggagaaaaagtaagggaaaaagtctggagatggatgtgtgtgtttgtactgcctgcsaagtggtcagtagggaaataggcttatataaaaacatctgactcttttccttaggcttatgttcacttggttatcaagaaaggtgatttgaattc

SEQ ID NO: 605160 - DNA, 393 bp, Homo sapiens
atttgagtgacaatttcatagtgaaccatgatcaatattgtaagctacaatttatataaaacatggcatttgaacaaactgcactcacaattatatgaaaaaataaatggctgacataacaatatatccgctatgtgtcaaatagatagacaggcaatacagcttaaagttgtgcttataaatatggacattggtggctgtgtagaaactagatagagagaagagtgaaggcgctccaggtggagaaaaagtaagggaaaaagtctggagatggatgtgtgtgtttgtactgcctgcgaagtggtcagtagggaamtaggcttatataaaaacatctgactcttttccttaggcttatgttcacttggttatcaagaaaggtgatttgaattc

SEQ ID NO: 605161 - DNA, 551 bp, Homo sapiens
gtctgtcagtgcctgaggttaaagagatttgcagttatatttccaaaggtctatagtgccaaggagacctgagattggtcctaggaagtgggaagaaccactcagctccaaatgagaaaaataaaccactaatataatagtcataaaattaagacgcaaagtccaaaagggaaaatagaccaggtaggtgcagaacatcactatggagaccagagggacaagaagatggtactgtgaatcccagggccactccttttctagcatgtggtcacatgagccctctttctccatamagacagatacaatctttgtgttgagcagaagaaaggagtaccactctgaaagactaagcattttcctactgagatattctaacttactatctagggctgagttatccaaaaggattggtagagaatggagctccccattattcagtagaatgatatttttaacatatgctatatgaaatataaagaaaatatatttgtacaccttagtgcaatgtgagcaaatgtgtgactttacaagacaataacaaaggcatatca

SEQ ID NO: 605162 - DNA, 577 bp, Homo sapiens
gcaaatccagctactcagaatttccagtgttatggaaaataattttgatatgctgcctcaactctcatttggaagaaggtgtagaaatatatttttggcctgtattcaatcccsgtggccttgtccatgctgacaagtttgtattccaaatttttcgattggcttcctctaccaggatagaaagctgagattgaattcgctggaaagttacgttagtttatttgagagtgaaattaataaggaaagattcaaggatgacatttttgtattttaaaatttaaaatttctgctgcctttttggaattgggataactctagagctgaaattttcagaatgcatttaaatgcctatctagccattagcaaaatattagaacaaggctcatgacatgactactcttggatagagcgatcatctacagaagcatgacatggaagccaaatcaaatcctttttgaaataaagaggtttgtttactaaaaattaacatccaaattgtcatttaggtacacatttaaagagtataaaggaagtatgattttcttgtaaatgtgatgctttgccaaagttctaatca

SEQ ID NO: 605163 - DNA, 511 bp, Homo sapiens
acagctttactttcattagatttaggccgtaaatctgctggtaattgcccaatttgattgttaagcatagttctctgtcaccagtgaagagctggagcagaagtagaaaatgttcaagtattttcttcttctagggaaacagttcattatattaatattaattttttctatgtttattttttcaacagaaggtcatacatatgctattggagagttcacagctagcccctcactactcaaattgtgggtgttattgccagactgcggagatgcacaagaattgacttgagaagcaaggagattattcatgytcctgcacactctgttatctctgggagctcttaatcaatgcagggtgagagccagttagcatgactgaggttagggtaaacgggctgttcagggaaagataaattaaaatgtgattattattcaaattggaatatagagaacataatccatgatggaagagaaggagaataatagaaataaataaaaatttacctactga

SEQ ID NO: 605164 - DNA, 626 bp, Homo sapiens
ctttagctgcatcagaatcccttagaaagcttgctaaaatcagattgcagtgtcccacccccggcatttctgatttagtagatctggaatagggactaaaatttgcttttctaacaagatcattgaatgctaatgctgctgaaagggaccacatattagtctaggaaacctaactcattcattctataatgtctargaaaaatgtttcacagagtcatagaatctgcagcatacattaataaagaattaaaagctgcttagagtttctaatcaaatatactcacattactggtgagaaaagtaaaatcaagatagatgaacttatttacctagtaattgttatcctttgcaacaaatgcttcatattataaaataaaaataacaacttttggactaaatcaattatggggaacttgagttatctatttcctttctgggaaagaaaagaaaaattgagaatgcagcattagttgataggaggaagaccacttcagtatatcactatgcaacacttaactcaacaaatattattgagcactaaaattaagagttcagttattgatttcaaattgattttgaattgatttcatcttgttgcagtcagaaaacatacagaagactaagaa

SEQ ID NO: 605165 - DNA, 571 bp, Homo sapiens
atatacacaatatttttaccatttttattacacaggataatgaggttttgataggttcaaaataattagattccatattsttaattgactagatcatttctttaacctatagctagtgaagagaatccagtttgtttggtatcaaacatagagatgaaaaaaataggataagaagtttaaaagtaagagaaaaaagactttttcaacctgaaatttgacataagacaatttctaaatctccaatagtttcaaatttaataactatcttctgcttaaatttgaatgatattactttgcattgctttttcttataatatgcttttccaagaaaccattcggcttgattaagaagatagcattaggagaaatacctaatgtaaatgacgggttgatgggtgcagcaaaccaccatagcacatgcatacatatgtaacaaatctgcatgttctgcacatgtaccccaggacttaaagtataataaaataaatgaaaaacattccagttaagcgatctggctttggagttagatggacagggattaaaattccaacactgtcacatttccttcaaa

SEQ ID NO: 605166 - DNA, 583 bp, Homo sapiens
gtgttaactcctactctggctttatattttcttatcaatcatgaaagaatgggtgagggatttgtagctggggtcacaagaagacatgtccaggagagcaaaactgcaactaaaatttgcacattataagaaacacaaaatttgacacaatacaaaaataactttgtaatagtcaaagctgtaagaaaagatatgttttttttttagcttaaagatggactctcactagaagtttcttatttagaattgaatatatttagggggtttgaggacattggtttgattggttatgtgatctattccaagtcaatttttttaagtttatattttaaattgtaccaagtcaaaatttttttattttatattttaaattgtaccctggccgattcgttttcagaagtcatttgttttgtagccttttttttttgtatacacatcaaattcttgaccaaaggacagatttartattttcacatatgaaaacaaataaattatgccactgtttcctgctattaatattgcttggtcttctcaaaggccaggccttttggcctaggcagtctgtctgcagttccaacagctg

SEQ ID NO: 605167 - DNA, 604 bp, Homo sapiens
ctgtttacttatatgttcttgtctttcacctcatagctttatgaagactgaatttcatgtttaaaacaagaaagaaatcttattttaaggttgtagaggccgatttttttgataaaatgctggctagacaaatgyccttttatcatttccatgaagaaaggttttctaaccattgttctcagcaacattattactttttaaaatgttttaatgtaattgagcttaggaattatactgttgtctcagtttccctcctactcaacagctggacatttttattttttttttttttgagacggagtttcactcttgttgcccaggctggagtgcaatgacactatctttgatcactgcaaccaccgtctcccgggttcaagcaattctcctgcttcagcctccggagtagctgggattacaggctcccaccaccacgccccgctaattttttgtatttttagtagagacagggtttcaccatgttggctaggctggtagcgaactcctgacctcaggtgatctacctgccacggcctcccaaaatgctgggattacaggtgtgagccaccacgcctggccaaggcaaaactatttttatcaatcacta

SEQ ID NO: 605168 - DNA, 604 bp, Homo sapiens
ctgtttacttatatgttcttgtctttcacctcatagctttatgaagactgaatttcatgtttaaaacaagaaagaaatcttattttaaggttgtagaggccgatttttttgataaaatgctggctagacaaatgcccttttatcatttccatgaagaaaggttttctaaccattgttctcagcaacattattactttttaaaatgttttaatgtaattgagcttaggaattatactgttgtctcagtttccctcctactcaacagctggacatwtttattttttttttttttgagacggagtttcactcttgttgcccaggctggagtgcaatgacactatctttgatcactgcaaccaccgtctcccgggttcaagcaattctcctgcttcagcctccggagtagctgggattacaggctcccaccaccacgccccgctaattttttgtatttttagtagagacagggtttcaccatgttggctaggctggtagcgaactcctgacctcaggtgatctacctgccacggcctcccaaaatgctgggattacaggtgtgagccaccacgcctggccaaggcaaaactatttttatcaatcacta

SEQ ID NO: 605169 - DNA, 570 bp, Homo sapiens
ttttaaaagaattctttttgactaagtttcactggatgtcagcatgatgttggaatgggacttttcaatgctccttcctttacagaatcactaatttgaacaattatccatgcacgaaaatgccttcacaagagctaaggaaaccaggtgagagattacagcacttgggtagattacagaaataagaaaagacacattaaagagggtaggaaagatagtgtcacattgctcatggacctctctcccaagcctagatagcacagcctggagacagataccctccctgtgaaggaaagagagggaaatgaccrtagaaattagccttggacccaacactggatgccctttctaagtagaacccagcaccgagcaggcccccatggcctcagacttcagaccagtacctgaagactgagcttccaagtctgctctggcaccaggccggatctgacagcctctggctctaggccagcccatcaagtctcagctcactgcccctccaggcctgcccagtagccctagtgctagttcaagccccacagactcaggctaggcccaataatcacactc

SEQ ID NO: 605170 - DNA, 595 bp, Homo sapiens
tgttaattgactagatcatttctttaacctatagctagtgaagagaatccagtttgtttggtatcaaacatagagatgaaaaaaataggataagaagtttaaaagtaagagaaaaaagactttttcaacctgaaatttgacataagacaatttctaaatctccaatagtttcaaatttaataactatcttctgcttaaatttgaatgatattactttgcattgctttttcttataatatgcttttccaagaaaccattcggcttgattaagaagatagcattaggagaaatacctaatgtaaatgacgggttgatgggtgcagcaaaccaccatagcacatgyatacatatgtaacaaatctgcatgttctgcacatgtaccccaggacttaaagtataataaaataaatgaaaaacattccagttaagcgatctggctttggagttagatggacagggattaaaattccaacactgtcacatttccttcaaatttacagaagttacttatttttgtgaaacatttctttttatttttataaattaaaaacatttttaatgagctctgaaggctaattgaaataatgtacaaaaa

SEQ ID NO: 605171 - DNA, 613 bp, Homo sapiens
tgcatgccaccacaccaggctaatttttgtatattttgtagagacagggttttgccatattgctcaggattgtctcaaacttctgaactcaagcaatctgcctgcttcagcctcccagcatgctgggattacaggtatgaaccagcatgcctaacctatatcttaatttgcaatagaaatgtagtaagtatgaataatgaagaagtataaaatatgaacagacaaaaaagaagtaaagatattgaatcagtaatcaaagacctcttaaaaaaagagcccaggatcagtkggcttcactggtgaattctaatgaacatttaaataaaaactaatgtcagtaattcttaaacttttataaagatttaaagaggagaaagtacttccaaactcattctatgaagagagcattaccctgataccaaagcgagacaaagactctacaagttaaaaaacaaaattggaaagaaaaaatgaattatttatgtttacagatgacctgattgtatacatagaaaaacttaaagactccaccaaaaaactactaaattaaaactaatacatgaatttgataaaattgcggaataaaaaatcaatatataaaatccagttgcat

SEQ ID NO: 605172 - DNA, 538 bp, Homo sapiens
taccaccacttgccctcagttttctcatctgcaaaataggggtaataatattacctattgcaaagggttattattatgaaaataaaataatatgcataaagcacctggagaagtctaagcatcatacaatgatttgcttgtatttttcacatgtgaatgatcaattagggtacatttgggttactacaaatatctacatgtgaggcagagaattgggtgcaatgaagttagaagtggtaggcaggagtaaatctcatccagaaagatatatgccagattgaagtcttgcatttgtttattctttcatctttttttttctttctaatacatytatatcaaattgataaaatgaaagagatattacaggttaaaatatacaattattctccctggtgagctccataactaacttcctagagagacactcttacttagtgcaaagctgatacattgacaccctgtgttgtcaaacattatattcctagggctaaacataagttaggaagaagataaatgaatgtctcttggtttaaaaatg

SEQ ID NO: 605173 - DNA, 612 bp, Homo sapiens
ttgttgaggtcaagtctcctacttaaatattttatatgagatgaagccttagcatgtccacattccttaccagacatttccttcaagagcttccctcatccttccctactgcttttgctcctctcatcgtaacagaaaagtattatgcaagattgtgacaaactagctgttccacacctctgcaaaggacagatcgagaggagatggatttttaattatcaccaaatttagattaggcacaaggaaatcgagatgaattttctgttatatgacatgggaatcagctaacaatggatattataaagtttgcttaacttggtttcatagaatcacagataccaggagttgcaagattctctaggcaaatatctgatttgtccggattaggaaackgaggccagagagttaaatgactggccaattagttacagaagcatagaataacacacagactttggtgtcaggataacctgggttcaaacatggactttgccactaatttgtagcagatgcacaacctcctagagcttgttttctcatctaaaaggtgtgcacaatggtacctaccacgcaagacttttgagagaattgaatagcactgggtatgaaaaa

SEQ ID NO: 605174 - DNA, 570 bp, Homo sapiens
agaaaaagtataaccaggaagtataagcaatatgagaaagttatgaggatttcataatccttcaaatttcttgcaackatttttactagttcaggggtcacatctcttatcaactctgtccccactcctgagtctcctcaaagaattcttgataatacctcactaatgactcataatatgcttttcacactaaataaggaattggccccagaatctcactaaacttagcggtcccatcatggattttcttctccacgctgcttctattccagagttcaaatccctgctttgtattctgattctttcttctaagcaagcacaatgtttataaaaatgtccagctgaaatatattttatttaattatttattcattataggtatgcatgcatggaaattataggtcattaatgaagtgatgaaataatgagaggacttcattcagatgtatcatcttcttgtggatggatttcttcaatgacgtgagtctttagggtaccattcttgagtccctactgagtcctttgggatccaattatttgggtccgtagggtcacattctgtcacgcagc

SEQ ID NO: 605175 - DNA, 570 bp, Homo sapiens
agaaaaagtataaccaggaagtataagcaatatgagaaagttatgaggatttcataatccttcaaatttcttgcaactatttttactagttcaggggtcacatctcttatcaactctgtccccactcctgagtctcctcaaagaattcttgataatacctcactaatgactcataatatgcttttcacactaaataaggaattggccccagaatctcactaaacttagcggtcccatcatggattttcttctccacgctgcttctattccagagttcaaatccctgctttgtattctgattctttcttctaagcaagcacaatgtttataaaaatgtccagctgaaatatattttatttaattatttattcattataggtatgcatgcatggaaattataggtcattaatgaagtgatgaaataatgagaggacttcattcagatgtatcatcttcttgtgsatggatttcttcaatgacgtgagtctttagggtaccattcttgagtccctactgagtcctttgggatccaattatttgggtccgtagggtcacattctgtcacgcagc

SEQ ID NO: 605176 - DNA, 520 bp, Homo sapiens
acagcatttgcttttgtttttcwtcatctctgtagctctcactacagtgcacagcacagtgtagaggctcataagtatttgctgaatggtaagtgatctggagaagtgaatgatattggcaatttgcattcacacctgggcacgattgaaattgacccaagtgactggcacacttacaaactgactaaagtaaaaggtcagtaaaacctttacaaagaatgacctttctacaatattataaaaaccatagttcatacacagccctggaaaaacttttgtgagataaattatgataaaaaatgttgtatgtctcatggttatgatatattgatatcatggcccctgttttaacttttaaaaaaatcaaactaactagctagttatactatgcttagggaaactattccttcttgattataagctgctgtgttacttttctcttccaaggaaatacgaacagttatcctgcctcaaaggcatataactaaaatatcatatggaggaataacctggctattcg

SEQ ID NO: 605177 - DNA, 518 bp, Homo sapiens
aaactaatacaaaggagtcagtaaacatcaaaatagataaatataaagagaaagaagcaaacaaaaattactttaaaatatattggccccaaatttttcaagtttggtgaacaacatacatttatagatccaagaagcctagataactcccagcaagataaacacaaagtaaactacacctaagcacatcatggtaaaactttagaaaataaaagataaaggcaaaatactgaaagctgtcrgaggaaagaggtcatcacatataagggaacaattatacaaataatggctgaattatcatcagaacattgaagaccagaggacaatgaagacactttaccctttcaataaatgataatagagcaactaatcggataaatacatgggaaaaaatgaatcttagcttcaccttacactacacacagaaacaaattcaagaaggattatagccctaaattataagattaaaacaataaatctcttagaaaaatatataaagaatatttttgtgacctagg

SEQ ID NO: 605178 - DNA, 518 bp, Homo sapiens
aaactaatacaaaggagtcagtaaacatcaaaatagataaatataaagagaaagaagcaaacaaaaattactttaaaatatattggccccaaatttttcaagtttggtgaacaacatacatttatagatccaagaagcctagataactcccagcaagataaacacaaagtaaactacacctaagcacatcatggtaaaactttagaaaataaaagataaaggcaaaatactgaaagctgtcagaggaaagaggtcatcacatataagggaacaattatacaaatratggctgaattatcatcagaacattgaagaccagaggacaatgaagacactttaccctttcaataaatgataatagagcaactaatcggataaatacatgggaaaaaatgaatcttagcttcaccttacactacacacagaaacaaattcaagaaggattatagccctaaattataagattaaaacaataaatctcttagaaaaatatataaagaatatttttgtgacctagg

SEQ ID NO: 605179 - DNA, 585 bp, Homo sapiens
caggctaatggcataaatctaaaatgcaattctgtacaagcaactctacattgggccaaaacaatgcaaaacaagtgtgcagttctccaatggtgtggttgagtccaaatttaaaaattagaaaaactgagggaataggattatagtatgaccttcgggaattatatatatatatatatatatacttaaagttgtgggatacatgtgcagaacgtgcaagtttcttacataggtatacatgtgccatggtggtttgctacaccaataaacctgtcatctacattaggtttttctcctaatgctatctctcccttagctccctacctgccaaaaggccccaatgtgtgatgttcccctccctgtgtccatgtgttctcagtgttcaactcccacttatgagtgagaacatgctgtgtttggttttctgttcctgtgttaytttgcagaaaattatggtctccagcttcatccatgtccctgcaaaggacatgaactcatcctttttagggctgcatagtattctatcatgtatatatgccacattttctttatccagtctatcattgatggacatttgggttgctt

SEQ ID NO: 605180 - DNA, 611 bp, Homo sapiens
gaggcggctgtagggtctcagagagataggagtagattgagctaggagtagatgatgttagaaacagagacgagaggttcaaaagttaatagagaggtgatggactgggtacaggaacatggagagggaccagccgtggaaaggaggagtgaggtggtttccagcggtggaaagagggaggagtgaggtggcttccaggagtgagctgggaaatcagcctgtgcccactgccagcacacagtctactgtttgccagagaaagtctcactgggggctcactcgaaagaaagagtgggtctacatcagctttgagtttcmcttaagattttgaaaacagggctgggtgtggttgctcattcctgtaattccagcattttgggaggcctgacctcgggtgatcagttcaagaccagtgaaacctcgtctctactaaaaatacaaaaactagccaggagtggtggcgtgcccctataatcctagctactcgggaggatgaggcagaatcgcttgaacccggaaagcagaggttgcagtgagccgagatcacaccacggcactccagcttgggcgacagagtgagactccatctcaaaaaaaaaaagatttttgaa

SEQ ID NO: 605181 - DNA, 611 bp, Homo sapiens
gaggcggctgtagggtctcagagagataggagtagattgagctaggagtagatgatgttagaaacagagacgagaggttcaaaagttaatagagaggtgatggactgggtacaggaacatggagagggaccagccgtggaaaggaggagtgaggtggtttccagcggtggaaagagggaggagtgaggtggcttccaggagtgagctgggaaatcagcctgtgcccactgccagcacacagtctactgtttgccagagaaagtctcactgggggctcactcgaaagaaagagtgggtctacatcagctttgagtttcacttaagattttgaaaacagggctgggtgtggttgctcattcctgtaattccagcattttgggaggcctgacctcgggtgatcagttcaagaccagtgaaacctcgtctctactaaaaatacaaaaaytagccaggagtggtggcgtgcccctataatcctagctactcgggaggatgaggcagaatcgcttgaacccggaaagcagaggttgcagtgagccgagatcacaccacggcactccagcttgggcgacagagtgagactccatctcaaaaaaaaaaagatttttgaa

SEQ ID NO: 605182 - DNA, 463 bp, Homo sapiens
caatcctatagggatttcatggatcattatcaattctctgtctgtccctaatcagattaaactgtgttgttgagagaaggggtgtatgggttatgccatagtatttagacaaaagaaaataaacaggtgcaaagttatactattccaagtaattcaactggaatgggaataagtagaaaagaaatgaaacaggagctcaaggttggttgataacactgattgctcttggtataactgagatggagtagagactcctcctagggacttgcgggcaccaaagcatagaaataaagtaaaatcttgagttcctttgaaggarattccggggacctagctagccttaagaagtgaatgagcaactcgataagctagaaggtaatagtagcttaaaacaatagccaaggaagttagagtcaggagaacgtttggttccctatagaaactagagataacatcttaacat

SEQ ID NO: 605183 - DNA, 197 bp, Homo sapiens
aaacatgtttgtaattgtttgttgaggaatttttattacactcctttaaaaatcattttcagataattctaagtaatagcatctatcaattgtcttttatcattsgatttgagattttctttttttcttatttatttattcatttatttattttttatagacagggtctcactctgtcacccaggatggagtagagt

SEQ ID NO: 605184 - DNA, 610 bp, Homo sapiens
cattttttaagttagtgtcaaatgtgtaaaaatgtaacaattttgaactatttaaaaaaaacactattaatattgcatgtacctattataagattttctaaaaggccaatctggggttattgctaaaaaaaagactgcttgctctttctgggtaacatacttcgaattttgagaaaattaaaatactctgttttccatcaataaagctaaacatattttacttatacaataaaatatgacaaatatgttaaattagtgtttcttaaaacctgattatccacaaagacaaattttgagactaatccccatgatgccagaggctattgatcagactggatgtttggctgttctgatgtttatctttttatctgtcttgaaagaaaatgtcaagtattcaccacaaagcttacaaggacctaattasagctataaaatcaaaataaaagagtatagcattgggagaggcatagtttgatgggcttattcttcaattaaaatcacatacctaccacttgcttaaaaaaaaaaatcaaactcgttaacaagatactcagctaaaatccctcccaatctatctttagcctgtccccagactcatcttctctcattc

SEQ ID NO: 605185 - DNA, 580 bp, Homo sapiens
aatagaccagtgggcagaggtcagtgggcaagaaagaaatagtgacatcaattactcgtctctactctttcacctgtaattttctgtctttaatttataatggaagtaatggataaataaccccttttgcagtgtggctagactcctgttgaccaactttagtagcttgttcaagggaaagccaaatagaagtagcccagttagtttcaaaatgtcatctgaataagtagaccatacactgtattagtgccaggcatgaccaggctcacccctcttacagtattttcccttmacttttactgtaagcaaggctttgcttctcactggttcattttacctagagctgctttattaacagtggaggctcacctctaattggcttattgactcctaatgttaatgcattgaaaatgaagatacttttgttgttgttgttcaaatgctttatcttgcttgataaagcaaggttctgtaacactaaaagaagaatcacctggtggatgcatggtttcatctataccctttattattattatcacacagtgctatgatatattttgcctttccctgttgtatcatg

SEQ ID NO: 605186 - DNA, 552 bp, Homo sapiens
aagaaatttcttaggagagcttggagtatgtctgagaagccagtgagaatatacttgagtgaggagatttctaaagagagaaggcttgctggagaagccaaaaccagccttggtgtaaggaactacagttattgtcatacagagaaaagaagtatgaggagtccactctgcaccccggttacacatggtccacagcgaaggaggaggaccttaatggtttcatgaaagttagaggagactgatacagggctagatgacaccrtgtcccacttggggaggtattgtgcatcgtgagccacttgaagagttcttatctacagagaggccaggttgaagcttgatctgccactaaaggagccattacatcaataaaggcctccagtatctgaattagaacaaagctaaggacatctccctactaccatcttggtctctgcttaattaagtaaggtgaccagagccatttatagtcttccatatgaatttgacccagaaaatggaggagcaggagatcagaccatgctctactctctatttcacatctcaaccata

SEQ ID NO: 605187 - DNA, 613 bp, Homo sapiens
cttgctttattatctcatgattattgtgttattcatagtagtaggtgctatgaaattatacatttcttcagctgttgaatgtatgtttaaaagaagatccttggcatagatcaaatttttatacattagagaaagggagacattacatcaatgataccctttatttgttatcattaaaagtgattggaaaagattgaattagacccagtatgggagagtggaggaagcactggacttggcagtaagacagatctgccttcttgctgtgcattatcttgttttattttttttcagcctcagttttctcatttcaaagaaagtagttggagtagctggctttgtgcttcatagcacttcacagtgctctatttcaagcactaatcatattctgttttgtattaggttagtcgtgtgtgtctgtgattatgtaagctccttgagattagattgtctcactgatgtgcacatctccattggtgcctcatgtagtgtcttgcatatagaaagcacttgtgacgtacccttttttgstttcaaagcagattgttttgacatttgtctgtatgaaaagaaggcaaaaggaagggagtacaatggaaaatgttgacatgaa

SEQ ID NO: 605188 - DNA, 482 bp, Homo sapiens
ctgctgactggaaagaaggggattaatttggggaatccatttgtttatactggtgaaagtcttagagatgatattttggacattcaaatctgccaaacagaattatcaaatattttaaaatgtttaacatttagttattactaggatatgaaaatgttttctctaccttatttttaattgattttcagtaataattcataatctaaatcaaaactgtttttagcattttamgaactgcttttacatatgttaatgcttgatacataaaagcaattttgaaaattggttattattttagcaaattatgcaatctgatcagtactcttttcgttttcagaacactgaaaaacaatggactcacacagattctggaagggaaattcttcctccttatgtattatagttgtttagactgcactattattatcattatcaattttttttttttttttgagatagagtctcgctctgtcgcccagcct

SEQ ID NO: 605189 - DNA, 598 bp, Homo sapiens
tataatgcatattataataaatgtttattatacacatgcattagagataatgtcctctgtaaaagagcagagcagaaatgtcaagtgtacatgttacttaaatttggtgctcattaatagtacctaacagtaatacagtatcctatatagttttaaggtcaattcctagcagttaatttcaatgatgtcatcccagctctgcatgcggaattcaagtctccctcttagggttccattaccccttgcacagaattctgatcttgtacttaccacgccatatagtaattatgacaactctgtgtctgtttcattcagcactatattcttagggcttgacacagggtagatacccagcaaatgttaggtaaataaatgaataatgtattccctaatagaatacaaacctgtcaagaatgggaactaggtctcattctcaaatttaatctttatgagaacaaggaccattcctgctttgtgccttgatcactgctgaaacactagtaactaggacagttactggggttragtgagctgagcctatttttccagcagccagttcaggacctgaaacagagtgaatgctctgtgaatgtttgtc

SEQ ID NO: 605190 - DNA, 603 bp, Homo sapiens
cacttagttggtattcaataaacgtctgatgatctagattcttcactcttgagctaattctacctgtcttcctcttcctggaactctgtcatcatagataatagaggcaataccctgtctagatacaatttaagaaacattagggtacaaccacatgtagtacagaggtccctggtagactaccatttactgggcaggccaactttggtagatcagccaggaagatcatgtttgctataaagatccaagaccacattcaggaataggtgttgttaacactgttatcttatcatctgtgagtttcctgtcatgrccaccttattgttattagatatctgtttattgtcccatgtggaactgagaagatgccccctgacatcttactttactcacctactgatggaagcccacttctctattttttagattttgctatctaggactatagtgtctataggataaataaaccctagaaccaggctatatgacttgaaattctggcccatcacttaatatcaaagaaacttggaagaggcacttgaactatctaatctttattttcctgaactgtggaatgagataaaaatagcccctatctcaaag

SEQ ID NO: 605191 - DNA, 531 bp, Homo sapiens
gtacaaccacatgtagtacagaggtccctggtagactaccatttactgggcaggccaactttggtagatcagccaggaagatcatgtttgctataaagatccaagaccacattcaggaataggtgttgttaacactgttatcttatcatctgtgagtttcctgtcatggccaccttattgttattagatatctgtttattgtcccatgtggaactgagaagatgccccctgacatcttactttactcacctactgatggaagcccacttctctattttttakattttgctatctaggactatagtgtctataggataaataaaccctagaaccaggctatatgacttgaaattctggcccatcacttaatatcaaagaaacttggaagaggcacttgaactatctaatctttattttcctgaactgtggaatgagataaaaatagcccctatctcaaaggattgttgtgataattaaatgagttaatgcaagtaaacatcttaaaacagtgcctggcacatagtaaatgct

SEQ ID NO: 605192 - DNA, 596 bp, Homo sapiens
aatgatagtttctactttttaaatttattataaaacttaagctagtatatgtaagatacttgacatactatatgctgtatagcaagtggtcaataaatgttacattttatgtttttttttttaagtcttattgtctctctttccagtatttttcctatttgttgccttcactgtgagccagaaaattccttcctctggaagcctttatctctgaaacccagcatttccaaaaatgttctgggaaatagatgttaataggtattacataaagggggaaggattcatatttaaatacgtttgagaagtactggattaaaaataaattaaccatattctttacagcaggactttttacaacactgaaatatgctactacacgttgtaattcttcagaggggascagtgcatacagtatttcctgaagttatttgattatagaccctctctctgtcttttttcgccagaatatcttatggaattagtgttcttaggaacttatttgctcaacactgccccaaagaattaccaggtttttttttttttttgtaactgtcaacaattccacaaattctctttttatttactgaagcacgcaa

SEQ ID NO: 605193 - DNA, 605 bp, Homo sapiens
gaggaacgacaatgtaccaagcagtcctcagatattttcctttatcctgtctctggtgacaagattccatagttaagtcactagctagacatgttttacactgatctcaccaaggccacccctaaggcgtgcagggctccaggcaaagattttttgtgatgcctatgtctatataaacagtttgattaaaaattgtattacaaaatttatagacctcatgtgtctatatttatagacctcatgtgaggtccatgaatttagatgaagatgtagaataatgtgtagagaagatacttaggtatttgtttattgttcaatgagtgcatgtgaagtatccggagccatcttttcatattctttgttgtcaaatgcatagtttctgragacaattttatatctcccacatgcagaaaaagctagcactactgttattactcacaatgcatggctttttggggcatatttgtaatgaaacaatataggtcttcttgcctcagcagtttcctaatactatttacttaacactggttacatcattactcgtgatgcttcagcattcatggtaccgctacaaatactggtttttaatgatgtacacaaatgca

SEQ ID NO: 605194 - DNA, 573 bp, Homo sapiens
ggcctccagctggccatgtctatctttccagcttcatctctagccattctaaaaatgatccaactacatgttgaatcttctatcttctatcagtacatcttctatcagtaccttgaaggcaccaagctcttttccattttagatatattgcaagctgtcccttctggcaaaatgagagtaggaaaaagaagaagccaggagtaaggataatgtctgtacttattgggttgagtaataaacttaactttgagtttcctagcaaccaaggcaacaagagatatagaaacagacacatggctcatacaatccattacaaaactcaattaagtttcttaggacaaacacagcttttattgacactgagacccaaggagagtaggagagagtgggcaatctttataaggagtagagtttattatatgataagcaacagtctccaccacatccttagacacaccctagcaataggaaaaacatttcatggggctatttcttataccagctctcaatttagtcctttgttatctgccatattgataaaarcaatcctatgagagagcaaactgttgttct

SEQ ID NO: 605195 - DNA, 575 bp, Homo sapiens
atttattgaccaaattggagtagataacagctttgggatataaatacaggctattgccttaaaaattttgtctatctacaagttttaagattctctttaagagcatgtccacaatgatattacagtagtacattttctgagcatgtccactgtgatattacagtagtaccttttccgttcctaaaactacaccatagaattttataatattctcttttcartagaagaaaaataatacacagaaaagatacacatactaatttcagcctttgtattgatattttgtgtgaccctaaacaagttcccatctgtaaaatcagaagagttatctgaatgatctccaagaacacttccagcccaaacaggattctttattaaatgctaaatgaggagttaactttcattataaaccaactacagatatacctcattttatagcattttgctttattgcactttacagatactgtgttggttttttgtttttatttttgtttttgtttcaaatttaaggtttgtgacaaccctgtgttcagcaagtctattggcatcatttttccaacaccatgtactta

SEQ ID NO: 605196 - DNA, 430 bp, Homo sapiens
gaattcataggtaacaacaggatgaatatatacgaacattctgatatcagagaagtagctatggaatggcctgtctgccccaacgttcttacagtgcagagggttgaaagtraagatccctggtagcaatcctggctggactaaggatctgaagcagaaagagagataacttgccaaggtcacttgtccaaataggctctgtaaattagatgtcacctgaagtgggtttttaggtttatttgtcaaagattcaagtaaaattagcacaaagcccccaccctatgggtactgggagctctatatcccttccaatctctcccagaggtttctgtgggttggggtaaatttttgtattctgaatattattggctcatagctccctgtattaggtcagtttattgatcatccccctatcctgcatatgatgttc

SEQ ID NO: 605197 - DNA, 550 bp, Homo sapiens
gttgtgggggtttggtgtacagattatttcattacccaggtaccagtaccagataggtagtttctctatcctctcccttctcccaccctccaccytcaagtaggccccagtgtctgttctcatctttgtgtccatatgtactcaatgtttagctcccacttataaatgaggacatgtggtgtttggttttctgttcctatgttatttcttcatacttcgataatggcctccagctccatccatgttgctgcaaaggacatcattttgttcatttttatgactgtgtggtattccatgatgtgtatgtaccacattttctttatccactctactattgatgggcatttaggttgattccatgtctttgccattgtgaatagcgctgagataaacatatgcgtgcatgtgtttttatggtagaatgacttatattcctttgggtgtatacccaattatgggatttctgggttgaattaaaattctgttttaagttctttgggaaatcaccatactgctttccacagtagttgaactatttccatttccacca

SEQ ID NO: 605198 - DNA, 393 bp, Homo sapiens
gagaacttagaatttggagtcaaaaaggacaacatgacggtctcagacccatcacttaattgctgataarctcagaccaaggcgtgtggctgtctcaagccaatcattgatttggaacccctctaatctgatgttttttaacatatttttgtcaatagtttggtctagagaagagtctgaatgctgcaggagggaagaggccaaaaggaagatcccaggttaccagacatggtttctgctctgttatcttgaaaaactcagtgatatggtttggctctgtccccaaccaaatctcaccttgaattgtcataatccccatgtgtcaagggcagggccaggtggagttaattgaatcatgggggtggtttctcccatactgttctcatggtagtc

SEQ ID NO: 605199 - DNA, 496 bp, Homo sapiens
tttgttttatattcccttgagttttggggtagtatgtagttaatgaatgaattaaataattgattaaacccatttttctattaacattataacagcacttctattaatatgaaaatatgaatgtgtctcagagaagtttcctttgacattataatgactgtattaaaatttcaaatatartaatgaaattctaattgttttagagaaacaatttaaaaaggctatatataaatgctctggaagaactatgggatgttcacaaaataccaaaaaggaattttcagaaaagttgatatgaaaaaccacataatttttattaaattggactgtaatttcaaaataataatcatttaaagagaatcttttgtttcaagtattacggtgaacaaaacaagaattggcagattaaaacatacaatatggcaatttagacaaagaaatgtaatccaaattctagtttatttaaagctttccatgaacttcaagtgggtaagga

SEQ ID NO: 605200 - DNA, 530 bp, Homo sapiens
ccttcttttttctaaatgtcttagcactggttttgtcaaaggaaaagaaataatttgggggaattgataaagcaggaaaaactttggcaaatgtgtcagtgacttttcaggtactgaagaagtttaagcccaaggtgggtgctacttggcaaggatgctgattatgagaacaaaaatgaaaaatcagactagataatggagattcattccctctctcatagttcaagactcaattccaccatttttacctgggtaggattctccagtagtgcctacactacaagtgttaggatttcagagtaagcccacttacccagtgatatggtttggctctgtgtccctacccaaatctcatctcaaattgtaatccccatgtgtcaagggagggacctgtaatccccacgtgtcaagagagggaggtgattggatcatgggggtggtttctcccatgctgttctcatgatagtgagtgagttctcacgagaactgatggtttcatagtgttmctccttcacacagtctctctctct

SEQ ID NO: 605201 - DNA, 566 bp, Homo sapiens
gtgagtatctgctcaggtttagagtcagacacatcaggattttgttcctaattttaccatcagtarggtgtggaccttagggaagttgtttaacctcttcaaacctggtttttcattctttaaaggggtatattaataataatgaataaaatgtaacaatgcctgttatatagtaagcccttaataaatgctgactgttaatattaacattatcatactttttagtagtcatattaggaactcactgacttccccttcctcctttcctcctccctcctccctttggtcatctttgggtacaaatacatttggaagcaaaattattgcttccatagctcttcacaatatcttatttgatcagagagcaactttggttttacaactgacattatacttagtgtttatttacatagattttatcttcttttgaaagaaataacttgacttggaaaaactgtttggtcaaagaatgagttatttttgtttctgaaactaactttgtgtcatacctagataccttactaacaagttagtaagaagccatcatccatgtacttgactaaaac

SEQ ID NO: 605202 - DNA, 566 bp, Homo sapiens
gtgagtatctgctcaggtttagagtcagacacatcaggattttgttcctaattttaccatcagtaaggtgtggaccttagggaagttgtttaacctcttcaaacctgktttttcattctttaaaggggtatattaataataatgaataaaatgtaacaatgcctgttatatagtaagcccttaataaatgctgactgttaatattaacattatcatactttttagtagtcatattaggaactcactgacttccccttcctcctttcctcctccctcctccctttggtcatctttgggtacaaatacatttggaagcaaaattattgcttccatagctcttcacaatatcttatttgatcagagagcaactttggttttacaactgacattatacttagtgtttatttacatagattttatcttcttttgaaagaaataacttgacttggaaaaactgtttggtcaaagaatgagttatttttgtttctgaaactaactttgtgtcatacctagataccttactaacaagttagtaagaagccatcatccatgtacttgactaaaac

SEQ ID NO: 605203 - DNA, 608 bp, Homo sapiens
cagacttccttttcttagagtagcattttagagctcaggtcaaatgcactcaatagtgaatgtatacaattgggcctccctgtctctggttctgcatccatggattcaacaatacaacaataagtacaaatttctaaatatagtataaaaactatttacatagcatttaggtattacaagtaatcttgaaatgatttaaaatatataggaggatgtgtataggttatatgcaaatgctatgtgattttctataagggacttgagcgtctgcaatttttgatatttgttaggtatcttggaacatatcccctacagatactgagggatractgtagtgattaccaatattttgtttctttgaggcataagaaaacccttggccagctcaatgcagtagcaacaattccattgaaaattgaattctacttaaaagagaaaatatattgccttacttaaattgaaagcagaaaactttgcaactctatgccgattgccagggcattagattagatcttatatatttttctgtgaataatcatcaccctatctagatgttctttcttggtacctacccaacagtttgttgatttcttaattttcaaaagagc

SEQ ID NO: 605204 - DNA, 619 bp, Homo sapiens
tgtaatcctggtttctctcaagctgttacttcccatcctcaagtgaaggtgggtggcggttaatggggaaaaacttgatgactaaggttaattatcagaaagaaaaattacagtgtacaattatcagggggaaaaaaaggatgactaaggccataaatcacaatcaggctcttcctacaattcatgcttaggaattaaaggaattttcccctaagaatgtcatctccactccacccactgttcatggcctattttatctytttgaatacagtctatcctcataggagaatgtgaaaatttcttgttttgtatggcctgcccataggaaaaggccttgatgataatcctttcacgtaaaagtgtgttccttggcttctggtgacttttaaaagctatagaattctcacaaaagctttgctatccatgtagcaaattcagtggtcagtctccctaccttattaggcttagtttaaaagccatgataatctggacaatcctaaatgaaggtatatctttccttggcttttgcttgaatgtatattattgttgttgttgttgttgttgcatccacatgttggatgctcagtgctcggttctacccaaaccaatctgataacaa

SEQ ID NO: 605205 - DNA, 619 bp, Homo sapiens
tgtaatcctggtttctctcaagctgttacttcccatcctcaagtgaaggtgggtggcggttaatggggaaaaacttgatgactaaggttaattatcagaaagaaaaattacagtgtacaattatcagggggaaaaaaaggatgactaaggccataaatcacaatcaggctcttcctacaattcatgcttaggaattaaaggaattttcccctaagaatgtcatctccactccacccactgttcatggcctattttatctttttgaatacagtctatcctcataggagaatgtgaaaatttcttgttttgtrtggcctgcccataggaaaaggccttgatgataatcctttcacgtaaaagtgtgttccttggcttctggtgacttttaaaagctatagaattctcacaaaagctttgctatccatgtagcaaattcagtggtcagtctccctaccttattaggcttagtttaaaagccatgataatctggacaatcctaaatgaaggtatatctttccttggcttttgcttgaatgtatattattgttgttgttgttgttgttgcatccacatgttggatgctcagtgctcggttctacccaaaccaatctgataacaa

SEQ ID NO: 605206 - DNA, 619 bp, Homo sapiens
tgtaatcctggtttctctcaagctgttacttcccatcctcaagtgaaggtgggtggcggttaatggggaaaaacttgatgactaaggttaattatcagaaagaaaaattacagtgtacaattatcagggggaaaaaaaggatgactaaggccataaatcacaatcaggctcttcctacaattcatgcttaggaattaaaggaattttcccctaagaatgtcatctccactccacccactgttcatggcctattttatctttttgaatacagtctatcctcataggagaatgtgaaaatttcttgttttgtatggcctgcccataggaaaaggccttgatgataatcctttcacgtaaaagtgtgttccttggcttctggtgacttttaaaagctatagaattctcacaaaagctttgctatccatgtagcaaattcagtggtcagtctccctaccttattaggcttagtttaaaagccatgataatctggacaatcctaaatgaaggtatatctttcctyggcttttgcttgaatgtatattattgttgttgttgttgttgttgcatccacatgttggatgctcagtgctcggttctacccaaaccaatctgataacaa

SEQ ID NO: 605207 - DNA, 450 bp, Homo sapiens
ggaaaaagagcactatactcaaataagtttgggaaatattggatraaacaaaattaactaggcttgtgtgtgtgttctttagaaatgcctctcagagtctttaatatgctcatgctgattgtggatatttaagagaaagaggtttaagtatcccttactcatctcatttagcccctatgtttttcttcatagcatctctcagggccaggtgttccaaaaaacatacttggaaaagcccaactctgctactcttctccattgcctgtttgagactaagaattctttcattagctgactttccttctatgcacccattcctcattcttctccccaatattacttgcccatttctctgttctattccttcacccttccttctcttcctccttttattctctttttggaaatttaaaattactattgagcacctggaaaggtggcttcgagatc

SEQ ID NO: 605208 - DNA, 604 bp, Homo sapiens
aaaaccacctggggggctttaataaaacactgtttcctaggccttaccctagacctgctgatatggtttggctctatgtccccacccaaatctcatctcaaattgtaatccccacgtgttgaggaagggacctgatgggaggtgtgtgggtcctgggagagtttcccctatgctgttctcgtgctggtgagggagttctcacgagatctggtggtttgataagtgtctgcagtttcccccatgctctctctctcttgtctgctgccatataagatgtgcctttcttccccttcgcctcctgccatgattgtaagtttcctgagacctccccagccataccaaattatgagtcaattaaacctcctttctttataaattacccagtctcaagtagtatctttayagcagtatgaaaatggaggaatacacctgcagaaccagagtccttgtgaataggacccaggaatcaatatttatcaaatactcccctggtgatggtgatgcagctggcccacactctgacacctgagtagctagtttgtaggtgagaaaatggaaatgcaaagaagtgactgacccagtagcacaactagattgaaagctt

SEQ ID NO: 605209 - DNA, 513 bp, Homo sapiens
atacaaatggtcaacaggtatatgaaaaaatgctgaacgatgctactcatcagacaaatgcacatcaaaatcacaatgagctatcacttcacatctgtcaggatgactgttaacaaaaacacataattagcactcattaaatgttaattatctttgttgttattattaagatttgtgtaccatgaagggtactataaatgctagatgatcatgacatggtccctgtcctcaaagagactgcataaatagggaagagacaaggaaacaaattagtataatagtataattttaaaagtatggactctggaagcagtttgaatcccrgttctgcctcttagcagctgttcaatcctgggctagttacttaacctaacatgaaattacgttacctatagaactgagatcattttacttgtctcctatggttgttgtgatgattacaaagataatgcatgtaaaacacatagcacagagtctggaacataattaagtgctcaataaatacagccatta

SEQ ID NO: 605210 - DNA, 488 bp, Homo sapiens
caatctggaactcagactctgttactatttcttccattccccaacatctgaggtgcttctcactcaatcccaaattttcctttgaccccaacttacttactcacaggagtaggaggacaaagagaaagggaaataatttgatgagaagcagggattgactacttccaattatttttcactgtaacccatactatcaacagcagatgacatcgatttgatcttcccagtactatttgttcttagccatattcagaatgtaaaatttagggccaggcatagtggctcacacctgtaatcccagcacttcaggaggccaaggtgggcasatcacttgaggtcaggagtttgagaccaacctggccaacatggcgaaaccccatctctactaaaaatacaaaaattagccaggcatggtggtgcatgcctgtagtcccagctgctagtgaggctgaggctgctggaggatcacttgaaccccggaggtggag

SEQ ID NO: 605211 - DNA, 483 bp, Homo sapiens
gaactcagactctgttactatttcttccattccccaacatctgaggtgcttctcactcaatcccaaattttcctttgaccccaacttacttactcacaggagtaggaggacaaagagaaagggaaataatttgatgagaagcagggattgactacttccaattatttttcactgtaacccatactatcaacagcagatgacatcgatttgatcttcccagtactatttgttcttagccatattcagaatgtaaaatttagggccaggcatagtggctcacacctgtaatcccagcacttcaggaggccaaggtgggcagatcacttgaggtcaggagtttgagaccaacctggccaacatggcgaaaccccatctctactaaaaatacaaaaattagccaggcatggtggtgcatgcctgtagtcccagctrctagtgaggctgaggctgctggaggatcacttgaaccccggaggtggagat

SEQ ID NO: 605212 - DNA, 568 bp, Homo sapiens
attggtatcagttctgcttgttttttttttttttaagcctataaattggttaaagataaagcattaaccaaaacctctgtaagtacatgagaatctctactttgtagaaaagaaataataataatttaagaattcagagtattttgattgcatataccaatatacttgggtaataccaactattagttttctttttaggacttttttttttgagacggagtttcgctcttgttgcccaggctggagtgcaatggcacgatctcggctcactgcaacctccgcttcctgggttcaagtgattctcctgcctcagcctctcgagtagctgggattacaggcrtgtgccactacacttagctaattttgtattttttaatagagatggggtttctccatgttggtcaggctggtcttgagctcccaacctcaggtgatccgcccacctcagcttcccaaagttctgggattacaggtgtgagccaccatgcccagccctctttttaggacttttgattatcaagagttgtgtaggctgaggcaaaatggcatatatatatatatgggtgtg

SEQ ID NO: 605213 - DNA, 568 bp, Homo sapiens
attggtatcagttctgcttgttttttttttttttaagcctataaattggttaaagataaagcattaaccaaaacctctgtaagtacatgagaatctctactttgtagaaaagaaataataataatttaagaattcagagtattttgattgcatataccaatatacttgggtaataccaactattagttttctttttaggacttttttttttgagacggagtttcgctcttgttgcccaggctggagtgcaatggcacgatctcggctcactgcaacctccgcttcctgggttcaagtgattctcctgcctcagcctctcgagtagctgggattacaggcatgtgccactacacttagctaattttgtattttttaatagagatggggtttctccatgttggtcaggctggtcttgagctcccaacctcaggtgatccgcccacctcagcytcccaaagttctgggattacaggtgtgagccaccatgcccagccctctttttaggacttttgattatcaagagttgtgtaggctgaggcaaaatggcatatatatatatatgggtgtg

SEQ ID NO: 605214 - DNA, 470 bp, Homo sapiens
tgtcagcccgctctgttttccctgaaccaggagtctccagatgtcaacacagaagtagctgttcacaattgctcagttacctggggcatggtgggccttggtcttcttcctcttcttggtcctttttaattcctgcaatacattcagacagggacagacaaaataagccaattcacctacacccataacagtccactgtctaatccccacacagggatctcaggctcctcagcatgagaacaggacaatgtgagagatatacttcaggaggcctgaaagctggtcatgatattctttggtttrcatctcagaaccaagggtgaaatatccccattctggtagatcgttatcccaaaatcatttatcccaagtttgtgcaaacagttatgctttattgttcccatcagttcaaagaaaatgccccagatgatttccaggaggaaaactaaagtattcagccctgtctcatc

SEQ ID NO: 605215 - DNA, 543 bp, Homo sapiens
ggaaatctacaaacccttcagtccaaatcatacttccgtgaattttttacatctgcctgggtccaaygtgctgagagcgggctcaggttgccacaggcatggctggagactaggaatagagccttgctcactgacccatttcatgtctaggcttccaactgagactacagtttcattacaacctatatgcgcccataggtcctgcctgcggcaatgacgtctctcgggtcagtaaggggtacttggaactggaatatcacccctatctggaagaccaggtggaggcttatcaccttcacagtaaggtactcactgtccacgtcaagagccaagccaaggtactgttcctccaatgagtaaacagcactgctgtagggctggcctaagtcaggcagttcaagataacctgaaggagtcgaataacatctatccagtgagtcctgcaagacttcaggctctttctcatccagcagctccctgctgagcctggaaaagtaggaaaaagtaaagaataagtcagggggaatcagaaaccacacagcc

SEQ ID NO: 605216 - DNA, 543 bp, Homo sapiens
ggaaatctacaaacccttcagtccaaatcatacttccgtgaattttttacatctgcctgggtccaatgtgctgagagcgggctcaggttgccacaggcatggctggagactaggaatagagccttgctcactgacccatttcatgtctaggcttccaactgagactacagtttcattacaacctatatgcgcccataggtcctgcctgcggcaatgacgtctctcgggtcagtaaggggyacttggaactggaatatcacccctatctggaagaccaggtggaggcttatcaccttcacagtaaggtactcactgtccacgtcaagagccaagccaaggtactgttcctccaatgagtaaacagcactgctgtagggctggcctaagtcaggcagttcaagataacctgaaggagtcgaataacatctatccagtgagtcctgcaagacttcaggctctttctcatccagcagctccctgctgagcctggaaaagtaggaaaaagtaaagaataagtcagggggaatcagaaaccacacagcc

SEQ ID NO: 605217 - DNA, 543 bp, Homo sapiens
ggaaatctacaaacccttcagtccaaatcatacttccgtgaattttttacatctgcctgggtccaatgtgctgagagcgggctcaggttgccacaggcatggctggagactaggaatagagccttgctcactgacccatttcatgtctaggcttccaactgagactacagtttcattacaacctatatgcgcccataggtcctgcctgcggcaatgacgtctctcgggtcagtaaggggtacttggaacwggaatatcacccctatctggaagaccaggtggaggcttatcaccttcacagtaaggtactcactgtccacgtcaagagccaagccaaggtactgttcctccaatgagtaaacagcactgctgtagggctggcctaagtcaggcagttcaagataacctgaaggagtcgaataacatctatccagtgagtcctgcaagacttcaggctctttctcatccagcagctccctgctgagcctggaaaagtaggaaaaagtaaagaataagtcagggggaatcagaaaccacacagcc

SEQ ID NO: 605218 - DNA, 611 bp, Homo sapiens
actgttcctccaatgagtaaacagcactgctgtagggctggcctaagtcaggcagttcaagataacctgaaggagtcgaataacatctatccagtgagtcctgcaagacttcaggctctttctcatccagcagctccctgctgagcctggaaaagtaggaaaaagtaaagaataagycagggggaatcagaaaccacacagccccagctagatttcatggctaacataaggaactgtttaaaaagaaaaaggacagatccattaatgaggtaatgaattattgcctttatgttgggatagaccagggccaggtagaaaagaatgaaagagaaagacagggagagggagagagagagagaggagaaagtgagctcagcgaattggccgggtgacacactgatgaaggggtcaaaggacactctgagttagtgccctcgggacacacagcgaacagtgatcatgaaaagagtgggctcaataattttccataaccttgctcaagattccatgcagttgccatacagcctttgaggtatggtcaacctatagtaagtgagtaaatgataaggggaggaagaaatggaaacctaaacatctactgcaatgaaaac

SEQ ID NO: 605219 - DNA, 611 bp, Homo sapiens
actgttcctccaatgagtaaacagcactgctgtagggctggcctaagtcaggcagttcaagataacctgaaggagtcgaataacatctatccagtgagtcctgcaagacttcaggctctttctcatccagcagctccctgctgagcctggaaaagtaggaaaaagtaaagaataagtcagggggaatcagaaaccacacagccccagctagatttcatggctaacataaggaactgtttaaaaagaaaaaggacagatccattaatgaggtaatgaattattgcctttatgttgggatagaccagggccaggtagaaaagaatgaaagagaaagacagggagagggagagagagagagaggagaaagtgagctcagcgaattggccgggtgacacactgatgaaggggtcaaaggacactctgagttagtgccctcgggacacacagcgaacagtgatcatgaaaagagtgggctcaataattttccataamcttgctcaagattccatgcagttgccatacagcctttgaggtatggtcaacctatagtaagtgagtaaatgataaggggaggaagaaatggaaacctaaacatctactgcaatgaaaac

SEQ ID NO: 605220 - DNA, 608 bp, Homo sapiens
tacagcctttgaggtatggtcaacctatagtaagtkagtaaatgataaggggaggaagaaatggaaacctaaacatctactgcaatgaaaaccaacagcaatgtcagtaggagtaattcaaccttcgttgaaaacatgaaattgaacacactcttgttttccctggacctggcatctccaggtgtcaacacagaattaagcatccataattgctcaaagttacctggggcatgatgggtcttggtcttcttccacttcttggtacttttcaatttctgcaataagttcagacatggacagacatattaagctggttctcctacacacataacaatccactgtctaatcctcacacagggacttcaggctcctcagcatgagaataggacactgtgagagatagtcttcaggaggcctgaaggctgatcaccatagagattccttggtttttgtcccagaaactgtgggtaaaattccctattctggtagatcgttatcccaatatcatttgtcccaagtttgtgcaaatggttatgccatatttttccaatcgatttaaagcaaatgcccccaaatggctgctaggagaaaaactgcactattcagcc

SEQ ID NO: 605221 - DNA, 608 bp, Homo sapiens
tacagcctttgaggtatggtcaacctatagtaagtgagtaaatgataaggggaggaagaaatggaaacctaaacatctactgcaatgaaaaccaacagcaatgtcagkaggagtaattcaaccttcgttgaaaacatgaaattgaacacactcttgttttccctggacctggcatctccaggtgtcaacacagaattaagcatccataattgctcaaagttacctggggcatgatgggtcttggtcttcttccacttcttggtacttttcaatttctgcaataagttcagacatggacagacatattaagctggttctcctacacacataacaatccactgtctaatcctcacacagggacttcaggctcctcagcatgagaataggacactgtgagagatagtcttcaggaggcctgaaggctgatcaccatagagattccttggtttttgtcccagaaactgtgggtaaaattccctattctggtagatcgttatcccaatatcatttgtcccaagtttgtgcaaatggttatgccatatttttccaatcgatttaaagcaaatgcccccaaatggctgctaggagaaaaactgcactattcagcc

SEQ ID NO: 605222 - DNA, 573 bp, Homo sapiens
gaacacactcttgttttccctggacctggcatctccaggtgtcaacacagaattaagcatccataattgctcaaagttacctggggcatgatgggtcttggtcttcttccacttcttggtacttttcaatttctgcaataagttcagacatggacagacatattaagctggttctcctacacacataacaatccactgtctaatcctcacacagggacttcaggctcctcagcatgagaataggacactgtgagagatagtcttcaggaggcctgaaggctgatcaccatagagattccttggtttttgtcccagaaactgtgggtaaaattccctattctggtagatcgttatcccaatatcatttgtcccaagtttgtgcaaatggttatgccatatttttccaatcgatttaaagcaaatgcccccaaatggytgctaggagaaaaactgcactattcagccctgtctcatcaaatactcagattgttcatggtagtgaggattttagacgctgaaattagagtgaaggatgaaatctacaagatctacaaaattgagacaaaatcagag

SEQ ID NO: 605223 - DNA, 573 bp, Homo sapiens
gaacacactcttgttttccctggacctggcatctccaggtgtcaacacagaattaagcatccataattgctcaaagttacctggggcatgatgggtcttggtcttcttccacttcttggtacttttcaatttctgcaataagttcagacatggacagacatattaagctggttctcctacacacataacaatccactgtctaatcctcacacagggacttcaggctcctcagcatgagaataggacactgtgagagatagtcttcaggaggcctgaaggctgatcaccatagagattccttggtttttgtcccagaaactgtgggtaaaattccctattctggtagatcgttatcccaatatcatttgtcccaagtttgtgcaaatggttatgccatatttttccaatcgatttaaagcaaatgcccccaaatggctgctaggagaaaaactgcactattcagccctgtctcatcaaatactcagattgttcayggtagtgaggattttagacgctgaaattagagtgaaggatgaaatctacaagatctacaaaattgagacaaaatcagag

SEQ ID NO: 605224 - DNA, 573 bp, Homo sapiens
gaacacactcttgttttccctggacctggcatctccaggtgtcaacacagaattaagcatccataattgctcaaagttacctggggcatgatgggtcttggtcttcttccacttcttggtacttttcaatttctgcaataagttcagacatggacagacatattaagctggttctcctacacacataacaatccactgtctaatcctcacacagggacttcaggctcctcagcatgagaataggacactgtgagagatagtcttcaggaggcctgaaggctgatcaccatagagattccttggtttttgtcccagaaactgtgggtaaaattccctattctggtagatcgttatcccaatatcatttgtcccaagtttgtgcaaatggttatgccatatttttccaatcgatttaaagcaaatgcccccaaatggctgctaggagaaaaactgcactattcagccctgtctcatcaaatactcagattgttcatggtagygaggattttagacgctgaaattagagtgaaggatgaaatctacaagatctacaaaattgagacaaaatcagag

SEQ ID NO: 605225 - DNA, 451 bp, Homo sapiens
ccttgtctgggcttccaagtggaactagagtttcactcaacctacatgtgcctatagttcctccctgtggtaatgacatctctcagctcagtaagggccacttgcagtaggaatatgaccctaaccagaagactcagtggatccttatcaccttcatagaaaggtactcaccatccatgtcaacagccaagccaacaygctgttgctccaatacataaaaggcacttctgtagggctggcatgagtcagtcagttcaagacaacctgaaggagttgaagaacatctatccagtgagtcctgcaagacttcaggccctttctcatccagcagctccctgctgagcctggaaaagtgggaaaaagtaaagaataagccagggggaatcagaaaccacacagccccagctagatttcatggctaacgtaaggaagagtttgaaaagaaaaagga

SEQ ID NO: 605226 - DNA, 573 bp, Homo sapiens
cctacatgtgcctatagttcctccctgtggtaatgacatctctcagctcagtaagggccacttgcagtaggaatatgaccctaaccagaagactcagtggatccttatcaccttcatagaaaggtactcaccatccatgtcaacagccaagccaacatgctgttgctccaatacataaaaggcacttctgtagggctggcatgagtcagtcagttcaagacaacctgaaggagttgaakaacatctatccagtgagtcctgcaagacttcaggccctttctcatccagcagctccctgctgagcctggaaaagtgggaaaaagtaaagaataagccagggggaatcagaaaccacacagccccagctagatttcatggctaacgtaaggaagagtttgaaaagaaaaaggacagatccattaatgaggtaacaaattattgcctttatgatgggacagaacagggccaggtagaaaacaatgaaagagaaagacagacagagacagagacagagacagagagaaagtgacctagtgaattggccaggtgacatactggtaagggagtcaaagg

SEQ ID NO: 605227 - DNA, 578 bp, Homo sapiens
cagtcagttcaagacaacctgaaggagttgaagaacatctatccagtgagtcctgcaagacttcaggccctttctcatccagcagctccctgctgagcctggaaaagtgggaaaaagtaaagaataagccagggggaatcagaaaccacacagccccagctagatttcatggctaacgtaaggaagagtttgaaaagaaaaaggacagatccattaatgaggtaacaaattattgcctttatgwtgggacagaacagggccaggtagaaaacaatgaaagagaaagacagacagagacagagacagagacagagagaaagtgacctagtgaattggccaggtgacatactggtaagggagtcaaaggacactctgagttagtgccctcatgacacacagcaaactgtgatcatgaaaagagtgagctcaatagttttccataaaatatgctcaaaattcgatgcagtggccatgagagtacagcttttgaagtatggtcaacctatggtacgttaggaaatgataaggggaggaagaaatggaaacctaaacatctactgcaatgaaaaccaacagca

SEQ ID NO: 605228 - DNA, 564 bp, Homo sapiens
actgtcattgctgttggttttcattgcagtagatgtttaggtttccatttcttcctccccttatcatttcctaacgtaccataggttgaccatacttcaaaagctgtactctcatggccactgcatcgaattttgagcatattttatggaaaactattgagctcactcttttcatgatcacagtttgctgtgtgtcatgagggcactaactcagagtgtcctttgactcccttaccagtatgtcacctggccaattcactaggtcactttctctctgtctctgtctctgtctctatctctctctstctgtctttctctttcattgttttctacctggccctgttctatcccaacataaaggcaataatttgttacctcattaatggatctgtcctttttcttttcaaactcttccttacgttagccatgaaatctagctggggctgtgtggtttctgattccccctggcttgttctttactttttcccacttttccaggctcagcagggagctgctggatgagaaagagcctgaagtcttgcaggactcactggatagatgtta

SEQ ID NO: 605229 - DNA, 538 bp, Homo sapiens
tattttatggaaaactattgagctcactcttttcatgatcacagtttgctgtgtgtcatgagggcactaactcagagtgtcctttgactcccttaccagtatgtcacctggccaattcactaggtcactttctctctgtctctgtctctgtctctatctctctctctctgtctttctctttcattgttttctacctggccctgttctatcccaacataaaggcaataatttgttacctcattaatggatctgtcctttttcttttcaaactcttccttacgttagccatgaaatctagctggggctgtgtggtttctgattccccctggcttrttctttactttttcccacttttccaggctcagcagggagctgctggatgagaaagagcctgaagtcttgcaggactcactggatagatgttattcaactccttcaggttgtgttgaactgtgtgactcatgccagccctacagaagtgccttttatgtattggagcaacagcatgttggcttggctgttgacatggatggtgagt

SEQ ID NO: 605230 - DNA, 538 bp, Homo sapiens
tattttatggaaaactattgagctcactcttttcatgatcacagtttgctgtgtgtcatgagggcactaactcagagtgtcctttgactcccttaccagtatgtcacctggccaattcactaggtcactttctctctgtctctgtctctgtctctatctctctctctctgtctttctctttcattgttttctacctggccctgttctatcccaacataaaggcaataatttgttacctcattaatggatctgtcctttttcttttcaaactcttccttacgttagccatgaaatctagctggggctgtgtggtttctgattccccctggcttgttctttactttttcccacttttccaggctcagcagggagctgctggatgagaaagrgcctgaagtcttgcaggactcactggatagatgttattcaactccttcaggttgtgttgaactgtgtgactcatgccagccctacagaagtgccttttatgtattggagcaacagcatgttggcttggctgttgacatggatggtgagt

SEQ ID NO: 605231 - DNA, 538 bp, Homo sapiens
tattttatggaaaactattgagctcactcttttcatgatcacagtttgctgtgtgtcatgagggcactaactcagagtgtcctttgactcccttaccagtatgtcacctggccaattcactaggtcactttctctctgtctctgtctctgtctctatctctctctctctgtctttctctttcattgttttctacctggccctgttctatcccaacataaaggcaataatttgttacctcattaatggatctgtcctttttcttttcaaactcttccttacgttagccatgaaatctagctggggctgtgtggtttctgattccccctggcttgttctttactttttcccacttttccaggctcagcagggagctgctggatgagaaagagcctgaagtcttgcaggactcactggatagatgttattcaactccttcaggttgtgttgaactgtgtgactcatgccagccctacagaagtgccttttatgtattggagcaacagcrtgttggcttggctgttgacatggatggtgagt

SEQ ID NO: 605232 - DNA, 559 bp, Homo sapiens
tccttcactctaatttcagcgtctaaaatcctcgctaccrtgaacaatctgagtatttgatgagacagggctgaatagtgcagtttttctcctagcaaccatttgggggcatttgctttaaatcgattggaaaaatatggcataaccatttgcacaaacttgggacaaatgatattgggataacgatctaccagaatagggaattttacccacagtttctgggacaaaaaccaaggaatctctatggtgatcagccttcaggcctcctgaagaatatctctcacagtgtcctattctcatgctgaggagcctgaagtccctgtgtgaggattagacagtggattgttatgtgtgtaggagaaccagcttgatatgtctgtccatgtctgaacttattgcagaaattgaaaagtaccaagaagtggaagaagaccaagacccatcatgccccaggtaactttgagcaattatggatgcttaattctgtgttgacacctggagatgccaggtccagggaaaacaagagtgtgttcaatttcatgttttcaacgaaggttga

SEQ ID NO: 605233 - DNA, 617 bp, Homo sapiens
cctagtctcaggccatacctgtggcgccctgatcctattctcatgacattggacctgggcagatgtgacaaattcagagaactrtgattttgactcaagggtttgtagatttcctttttcactctaatttcagtgtctggagtcctcactaccatgaacaatctgagtatttgatgagacagggctaaatattgcagtttttctcctagaaatcattgagggtatttgctttacgttgattggaaaaatatggcgtaactgtttgcacaaacttgggacaaatgatattgggataacgatctactagaatagggacattttacccacagtttctgggagaaaaaccgaggaatttctatcatgaccagccttcaggcctcctgaaatatatctctcacagtgtcctattcttatgctgaggagcctgaggtccctgtgtgaggattagacagtggattgttatgtgtgtaggggaatcagcttaatgtgtctgtccatgtctgaatttattgcagaaattgaaaagaaggggaaggggaaaaaaagaaggggaagaagatcaaagaaggaaagaagaaggggaagaaaagaaggggaagaagatcaaaacccaccat

SEQ ID NO: 605234 - DNA, 617 bp, Homo sapiens
cctagtctcaggccatacctgtggcgccctgatcctattctcatgacattggacctgggcagatgtgacaaattcagagaactgtgattttgactcaagggtttgtagatttcctttttcactctaatttcagtgtctggagtcctcacwaccatgaacaatctgagtatttgatgagacagggctaaatattgcagtttttctcctagaaatcattgagggtatttgctttacgttgattggaaaaatatggcgtaactgtttgcacaaacttgggacaaatgatattgggataacgatctactagaatagggacattttacccacagtttctgggagaaaaaccgaggaatttctatcatgaccagccttcaggcctcctgaaatatatctctcacagtgtcctattcttatgctgaggagcctgaggtccctgtgtgaggattagacagtggattgttatgtgtgtaggggaatcagcttaatgtgtctgtccatgtctgaatttattgcagaaattgaaaagaaggggaaggggaaaaaaagaaggggaagaagatcaaagaaggaaagaagaaggggaagaaaagaaggggaagaagatcaaaacccaccat

SEQ ID NO: 605235 - DNA, 617 bp, Homo sapiens
cctagtctcaggccatacctgtggcgccctgatcctattctcatgacattggacctgggcagatgtgacaaattcagagaactgtgattttgactcaagggtttgtagatttcctttttcactctaatttcagtgtctggagtcctcactaccatgaacaatctgagtatttgatgagacagggctaaatattgcagtttttctcctagaaatcattgagggtatttgctttamgttgattggaaaaatatggcgtaactgtttgcacaaacttgggacaaatgatattgggataacgatctactagaatagggacattttacccacagtttctgggagaaaaaccgaggaatttctatcatgaccagccttcaggcctcctgaaatatatctctcacagtgtcctattcttatgctgaggagcctgaggtccctgtgtgaggattagacagtggattgttatgtgtgtaggggaatcagcttaatgtgtctgtccatgtctgaatttattgcagaaattgaaaagaaggggaaggggaaaaaaagaaggggaagaagatcaaagaaggaaagaagaaggggaagaaaagaaggggaagaagatcaaaacccaccat

SEQ ID NO: 605236 - DNA, 617 bp, Homo sapiens
cctagtctcaggccatacctgtggcgccctgatcctattctcatgacattggacctgggcagatgtgacaaattcagagaactgtgattttgactcaagggtttgtagatttcctttttcactctaatttcagtgtctggagtcctcactaccatgaacaatctgagtatttgatgagacagggctaaatattgcagtttttctcctagaaatcattgagggtatttgctttacgttgattggaaaaatatggcgtaactgtttgcacaaacttgggacaaatgatattgggataacgatctactagaatagggacattttacccacagtttctgggagaaaaaccgaggaatttctatcatgaccagccttcaggcctcctgaaatatatctctcacagtgtcctattcttatgctgaggagcctgaggtccctgtgtgaggattagacagtggattgttatgtgtgtaggggaatcagcttaatgtgtctgtccatgtctgaatttattgcagaaattgaaaagaaggggaaggggaaraaaagaaggggaagaagatcaaagaaggaaagaagaaggggaagaaaagaaggggaagaagatcaaaacccaccat

SEQ ID NO: 605237 - DNA, 547 bp, Homo sapiens
gaattcagcaaactttcagyaaacaatcagttgtgttagcaatgaacaatctgagaagaaaattgacacaatgatttcatttataatagcacttgtaagaataatatgcctgggaataaatttgttcaagaaggtgccgtacttgtacacagacaactacagaacattgctcgaggagattcaggaagacctaaatcaatggacagacatcttgtgtccatgggttggaagttgtaacatggttaagataaaaatacaactcaaagcaacccacagattcaatacaatcctatcaagaagtggccttttttacaggaatgcctaagaagaacttcatattcctaaaaaatagtgtgtccccccaaaacaaaagcaatcttgaaatgcaagaagaaacattttctattccaaaggtctttaactgctctaagcagtacttggtagtcttcaatatataggctttcatatctctttttttcttcttttgtttctgcacaggatctcactctttcacccaggctggagtacagtggcacaatcacagctc

SEQ ID NO: 605238 - DNA, 546 bp, Homo sapiens
gtaaacaatcagttgtgttagcaatgaacaatctgagaagaaaattgacacaatgatttcatttataatagcacttgtaagaataatatgcctgggaataaatttgttcaagaaggtgcmgtacttgtacacagacaactacagaacattgctcgaggagattcaggaagacctaaatcaatggacagacatcttgtgtccatgggttggaagttgtaacatggttaagataaaaatacaactcaaagcaacccacagattcaatacaatcctatcaagaagtggccttttttacaggaatgcctaagaagaacttcatattcctaaaaaatagtgtgtccccccaaaacaaaagcaatcttgaaatgcaagaagaaacattttctattccaaaggtctttaactgctctaagcagtacttggtagtcttcaatatataggctttcatatctctttttttcttcttttgtttctgcacaggatctcactctttcacccaggctggagtacagtggcacaatcacagctcactgcagcatggaattc

SEQ ID NO: 605239 - DNA, 545 bp, Homo sapiens
gtaaacaatcagttgtgttagcaatgaacaatctgagaagaaaattgacacaatgatttcatttataatagcacttgtaagaataatatgcctgggaataaatttgttcaagaaggtgccgtacttgtacacagacaactacagaacattgctcgaggagattcaggaagacctaaatcaatggacagacatcttgtgtccatgggttggaagttgtaacatggttaagataaaaatacaactcaaagcaacccacagattcaatacaatcctatcaaraagtggccttttttacaggaatgcctaagaagaacttcatattcctaaaaaatagtgtgtccccccaaaacaaaagcaatcttgaaatgcaagaagaaacattttctattccaaaggtctttaactgctctaagcagtacttggtagtcttcaatatataggctttcatatctctttttttcttcttttgtttctgcacaggatctcactctttcacccaggctggagtacagtggcacaatcacagctcactgcagcatggaatt

SEQ ID NO: 605240 - DNA, 545 bp, Homo sapiens
gtaaacaatcagttgtgttagcaatgaacaatctgagaagaaaattgacacaatgatttcatttataatagcacttgtaagaataatatgcctgggaataaatttgttcaagaaggtgccgtacttgtacacagacaactacagaacattgctcgaggagattcaggaagacctaaatcaatggacagacatcttgtgtccatgggttggaagttgtaacatggttaagataaaaatacaactcaaagcaacccacagattcaatacaatcctatcaagaagtggccttttttacaggaatgcctaasaagaacttcatattcctaaaaaatagtgtgtccccccaaaacaaaagcaatcttgaaatgcaagaagaaacattttctattccaaaggtctttaactgctctaagcagtacttggtagtcttcaatatataggctttcatatctctttttttcttcttttgtttctgcacaggatctcactctttcacccaggctggagtacagtggcacaatcacagctcactgcagcatggaatt

SEQ ID NO: 605241 - DNA, 547 bp, Homo sapiens
gaattcagcaaactttcagtaaacaatcagttgtgttagcaatgaacaatctgagaagaaaattgacacaatgatttcatttataatagcacttgtaagaataatatgcctgggaataaatttgttcaagaaggtgccgtacttgtacacagacaactacagaacattgctcgaggagattcaggaagacctaaatcaatggacagacatcttgtgtccatgggttggaagttgtaacatggttaagataaaaatacaactcaaagcaacccacagattcaatacaatcctatcaagaagtggccttttttacaggaatgcctaagaagaacttcatattcctaaaaaatagtgtgtccccccaaaacaaaagcaatcttgaaatgcaagaagaaacattttctattccaaaggtctttaactgctctaagcagtacttggtagtcttcaatatataggctttcayatctctttttttcttcttttgtttctgcacaggatctcactctttcacccaggctggagtacagtggcacaatcacagctc

SEQ ID NO: 605242 - DNA, 547 bp, Homo sapiens
gaattcagcaaactttcagtaaacaatcagttgtgttagcaatgaacaatctgagaagaaaattgacacaatgatttcatttataatagcacttgtaagaataatatgcctgggaataaatttgttcaagaaggtgccgtacttgtacacagacaactacagaacattgctcgaggagattcaggaagacctaaatcaatggacagacatcttgtgtccatgggttggaagttgtaacatggttaagataaaaatacaactcaaagcaacccacagattcaatacaatcctatcaagaagtggccttttttacaggaatgcctaagaagaacttcatattcctaaaaaatagtgtgtccccccaaaacaaaagcaatcttgaaatgcaagaagaaacattttctattccaaaggtctttaactgctctaagcagtacttggtagtcttcaatatataggctttcatatctytttttttcttcttttgtttctgcacaggatctcactctttcacccaggctggagtacagtggcacaatcacagctc

SEQ ID NO: 605243 - DNA, 590 bp, Homo sapiens
tatttttttctctgctaacaatatcaaatacctccaacccacaaaggttaaacctaatcactcatatgtatttactggattttttttttttttttgagacagagtcccaaaaragactggagtgcagtggcgcgctcttggttcactgcaacctccatctcccaggttcaagcgattctcctgtctcagcctcccgagtagctgggattacaggcacctgccagcactcccggctaatttttgtatttttagtagagacggggtttcgccatgttgagcaggctggtcttgaactcctgacctcaggtgatccaccgcctcggcctcccaaagtgctgagattacaggtgtaagccactgtgcccagcctactggacatttttaaagagcctatgatttgctagaagctagagatacaaaagtgaataaaatttccccaccttaagtagctcagttgttaaaagggaaatatatatgctcatagataagtacaatacaatggtaattatccagtttgctttgccaaagttaatggcaaaacgattcacatgaaagtccaggctagaaagctgggagttatacttgacttt

SEQ ID NO: 605244 - DNA, 579 bp, Homo sapiens
tttaccatccagtcttcttytttttcctctataaatgtagatgaagttttcctaactcattaaataattttaaatatttttaatagttttataattacatcatgcagatgtccctgtttgaaatttatggtttttgcttgaaatatattcttgacatttctgaattggttttctaacagattgctatctccatagtttagctgaatctctttactacattctggtcaaacatatctttttactcaatttttagtaataacataaatgcgattcagcaccctaccttttgcaaataaaatcaccagcatttattatattgatcttatatattgaattacacttgactggataataatagtaaaaaagattattgctaagaatttcttctgtgtgttgttcttactttataaaatcaatgtttccttagagttattgaattcattttgatttttttaaaaattctcaagtcaaataaatacagaaaggattatttcaagactttaatgcctaaagtttgagtattgaaaaggctaaataactatttccatgtactgagccttggagaagggaaatttgttt

SEQ ID NO: 605245 - DNA, 475 bp, Homo sapiens
gagagaactggctgtctaggaacagaaaygtggcatctggatggagctaatacaggacagtggcttgcacatagtagtagatcctccaagcaatgttgttgattgattgacacagcaagcaagactgggagtcctaaaagaggcttggagacttggggtaggggaggatgatgtgggctgtaacagcagcttggtggagtgcaaagggcactggtcagagagtcaggaaactacaggcaccattcctagctccaccactaacttgatgtgcatacctggtcagatcgctctccctctggagcctcagtttccccatctataaaaataaggattgggatcatttgtttccaaagtttctcccagcgctgcatcttacaatttccggggtgtgcatggtgcatgagagagaaagcaggagtcactgctagcgctccacctcctggaagcactttggctctgggctgcccaccccttt

SEQ ID NO: 605246 - DNA, 504 bp, Homo sapiens
cattgtactgaaggaaacatacagtcagttacttaacttattttttcattttctttctttctttcttttttttttttcttttttgagacagggtctcaccattttgcccaagctggtctcaaactcctgggctcaagcaatcctcctgcttcggcctcccaaagcattgagattacaggcgtgagtcacagcacccagccaagtgacttaacttttgttaacaacttcatgcaaagataataattttctgaaaaataattatttaaaatatacccactgctggccgggcatggtggctcacacctgtaatcccagcactttgggaggctgaggcggacagcttacttgaggtcaggagttcmagagcagcctggccaacatggcaaaaactgctctctactaaaaatacaaaaatcagccgggcatggtggagcatgcctgtagtctactcaagaggctgaggcaggagaatcacttgaacccaggaggtggaggttgcagtga

SEQ ID NO: 605247 - DNA, 590 bp, Homo sapiens
actttccgaccttggaaggctgcatctgagggtgggcgtgagaagttcccatttgctgcttggattgcagaatccagacacctctcatttattactgaattagtgtgatgatgctgaggatgttgagaaggcactgttaggctttaaatttgaagtaaacaaggaaaagactgttgactcccatcatcttagaagaaatgatcttgggagtaactccagaggaaagggtctggatttgattccttgaatggttctagtactcagcacactggggctttcttaaaacctcttggtgccattcttcacttgggaatctcccacctggacytcagccaaatcttgagttggtgttggccttttaggatcctggctttgatgtcaggttgtggctttctgctgtgaatgataactgtcttggaaacactcccattctggctcaagagataaggaatagggcaacctgccaacccatgggagagctgagggcccagcacactgctagaagccactctgccattctgagggcctgtgatcagtgagaggctgaggtagactttctgttgccaaggacctgttcagatcatgttaca

SEQ ID NO: 605248 - DNA, 458 bp, Homo sapiens
tgcaatgttaatttgcatttctctgactactaataagtttaatcatcttttcatgtgttgattgggtgaactaagttcagttcactcaccttgcagcagacccagacctgmtctcagatcccagcttatatggacatttgtccccaggatagctctggctattgtgttcgcttactattgctcctcagattctagcaaaatgccttcttatctctattttgttcttaggagaatatttctcttattttcttgaaagctccatgactctttaaaaagaatgcttgttatgggttacctgggttccatttgcatggagtggaagggcacttgagagttgtcagtcacactgcctgccttccttctctgtttgtccctgctactggcactgagagagtatccagcagcaagtccccctctgagttagacagactgatttacccaaaagtcaagccccagtc

SEQ ID NO: 605249 - DNA, 615 bp, Homo sapiens
attagatttgaaactgataccttaagagctaatcatgtctgattagacactaactcatcttgttagacaaatgacacagccctatctggtacctagtggatagtcaataaatgtttactaaatgaataatcaaatacttaagttctgttttgacttatagttcccttaccccttccctatcataggataattttaaaaagaaaagtttctatttgatatattcacacctctgtacaaaatgaagcaagtaaatctgtaatgaagaggacaaggaaaagaatagagggaattttgggtgaaattttgcatgctgagggtagtttaggactaacractggggctgcaaggactgacttccgggttctgaggcttacgtagctctcagccagccatcttcaattcctccaccgccagccttccacatccatcttccttgttgagactgttatttacgttcacctggactagggcaacagaattctatgcatctagtctgttcaaacaatactacctacataatctatagcgtatggctctgtcaatgccattccatttccccgctgcctaccaaatggagcataaactcaaagtcctctcgagtccagtcccagcctg

SEQ ID NO: 605250 - DNA, 535 bp, Homo sapiens
cttgaaacaacctaaagagtgatactattaatattactgttttacagataaggaaactgaggacaagagtgattaattgtctagggtcacaaaatgagtaagtaacatagccagaattcaagcccagattacttgactctaagccatgtgtctttccatttcaccgtgctgcctgctggcctactctagagataactagaaactgacattctccacaaaatcattaacaaccagatgttaagccaaaagtctgctgagcattcatgtacacacaaatgagagttccaaccaccagttagacctatgctaggtgctggaatacaactgtaaacaagacagagagtccctaccctcatgagccttctagtctggggagggtaagaaattgaacagrtaactttaactgtgatgaatgtcacagacaagttgtacagagtgctgaggaatttctggcagaggagcctagtattctagtaggagttaacagttggggtacaggtaagtagagtcaagaggtattttgaaggtggaatcc

SEQ ID NO: 605251 - DNA, 484 bp, Homo sapiens
aagttttgcataagggattgtggaccctttatctttggataaaaagatttgttttatccattcaacgcacattgtgtttagtgctaaggaaaaaatgattaagacatggtttcttccctggaagagtgcacagtggagtagagtgagtgacagaggagttgcaccctattcaggatttgagttccatgtaaaaaaaaaatcaccaacaattaaccttgaaaaatcttttaaattgamcatcaaatgcgtaagcagggctttatgtacaaaattctgcacaatagtggatatacttataactatacagtagtgtagagtatctaataaacaatataaatgcaaatgtatacatactgcgtctttaaacactggaatcacagctggtatgataaggtgttctatgagaagcaagaggtactaagatccagtaaaatagcagattcacatcgccctcttactctggaacacaggcagggttctgctg

SEQ ID NO: 605252 - DNA, 484 bp, Homo sapiens
aagttttgcataagggattgtggaccctttatctttggataaaaagatttgttttatccattcaacgcacattgtgtttagtgctaaggaaaaaatgattaagacatggtttcttccctggaagagtgcacagtggagtagagtgagtgacagaggagttgcaccctattcaggatttgagttccatgtaaaaaaaaaatcaccaacaattaaccttgaaaaatcttttaaattgaccatcaaatgcgtaagcagggctttatgtacaaaattctgcacaatagtggatatacttataactatacagtagtgtagagtatctaataaacaatataaatgcaaatgtatacatactgcrtctttaaacactggaatcacagctggtatgataaggtgttctatgagaagcaagaggtactaagatccagtaaaatagcagattcacatcgccctcttactctggaacacaggcagggttctgctg

SEQ ID NO: 605253 - DNA, 612 bp, Homo sapiens
ctttttgtattcttagtagagatgggtttcaccatgttggccaggctggtctggaactactgacctggtgatccacccacctcggcctcccaaagtgctgggattacaggcgtgagccactgtgcctggcctattactactcttaatgatacggtcctccctgtgacccaccttaggtgggaaactgaaaaagtttgaccctgttatggattccttctttcaatgtctttaaaaacattatttgccaggttagccatgagttcaaactgatgatcccattaatgatcagaatttggtcaacggtttttctgaaggcaaggatgaacttgtctgaggtgaagtatttattcatagtgagcccttgtttgattgaacargacattgacttttttctgcaaaaccagtagcccaaactcatctttgcctgtgtggacacagatgagaaatattcacaatcacattatgcaccgagtcttaccctcaaagaagtaactgatgtttcccatggaaggcatgagagtggaaagagagaatgttgggatggaaaactagataattcatgtatatggaaagttcctgtgtttaaaaaaataaggaaaggaggaaagaaaa

SEQ ID NO: 605254 - DNA, 537 bp, Homo sapiens
gataacaatataatttctaacttyaacaaggcagaagcagatttaacttgatgtgcttcttgaatagtaggctttgggcatggagaatgagcaaacaactgcaacagaactggaaaacaggagaacatggttttaaggagatggagcttatcggaaggtgtattttatataaatatataatcttttagatttatcaatattttaatatcttacatcataaatatgtgagatcagttagggtatgtggaaatattgttatgaaataataaaacattgttatttctagtgaaaacagagacttgaagacagtcaaagagaaggatgacattctgtttgaagaccttcaagacaatgtgaatgagaatggtgaaggtgaaatagaagatgaggaggaggagggttatgacgatgatgatgatgactgggactgggatgaaggagttggaaaactcgccaagggttatgtctggaatggaggaagcaacccacaggtattttataaaggatcctgcacatctttatgtagtctgcttatgt

SEQ ID NO: 605255 - DNA, 506 bp, Homo sapiens
gtctcgatctctggacctcatgatccgcccccctcggcctcccaaagtgctgggattacaggcatgagccactgtgcccagccctattttatcttcatagtctataaaatattatccttacattatcctctatttatctctaacaatcctgaccatctcagagcgtaaactctttgaatccagggaatgcggcttgatttatgattaaataggaacacagttgatgatttatgattaaatagaaacccaatatgcctgaaaacaggaaaaaaaaagtctgaaaataaatccttaaagatagatatatwttttttttttttttgaaatggagtctgctctgttgcccaggctggagtgcagtggcttgatctcagctcgctacaacctctgcctcccaggttcaagtgattctcctgtctcagcctcccaagtagctgggactacaggtgcgcaccaccgtgcccagctaatttttgtatttttattggagatgcggtttcaccatg

SEQ ID NO: 605256 - DNA, 472 bp, Homo sapiens
gagtgagatcaatgaattgaaagaacctaataagtcaaaacattttgcacatggaaaatctgatcttaaaatttataaggaatttcaagagaccctaaataaccaaagcaatctcaggggataaaaacagtcaagggggatgtcttggacttcctgattgcctactacacatctacagtaggcaaaacaatgaggtactggcctaaagacagacatacaaaccaatggattagaatagagtgccccaaaataaacgcttgcacacacagcaaaatgatttgcaagggtaccaaatcattcaatggaaagagggcagactttttaccaaataatgccgagaaaactggatattcatatgccgaagaataaatttgaaccctttccttacatgatatacaaaaattaactcaaaatggatcagaaacaaacattaaagctaaaactawtaaaaatctacaggaaaacataaaag

SEQ ID NO: 605257 - DNA, 576 bp, Homo sapiens
atgacaagcaacctcagggactataacttagatctgaaataaacaaattaataycttgagcctgttacaggctcttcaaattgcatatttagattctatgaacacagcagggtaaagatacagcatcccggatccacctgatagcatcgggactttggcccacatgtggctcactggtgattacgtatgtgaatgaacagcttggaggggaaaccctggattttgaaacattatttcacagtttatagcttgctcaatggcaaaaacattaaattgcacattttaaggtcatatctgaaggattagtttcactctcttccaatacttaaattaattaccataaactatgaatgaattgaacattagggaatagcctacttagtattttaaacagaacatgctgcagagtcaaattccaaatcctaatttgcttgtacaactctaatgctgagcaaatgatgaaattccttaatgtctgtttattgtaaaataaaatccagttagtaataaagaaaaaaaaatgagtacagaatcaaattcttggagtccaagcatatttcatctcaaatagcaaat

SEQ ID NO: 605258 - DNA, 610 bp, Homo sapiens
agctgtaaacaatgaacaagtcctagagaaccactgtacaacatagtgcctatagttaacattactgtattgttggcttaaaaatttgctaagagggtagatcttgtattaagtgttttaccacaaaaataaataaatgtagtgggatgaaactttttgaggtgatagataatgactatggtattggttgttaatggtttcataggggtatacttctctccaaattcatcaagctgtatatattacatatgtacagctttttgtatgtcagccatatctcaataaagtggatgaattttttgaaggttttgttttttgttattttgttttgttttacaataaaggattatagaaaataggagatgcaattgcgtggactggcaagtcatactatataattcttttatattaagaatgtttcttcattttgctgaagctctttcaaaaatatttttaatacctcccctatatgtatagtttagtatagtctataatttcaaaattcartgtcaaggtaaagattatttaatactctttctgaaaatacgagtaatatttcagtgaaaggagctatttgaatatgtgaatctttaccttgtcaagttacttt

SEQ ID NO: 605259 - DNA, 620 bp, Homo sapiens
gtacacatagaaaatacacgcttctaacaaatttcacaaatgaaatctaccaagtatattaacaatagaagacagtgagctacaggtagaaaaatacatgcttcttacaaaactaatttgcaaattcaaagtttcactttcgctttggaaaaaaattggttagaagaataaaataatttgttccatgactttaaaagaccataaactattatatagtcatttgtgcctaataccttaagctagtggggcaaataagtcatttttattaaaaatagataatattcatttttatttaaaatagatcatcatcaatagactattgacatgacaatagacatgtcaatgtttacacaattcaaagttacgcacgttcgtaagattaaagacataaatatttagagcatatgaaatatatctcctggatttcagaaatatttattcttatggatatgtaaaaattatctataaataacctttagggttgaaaactctaagtaattacttaaatgaagaaacaataaatattcattttttaaaaagtagttttcaagcatataatacgtgaaaataatcttacagagaaattgtaattgggtayaggacttgtatttattctgact

SEQ ID NO: 605260 - DNA, 620 bp, Homo sapiens
gtacacatagaaaatacacgcttctaacaaatttcacaaatgaaatctaccaagtatattaacaatagaagacagtgagctacaggtagaaaaatacatgcttcttacaaaactaatttgcaaattcaaagtttcactttcgctttggaaaaaaattggttagaagaataaaataatttgttccatgactttaaaagaccataaactattatatagtcatttgtgcctaataccttaagctagtggggcaaataagtcatttttattaaaaatagataatattcatttttatttaaaatagatcatcatcaatagactattgacatgacaatagacatgtcaatgtttacacaattcaaagttacgcacgttcgtaagattaaagacataaatatttagagcatatgaaatatatctcctggatttcagaaatatttattcttatggatatgtaaaaattatctataaataacctttagggttgaaaactctaagtaattacttaaatgaagaaacaataaatattcattttttaaaaagtagttttcaagcatataatacgtgaaaataatcttacagagaaattgtaattgggtatasgacttgtatttattctgact

SEQ ID NO: 605261 - DNA, 487 bp, Homo sapiens
ggcaatgaccttccatctttttaaacattgttttgaacagactatagcaatataaataatggtggctatcacagaagttagagccccactcccattgatcaatttctggctttgcttctttagaggaagttgcggaaagtgattacaacagctcctagcacttagaagcaaatttctaattactattatatattttacttaatgtttaattattactatctccaatttgctaccctctaaaaccttttgaaagttagggggaatgatcaattaagattcacagggcaattaaaaatmccaactatgatgtttcagcttgattaaatcagactatgctgctactatcaggaatttaacaatcataaatgttagaagctttattactttattttttacttaataacctatgatgaccccatgatcagaattggttaagaattgtatcaaaacaaattcaaaatgctatcctaggtaatttaaaaaaata

SEQ ID NO: 605262 - DNA, 339 bp, Homo sapiens
ccagagaattagagggttttaggtatgtatacatataatattaaaatatttaaaataatctattagcagaataattttatatatttttgagaatgrggagcatcaagacctccatgtaacttcaccaacaagtatttaaaaggataaggcaatttcatacaaaaaatactgtaaatatgagttctaacactagccttatcacattagcttttgttctctgtgcctcagtttcttcgtcaataatatggggagggtaatagtacattttttcgaatgcttattctaataattaaaaaaagcaaatacatgtaaaatacttgaaagttgccacagaaagag

SEQ ID NO: 605263 - DNA, 613 bp, Homo sapiens
taattattaaattaccatattcaacccttaaaataataaataattcaggcagtcagcattgataaatgctaagatgactggatgaaaggcttttaagttttatatayacacacacacacacacacacacacacacacacacatatatttgagtacagactcaaactaacagtccacagattatttattacagtgggaaaatttttatttttttaaattgatatatctgtaccatcttaatcaagttaacaaacttagctggagcaataatgtgctttctcatgtgatatcatgggagatttatggcttatctataatactttacccaaaaatgtttaacctggatctaataatgagaaaacaatctaagcaatgtaatgatgctatgatataactagatggaactgttaaaaagaattcaatgttatgaaagacaaagatgttagggattaaagagacatgacaacccaatgtaatatgtgaatcttgtttcaaacctgatttttaaaaatggactatgtaaattaagtattattgaatcaatgttgaatttcttggttatcatagtgatattgttgtatatgagaaagtccttgttctcaggaatacatact

SEQ ID NO: 605264 - DNA, 592 bp, Homo sapiens
agagaagggttgtcattggcctttagttttttgttgctgagtaagtgaaaagaaatggaaaatgagattcttccartttcaaactgttacaatatggtgacttacatgccctacagagaattcctgaaggcacgaacccagtcacaaattggcgcacatcagcattttgcataaaaggaaagcatccatatctgactcaagcaacaatgaaatcaatacagaaacatttccagagaagtcctgcaggttttttatgcatttatagctagtatattgtgcaaaaaatcttctgactgtttaataaatcaactttagatccacaattcctaaacttccatgattttctttatcatcagctagagagcaccctgaagataggaagtcacatttgtttcccctactgtttctatccttattagatggcttatctctctgctggttttttgataggtttggatacaggagttaaattcatatcttatagtctctctaccacagcctcctccaaagcttgcagaatatcgtgaaaagagtatctggcaactccagggccaaaacgctgccctcagctctctgcctcggcccagacctg

SEQ ID NO: 605265 - DNA, 589 bp, Homo sapiens
ggactctgcaacttggaatggggatgtatgggaggacctgatgaagctggggacactgagtttgtaaactctgatgaaacttttttgccagaaggaacagctttcccattcacagtaatgacaacatcccctccccaacccatgctgccatcagcctttccaccttttctgaggagataaaccctgtgctgcctgaggcaacagtgatgacctgccctgaggcagttgccaagcaagataatgttgtttctccttaggagccacccccaacacccctgtttgcttctagacttataactagaataaagtcccagtgggtccctagaggtgaggttgagagtatgatccatgaggaagtgtgctacactcaaagaaaattgtttgagttctctaatttatataaacagaaatctggagaacaggcatgggaatggatattaagggtatgggataatggtggaaagaacagaattggatcaggctgaatttaccgatttgggtccactaagaargaactctgttattaattttgcagcttggggagtttaaaaaggttctaatagtttatttgcttggtaagctgaaatat

SEQ ID NO: 605266 - DNA, 435 bp, Homo sapiens
attctctgaatcagcgtctgatatatagtactgtttctcccatatccaggattcatgggtccaggaatcaaagggtggaagtggaagtggcaccactcaccatcacccttagtgatcyactagcaaaatttttgcttcctgttgccatgacattacgtcctgcttgcctagaggtcttagttccagagggaggaaggctgccgtcaggagacacaacaatgattccattaaactggaagttgagattgccacctggacactttaggcttctcctacctttaagtcaacaggctaagaaaggagttacagtgttgactggggtgattgacctggactgtcaagatgaaatcagtctactactacataacagaggtaaggaagagtactcatggaatacaggagatccattagggtatctcttagtattaccatgcc

SEQ ID NO: 605267 - DNA, 422 bp, Homo sapiens
tattctctgaatcagcgtctgatatatagtactgtttctcccatatccaggattcatgggtccaggaatcaaagggtggaagtggaagtggcaccactcaccatcacccttagtgatctactagcaaaatttttgcttcctgttgccatgacattacgtcctgcttgcctagaggtcttagttccagagggaggaaggctgccgtcaggagayacaacaatgattccattaaactggaagttgagattgccacctggacactttaggcttctcctacctttaagtcaacaggctaagaaaggagttacagtgttgactggggtgattgacctggactgtcaagatgaaatcagtctactactacataacagaggtaaggaagagtactcatggaatacaggagatccattagggtatctctt

SEQ ID NO: 605268 - DNA, 422 bp, Homo sapiens
tattctctgaatcagcgtctgatatatagtactgtttctcccatatccaggattcatgggtccaggaatcaaagggtggaagtggaagtggcaccactcaccatcacccttagtgatctactagcaaaatttttgcttcctgttgccatgacattacgtcctgcttgcctagaggtcttagttccagagggaggaaggctgccgtcaggagacacaacaatgattccattaaactggaagttgagattgccacctggacactttaggcttctcctacctttaagtcaacaggctaagaaaggagttacartgttgactggggtgattgacctggactgtcaagatgaaatcagtctactactacataacagaggtaaggaagagtactcatggaatacaggagatccattagggtatctctt

SEQ ID NO: 605269 - DNA, 609 bp, Homo sapiens
ggttttggaaacctttaacaaagacctagatttcagactttgaaactttttaacaaaattacttaccatagcaattgttattctcttgtatctattattggcatttttagaaattttcaccatcatttctggaactgaataatagcagtaacgttttttctatttggattctctttctaaaattacatttactattatagcttggtgtctgccasagccgtaattaagtaccatttgtgagtataacaatcccttttttcaatcttatttagctttctatttattctttgactattacttttattttgaatgacaggaaagggaaaatgtgtggcctaattaacaaaatgttaccagctattcttggctatacatgggcaaagatactgaatctaacagttaaactgcagactactgagtgttctgttcttttttctcagactatatctattcttgatgagatgaatataggctgtttatatattgaaattatgtaaatcctcagatcctacccaaatggtgcgtagctctttctcttaaaaagtaattcttcctctcaaaagaagacatttatgtgggcaacaaacatatgaaaaaaagctcatcatc

SEQ ID NO: 605270 - DNA, 583 bp, Homo sapiens
aataatgctaaagtctctagtgaagaaggtagaaagcatgcctgttcagatggcgaattcagcagattgatgaaacctaagagcaagaaaataatgaaaattcagtaaagaaataacaataatgttttcagtgggctaaacagtagattcaacatagctgagaaaatgattaataaacttcaagatagatcaataaaaattacacacattcaaacacaaagaaaaacagtaaaaaacgcaagaaccaaacagatttcaagagatgtcaggcaatatcaaatgatccaatgtgtgtgtataaagaatcgctgaaggaggaaagagaaagtatgtcacagaataggttttgaagagataatggtgagtattytcaaaaattaaattaaaataccgaattccatatccaaaaagctcagagagtgataagcaacataaatcaaataacaaaacaaaacaaaacacagaagaaagaagagagggagaaaaagggaaggggaggaaaagaaagggagagagagtttcaaattgttggaaatagattaataaaggaaaaaactcacattacataaaagtaataaagata

SEQ ID NO: 605271 - DNA, 575 bp, Homo sapiens
aagtagattcaaatcccttttaaaaacgtatgatttatttcagaggacaacctcccttttcaggctttgtttaaacaattgtgtgaactaaacaatgtcttacatatggcataattcaaaagggtctggaccaagttcagtggaactrgaacataatggtggtggtttaactcatttaagcatgtatgattctagttattattcaacaggaactgacattttaatccatgatacgttacaaatttttaagaattttatttgtagacaaatgcacattaatgacttatagaataacatcgaggtaacatctggtattttgtttcatccatccatctgcttcttcagttctgtcatagacacctttcttcttattactttcaagcacaaccttagatacagtcaacagctggaggtatggtctctcttatctccttgcatataatctcattcatcctcaattcaaaacaagcgtatgtgtgtgtatgtatgtatgtgtgtatatataggtatgtgtgtgtatgtatattatatgtatatgtgtgtgtacatatatgcttatatttatatattattat

SEQ ID NO: 605272 - DNA, 635 bp, Homo sapiens
agtgaaactaaaagtcccccaaagcattggtaatctgtatgacattagcagggaacctaatgtgcgtatctagagtaccagaataagagaagagaggagggggggcaaaacaatatttaaaagataatgaccaaaaatgttccaaatttagtgaaaactgcaaacctgcaaatcaaagaatctcaaaaattcttaagcataatagacataaakaaaaatacacggccaggtgcggtggctccagcctgtaatcccagcactttgggaggccaaggcaggcagatcgcctgaggtcaggagtttgagaccagcctggccaacatggtgaaaccctgtctctgttaaaaatacaaaaattagctgagtgtcatggagggcacctgtaatcccagctacttgggaagctgagacaggagaatcgcttgaacctgggaggcggatgttgcagtgagccgagatcaggtcactgcactccagcctgggcaaccagaacaagactccatctcaaaaaacaaaaacaaaaacaaaagaaaaatacaccaaggcacaatgaatcaatttttcaaaaaacacagaaaacaaaagaagttaccagtggcataagaataaagatatagtgtgtgcagaggaacaca

SEQ ID NO: 605273 - DNA, 635 bp, Homo sapiens
agtgaaactaaaagtcccccaaagcattggtaatctgtatgacattagcagggaacctaatgtgcgtatctagagtaccagaataagagaagagaggagggggggcaaaacaatatttaaaagataatgaccaaaaatgttccaaatttagtgaaaactgcaaacctgcaaatcaaagaatctcaaaaattcttaagcataatagacataaataaaaatacacggccaggtgckgtggctccagcctgtaatcccagcactttgggaggccaaggcaggcagatcgcctgaggtcaggagtttgagaccagcctggccaacatggtgaaaccctgtctctgttaaaaatacaaaaattagctgagtgtcatggagggcacctgtaatcccagctacttgggaagctgagacaggagaatcgcttgaacctgggaggcggatgttgcagtgagccgagatcaggtcactgcactccagcctgggcaaccagaacaagactccatctcaaaaaacaaaaacaaaaacaaaagaaaaatacaccaaggcacaatgaatcaatttttcaaaaaacacagaaaacaaaagaagttaccagtggcataagaataaagatatagtgtgtgcagaggaacaca

SEQ ID NO: 605274 - DNA, 635 bp, Homo sapiens
agtgaaactaaaagtcccccaaagcattggtaatctgtatgacattagcagggaacctaatgtgcgtatctagagtaccagaataagagaagagaggagggggggcaaaacaatatttaaaagataatgaccaaaaatgttccaaatttagtgaaaactgcaaacctgcaaatcaaagaatctcaaaaattcttaagcataatagacataaataaaaatacacggccaggtgcggtggctccagcctgtaatcccagcactttgggaggccaaggcaggcagatcgcctgaggtcaggagtttgagaccagcctggccaacatggtgaaaccctgtctctgttaaaaatacaaaaattagctgagtgtcatggagggcacctgtaatcccagctacttgggaagctgagacaggagaatcgcttgaacctgggaggcggatgttgcagtgagccgagatcaggtcactgcactccagcctgggcaaccasaacaagactccatctcaaaaaacaaaaacaaaaacaaaagaaaaatacaccaaggcacaatgaatcaatttttcaaaaaacacagaaaacaaaagaagttaccagtggcataagaataaagatatagtgtgtgcagaggaacaca

SEQ ID NO: 605275 - DNA, 481 bp, Homo sapiens
atgcctatgtatacccagtgcttctattatccctgtaattaatgaagaggggcagagaagtgaaaaacttcttgggaaaaattgatacaatcaaccaggacagatttccctaagtaggcagaataaaagcctttaagttagtctcactgtctttacataaacctaaatgcagaggttgcatcgacaagaaaaatatatggccatgatatctactttctaggtttgccagacatggaattttatccatgagccagttcctcagtttctctccatttataaacctttcaaggcaayacctgccatgaaaatagcaggatatagaggcacacaagagctatacagatccttatatcatgagttccatagggaaaagttatagataaatgcaaaaacagatagaacaccaaatagagtgtgtgttagaggcttgtccaatctattcaaagcctgtcatactgcaaatccccattccagaggggtt

SEQ ID NO: 605276 - DNA, 575 bp, Homo sapiens
aattaagttagaaatcagtaagaagaaaactaaaaaatccccccaacagcttggagattaaacaaagcacttttaagtaatgcataattttttwaaaaaaaaaagaatagacattagaaaaactttgattaaatgtcagaaaaaaatataaagtatcaaacctttaggaatgcagctatctgcttagaagaaaatttatagccttaaatttctatcttaaaaaaagaagaatggataaaaatcagttatccaatttcccctttcaagcaggaagagaaagaacacatatcaaactttcagttggcagacaataaaataatgaaatttaaaataaatgttaaatagagacagtccaaaaaagttatcaccctcattagtcatcagaagaatacaacacacatacacacacacaataagggaccactatatagaggagctaacattaaaatgatagctacactgttgatgatgagagtttaaaattttacaatcacaatttatcatttgttcatagtacttactaacgttgagcacaaccgtaccctttgacccagcagttccactctgaaatatgt

SEQ ID NO: 605277 - DNA, 575 bp, Homo sapiens
aattaagttagaaatcagtaagaagaaaactaaaaaatccccccaacagcttggagattaaacaaagcacttttaagtaatgcataattttttawaaaaaaaaagaatagacattagaaaaactttgattaaatgtcagaaaaaaatataaagtatcaaacctttaggaatgcagctatctgcttagaagaaaatttatagccttaaatttctatcttaaaaaaagaagaatggataaaaatcagttatccaatttcccctttcaagcaggaagagaaagaacacatatcaaactttcagttggcagacaataaaataatgaaatttaaaataaatgttaaatagagacagtccaaaaaagttatcaccctcattagtcatcagaagaatacaacacacatacacacacacaataagggaccactatatagaggagctaacattaaaatgatagctacactgttgatgatgagagtttaaaattttacaatcacaatttatcatttgttcatagtacttactaacgttgagcacaaccgtaccctttgacccagcagttccactctgaaatatgt

SEQ ID NO: 605278 - DNA, 575 bp, Homo sapiens
aattaagttagaaatcagtaagaagaaaactaaaaaatccccccaacagcttggagattaaacaaagcacttttaagtaatgcataattttttaaaaaaaaaaagaatagacattagaaaaactttgattaaatgtcagaaaaaaatataaagtatcaaacctttaggaatgcagctatctgcttagaagaaaatttatagccttaaatttctatcttaaaaaaagaagaatggataaaaatcarttatccaatttcccctttcaagcaggaagagaaagaacacatatcaaactttcagttggcagacaataaaataatgaaatttaaaataaatgttaaatagagacagtccaaaaaagttatcaccctcattagtcatcagaagaatacaacacacatacacacacacaataagggaccactatatagaggagctaacattaaaatgatagctacactgttgatgatgagagtttaaaattttacaatcacaatttatcatttgttcatagtacttactaacgttgagcacaaccgtaccctttgacccagcagttccactctgaaatatgt

SEQ ID NO: 605279 - DNA, 336 bp, Homo sapiens
atccacctgccttagtctcccaaagcgctgggattacaggtgtgagccacctcgcccggccagtccctactttcaaacctggttttcccatgctgtaactcgttaatccatgtgtctgagaaaatagcagttcctctcctctctgaggctaagctctctgctaccygggcatggcgcgtgaatcccttctgcttcatttgccacagccactgcctcctatgctaactgtgagagccctcttttctgaatattctattgtttcctctcctttagctccctccttggagctgacaaacatgtccatgtctccttaaacctaaaatcatctacatgccc

SEQ ID NO: 605280 - DNA, 595 bp, Homo sapiens
ctgccatatacccagtaatttgttaaataacctgggccacaatacataacatttctgtatcttcttttctcatttataaattaagaggattggaaaagatcacctataacatctcttatggatccaatgatcaatgacccacaaatctaaaagtataagcaaagagtttatgatcatcttatctctaaatcacagatcaaagaacaactgaatggaatcatgtatgttgttatagagttgggtacactgataatacctgagtctacagtacactttaacctctagatctttttaggcaggagttctgtaatacatctagctgattatgaaggaaaagtttcttaagcctcagactattgtgtcttattgttacttgattatttttaactatgagtaytcattataaatttaaacaaactgcctgataaatgctttatgctgagcaggtagaattgtatgagaaataacaagatcccataatatgtcactgaaattagtaacattattttactctgaaattggcctattactctaaaggatgccatctctatgaaataaaatgataaaagccttaccagataaatttattgccact

SEQ ID NO: 605281 - DNA, 532 bp, Homo sapiens
gaaatacaaaaactagccaggtgtggtggtgcatgcctgtaatgtcagctactcaggaagctgaggcagaagaatcgcttgaacctgggaggtggaggttacagtgagccaagattgtgccactgcaatcaggctgggagacagagcaagactccgtctcaaaaaaaaaaaaatgatgatgatgatgatgatgtggagagycttcagaccatgctgcaggacagacactgtgaaaggagaaggggaagcaaggtgggtcaggtgggaagagccccagagcacagagaagctctgaggaagtctctaccaggctcatgggaaatgtctgagtcgaagttgcctgctagaagcacctgtattaggcagaaatgtcctgattctggttactgcctcctactcccacctccaccccatctaaaggtgagatagtagaggccctcagtcagctctgctgtctgcagcatgttctcctggaaggagatctgagctgtcacctccatggctgccagagacactggcagaatgccatgct

SEQ ID NO: 605282 - DNA, 532 bp, Homo sapiens
gaaatacaaaaactagccaggtgtggtggtgcatgcctgtaatgtcagctactcaggaagctgaggcagaagaatcgcttgaacctgggaggtggaggttacagtgagccaagattgtgccactgcaatcaggctgggagacagagcaagactccgtctcaaaaaaaaaaaaatgatgatgatgatgatgatgtggagagccttcagaccatgctgcaggacagacactgtgaaaggagaagrggaagcaaggtgggtcaggtgggaagagccccagagcacagagaagctctgaggaagtctctaccaggctcatgggaaatgtctgagtcgaagttgcctgctagaagcacctgtattaggcagaaatgtcctgattctggttactgcctcctactcccacctccaccccatctaaaggtgagatagtagaggccctcagtcagctctgctgtctgcagcatgttctcctggaaggagatctgagctgtcacctccatggctgccagagacactggcagaatgccatgct

SEQ ID NO: 605283 - DNA, 626 bp, Homo sapiens
ccaccatggctggctacatttttgttgttgttgtggagatgagatttcaccactgttggccaggctggtcttgaattcctgggctaatgtgataggccagccttggcccctcagagtgctgggattacaggagtgagccactgtgcctggcctatatatacatgtttttataaaaatgtttcatttatactctttctgtctgctttttttttttttttttttttgagatggagtcgcactctgttgcccaggctggagtacagtggcacgatcttggttcactgcaacctccgcctcccaggttcaaatgattctcctgcctcagcctccctagtagctgggatcacaggcgcccaccaccacatctggctaatttttgtatttttagtagagatggggtttcaccatgttggccaggctgatctcraactcctgcctcaggtgatccacccgcctcagcctcccaaagtgctgggactacaggcatgagctactgcccccagcctgctttttttttgtttgtttttttcttacacttaacattatatcttagaggtctttccaaattgttatattgatttattttttttaaaaaagctatgtggcgttcaactgtatgaatgtat

SEQ ID NO: 605284 - DNA, 626 bp, Homo sapiens
ccaccatggctggctacatttttgttgttgttgtggagatgagatttcaccactgttggccaggctggtcttgaattcctgggctaatgtgataggccagccttggcccctcagagtgctgggattacaggagtgagccactgtgcctggcctatatatacatgtttttataaaaatgtttcatttatactctttctgtctgctttttttttttttttttttttgagatggagtcgcactctgttgcccaggctggagtacagtggcacgatcttggttcactgcaacctccgcctcccaggttcaaatgattctcctgcctcagcctccctagtagctgggatcacaggcgcccaccaccacatctggctaatttttgtatttttagtagagatggggtttcaccatgttggccaggctgatctcaaactcctgcctcaggtgatccacccgcctcagcctcccaaagtgctgggactacaggcatgagctactgcmcccagcctgctttttttttgtttgtttttttcttacacttaacattatatcttagaggtctttccaaattgttatattgatttattttttttaaaaaagctatgtggcgttcaactgtatgaatgtat

SEQ ID NO: 605285 - DNA, 509 bp, Homo sapiens
agaaaagagccctcagaaataatgccacacatctacaactatctgatctttgacaaacctgacaaaaccaagaaattgggaaaggattccctatttaataaatggtgctgggaaaaccggctagtcatatgtagaaagctgaaactggaccccttccttacaccttatagttgatttttatagtgaaattttgyatagtttcaattcctttttcatttccttttgtatatattctattttctttgtagtcaccatagggactgtatttaatatcctgaagttatatattctaattgggattcataccaacttaacttcaataacataaaaacactgctcctttacatctctgtccactctcctttcaattgttcatgccacataattacatctttatacattgtgtgtcaaaaacataaactaataatttttaatgcattaacttcttaaattatagagaaacaaaatgtggaattaaaaaccaaaattataacactactaggttttag

SEQ ID NO: 605286 - DNA, 371 bp, Homo sapiens
taagtttccaattaggccaacttctgaccatacaaatcattttactgtaagtrtaagggctacttttgggctctctattctactccgttggtctatatgtctgtctttatgccagtaccacactgttttgattactgtagctttgtagtaagttttgacatcagaaagtgtgagtcctctagctttgttctttttcaagattgttttggctatttgaggtcccttgagattccatgtaaatttaggatgggtttttctatttctgcaacaactgtctttgcaattttgctatagattgcattgaatctatagatttctttggattgtattaaaattgtaacagtattaaatcttcttatacgctgggcatg

SEQ ID NO: 605287 - DNA, 576 bp, Homo sapiens
ttcccagcaccattgattgaagaggctgtcttttccccagtgtatgctcttggtamctttgtcaaaaataagtcactataggtgtgtaaatttggttctgggttctctattctgttccattggtctatgtgtctgtttttatgccagtaccatgctgttttggttactgtagctctgtagtataatttgaagtcaggtattgtagtcaggcaatgaagtctctattttgtttttttttttgtcaggatagctttggctattctgggtcttttgttgttccatatatattttaggattttttttgctatttctatgtcactggtatattgacaaggattgtatggaatctgtagactgttttgggtagtgtggaaaatttaagaatattgactcttccaatccatgaacatggaatatctcttcatttttttttttcattttactataatatttgtttcctccatttcttgcatcagtattttatagtattcattgtagagatctttcactttttttgctaattcctaggtgtttcattttatttgtggctattgtaaatgggattactttttcatt

SEQ ID NO: 605288 - DNA, 492 bp, Homo sapiens
ctatccaccatctttccttttgcctctctgtgtttttctttgtgcttactagtacaagtgcattttataccttctgatgatttcttattgctcattaacatccctttccttcagactgaagaactcccttgagcatttctcayaggacaggtctggtgttcataaaatccctcagcttttgtttgtctgggaaagtctttatttctccttttgcttgaggacatttttgccagatacactattccagagtaaaactatttttttttcatatagcacattaaatatgccatgccgctctctcctggcctgtaaggtttccactgaaaagtctgctgccagacacatcagagctccattgtatgttatttgcttcttttcaggtggtccttttaggaggctttctttatccttaacctttgggaatttgactattaaatgctttgaggtagtcttctttgggttaaatctgcttggtgttctataaccttcttg

SEQ ID NO: 605289 - DNA, 469 bp, Homo sapiens
ggaaaaaagttttttttctaaatataaaaggataagttggttaaaagtagaaagatttttaaaaacatgaaaatgatactcattataatatgattatgttaatattagatacagcagtcctcaagtaagtgttaccagaggaaaagatatctcatgatagcaaaagaggtgcttgattaagaaaacagtagattctaaatgtatagaccttttattacagccattcaaggtaaataaagcaaagtttaacacatataaaaagaaataaactcaaatacaattgtatttagagattttaatatttcttcccaataattgaaaggatagataaaatatactagtatgaatatgagagatttaaataacattgtgactataataatctattatatattttgaaactccacactcaamaaaggcagaacatacattcttttcaaatgcaaataagatgctttttaaggtagat

SEQ ID NO: 605290 - DNA, 598 bp, Homo sapiens
tggccaaggcaagattgggaacagttgtattgtgtgcagaggatggaattgcatctctgatataaaagggcttccacagggaagatgagaaaagtggaaaagagagatggataactcacgaaaacaaacattacttacctcatgattctaggaccatttcaactgccccatcttgacattttccacaattagaaaactaaacagagccctagtgtgtcaaagatgtgaatttcaacaaatccacaatcagaattcccctcaagttcatagatcattctcacccccaggtactatgatggttttctcttattaraaaacatgttggtttctcacctattacaggaacactggtttttctacttgctgtgtaagttatataaggaattgtcagcattaaaaactaattgaaaattgcactgtagaactcacatcatgttcaaaatccagaactcacatcatgttaaaaaacacagttcaattcactgagcaaatttaatatgtattttgaagtataaccaaatcatatcttgaggttttaaataatagaataagtggttattacttgtttatatgataataacactttaaatttaaattt

SEQ ID NO: 605291 - DNA, 596 bp, Homo sapiens
taagttaaataaaattaaatattcagttcatcagcaacactggccacatttcaagtgttcagcaatcatacatggttagtggctaccatattggacagcacaaaaaacatgtccatcatcacagacagttctatttgacagctctcgtctacagcaatgtttggcaaacagtaggcacccaataaatatttgttgaataaatcctcactcaatttcaggtcatccctcccttttttttttttttttttttggtggcatcraagccctaaaagtgaggtaaactagacaatttccctaggacagtattcagggtgccaagaggcctccaagcagatgctacagaagacagggctgtgaagacaatcccctctattcagaaagaaaactgttgtgaaataattatgttttcataatattcgaagaactgaaaactggaagagaattgcacttgtgtgatttcagagacatatggatagaaggatgatttaggggcaaagtaagaaaatattccaacaaagctcttcaaatatgacataggctggtttgtgcggtaatgaacttgctatcactaaaagtactaaaactgagactgaatg

SEQ ID NO: 605292 - DNA, 596 bp, Homo sapiens
taagttaaataaaattaaatattcagttcatcagcaacactggccacatttcaagtgttcagcaatcatacatggttagtggctaccatattggacagcacaaaaaacatgtccatcatcacagacagttctatttgacagctctcgtctacagcaatgtttggcaaacagtaggcacccaataaatatttgttgaataaatcctcactcaatttcaggtcatccctcccttttttttttttttttttttggtggcatcgaagccctaaaagtgaggtaaactagacaatttccctaggacagtattcagggtgccaagaggcctccaagcagatgctacagaagacagggctgtgaagacaatcccctctattcagaaagaaaactgttgtgaaataattatgttttcatratattcgaagaactgaaaactggaagagaattgcacttgtgtgatttcagagacatatggatagaaggatgatttaggggcaaagtaagaaaatattccaacaaagctcttcaaatatgacataggctggtttgtgcggtaatgaacttgctatcactaaaagtactaaaactgagactgaatg

SEQ ID NO: 605293 - DNA, 509 bp, Homo sapiens
aaagcctttatgcttctgccaatgaatctgaattcatttcattggactaagccccagctggccctgatttggaagagaccattagaagagctggaggaacacacattcttttgctgggcaaccctgggaaagtctctctaacttgctgtgtaccagggtccttatttgtagaatggaaatgattctaacagctctgtctatttcacaggtcagccccagagacaaaataagaaaatatgcacagaatcagtctcayacccattctaaaaattagaaaactgaagcacagagaagttagtgacattatcagaatcctaaagcatcaagggatggcttcaagtcacagagagtaaatgcagcacttagcttggaggatcttctaattaaggtatagatatagatatatgtgtatatacacatatatgatatatacaatagagatatccaatatatatactatatatgtagtgtgtacattatttaatgtatgttaacattatttaatgctt

SEQ ID NO: 605294 - DNA, 509 bp, Homo sapiens
aaagcctttatgcttctgccaatgaatctgaattcatttcattggactaagccccagctggccctgatttggaagagaccattagaagagctggaggaacacacattcttttgctgggcaaccctgggaaagtctctctaacttgctgtgtaccagggtccttatttgtagaatggaaatgattctaacagctctgtctatttcacaggtcagccccagagacaaaataagaaaatatgcacagaatcagtctcacacccattctaaaaattagaaaactgaagcacagagaagttagtgacattatcagaatcctaaagcatcaagggatggcttcaagtcacagagagtaaatgcagcacttagcttggaggatcttctaattaagktatagatatagatatatgtgtatatacacatatatgatatatacaatagagatatccaatatatatactatatatgtagtgtgtacattatttaatgtatgttaacattatttaatgctt

SEQ ID NO: 605295 - DNA, 407 bp, Homo sapiens
attttattggtaagaaaactgaggtacagagatgagatctacactgatttaccagggctcaaagtaaaacaagtacagagccaagttgagaactctgatctcctcaggtacttcccaatgctctgtgcacaagagagaaataaaataacatgaactcaggctatttggggaaagytcagtgtgaataaattagaaggatgagtaatttaatatttgaaaacaaacatcacctaatggatgtattaactgaaaactgtgtccctatctaaactcttagtttggtaaacttccactcctttagaactcaactcagctatattattaaccatggggatttcgccagggcacctgcccacgcacggttcccctgtgaggtgtctccagatcatcctgtccattcatccacc

SEQ ID NO: 605296 - DNA, 603 bp, Homo sapiens
atgcaagaaaaagatgcctacaaaacatgcttaaaatgtttgcatgaaatattgtcaaaggaatgctggaaattgcgttcatgccaatttattatttaacaattttcctttcaaagagagagcaaaagaaagctcactacctgcccaaatcagtgtactttctgaattactggggtcaaaattaatgaggcttataagaatgatcatatgctttgacctaataacctcctgggaatctatcctaaggaaatacctcaaaagaagaaaaatgctatatgtacaaaaagatcataacatcttttgttataatttgaaaaaaaatggcaataaaataaaatgtccagcataaagaaaatagtagatgatcttggcagaaactctctgggacacagatacatgtttacagaattagctttcacaagaagtgcaggaaattcatgttagatatatggatgtacaataacatataaagaaaagatgcagttggttgtagacagtgagaacatggatgaaataagtagtttttttttcttttttttttaagwtggagtctcgctctatcgcccaggctggagtgcagtggtgcgatctcggctcactgca

SEQ ID NO: 605297 - DNA, 402 bp, Homo sapiens
gaattcaattcccttaggtctggggcaggcgcaggagccccaggaggagaggggaccctcgtaacagcggaaacactcagtggaccttgctgggttaacggagccctcttactctccaagagacctgaggaaaataatttcattgttctaagccttccttcccaaaatgggaacaagaccactaacagctagtgtgttgtgcaaagtacaccagtggccatctggtgtgtgtttctgagcacagacccaggagtctctgactaattctacactctgtcacttacttgctgtatgaccttgggtaattgacttcacttctctgtgcctgttacctcctctggaaaatagagatcatatcagtacctggttgacawatgagttaatacattccccagtgtatca

SEQ ID NO: 605298 - DNA, 597 bp, Homo sapiens
gctgggtacatgcagcccagctctacaggctgcagcagggaaggagcatttgatttttacaatcaaagggaagacaaagaggtaaaaacacaaatcagttttgtttttacaggaatcacactctgggaaatggtgtacatttaatccagcccctcattctgaaagaaagaaaactagggtgagaggtagaggaggggtgtcactggtccaaggcttcctgggcagttggggcaaagctggaccagaatccagtctaccacctgcttcaagctgctctgtagacctgcaagaatcaagttctcaagctcaagtccacagccttcacagacacaaacagtgaccagctggaagataagatggaaggaaggggaaacctcatttatagtagcaacagaagagaaaaaactaccaaggaataaacttaacaagaaatgttaacaacacctatatgaagaaaacttcacacacttctaaaacactctaaaacactcaaaattactcaacaaataaaatatccccttttcttggaaagggttcagcattatccagacatcggctctctctcagctcacttaygtatttaacattatcccaaca

SEQ ID NO: 605299 - DNA, 281 bp, Homo sapiens
tggcatagtgcttccccctgcaggtagatacaggaactacaaaagggataaggcatgccccaggggacactggcaaggaaatgtgattgtctgtgaataaagactcactgcctatggcttcaggaattccatttttctctagtttagggaattagatgcatgaatgccccaagatggcacatacaaggatgttcatcgcaggtgatggtgctagcaaaaaatgagaaacaccctaaatgtccattgataggagaatgaraattcggtagtggtgagtccct

SEQ ID NO: 605300 - DNA, 567 bp, Homo sapiens
accaaaaaatatatttcttattataaatcacaatatcacactgaataaatgaatggataattacataaataaaagctatacacccaaaacgtttgcatttattttctatagtggggggaattaggggtgatctttttccaaaaaatgtgtttttattctttttgcatctatttacatctattttcaaatttttgtacaataagcacacattacttctataataagaagaaaaaaagaaacttggaattctgtcaaattctgccatcaacttattttctaacctaggacaccacaaccaccctatcwtgcctcagagtccccagcaagaaatggagagttggttggatgacccccaggaacccccctcccttggctgggtggaggagagggcggagctaaggaaggctctacagtagagggaacaggaatgaaatggaactgggaacagaaagattccccatgagccagcgaaagtgtgcaggcgagggagctgcagttcctcaatcttgtcagggcctcagagtccaaagggtggaatagacagagctgccccaaaactgtgagttt

SEQ ID NO: 605301 - DNA, 590 bp, Homo sapiens
tttgacatccagggctttgttgtccgtggagggactgyccctctcaggataagctaattcctggacgtaagcaacttgcctgcatgtatgtcttcatatataaaccaaccaatccagagctcataccccattctttatcctttctttatcaccctctattcttctttatctatctttatccttctttatcactctcatgtcccaggccactatccgcctgccctaattgcctcagggccaggtagcagacaactagggacagcctctcctccccaagataccatgaaattattcaaactagccaatcctaagactggttgccctgccttgcttgttccttcctgtggaaagtacagtaaagagtcttgctcgtgctttcccccgtcccctctacctcctgactgaccttgatgtttccctgttttgcctcttgtggtgtgaggtgcctacagctcctagggaaccctgagtagcaaaataaagtacttccctcatgacactcatttctgtgttcatgtgtcttatcatactgattaaaacaaatcctgggtaccataaaaataaatgacatttctattcatgctttgtta

SEQ ID NO: 605302 - DNA, 590 bp, Homo sapiens
tttgacatccagggctttgttgtccgtggagggactgcccctctcaggataagctaattcctggacrtaagcaacttgcctgcatgtatgtcttcatatataaaccaaccaatccagagctcataccccattctttatcctttctttatcaccctctattcttctttatctatctttatccttctttatcactctcatgtcccaggccactatccgcctgccctaattgcctcagggccaggtagcagacaactagggacagcctctcctccccaagataccatgaaattattcaaactagccaatcctaagactggttgccctgccttgcttgttccttcctgtggaaagtacagtaaagagtcttgctcgtgctttcccccgtcccctctacctcctgactgaccttgatgtttccctgttttgcctcttgtggtgtgaggtgcctacagctcctagggaaccctgagtagcaaaataaagtacttccctcatgacactcatttctgtgttcatgtgtcttatcatactgattaaaacaaatcctgggtaccataaaaataaatgacatttctattcatgctttgtta

SEQ ID NO: 605303 - DNA, 590 bp, Homo sapiens
tttgacatccagggctttgttgtccgtggagggactgcccctctcaggataagctaattcctggacgtaarcaacttgcctgcatgtatgtcttcatatataaaccaaccaatccagagctcataccccattctttatcctttctttatcaccctctattcttctttatctatctttatccttctttatcactctcatgtcccaggccactatccgcctgccctaattgcctcagggccaggtagcagacaactagggacagcctctcctccccaagataccatgaaattattcaaactagccaatcctaagactggttgccctgccttgcttgttccttcctgtggaaagtacagtaaagagtcttgctcgtgctttcccccgtcccctctacctcctgactgaccttgatgtttccctgttttgcctcttgtggtgtgaggtgcctacagctcctagggaaccctgagtagcaaaataaagtacttccctcatgacactcatttctgtgttcatgtgtcttatcatactgattaaaacaaatcctgggtaccataaaaataaatgacatttctattcatgctttgtta

SEQ ID NO: 605304 - DNA, 590 bp, Homo sapiens
tttgacatccagggctttgttgtccgtggagggactgcccctctcaggataagctaattcctggacgtaagcaacttgcctgcatgtatgtcttcatatataaaccaaccaatccagagctcataccccmttctttatcctttctttatcaccctctattcttctttatctatctttatccttctttatcactctcatgtcccaggccactatccgcctgccctaattgcctcagggccaggtagcagacaactagggacagcctctcctccccaagataccatgaaattattcaaactagccaatcctaagactggttgccctgccttgcttgttccttcctgtggaaagtacagtaaagagtcttgctcgtgctttcccccgtcccctctacctcctgactgaccttgatgtttccctgttttgcctcttgtggtgtgaggtgcctacagctcctagggaaccctgagtagcaaaataaagtacttccctcatgacactcatttctgtgttcatgtgtcttatcatactgattaaaacaaatcctgggtaccataaaaataaatgacatttctattcatgctttgtta

SEQ ID NO: 605305 - DNA, 536 bp, Homo sapiens
tggtcaggcttgtcttaaactaccaaactcgtgatctgactgcctctgcctcccaaagtgctgggattacaggcgtgagccaccatacccggcccttattttttaatagtcaggttttttaatgaagtcattaaagtcagattatacagaatcagagggagtcaaaagtcagtttccttttactgtgtctcccaaatccacttgccttttcaaagataattgctgaaaacattatttggtgggtatcatttatatccttttatgtcaaaatatgtgagtgaatattttacacatgcaagtttgttctttttttttaaattttttcattatactttaagttctgggatacatgtgcagaatgtgcaggcttgttacataggtatgcacgtgccatggtkgtttgctgcacccatcaacccattatctacattaggtatttctcctaatgctattcctcccctacccccctgatcccccgaaaggccctggtgtgtgatgatcccctccctgtgtccatttgtagtcattgttcaaat

SEQ ID NO: 605306 - DNA, 603 bp, Homo sapiens
gctccgcagcggtcctcactctccacggactccgaggcctgactgactgtgccttgctgcaggctcgacacccggcactgcccagtgtctcatgcaggggcgctcaggctgtgaataaatggggcagacaccgcwggacggccagagcgcccacggggaccccatgtgtggtcagtgcagcgtatggggtctcaaaacaacgtgacttaaagatccaacagtgagacgatggttaagtgacaaccaccgtataatgggataataagcgtgggtagacgttcttttcagagaacatttaatgatgggaagacgatcgtaacatgttgagaaaaataaaagcaaaacaaattaccaaatacccagagcctaccatttattaaataaattccaatgtaaattttaattcaataaatacatatcactaggcatgaatgtggaactgaaaacagtatgtcatggatactagcacataagtatcaaaagaaaggacaaaatacaattttgtattttctgtatgcatttctatgcctttcaaatattttataataatgtgctattttgtgatctaatgaaaaaattaaaattttaaagaaaataaacact

SEQ ID NO: 605307 - DNA, 477 bp, Homo sapiens
  misc_feature 195: n = A,T,C or G
tcgaaatgatagcaaggttactagacaaagtgtggggcctcccaaggcaaggagacctcagttccttgacagctggcacacccaataaaacagagacaaaaatgtcagcagtgccactgaggaatattggcagacttgtgataatttgtgacagggcaggagggggccaacagtttgtagggtacctgtgtcacnatggagctgcagctgtaaatgtgtaaggcgaaataccacctggtccctgctgccccctgagctggggtcggggtggaggcagaggcaggcctgggcaacgcagtgcttcccagatactgggtcggagccaggcccctggactctccacggaagcctccttgcctttctagcaacaaccacggcttcaaaggcctgccaaggagctgatcgggcaaccccgggagcttgtgtagccgtgttgtgcgtggcagtcctgcasgtcggggcgctggaaactcctac

SEQ ID NO: 605308 - DNA, 608 bp, Homo sapiens
tctgcttggaccagaacatgtgaataaacttaagcttatttatttaaaattccaaatgagttgctctagattctaaaaaggtgaaactttggctgttgaaagtttcagtattagtaaacttcagttactttttcttttccattttactttgcttccctgcatttcaaagctgctctttctggttctccccaccaccccaccaccgagacttgtgtttgttaatggaaataattttttaggaattggggatccattgtctatatttcaaatcattttttcctcaaaaacttgtgtttgttattagaaataattttttagatattggggatccagtgtccacacttaaaagttgtatgtgtttaaaaaacaacaacagtartgtgcaaggtgagatgcttttgaataaacgtaagcctattttctgacctttcttaatgcaaactctttgccttaaatggtaggatatttagaaatttgcacaaaattaaaaaaataaacattgtcttggagggttaaaaaatagaaaggtgtacgtgtatagattcacatacacatatgtatatacaggctgacttgatctagaacattaaatccaccctgcaagttaa

SEQ ID NO: 605309 - DNA, 519 bp, Homo sapiens
ttgtgtttgttaatggaaataattttttaggaattggggatccattgtctatatttcaaatcattttttcctcaaaaacttgtgtttgttattagaaataattttttagatattggggatccagtgtccacacttaaaagttgtatgtgtttaaaaaacaacaacagtagtgtgcaaggtgagatgcttttgrataaacgtaagcctattttctgacctttcttaatgcaaactctttgccttaaatggtaggatatttagaaatttgcacaaaattaaaaaaataaacattgtcttggagggttaaaaaatagaaaggtgtacgtgtatagattcacatacacatatgtatatacaggctgacttgatctagaacattaaatccaccctgcaagttaaccccccattgcaatggttgccttaaggtatttgctagttgtgtatatagtgtggttaatcactagctacactgtttcccacttgattagagcaatgggaagcatattttggcctaccagc

SEQ ID NO: 605310 - DNA, 250 bp, Homo sapiens
agaataacatgacctgactaaatgaactaaataaggcactagtgacmaaccttggagagacagagatatgtgacctttcaggcagataattcaaaataactgttttaaggaagcttaacaaaatccaatataatgcagataaggaatttagaatcctatcagataaatttaacaaagggattgaaataattataaagaatcaagcagaaattctggagttgaaaaatgcaattcatatactgaagaattc

SEQ ID NO: 605311 - DNA, 373 bp, Homo sapiens
cattctcctgtctcagcctcctgagtagctsggactacaggcgcccgccactatgcccggctaatttttgtatttttagtagagacgggggtttcaccgtgttagccaggatggtcttgatctcctgacctcatgatccacccacctcggcctcccaaagtgctgatgttctaaactgtctaggagttccctaaaagactgaagaaagacactcatctttgttttgcctgacagataaatcacttaagatgaaaaagtggtgggcattgctcaaaaacattaaaagacaaatgaaaaacctacagctacatagggcaaaggattatggctgacatacgatcacagcctaatgtctgggagaaaagcaggtaag

SEQ ID NO: 605312 - DNA, 501 bp, Homo sapiens
atatatttattaaaatattttgtatgagattaaatgatgctataactacactggtctttttattattctgttttcagagaaaaaaaacagaatgtaaatggctcacatttacttgcaaacttatttataatgtaaactatttaaaaatccgtgtacatttgtaggagacggacatccaaaaatgtgcaacttaaaatctgggaacaaattatatgcacatatgtcttactagtttccttagacgcatgacaagccactccacagtttagccagtggtcctctgggagctgtcctctattctaacatcatccaagatgaaacccattctggggcccatgtctgggactcttataagcaacgggcaggcagctgtgatggacaggagtagaaatctccttgctcaggtccagcagtgcactctttcattttctttttcatttgagacagggtctcgctatgctgcccaggcwggagtgcagtggcaggatcacagctcactgc

SEQ ID NO: 605313 - DNA, 541 bp, Homo sapiens
gttaacaggtgcagcacaccaacatggcacatgtgtacatatgtaacaaacctgcacattgtgcacatgtaccctagaacttaaagtaaaattaaaaaaaaaagccattctagtatcatgttagcattgtctcctgggacccytgcatggatgttaatcctgtctcaaggaaactgttcactttgatcaagttttctcagaatacaattccacatgcattctcctggctcctgctgatcaatatgctagctccatctggaagtttcttcagagtatggcctcttagcagatcagtacttcctcagtcaagtagtgtttgatgtaaactaagttaatagtctggtggccaagaggagccatggaagtagatcctgagtggggcaggagggtacattttgtccttaaaggcaaaagcctctgcatcatcttcaagcaaagagaaaggggtattagactttaaaaatgaagtggatcacttctgcaggcccagaggagtaagtacctagagactcaagagttttgaatgcattgaaacatatat

SEQ ID NO: 605314 - DNA, 541 bp, Homo sapiens
gttaacaggtgcagcacaccaacatggcacatgtgtacatatgtaacaaacctgcacattgtgcacatgtaccctagaacttaaagtaaaattaaaaaaaaaagccattctagtatcatgttagcattgtctcctgggacccttgcatggatgttaatcctgtctcaaggaaactgttcactttgatcaagttttctcagaatacaattccacatgcattctcctggctcctgctgatcaatatgctagctccatctggaagtttcttcagagtatggcctcttagcagatcagtacttcctcagtcaagtagtgtttgatgtaaactaagttaatagtctggtggccaagaggagccatggaagtagatcctgagtggggcaggagggtacattttgtccttaaaggcaaaagcctctgcatcatcttcaagcaaagagaaaggggtattagwctttaaaaatgaagtggatcacttctgcaggcccagaggagtaagtacctagagactcaagagttttgaatgcattgaaacatatat

SEQ ID NO: 605315 - DNA, 545 bp, Homo sapiens
tttattcttcaaaatgatcactcactctaacttctgcatgaaaaatgtcaacatctctgcttcctatgtctgagtgtttcctccttcatttctgttataattcctctaagataacttccttcagctcagcccatggagtccagttctctctggtttgattttgtcctattgcaaaccaagcccagttctgatgctacagagaaatccctgagcaaacagaaaaccactgaagaggaaggacatggccgggtgcagtggtgtctagcatctgttccccagtgagaattttgacaaacccaaatttgttcagagggagaaagaaataatttcttattcagacttctgggtaaatgtgacataaccagagatccttatctattgcttgggtgggggtaaatggctgtcttatattaatttttcatttaaaaaatcaaaatgcatcaactgcaactatggtgcacatcatgtaatatccttcatttcaaaaggtgtctcaggatctttcaatatcacagttataattaygaacatgagtgtcaacaaaa

SEQ ID NO: 605316 - DNA, 434 bp, Homo sapiens
aatggggaaaaaagcctagaaggcatttcagagatcatctaggcatcattcccagctccgcacccacaccccatcagagtcccagaggcctaggaggaaagaatggtcttgtgggccaggcccaaggccttgtagactcaggacacagatccccacatcctggctgctctggctacaccaacagcttaaaggtctccaggtgcagcttggctcaccactccagaggatgcaagctataagccttggtggcttccacatagtgttaagcctgcaggtactaagagtgcaaaagtgaaggaagcatggcagcttccacctagttttcagaggatgtatggaaaarcctgggtacccaggcaagaaggctgccacaggggtttgggggtagcccacacagagatactttactagggcagtattgagaagaaaagtgg

SEQ ID NO: 605317 - DNA, 559 bp, Homo sapiens
ttgacttcagtttccctttctctgtgaggccttcgcttgccaccttatctaaaattacaacattctctctatccaagagcctttccccgctacctatttatttttctccttaattcttgtcatcctacaacaaatggtatattaatttattgtatttccctactagaacataagtccttcaagagcasggagttttgtccattcttgcccgtttgatctcttccattatgcctagtgtgggtaccatataagcactcaataatattaagttgatgcaaaagtaatcatggtttttgccattaaaagtaaccatgattacttttgcaccaacctaatatttggtgaaagaatacatgcaaggatacatgtaagctacttgtactagcaatgccctttcttactcaatttcagaagctcagacattgttacccttttccaatcctatttgtctaatagttattaacacacttcctacccctatgctgagtaatgagcttctattagtgaattgtgttcatgtaatatttagcaggactcagttttcccatggactctcacc

SEQ ID NO: 605318 - DNA, 612 bp, Homo sapiens
ctgttatttggataaccttcagggaaatccttaaaacactgaaaatgaaaaccattaacaatgtgttagacacacatatacagaagagctgataatgttgagtgcatgtgtatattctgtatccgtgtgtgtgtgtgtgtgtgtgtgtgtgtgtgtgtgtgttgagggaaataagagatttgttctctgggaaatagctgatccagaaactgtcattaattcataggccaaaaagccaaactcctattttgcagccctttccccatggacttaaggagtctgaggattaaaaaaaaaaaaaaaagtctgaggtataaatacgatcataaagagacattcaaatttgctttcttcaaagattttgctctgagctacccacgactgcctgagacatgtcagatcttcaagaagtggctagctctactctgagaagctttctgtttctgcttgctacccaggcaaccaaaatgtcagtgtgcacatgtgcatgcgtgcatataaatatatacacatctctcaccrtcttattcttcacgtgctacctgtctgcgtatatgtgtttatatacatgtatgcgtatgtctgtgtcacatgtacatttagaggtgtttt

SEQ ID NO: 605319 - DNA, 596 bp, Homo sapiens
ggaaatgatcaactatcctactctcatttttatgaagagatgctatgagtgaacataattacaatttataatttaatgtgtacagttttaagtaaaatttgcatacatgaaatgcacaaatcacagttataacattcagtgagttttgatcaatgtattcaccatgtaatccatgaccctatcaagatataaattatagataattcccgagtttatggaaataatctcaaacttctttgcattcaattttctaattctcacacctcatctcctggtaacaactgatctttcagtcaccatagattagttttgcctaaattgctctggaatttcatactaatgacatacaagacgatgtacccttttgtgttcgacttctttatcaaagtataatatctgtctgtggtgtatatcaatagtttattactttttaatattaagcagarcccaattatatgactatattacaatttgtttatccattcctcgattgatagacatatatgttggttttttgtgtgtattatgaataagactgcaatgaacattttcgtacaagtcttttgtgaatatatgttttcatttatctctagtaa

SEQ ID NO: 605320 - DNA, 466 bp, Homo sapiens
ggccttctgtttttgtctggtcaagacctagagctctgtgggaacagtttttgtttttgttttttttaaacatttacatggcccttttctgctctttggggaaatgggagagattagagctgctgccacccagagggtggaataagtcaatggaatggatgagttagcagggaatgagcctatacctacaggtaggaagcgaggttttcatgaatctctaaatgccatttatctactttcagagataaacaaacaaatagatctaagccttttctgtgasagtcaagtaggttattcccgagcccagacgaccttctagtgtagactcagtgcagtgtacagtgtgacctaggaacatcagcatcgctggggaacttggtagagttgcaagttaggctctacaccagcccaccgagccagaaattctggcgggtggggcccaataacctgtattttaacaagccct

SEQ ID NO: 605321 - DNA, 615 bp, Homo sapiens
atagaccagggccttctgctacttgaaggcttccctctctgtgccctaaaaaataaataaataaataaataaattaattaattaattaaataaataaatggtgtggaatccttggggcttcagggaagcaaggaaccgaggactgaactttgtgtttgaagttaggatagtttgtatctggatgacttaaagatccgttggcaagaatggaaaccaagtcttycaaagagaaacctacaagaaggaatgtggtcaattgcccgggtgactttggtgcaaccaaaagcctttgagtgttagccagggagggctggttcagattctgcagatccagtttctagcagtagagcctggtgtcagcatcagtaactagtacactgaccagactttccagttttttctctcttcaaccggctgcctagtgttcttgtacagaatgaaccctttggaatgaataagtccatagtgttcttggacaaggcagtaggagggaacctgaataggttatactggatatttttctaaaaaccaaactgtgggaactgaaaaattaattgagaggggaggcatacaagagaaagagatgtgattttatttaactacaagctgaaaaac

SEQ ID NO: 605322 - DNA, 585 bp, Homo sapiens
aggattttttgtgtctaagttcacgagagatattggtctttagttttccttggttatactggctatgtctggttttgatatcatcaatggtttcagatcaaatgatttgagaagcattcccttatctctattatctggaagagatcatgtaaaatcgttgtttatactttattaaatgtttggaagatttcatcagtgaaaccatctgggcctgagatctctttcttaggagcttttaaattatgagttatatttcatttatcatcatagggctatttagatggccartttaatcttggttgagtttggtagttgctgtcatcgaggaattagttcatttattctaagttgtaaaatatgtgagcataaaagtattcataatattatctttttcttcttttttctttgatgagtccaggatctactttattcctgttggtgattgtgtctcttatttttgtcagtcttgctagagatttatcaatttattttctgaagaccaaccttgctatttaattgattttattatttttctatttttaactttattgatgtttttctcttatatttattatttttgtttgt

SEQ ID NO: 605323 - DNA, 552 bp, Homo sapiens
gattccatgtctgggctatcgcatagtgtaaacaaaggctgtcgaaaattcaaagaatctgttttaatgcgtgacccaaggtgagaggggaacaggagcctgaccggagcccccaccgcctctcctccaggcgaggggaagatgcggcccccggcaagcatggggaaggctgagcagagggctagagggggctctgtggcccaggcccgccccttcctctcaaagcctgtgagtgtaaagctatgcgagagccctggggctgccgtcctggggaaagaaggcccagccctggccctgtggttaagggccctggttggaacggagggcagggcccgggccccaagcccatgactgggttctccttccctcgcagaggagcccggtggtcactgggagcctcagctgtgcgtggtcaaatgaggtgcctgggctggcatcttcgtgtgttcctgggtgaccctgtgagcagctccgtttagcctccagccctgacaacatcccttyccaaagggacggcctctgcacctgcccccaggcgtgggcaaaggggat

SEQ ID NO: 605324 - DNA, 393 bp, Homo sapiens
ccagtgaagaccaagtacacctttataataaaaataccaccctttgttggcacacgaactctccattagatatttatcaaatgtttaaaaagttggcccagaaccacacacgctttaccacgagtctccttggtagctggaggaaagcaaggccatcgaaggtggagcctggggtgcctccatccaagccctcatcttgcagacaggcggctctcctgggctcacctgtgagcccacacgcagagccacctgcggcgtttgcgcagagcctctgcggccaccaggaagtcacacagcccttggtgggtccgcagtggatcarcacagacacggctgcacctgagattcagaagaacgggcggacggtgctttcctgcatgtgtaagaggaatt

SEQ ID NO: 605325 - DNA, 577 bp, Homo sapiens
tacagcgccaatgggattttacatccttcgtggaaccatcatccatcatcaactgactttacttcctcttaatcccagcagcctcctctggctttmacatgggaagccatcatctccttggtcttggctagttttgcccccatcctgggcaaattccttagctcctttcccctctataaaacagtgccctaaggtggagattcagttatattattttggacattttattactatttctatatgtccagatgcttgcccaaataaaatcggatttattctttgatgcctgtaaagtaatttagccacaagagcactgaagctaatggcgtttctgcagaggccagctccagggatgccgtgcacacaggctcttctcctgtagctcacagaggggcatccttggctatgccagatgcccacgatgtgtccacagctcacaagggtgcacgtaggatgtgcacggctggggggtgggcagcatgtctgtgccccaggggccctggacaggtaggtgcaggcgtgccaggccctgcatggctggaggcgctggcagaggggaaggtggaaaattacacag

SEQ ID NO: 605326 - DNA, 577 bp, Homo sapiens
tacagcgccaatgggattttacatccttcgtggaaccatcatccatcatcaactgactttacttcctcttaatcccagcagcctcctctggctttaacatgggaagccatcatctccttggtcttggctagttttgcccccatcctgggcaaattccttagctcctttccyctctataaaacagtgccctaaggtggagattcagttatattattttggacattttattactatttctatatgtccagatgcttgcccaaataaaatcggatttattctttgatgcctgtaaagtaatttagccacaagagcactgaagctaatggcgtttctgcagaggccagctccagggatgccgtgcacacaggctcttctcctgtagctcacagaggggcatccttggctatgccagatgcccacgatgtgtccacagctcacaagggtgcacgtaggatgtgcacggctggggggtgggcagcatgtctgtgccccaggggccctggacaggtaggtgcaggcgtgccaggccctgcatggctggaggcgctggcagaggggaaggtggaaaattacacag

SEQ ID NO: 605327 - DNA, 362 bp, Homo sapiens
tgagcatgcacagtgacactccatcctcaaatggaagggggcgtgcatgggatcgggcaccagtaggtcctgagggcacaagtaagttatataaagaagtggtgcaaatgcccacagtctccacccctgctcccctgccttctgtctcagcctgcacctgtgtccccactgagagttccctgtgatcatttgacagagaaagcaaggctagagcctggcttccagatggttctgcactacacagaggcatcacccacaagtcgacagcagcactgcagcccctttyggggacgtccctgaagcacatggtgaagggaaacctgcctggtcagcagaactccaggcagtgcatctggttgtgc

SEQ ID NO: 605328 - DNA, 497 bp, Homo sapiens
tgaggttgtgctacatgctgctggtagatctgggaagaggaacatgaagaacgcacagttgcttttagtaatggagaggtgcctgggaccttgtcattaccagcatcggtgagggggcagaagagtggattcaagaggagccaggaggaaaggcacacagcaagtggagggagcatgttggggggttctgatataaacaccaacagagaaacagggcactaaatgagggagaaagtgaagtcaagtgggaggggtttttttggagataggaggaaaacagcatatttttatggccatggaaaaaatccagcggagaggaagcaatgaggggcaggggctggagaagrgccagaggggatgggagccaatgcatgtggatggtgagtattttgtagttgttttctcagggtttccaactagttatttgttttctcttggtttcttgcagacagcacatgccttcctcacatagccctgttcctctgggtcttccatca

SEQ ID NO: 605329 - DNA, 497 bp, Homo sapiens
tgaggttgtgctacatgctgctggtagatctgggaagaggaacatgaagaacgcacagttgcttttagtaatggagaggtgcctgggaccttgtcattaccagcatcggtgagggggcagaagagtggattcaagaggagccaggaggaaaggcacacagcaagtggagggagcatgttggggggttctgatataaacaccaacagagaaacagggcactaaatgagggagaaagtgaagtcaagtgggaggggtttttttggagataggaggaaaacagcatatttttatggccatggaaaaaatccagcggagaggaagcaatgaggggcaggggctggagaagggccagaggggatgggagccaatgcatgtggatggtgagtattttgtagttgttttctcagggtttccaactagtyatttgttttctcttggtttcttgcagacagcacatgccttcctcacatagccctgttcctctgggtcttccatca

SEQ ID NO: 605330 - DNA, 625 bp, Homo sapiens
gcaaacagtgagggcgcacagacaataagaaacaaccctgcttcatcacacatctctcttgctccatcatcattttccgtttaggacttgagctgtccacgaaagaaagagaaagggctctgttatatgtccagaactttcctctgtacttgtcaattctcttagtagaaaatagaggttataaaaaataccaattggtcatactttccaggagaaagataaataattaggagtccatttaaacacacatgtaatgactcaggaccatgttacaagcccaaatataccttttcatgctctgaaaactgaaaaggtaaagagtaagatttgggatctcagagacatgcatcagggccagccagtgtgggcatgaggttgcggttgctgatctcaaatgtgcagtcctcacacaggcttgaggtttggatatctatctgagcaattctcaattttgtctttagcaygggctggagtgtccacaggaaaggctgttctttcaggatctgagcccatctgttcctagttgacaccaaggtttgaaaagtgcagacccacatgaaaatgaaactacatcgactgcagcttttaaagttaaccaaccttaattgggactcaaaagtattct

SEQ ID NO: 605331 - DNA, 577 bp, Homo sapiens
tatcatagagcttttggtagagcttttcactgaaaatgtttattgaacacttactatgtgcaaagcactatggtagatgatacaaagaaaattaaaatgagcaaaaaattgtccttacccctaaataatttacaaaccagtggagcttatttctaaaagccagcatgcaaaaaatttgacttgaaagaggcaaaagtaacttctataagggtctaaagaataaatgaatcatgacacatgttttctgtttttttttgcttgtaggtcaatcctgttggtgtccacaatakttctctctctggggcagtgggcatagtggtaacagcatgtgtttaagagtcagggagaccttgatttgcatcccaatatggcctcctctagctctaggacctgggacaagctaatcaaactcatctgcaaaatgtgaataatgatcgtcatagagtgggtttgcagattaaatactgtataagcctcacaagtaccccaggaggtggttactctgaatacctctattttactaatgaaattagcaacttgtccatgaacatacggctagcaagtctgacctgggagc

SEQ ID NO: 605332 - DNA, 577 bp, Homo sapiens
tatcatagagcttttggtagagcttttcactgaaaatgtttattgaacacttactatgtgcaaagcactatggtagatgatacaaagaaaattaaaatgagcaaaaaattgtccttacccctaaataatttacaaaccagtggagcttatttctaaaagccagcatgcaaaaaatttgacttgaaagaggcaaaagtaacttctataagggtctaaagaataaatgaatcatgacacatgttttctgtttttttttgcttgtaggtcaatcctgttggtgtccacaatagttctctctctggggcagtgggcatagtggtaacagcatgtgtttaagagtcagggagaccttgatttgcatcccaatatggcctcctctagctctaggacctgggacaagctaatcaaactcatctgcaaaatgtgaataatgatmgtcatagagtgggtttgcagattaaatactgtataagcctcacaagtaccccaggaggtggttactctgaatacctctattttactaatgaaattagcaacttgtccatgaacatacggctagcaagtctgacctgggagc

SEQ ID NO: 605333 - DNA, 577 bp, Homo sapiens
tatcatagagcttttggtagagcttttcactgaaaatgtttattgaacacttactatgtgcaaagcactatggtagatgatacaaagaaaattaaaatgagcaaaaaattgtccttacccctaaataatttacaaaccagtggagcttatttctaaaagccagcatgcaaaaaatttgacttgaaagaggcaaaagtaacttctataagggtctaaagaataaatgaatcatgacacatgttttctgtttttttttgcttgtaggtcaatcctgttggtgtccacaatagttctctctctggggcagtgggcatagtggtaacagcatgtgtttaagagtcagggagaccttgatttgcatcccaatatggcctcctctagctctaggacctgggacaagctaatcaaactcatctgcaaaatgtgaataatgatcgtcatagagtgggtttgcagattaaatactgtataagcctcacaagtaccccaggaggtggttactytgaatacctctattttactaatgaaattagcaacttgtccatgaacatacggctagcaagtctgacctgggagc

SEQ ID NO: 605334 - DNA, 531 bp, Homo sapiens
cttagtttctacattctactaatcaacattctgtaaaacaataggcaagtgctctttcaaaatgttaaagtcatgaaaaaccatggaaggctgataaatcattgcacattaaatgacactaaagaaacatgataaagaaatataatgtgctatcctggattaaatcctacattaaatgtataaaaaattgctatattctttttttttccccagctctgtcacccaggctggagtgtagtggtgcaatcacagctccctgcagcctcagtctctgggactcaagtgatcctcccacatcagcttcccaggtagctgagactacaggtgcatgccaccayaacctgctaaatttttttttttgtatttttttttcagagatggggtttttccatgtggcccaggctggtctcatactccgaggctcaagggaatctatctgcctgcctcagccacccagagtgttgggattacaggcatgagccactgtatctggcctaaacattgctatattcaatattagtatagtagtaa

SEQ ID NO: 605335 - DNA, 610 bp, Homo sapiens
acatgtcttccttcactagtttagtctataaagtctgatttacatagttgcagcttgtatctccccaagactgtcctgctttatctgcaacctggttcttggtcaggtctttctaactagaactccagtcttgtccctttatcttgcatcatttgctcctcagaaaactgccccagtgaaactcttataagcctctctttcttcctctatctgggcaaaattcccctagcatctcccattcttaactatttcatatcctttttcctcttttcttcctttttagtccatacctctccttttcctgctttcctggcttgcacctggaatatggtgccaccataacctattacactttcccagatctaatatctgattgcctgtcaatcacttgcagaccatcatggcatgtgaaagagaaagtagattcattttattttattttgttttatyctaggagtattagcattttaatagagcgtgtcttagataaagtaattgttactgaaccccaaaatagcatcacatggctaggagactgttctgctcattcataaaagccatttgttttttgtggtaaaatatacataacataaaatttaccactttaacc

SEQ ID NO: 605336 - DNA, 514 bp, Homo sapiens
tgtgtggtcttgtcagtaggaacactgggtagtttaactatgtccacaaattctttgaccctgccttcaaaagatggagtccttccctcaagtagggactagacttctgacttgcttctaacaaatacaaaaaaagcattaagtgacagaatgtaacttcagagactgggtcataaaaggcactgctgtttcctgcttgctctctcttggctctgggggaagccagcttccttgtcatgaggaagctcaaaaagccctacggagaggacatatttggtgaggaactgagcctccagccaacagacagtgagaaactgaaactccctgcagacagtcacatgagtgagcttggaagtggatcctccagccccagtcaagccctcaaatgacagaatccctggctgaaagttttgttgcagcctcatgagagatcttgaaccaaaatcctccccaascccctgccacccacaagaagccactctcaaattcctgacccacagaaactgtgagatga

SEQ ID NO: 605337 - DNA, 610 bp, Homo sapiens
ggaatcatagtgtctattctttctgtgcctggattctttcattcaacactatagttgagagatttgagagattctccatgatgtcctatgaggtggtagtttgttcactttgaataatgtactgttacataaatttttctttctaccatgggtggatatttgggttgtttccacgttggagctgtcatgaaaagtatattgtaatgaactttcttgtatattttttgaagtggggcctcaatcagaaggatttgggcctcctttgtacatttcttgatgtccttatgtacatacacattaatgttgagtgttctacctagaggattgctgtccagccttaatgaataacattaaaargttttccaaaataattgaaccaatttgtatttacttgaaactactgccacaatttttatttgtttaataatgcacagaaactagtcccttaattcaataaatacaaagctctcctagaataggatttcccaaagtgtggaatacaagtcctgccagagactctgaaaattaaaataggttttttggttcaaataattttgaaaatcattgcatattatatcatcttctcagagaatgtaccttaacacattaa

SEQ ID NO: 605338 - DNA, 588 bp, Homo sapiens
tagtttgttcactttgaataatgtactgttacataaatttttctttctaccatgggtggatatttgggttgtttccacgttggagctgtcatgaaaagtatattgtaatgaactttcttgtatattttttgaagtggggcctcaatcagaaggatttgggcctcctttgtacatttcttgatgtccttatgtacatacacattaatgttgagtgttctacctagaggattgctgtccagccttaatgaataacattaaaaagttttccaaaataattgaaccaatttgtatttacttgaaactactgccacaatttttatttgtttaataatgcacagaaactagtcycttaattcaataaatacaaagctctcctagaataggatttcccaaagtgtggaatacaagtcctgccagagactctgaaaattaaaataggttttttggttcaaataattttgaaaatcattgcatattatatcatcttctcagagaatgtaccttaacacattaaaatctctgagaagccctttatttaaaaataataggctaagtttgtttgaatgataagtagttgctttggcccac

SEQ ID NO: 605339 - DNA, 532 bp, Homo sapiens
atttttttaaatcttggaatcatatctttaaatatacaaagtactaaatgggaaacgtcacacagacytggcccctgggtgggaagccctagttgttaaacattctcctgcttaatgagctggaaaatctgcctagttccatcttcctagtatagcacctaagtgtactcattattctacacaaaagagcttcaaattcttaaacataatgcaattttaggagaaaaaagcgtggctttggagtcagattcatttaagattcacatttcagttattagctctgtgactttgggaacatgaattaacttcaataaactcaattatataatctgtgaaattgtaataataccaaatgacaaataatcatttatcttcatcatttaaataatgatggtaaataaatgcaagattgtgaagaattaaatgagataatataacaaaaatgtacagcataaatacctttggccattcttcatctgctataatttccaattatacaatctccttcctcctgttccaatgctctgattga

SEQ ID NO: 605340 - DNA, 491 bp, Homo sapiens
gaacaatctctccatgtctcattacaaaatctttatcgcccattagtccagagaggggtgaaggaggcatctatcattctggtctgaaacactggcacacagtaagaaatagcatgcccagtgatgctaggtctagcctgtgggaaaaaaaacacaaaaactrtaacttagatgtttatatttagtcctatctcaacttttccctctcgccactctcagctccagctataaaattatccctccattgccacttgacattaatgagaaataataataatagctaacatttattactaccaggcaggcactacactatgttcctgacatattgttgtgcattacatcctaatggcaactactagatagcatcatcattatcctcatgtcagtataataaatggagaaacataaaggctaaagaatttgcacaaagaatttggactcaggtaatctgctcagtatccaatgtctacaccatcattgtttactgg

SEQ ID NO: 605341 - DNA, 565 bp, Homo sapiens
tcatctgccccttttctttcttcctcatctgcttatgccatacaggcaccaccactttcaaccattttagcagttgtttcaggcatttatctccttatttataaataatccatttattcatctatttattttgcttcttggttttaaatatgatcatttatttttctgtttaatttaataagcttagaacctcctctccccttgcacacccaagtacaaaatggttctatcacaatcataactgggaggcaaaaaaagtcaatgttttcactatatatatgtgtgtgtgggtgtgtatatatagtgaatataataaacataatatttcttgtagcttaatcttatggtgtgttatatttccttatagtrtgttatgacattttctttcttgttcaactttttgtttgttacaaattcataaacacctcattttaaatgcttacttttaaacccctaactaaatcagcctcacacttctcaaaataatattttacaatgtaagtaacacatcatttattagtaacttttttctttgtcggaaacatctctgaagactcctgcatca

SEQ ID NO: 605342 - DNA, 565 bp, Homo sapiens
tcatctgccccttttctttcttcctcatctgcttatgccatacaggcaccaccactttcaaccattttagcagttgtttcaggcatttatctccttatttataaataatccatttattcatctatttattttgcttcttggttttaaatatgatcatttatttttctgtttaatttaataagcttagaacctcctctccccttgcacacccaagtacaaaatggttctatcacaatcataactgggaggcaaaaaaagtcaatgttttcactatatatatgtgtgtgtgggtgtgtatatatagtgaatataataaacataatatttcttgtagcttaatcttatggtgtgttatatttccttatagtgtgttatgacattttctttcttgttcaactttttgtttkttacaaattcataaacacctcattttaaatgcttacttttaaacccctaactaaatcagcctcacacttctcaaaataatattttacaatgtaagtaacacatcatttattagtaacttttttctttgtcggaaacatctctgaagactcctgcatca

SEQ ID NO: 605343 - DNA, 564 bp, Homo sapiens
acaaaggtcggtatgcaccagaatagaacttcttgaaagcacaaaactcacaggacctataaaacagtaccataatgaagaaaacaaagtaactaggtaacaatcaacatgatgactggaacaataccacatgtctcaatattaatggtgaatatraatgaaccacatgctccacttaaaatatgcagattggcagaatggattcaaaaaaatggtcaaaccaagatgtgctcgttttaagagacatacctagcattcaacggattcttatcgacacaatgtagatgatactacacataaatggaatctcacagtgagcattagtagctatcaggtaaaacatactttaaagcaacaactaaagcaacaaccatttaaaaaagagacaaagaaggtcattatataatgataaaacaatcaatccaagaagaagattttacaattctaagtatatatgacctaactctggaactcccagatgcataagacaattactactagacctcagaaaacagacagacaacaacacaataatagtgggggacttcagtactccactgacag

SEQ ID NO: 605344 - DNA, 634 bp, Homo sapiens
attcctagaattttaaaagaaaaatatttggttaacaacaatatttcatgttagaagaaaagaaggaagagattctgtctggaggaagaagattagttttggattttttgtttgtttgtcttctcaatatatctctttttcttagggtgaaaagcttatgtcatttataaaaatgaggttacaaattagctcactggtgctcatcagtagtttattagtctcaatcttattaataatcatactgttctttctgggaagctaatagcaaactgaagatcactttgaaagataattggctttggcttagtaacaaagccatgtttatagatgtctctggaaaaaaagaaacccacacaccatcaaataatattagagtgtcatggtccttatggccagattaagactacttccaggtgtctcccttcctcagtaagcttcctgtttcccaccaaaccaaaaccagaacatattgctgaccaaaacacaaacrgtttatatccagcctgttcttcctgaacagtatccaactttatttggaagcagaaattgcctattctctggagatgagttgtgattagccaaatcaattctgttcctcactttcccagtctccttgcaactaaatatggcccgg

SEQ ID NO: 605345 - DNA, 462 bp, Homo sapiens
ttctttgcaattgatcactgtgcatccttgggctagtcacttaattttactgagcttcagtttcctccaaggttgaatcgagatcatacctacctttaaagattgttgtgaaaatcattttataaataagtatcctgtcaaactacaagccggtgaaaccctaattttatgatgctaaaaattagttggttctgaatcacttaatgcctatatgaaatacctgcagtatagmttatatgcttgtagcaattcaagtcctaatagaaaaaaccaaagaggcatcttgataccttagaaacatctggatagacacagatgagaattgtaaagcaccagaatgtcctgagacctctgaggtgacagaatcaaatcccttccccttgtaagagaagaaaagcttcctcctccttggagggagatcttataaaaatgtcatcagatatttgtccttcccaatattca

SEQ ID NO: 605346 - DNA, 568 bp, Homo sapiens
accttgaaaaaaaatgaatcaattcctacacacatgaaacctaccaagattgaaccataaaggaatccaaaacctgaatagaccaataacaagtaatgagatcaaagctgtaataagtagtctcccagtaaagaaaaagaactaataccaattctactcaaactattccaaaaaatagaggaagagtgaatacttctaaactcattgtatgacaccagtattaccttaataccaaaaccagagtcatatccgaaaaagaaaagtaaaggccaatatccctatgcaaaaatcctcaacaaaatgccagcaaaccaaattcaacaacayatttaaaagataacctattaggaccaagtggaatttatcccagggatgcaaggatggttcaacatacacaaagccataaacgtgatacatcacatcacagaatgaaggacaaaaaccatatgatcattccaactgacgctggaaaagtatttaataaaatttgtcatcccgcaagataaaaactctcaaaacactgagtatagaaggaacacacctaaacataataaaagtcacatacaac

SEQ ID NO: 605347 - DNA, 568 bp, Homo sapiens
accttgaaaaaaaatgaatcaattcctacacacatgaaacctaccaagattgaaccataaaggaatccaaaacctgaatagaccaataacaagtaatgagatcaaagctgtaataagtagtctcccagtaaagaaaaagaactaataccaattctactcaaactattccaaaaaatagaggaagagtgaatacttctaaactcattgtatgacaccagtattaccttaataccaaaaccagagtcatatccgaaaaagaaaagtaaaggccaatatccctatgcaaaaatcctcaacaaaatgccagcaaaccaaattcaacaacacatttaaaagataacctattaggaccaagtggaatttatcccagggatgcaaggatggttcaacatacacaaagccataaacgtgatacatcacatcacagaatgaaggacaaaaaccatatgatcattccaactgaygctggaaaagtatttaataaaatttgtcatcccgcaagataaaaactctcaaaacactgagtatagaaggaacacacctaaacataataaaagtcacatacaac

SEQ ID NO: 605348 - DNA, 568 bp, Homo sapiens
accttgaaaaaaaatgaatcaattcctacacacatgaaacctaccaagattgaaccataaaggaatccaaaacctgaatagaccaataacaagtaatgagatcaaagctgtaataagtagtctcccagtaaagaaaaagaactaataccaattctactcaaactattccaaaaaatagaggaagagtgaatacttctaaactcattgtatgacaccagtattaccttaataccaaaaccagagtcatatccgaaaaagaaaagtaaaggccaatatccctatgcaaaaatcctcaacaaaatgccagcaaaccaaattcaacaacacatttaaaagataacctattaggaccaagtggaatttatcccagggatgcaaggatggttcaacatacacaaagccataaacgtgatacatcacatcacagaatgaaggacaaaaaccatatgatcattccaactgacgctggaaaagtatttaataaaattygtcatcccgcaagataaaaactctcaaaacactgagtatagaaggaacacacctaaacataataaaagtcacatacaac

SEQ ID NO: 605349 - DNA, 568 bp, Homo sapiens
accttgaaaaaaaatgaatcaattcctacacacatgaaacctaccaagattgaaccataaaggaatccaaaacctgaatagaccaataacaagtaatgagatcaaagctgtaataagtagtctcccagtaaagaaaaagaactaataccaattctactcaaactattccaaaaaatagaggaagagtgaatacttctaaactcattgtatgacaccagtattaccttaataccaaaaccagagtcatatccgaaaaagaaaagtaaaggccaatatccctatgcaaaaatcctcaacaaaatgccagcaaaccaaattcaacaacacatttaaaagataacctattaggaccaagtggaatttatcccagggatgcaaggatggttcaacatacacaaagccataaacgtgatacatcacatcacagaatgaaggacaaaaaccatatgatcattccaactgacgctggaaaagtatttaataaaatttrtcatcccgcaagataaaaactctcaaaacactgagtatagaaggaacacacctaaacataataaaagtcacatacaac

SEQ ID NO: 605350 - DNA, 508 bp, Homo sapiens
ttagcactaataagaataatcagacatgtaactatcaaaggaagtctgtgtttacatgacacatacaatgtagatgaggttcttttttaagttaagggagttgttatttttcagaatgtttytcatgccacagtcctgcatttgtggaaagctccttgtaatataaggcaatatttagacacgaggcttccaaggctgagactgccatataatgcagtgggattttttcagtaaaccataacctgagcatccttagaagagacttgccttatcctgacttctactttatcatgattaataatattatggagatgtcagtgagtttctgccatgaaatttatgatcaccatgtgagtgagcctgtagctatacattttttatgctctgagaaagatatagttatctctaccttcccacaaaaacatcttctactgaaaaatgcttctaaaatagttgctaagatacaggtttgactggagcaatgaaaacaagataaatgaattcacac

SEQ ID NO: 605351 - DNA, 575 bp, Homo sapiens
gtggtttcctgctacccaccaaatagaagctggctttcagggtggtgtccaactccctccacggtctgcctccccaacccccaacttttctttccagccgtacctcctactccatccctccgcaggagcttactacaaccgctccagatcattcctcatttcccagagtggggtgtggggtgtgggggtgtgtgtggaaaaaacacagttgttcaggtctctattctttattatgttgtttcattgttttaaaatgtcctcatgcacattctcatttactgaaatcttacttgccattcagggattccttcaaatgccacttcttccatgcagccatttctgattcctcccttcaggagtagtcactccttttcttgcatttcccaaactagatgcctatgcttctgtttagcacttgcccagccctgaaccaaggaactttgcckgatcaccttgcatcccacggcactgaacacagggcctggagcagccctctacccgcaggtggacccaggctgcttgttgatgtagttcatgttcatcctggagccctaaagagcacgtaggcagtccag

SEQ ID NO: 605352 - DNA, 383 bp, Homo sapiens
attttgaggaaggttaccaatgcacataaagtgctcagtcctgtgcctggcacatagtaggtgctcaagtgggacacagtggcagtaactgctattatttataatagrttgggtttgctgttgaggaggttactgtaccaaggcatgagaagcctcaggtcagtcagagagaggcagggcaggggacccagcaggacccagcccatcctaggagattttgctgtgattccatgatgtgaaatgcttccgtgtggccattccagtccttccctgactcagttacgaaaggccggaacagcatcttagttccctctgattttgcctgagtttggggccttctctttaaattcttcaggcattgcccactggctctgatgtatgct

SEQ ID NO: 605353 - DNA, 614 bp, Homo sapiens
tccttccctgactcagttacgaaaggccggaacagcatcttagttccctctgattttgcctgagtttggggccttctctttaaattcttcaggcattgcccactggctctgatgtatgctttgggccaaactgcctttttagaaattctcaacatgcaggggtatcccttccaggagcccctgccyactcttcctctatgcctggccaactcagcccttgctgctgtcccttccccgcagaggaccaaggtcaagccctttcttctccccatggtgtttcctcctcccctgaccctctgagctgcttcatggtcttctcctcactgcccaggaccagtgggttccacacagactcccagcaggcagggagaagagaagcactcttccaagtccttccccctcctgccacattcctccccagctcccagcctcccaggactacctgagcctgactttctgaggcacaatattgaaacctcttgagaaccacccactctgatgatggacttgaaggccatcagacaactgatgtgctttccccaataaggcagggaagggagaaaggcaagtctctgcctggccacaaatgtgcccccaacactaggacatggcat

SEQ ID NO: 605354 - DNA, 614 bp, Homo sapiens
tccttccctgactcagttacgaaaggccggaacagcatcttagttccctctgattttgcctgagtttggggccttctctttaaattcttcaggcattgcccactggctctgatgtatgctttgggccaaactgcctttttagaaattctcaacatgcaggggtatcccttccaggagcccctgcccactcttcctctatgcctggccaamtcagcccttgctgctgtcccttccccgcagaggaccaaggtcaagccctttcttctccccatggtgtttcctcctcccctgaccctctgagctgcttcatggtcttctcctcactgcccaggaccagtgggttccacacagactcccagcaggcagggagaagagaagcactcttccaagtccttccccctcctgccacattcctccccagctcccagcctcccaggactacctgagcctgactttctgaggcacaatattgaaacctcttgagaaccacccactctgatgatggacttgaaggccatcagacaactgatgtgctttccccaataaggcagggaagggagaaaggcaagtctctgcctggccacaaatgtgcccccaacactaggacatggcat

SEQ ID NO: 605355 - DNA, 614 bp, Homo sapiens
tccttccctgactcagttacgaaaggccggaacagcatcttagttccctctgattttgcctgagtttggggccttctctttaaattcttcaggcattgcccactggctctgatgtatgctttgggccaaactgcctttttagaaattctcaacatgcaggggtatcccttccaggagcccctgcccactcttcctctatgcctggccaactcagcccttgctgctgtcccttccccgcagaggaccaaggtcaagccctttcttctccccatggtgtttcctcctcccctgaccctctgagctgcttcatggtcttctcctcactgcccaggaccmgtgggttccacacagactcccagcaggcagggagaagagaagcactcttccaagtccttccccctcctgccacattcctccccagctcccagcctcccaggactacctgagcctgactttctgaggcacaatattgaaacctcttgagaaccacccactctgatgatggacttgaaggccatcagacaactgatgtgctttccccaataaggcagggaagggagaaaggcaagtctctgcctggccacaaatgtgcccccaacactaggacatggcat

SEQ ID NO: 605356 - DNA, 523 bp, Homo sapiens
tccataatcacatgagccaatctcttttgataactcgctttctgtgcatctatatacagcctattgcttctgtttctctggagaaccatgactaataaccaggccttgtgtgcccaggtaaggattctagcatggaggaaccattcaaaggttttaagcaaggaggtcatgtggtcaaatttgggtggtataaagggcactccagcagcccgttgagtatagaccagtgagaccgcttgggctgaggtcctctctggaggatgtcatggtcatcacccagtggagagatgtggaggaagaaggaactgggcactggatggatttggggtggttgtgggagccaggccctgccttgggcagccaagatgccacccctaggacataacagcggcaagagcacrttgtgggaagatggcgagtttgtggaacccagcagggtaggcatgggcagctctggagtttgggagagaaggcaggtgggaaaggtggacccggaaatcgggagccttgattggaggggatg

SEQ ID NO: 605357 - DNA, 523 bp, Homo sapiens
tccataatcacatgagccaatctcttttgataactcgctttctgtgcatctatatacagcctattgcttctgtttctctggagaaccatgactaataaccaggccttgtgtgcccaggtaaggattctagcatggaggaaccattcaaaggttttaagcaaggaggtcatgtggtcaaatttgggtggtataaagggcactccagcagcccgttgagtatagaccagtgagaccgcttgggctgaggtcctctctggaggatgtcatggtcatcacccagtggagagatgtggaggaagaaggaactgggcactggatggatttggggtggttgtgggagccaggccctgccttgggcagccaagatgccacccctaggacataacagcggcaagagcacgttgtgggaagatggcgagtttgtggarcccagcagggtaggcatgggcagctctggagtttgggagagaaggcaggtgggaaaggtggacccggaaatcgggagccttgattggaggggatg

SEQ ID NO: 605358 - DNA, 639 bp, Homo sapiens
ctctagattggatcatttacatcaggggccggcaaacataaatatttgaggctgtgtgagacacatgatctctgccacacctactccactcttccatcgcaggccaaagcagccatagtttggaaacaaatcagtgtggctgtgctcccataaaaaatatatatttacaaaaaygggctgcaagctggatttagctgtagttagcccaccctcacggaatcattatgcaaatatgctgttgttattcccagcataaaaacggaaaagagaataatcctcttttgactctggttagctctttccctagaaaaactcctggatgacaatcttcgctgcctcctacgtctctcctggaccactcctacctggctcttcccctactgtcccctaagaactgtcctgcaggttgccagtgacctccgggttgccaaatctggtgggcagtcctcatgcttcctcttagccaggctgcagcctttgctcaccccccttcttcctcggggcacttcctgcccttggctcccaggacacgcactctccccatttcccttccaccaccctggctgtgccctctcagtcttgtgctgattccttcttatctacttgatgtctaaatgttggaagtcacagggtccacat

SEQ ID NO: 605359 - DNA, 505 bp, Homo sapiens
ttttatatataggaaatttgtttaattattgtattttgcttgaattctattttgggacaaaaccaaatgaaaattgaatgtcaagttaacttctactggtacttctaaaggcccataattaataatcataatgatcttatgacctttaagagcactgggraagaaataagtttcaataatttttaacaaaattcttaagtctgaatgttcttggtttgaccaaaatttcttcatcagtgcctaacaaacattccatgatgaagccttttccggaggcagaaatgtaatcaaatgatgtggaattggcaatccatccaaagggggaaggaatcccaaggaatgtcccaggcaaactctactttggatccaaggaactcacatatacaaatacatcaaactgaggagtgccttcttttcctttgtaaatgaccaaactgaaccaattcaactcaaaggaaagccacaatgactagcagcttacttcacacttcaacagaccaaaagg

SEQ ID NO: 605360 - DNA, 585 bp, Homo sapiens
gaaaatacattcagggccagaaaaaaaatggacaaaaagttcattatagagcaattggcaacgtttgaatatggtgtgacattatataagtgaatattcttgtgcktagaaaatgcacactgaaatatataagtgaatattcttgtccttagaaaatacatactgaaatatataagtgaatattcttgtccttagaaaatacacaccaaagtatctagctgtaaaggagaaagatgtctacaacttgctctcaaatcattcaggaaaaaaaaaatttaattgaaaaaagataaaaagataagttgaaaaaactgaaaaagaaaataagaaaacaaatgtgggaaataagacaaagagggacaaatctggatgaaggatatacaggagttctttacactgctatagctatttcttgtgtttgaaattatttacaaaaatatattaaaaagaagacactgtagaaataatttcaatattctaagacaaaataattttgaacctaaattctatatgcaatcaactatttaagtattatgacaaaataaaaacatgttcagactgcaggacttagaatatttctttggc

SEQ ID NO: 605361 - DNA, 493 bp, Homo sapiens
aggcttgccctccgtggccatgctgggctgcagaggctgctggacacacagcccaacgttgcactgccagccccacccatccctgcttgggggacagaagggagccaactcagaggctctggccagggaaccaccgggcccgtgaaattggtacttgaagttgggctggtgtgcggctggtgggttctttttttggttgagcaagaaaggctggtgtcagcgcatctggggagggtggtcaagggcagtgccaagcccagttccccggggtttgagctggctgagggtgaggccagcgtgggcacatgttaagtgctgctgagggctcaccctggggctgcggggcctggaagatagaggctgggcaaagatatctccagaaagctcaaccacgtttttgcggraggcaacttgcagtcatattatctaatgtgattttcatttctggaaattgttgcagcttccagtccctctacccattgaagctgagcaa

SEQ ID NO: 605362 - DNA, 612 bp, Homo sapiens
ttctaccctcttctaaataaacttggtctgcccctcagctggaatcccaaatctatgcccccaccccacgcttgacatgttccccagagtgccactgtcatgaggtcaggcttcactgcaccctgtggccaggggtattctgcagccttctgtcactgtgctcttccctttccttatgttgggctgaggggcagagagccctgcccccaccccaccccaagcrcttactaagaacgggagacacactaccaaagcgtctgcagttgtgttgtcttttgtgctgggggatgttgtctttctttcgggtaacataataaccccgtgagcccatcgtttcaaataaacacagctgaccttctattattgtatcaggatcaggctggccggaacagcagggcccctgcatccctggagcacatgccgctgacaggctgtggctctgactgtgctgctgctggcctgccttcctcagcccgggcccagcaccgccgtagccttaaacccatcccagcctctcacgtaccaggctcacagtggttccctggcccaggaacccagacctcaggcctgccttccagcttcctgagggtctgggcagaggctaggccctgc

SEQ ID NO: 605363 - DNA, 498 bp, Homo sapiens
ataggagtgcacaacctgggaatgagaaatgtaagctttcagcaagacctgcttgcaccatcttttggctggaaaacctgtaggcagatggcatctagcagtgtcactctggagcctgggycctatcctgccacaccctctgagaagccactttagggctcagggtgtccatggcagaggagcaggtgttgaaatcactgtggcagctgccctgactgcaggtcccccacccggctgcatgttggttgttgataagtctcaggtgtcagtgtttcttctgaaccaagaaaggcttcactaagcctcaggccttaaaaagggaccagtgcagcctccttttcaaccacatcaaatctgattcagctgcttgggtcccggaacctcctcagaatcctgtactttgtgtgtttatattttttgtgggtttctacattcacaagatgggggaggcttagtctgaagtaaactcccgagctcctttctggctgtgaaattcta

SEQ ID NO: 605364 - DNA, 586 bp, Homo sapiens
catgtataaaacaggtttataatcatacccatttcactgaggtattgaacaagctgaatgtgtgaaacatgataaatgcagtacctggctcttcttacggtttcaataagagatggctatmttttttgtcccagagtccccatggttacttggcacagcctctctagaattgggacgtggtaattgagagaaaacaaagtttttgagtccgctctcttatcagcaggcataggaggaacagtggtttgaatgtcagctggtatgcagggggatagtcagtgtgccagtgggctgcccatccctgcagctgctcatggtagggtcatcagtctggaagtcagctgcagctttggaaggatctgcatgctgtaatttgtctgcctggggcaaaggcacaccaagggctgtagctaaagatgccccagcagggtcctctctagatctcaaaggaggaaggagctgaggtgacttcaccctaagctatagatcagggactctggagagtggcctgtcacccagatacacctggagaaaaaccagccacccaacctagccagtcctcagactgagaaaagcacgtaaaaga

SEQ ID NO: 605365 - DNA, 601 bp, Homo sapiens
ctgccacatgcccgacccacccatctctgccaggacaggtgctgtgcatcacgggctcccctcagaccttgggtgactaatgatattggttacactctgcctgctggagcaggggttctcagctcgggggaatttggctccccagaggatagttgacaatgtctggagacattttgatttcacgactgggaagtttctactggtctgtagtgggtacgggccagggatgctgctgaaaagacaatgcacagagcctcctgccacagagactcatctagtccacgtgtgaatcgtgctaaggatgagaaaccccatgctggactaatggcaccagacctgcctcggggctcctcccgtgcctcagtccctaggacgcacgccctyacccgtggcccaggcctcaccgacctgtggtttgccaactcttgggatcccattcttctacagtttggcctgttccacctccacccaagacctcattcggacaaatagtaatttgtctgttattcatctacagagtatgtactctgtgcctgacgctatgctaagacccttatttcactcggtctgcccaatgacccagtgaagtattgttggttat

SEQ ID NO: 605366 - DNA, 599 bp, Homo sapiens
gctgcctttgttagaaagaaatgttttgagaggccgaggcaggtggatcacctgaggtccggagtttgagaccagcctggccaacatggtgaaaccctgtctctactaaaaatacaaaaattagtggggcgttgtggcaggtgcctgtaatcccagctactcaggaggcttgaggcaggataattgcttgaacccgggaggcggaggttgcagtgagccgagatcatgccactgtactccagcatgggcgacaaagcgagactctgtctcagaaaataaatacataagtaaatattaaataataaaataaaaattgaaaataaaagaaatggcttattgkgctgttttttgttaaaagaggattctgccaaagattcttgccctatctgcttggttgattcatttatttctcctctttcattagtgcagtaaaagtaaaaattttcatgactgaaattataaattcagaattagagtaagaaatactttaaaaatatctgattaattttgtctaaaattactataattaataaaccttaagcatttaaatttaatacaatttattttcaactcattgcccaagtccatattactgaatt

SEQ ID NO: 605367 - DNA, 501 bp, Homo sapiens
aatagccaataatcatgtagaaaggtgctgagcatcgctagtcagcgggaaatgcaaattaaaaccaaagtgagacacaccacacatttactggaatagctaaaatttaagaagactgacaatgctgtttgtgaggatgtggaacaatgggaaccatcacttattgcaggtggataaataaaattgtccggccgctttgrtaaataaacatctcagcagtttctcatatacacttaaacatgtagccaactagcgaagaaggagataaagcagctgagggaatgcctcccggataagaagaaaaggaaagcgatcttgtctaaattactttcaacatgatacctgtagcacatggctttatttatgtgaatttttgctaggtgtatgctccttatccatactttgttattttttttttttttttttttgagacggagtctcgctctgtagcccaggctggagtgcagtggcggatttcggctcactgaagctccgcctccc

SEQ ID NO: 605368 - DNA, 574 bp, Homo sapiens
cattaagaagaacatacactataaaatgttttttaaatgttttcatttaatatttaatgaacaaatacaagcactatattttacctcaagcaatataatataatgttcactaaaacttcttttatataaaaatcttgttagccttttctacagactctggatttgacaaaatgtctaatctaaaagagaaatgttgaaataatttagtaaaataaaaaatataattactcaagagctcagtaatccctaaaaatgttaaagggaagcctatattttgttataaaaataaaactattgcaagtatatagagttgtccaaaaagtttyggaatatttatctcatctggactttttataatcaaaggtagtcaaaaaacagtgtactgtaaatatagtgatcaaaacatcacaatattataaattgaatacttcctaaatccaataacattttctaagacaacttaatgtgtaccgtttttggttgcttgtttctcaagggagacgtggaaattattcagtaaatgcttgctaatattgggatttgctttttatatattctttgttgtgagcaatgt

SEQ ID NO: 605369 - DNA, 604 bp, Homo sapiens
cctcacatacgtatacactttctatattcaagcttctaaacttatgtattactggtcaagctacccaagcatatattgtttcttggcctcaattcacaattcctgggaaaattactcactggataaaatgtagtcagggttcctcctataggtcaagtaacaatatctaaggaaggtaatcatattgtaaaaacatagttggccataaatttctccatgtccacatcatcatgcatgtggaaggtggaattcctaagattatcattatgtggtagatmagccattatattaatctaacagtaaaagtaatattggacacgatcattacacatattcccacacataaagttaaaaggtataatgaagatatcaaattattttgggtggacttcaactctttctcttttgacatcagaaagggagaaggaaaccctttctctgtttatttcccaaagggaagtcaaatagacaaaattatgaatatgcaaaatacacttgatcaaaacagaagcacacagagttaaacaataaaactacatgtaactacatacacaaaaaaatccatggcagcaatagtaatagtttgtagtgtttatttgtctct

SEQ ID NO: 605370 - DNA, 382 bp, Homo sapiens
gcaccaccacaccagtcttttttttttttttaactttaattccagggatgcatgtgctgaacatgcaggtttgttctataggtatatatctrccatggtggtttgatgcacctatcagcccgtcttctaagttttaagtcctgatgcattagctatttgtcctaatgctctccctctccttgcccctgtcccctgacaggcccaggtgtgtgctgttcccttccctctgtctatgtgttctcactgatcaactcccacttatgagtgagaacattcagtgtttggttttctgtgttagtttgctgaggatgatgacttccagtttcatccatgtctctgcaaaggacatgatgtcattcctttttatggctgcatagaattc

SEQ ID NO: 605371 - DNA, 538 bp, Homo sapiens
atctgcattcctatgtttgttgtgcaccgtttacaaaagctaagatttggaagcaacctaagtgttcatcaacagatgaacaggtaaagaaaatgtgacacatatacacaatggagtaccactcagccttaaaaaagaacgagatccattcgctacaacatgaatggaattggagatcattgtgttaagtgaaaaaagccaaacacagaaagacagacctcacattttctcacttatttgtgggatcaaaaataagtactatgtgggctttaaaattcaattgagctcatggaccagtaaaaggatggttaccagaggcttagaaaggtagcagtggagtgggggtcagtgggmagatgattagtgggtacaaaaaaccccagaaagtataaataatacctagtatttgacagcacaacaggatgactgtaatcaataataagttaattgtacattttcaaataactaaaagattgtaattggattgtttttaacacaaagataaaatgcttgaggggatggatgtccattctccatg

SEQ ID NO: 605372 - DNA, 476 bp, Homo sapiens
ataccaaacaatactaagaatcactggaaactattacgaacaattatatgccaacaaattgggaagtctagaaaaaaatggataaattcttggacacatacagtctaccaagattgtattatgaggaaatagaaatcctggacagaccaataatgaataatgagatccaagtaataagaaaaattgaactatgaaataagaacccatgcctggttggcttcattgatgaatttttaccaaaaattttmagaaaaataaataccaattatcctcatactatttcaaaaaattgagaagaagaaatcctcccaagctcattctatgaggctagcattaccttgatactcaaatcaaacaaggacacaacaaaaaataaaactatagcccaatatccctgatgaacataaatgcaaaaatcctcaaaaaaacactagcaagctgaatccaacaacacattaaaaaattacttgttttga

SEQ ID NO: 605373 - DNA, 540 bp, Homo sapiens
tccatgtttccttgtatctttgtatgttcaccgagtttttttataagttggacatttggaaaaatagtcacctcttccaatctttgcagaccggctctgtgagggagagaccttcattaatctgactggcataaatacttaaagtcttctcaggaattttctggacatatatcttccctgggcctatgcatgcacattttccccatattgccctcatacaaagctgtatttaatgtcttaaaattgctacatgcctcatccctgcctcttctcagggccttggatattctactctatttgtctttctgcaatttcttgttcccagtgcccacagtgattcagtctcgctaatgtttcwgcatgtcacagagcccactatagatttcagaggcctgcaatctgagatcctaactatgccacgattcctgtttgagctctgagtcaggcaagacagaatcccatactctgggagccgatggacaagacaaaacactgccaccaatttcttctttacttacttctatcccaagggagtaacta

SEQ ID NO: 605374 - DNA, 550 bp, Homo sapiens
tccatgtttccttgtatctttgtatgttcaccgagtttttttataagttggacatttggaaaaatagtcacctcttccaatctttgcagaccggctctgtgagggagagaccttcattaatctgactggcataaatacttaaagtcttctcaggaattttctggacatatatcttccctgggcctatgcatgcacattttccccatattgccctcatacaaagctgtatttaatgtcttaaaattgctacatgcctcatccctgcctcttctcagggccttggatattctactctatttgtctttctgcaatttcttgttcccagtgcccacagtgattcagtctcgctaatgtttctgcatgtcacagagcccactatagatttcagaggcctgcaatctgagatcctaactatgccacgattcctgtttgagctctgagtcaggcaagacagaatcccatactctgggagccgatggacaagacaaaacactgccaccaatttcttctttayttacttctatcccaagggagtaactaaaattggggc

SEQ ID NO: 605375 - DNA, 649 bp, Homo sapiens
ttggtgccttaaatgcgcaatattaaataatttgattccatcagggtaaatctatcagttgaataaattcaaactttataaaattccagaaacaatgctgcttcaggtacggatgattaagctaatttaacaactgcataatacagagaaaaattatcttcctttcagcattttctcctattagcttgatacaatctataaagtaaactaattgctgagtatatgtcaaatagaaagatggaacatccactactttttcccagtcttagtacttttaaggccaattcatgtggcattaaactgtaaaaaatctttccaagggggtggatacagattaacaaaaatttaggaggcaacatgttatgccttcaagagtgaaaataatcattctgccttaaaaaattatgtctttgttgattttcctcaccatttcccatccctaagcgtacactgaaacactaacatctctccctggatttacacaaaactaatatcagcattggttattctcctcatggaagttamacctagagacagaagcaaacacttttcctctagtgaattcttccccttaaatgtaatggcaggttccaatttcttccgcatattgtgctaaagtaagtgatttcaatgtggggtcccaaaggct

SEQ ID NO: 605376 - DNA, 284 bp, Homo sapiens
aacaataatgatctcgggtaaaacaaacagtgaaatagcaactgattatacttctcagcctgtttagttgacatcaacagatacatatcattaataattgaaataaactgaatgyttccttgttaaatctgggttccataactgaattcgtttcacaacacactgaatacaaaacaaacaaacaagcaaacaagcaaacaaaagaccatttagtcttcaggatcacaataggaccatgtcacaaatgatttcactgagtatctgaactgcctactaaaaaggcc

SEQ ID NO: 605377 - DNA, 284 bp, Homo sapiens
aacaataatgatctcgggtaaaacaaacagtgaaatagcaactgattatacttctcagcctgtttagttgacatcaacagatacatatcattaataattgaaataaactgaatgcttccttgttaaatctgggttccataactgaattcgtttcacaacacactgaatacaaaacaaacaaacaagcaaacaagcaaacaaaagaccatttagtsttcaggatcacaataggaccatgtcacaaatgatttcactgagtatctgaactgcctactaaaaaggcc

SEQ ID NO: 605378 - DNA, 483 bp, Homo sapiens
agcctcactgctggggtggtgaactgcatgtgtcagactattttagcttaatgtcattaacactaaattcttccaatgacccttgttctgcttccactttcaccaatcaacctctgacccccccccccaattggtctgctcacatagtaaaaatgatcacataaaagaggcttgtgattcaaatgtaactttttatgtgataaattcattgacagaatgcacttatcctatggcatctaaagaaggagtgtatgaaattaatgagcatgattctccttttgtttatccttacagcaaaaacactctgtggtgtggtgaccaaccatcccaatttgctcrggactgaggcagttctccaaatgtgggacttctgtgcctaaaccaagaaagtgttgggcgaccagaaacaggtgatcaccctagctactacatggcagatgctgtgataagtgctaggaatttttaaataggtattatatatcc

SEQ ID NO: 605379 - DNA, 641 bp, Homo sapiens
atccgtgtgacacaattctaatcaaatgggtgggagcaaatgtttttcttcttgtgcattacccagaaaatgagtgagtacctcctcccctgatttttttcctacttcccccatcaaggaatcagtgagaactgtttcacaactttgactctcaaaatggaaacttcatggtaaatatggaaacgttactctaaaagctctgaattatctacctctggactgttttagaaagaaaagaaaatctatctatctatctatcttgcataaactgttatatttaaggtctctttattataaaagattggactatatccaatccaaaccagaaatttgtactggaagtagcctgctgttctcacaaaaccctaaaatatatggcactggcttagcagtaatcaggaggacactgtaattatgggttggaagttgcttgtgataacttgagaagyagactgtgccaacaaacaaataataacagaccaagcctgggttttcatatagacaaaaaaaaagcacagtaaaatgctggagaaaggaaaagccgagcacaaagaccactaaataagtgaaagactttaagttgaagaactatatccagacataatttgcatcgatgactccttaccatggaaatgaaagag

SEQ ID NO: 605380 - DNA, 378 bp, Homo sapiens
tatcacagtgaaataggataggcccactgagtgtttgttagacaaggtaagcaaggaattcgtggaaataraaaattatgtaaaggaaaagagttgactggactgcaaaccagggttcagaacacaggtataatatttcatgggactagaacattttctggaagttaaggctgaaaaagaaatgaaaggagaaagcaagagtgagagtgagacaggagaaagatggaaggaaggaaggaaggaaggaaggaaggaaggaaataaggaaggaaagaaggaaggaagtcacccttaggaaataggaaaagtgtgtacgtactgggcattgagaaacaatggctgagcataagagttgagactctgaaactcaatttgtgg

SEQ ID NO: 605381 - DNA, 593 bp, Homo sapiens
ctggaaaagtaaaactaatgatggaggaagtaaattggcataaattcaaaattcatgggccctttcaaaaataccaaagttttggtgagtggcttcatctctaaatgacagtaagtggactgatagtcacacgtgaatgtctgagtagattttgcgtgctctaatgtggacattttatgaagaagctcatgactttgtgatcstttgtgctatggaggaggttggagaattttctgtatacataaagcatttctccttaactaagcttcaacaagttcattaaccaacatcagttgaactgatttttgagaagtgaacctcagggactaccaacggcttggagtgaaggcctagagctatgatcacgttctagtcagggtatgaatcagtgtggaaccacagctgaaacatcacgcattttaatagacccattgcatgaggattttatctcaataataaataaaattattaatagacgtgagctgtagatatccatgagaagccaaatggttagaagggcaactatcagttactcttaggatgcccttgcccaccaaaaatgtgagagtggggtgaggaaagagaaaaagaga

SEQ ID NO: 605382 - DNA, 640 bp, Homo sapiens
ctagtcagggtatgaatcagtgtggaaccacagctgaaacatcacgcattttaatagacccattgcrtgaggattttatctcaataataaataaaattattaatagacgtgagctgtagatatccatgagaagccaaatggttagaagggcaactatcagttactcttaggatgcccttgcccaccaaaaatgtgagagtggggtgaggaaagagaaaaagagaggaagaaataaaagaaaaagagattggatccactagtatggatccactaacctagaattcaatcagtgaaattatgtgattaatgtcttcaaggtcacttaaaaatagtgtgtattcacttaggattttctaatgctgaaaaattatctgttatttattaccacataatgccttgaagatcttaagtacatttttattgccattaaataatttgcctaaaatttgcctcaacaaacaaaggtaagtgtattagtctgttctcaccctgctatgaagaaatagctgagactgggtaataaataaagaaaagaggtttaattgactcacaattctgcaggcctggggaggcctcagaaagcttacaatcatggtggaaggcacctcttcacagggtggcaggagagagaatgagtgcc

SEQ ID NO: 605383 - DNA, 640 bp, Homo sapiens
ctagtcagggtatgaatcagtgtggaaccacagctgaaacatcacgcattttaatagacccattgcatgaggattttatctcaataataaataaaattattaatagacgtgagctgtagatatccatgagaagccaaatggttagaagggcaactatcagttactcttaggatgcccttgcccaccaaaaatgtgagagtggggtgaggaaagagaaaaagagaggaagaaataaaagaaaaagagattggatccactartatggatccactaacctagaattcaatcagtgaaattatgtgattaatgtcttcaaggtcacttaaaaatagtgtgtattcacttaggattttctaatgctgaaaaattatctgttatttattaccacataatgccttgaagatcttaagtacatttttattgccattaaataatttgcctaaaatttgcctcaacaaacaaaggtaagtgtattagtctgttctcaccctgctatgaagaaatagctgagactgggtaataaataaagaaaagaggtttaattgactcacaattctgcaggcctggggaggcctcagaaagcttacaatcatggtggaaggcacctcttcacagggtggcaggagagagaatgagtgcc

SEQ ID NO: 605384 - DNA, 633 bp, Homo sapiens
gtcatgggagggacccggtgggaggtaattgattcatgggggcgggtttttcccatgctgttctcatgatagtgagtaagtctcatgagatctgatggtttcatgaagggaagttccccttcacacactctctcttgcctgctgccatgtaagacattactttgctcctccttcaccttccagcatgattgtgaggcatccccagccatgtggaactgtgaatccattaaacttctttcctttataagttacccagtctcaggtatgtctttattagcagcatgagcacagtctaatacaccatccataagtagacaactgataatttttttattggtaagaagagactaggcttttctttagtaataaccaagcccataatatcccaatggtttaactcaatagatatttctctttcacagaatagctggggtgtcagctgtcttcgtggtcactcaaaasaagtagtaaattacattgtctcttaaagcatctttgtggaaataacatatatatcattgtttctcacattttattgctatgactttgcttacaacaagggagcaggggattgtgatcccgcataaaaaaagatgagatatttgtgaataactgtaatactgtcacaacctt

SEQ ID NO: 605385 - DNA, 447 bp, Homo sapiens
aaagagaaagactgaaaagaagtgaaaaattattgatatatcttaagaatatttttataatatggaaaaaacacagacattaattataagttaaagataattttgaagagctagctgttggttgaatattcagaaacagaatttcaaggaaatcttaaaatttgcctatcaagttgttgttggatarccttagaaggtttatatttttgctctgggaagaattgtaaataaggtgaaacagaggcacaagtataaagataaaatgtatggcaagtttacaatagactcacatgccccagtgaatttctcttgaacacatttaggaactcaagtttgcaaccagcttttgtctcctgtcatttctttctctttgcttttttcttctcttctctttcctcctactccttcctcttcttgttcttcatcttcttattcttcttcagtaga

SEQ ID NO: 605386 - DNA, 628 bp, Homo sapiens
aataaaaaagcaattaggaatcagtttgcttaatataaaagatttaatgaagtgaagtgaaatagacagtacagaaagtaaataaaagagaaaggagtcttaaggtgatrcacatagattttgaactctccaagggtggatatctggatgtagaaagagaataaacagtcagttgttgaaaagatttagatttattttttaaaataaaaatttcccctttaatctgataaatagtattacttaaatattctgcatttttaggaaaaatgaagatatatgggttttcaatatgtgaaatatttgtaaccattttggacatagctaaaatttttcaagagccagattatataatttcttattcagtgattttcaaatgaattacctggctttatgtatattgtggttttataaaatgaaattgaattacttaatgtttaaggcattctttatagtcatatacatttatttatttattgtgtttaatttctaggtgttgtagtaacattagcctgtaccaaaatcagtcttcagttagaaaaaagcccttattttgcttattcagtttattttttaatctctttacttaaaaaaattgattgttagcctatactattacttttccagagag

SEQ ID NO: 605387 - DNA, 620 bp, Homo sapiens
agatgtacaatcattgtgtcacctaaaaataaaaggggtaaaaatggaaagaaaatgcattaatatacagcctcttgatcgtggaaataatcagcagactaatgtaacaagactcagcaacagaagaattaattaggctgaaattgattaaagaaaagggggtaaaaatctgtctgggataattcaggtttcaattaaacttaagaagaaagaagaaaaatattcttttgttccattattgttttgacagcattatatggacttgtccacagaatgttaatcaaattagattttttttttttttaaagaaggaaggggtttattcggccgggggcattggcaaggcttctgtctcaagagccaagcaaattagattttgttgttgtygtttggttagcctttgtgtgtgtgtgtgtgtgtgttttcttcctctttaataataggatagtaaatttcaactgctaacaagtcattaggggtttgctaacttcaggcagcaacctttcatgaaagctgttcttaccataattgtcgtgaaatgttactgttaccacctcatgcccagccagctattgttgagacaccactgagttttaaggtacatcaaatatgggaaacac

SEQ ID NO: 605388 - DNA, 620 bp, Homo sapiens
agatgtacaatcattgtgtcacctaaaaataaaaggggtaaaaatggaaagaaaatgcattaatatacagcctcttgatcgtggaaataatcagcagactaatgtaacaagactcagcaacagaagaattaattaggctgaaattgattaaagaaaagggggtaaaaatctgtctgggataattcaggtttcaattaaacttaagaagaaagaagaaaaatattcttttgttccattattgttttgacagcattatatggacttgtccacagaatgttaatcaaattagattttttttttttttaaagaaggaaggggtttattcggccgggggcattggcaaggcttctgtctcaagagccaagcaaattagattttgttgttgtcgtttggttagcctttgtgtgtgtgtgtgtgtgtkttttcttcctctttaataataggatagtaaatttcaactgctaacaagtcattaggggtttgctaacttcaggcagcaacctttcatgaaagctgttcttaccataattgtcgtgaaatgttactgttaccacctcatgcccagccagctattgttgagacaccactgagttttaaggtacatcaaatatgggaaacac

SEQ ID NO: 605389 - DNA, 566 bp, Homo sapiens
atgttaaataaatatttggagtattaataatatagcccctgagagtattagattactaatagaggtaagggctacttttgggaaagagttaacaaacactactagaggaaaaacctcacctcctttataatgttaatgctataagtttcttttatggaatcaggcattcaaaaagcaccagtaaaaatgcaaatacgttgcccacaaggcataatatatcaagtcactaacatccactctcaaagaacagacaagcttgaatgtmaagttaagtttagatgatatagtttccccaagtataagccaatgcccagtgagaaaaaaaagtagtggatatcccagtgaaaattaaatataaaagttgaacagagtaagcaatgaaaatgtcatctatttcaaaatagggtctgaccatgtctgtagagaaagcaacacgtgctttgaaatcatgaacgagtaaggaatactatcctatagggacaaagaggtttaggaaaaaaaaacttgaaaaataataaaacaaaaaggataaaataaccattgccctaaagctcagtgtagcaaat

SEQ ID NO: 605390 - DNA, 520 bp, Homo sapiens
agaattcactgttagcaggactaaatagcttgctaacagtgggccaaacactctacactgcatgtctctcattcacagggaccagtamtatctgccttgtctctcctctccttttcagaagggttctttcttaagtatctgtatgtcatgccaatatgcacttaaaataatgcattgcacaaccatgacccccaccctgagcacacaagggaaggacgaatttaagtgatattgtgccctaaaagattgaaatatgaggcttttaaattgccagtgtaaactaaataaagcgtgatgacaagtgaagacaaattcattttacaattcaattttactttttcatttctctaaatggcactattccccagatattccagtattaagacaggtattattttagtcagcagcaactgggcttgacccatttagattgtcacttccagacaagctaatatcattcttagcttggacccaaaacaattgattattccagataatgaaattttctctggtatgaagg

SEQ ID NO: 605391 - DNA, 571 bp, Homo sapiens
gctcttgctcatagtaacaaagggatggccttagatggaaaattcaatgttttacacttcaagcttctgatttttttcatcattctaaaagaaagaaaagaatatcttagggttgcctgccagagtaaatctccatgtttattttctctaattaataaaataagattcttttccaattgaataaagtaaaacaaacctcttgsttttaatagcaagtctcacctccaccctctaatgagtctagtgcctcaagtgcaaaacacatgtaattttaccattctagacagtaaaacttcaggtttctgccaatgggaaagacagaatcacctgactatgggaagttagggaggggatctggaaatttaaagacatatcacacatcccagttccagcctcaacttgtacacctgttcgtgcaggtaactggtcattcaaatttaagagagtcttctggagttttctgcttcagcaaaggaaacttgcttgtttccaatttccacctcatccccaacaacataagatttttcatgtctgttgactctgtcagcatgcatcatctgcttttcagttt

SEQ ID NO: 605392 - DNA, 571 bp, Homo sapiens
gctcttgctcatagtaacaaagggatggccttagatggaaaattcaatgttttacacttcaagcttctgatttttttcatcattctaaaagaaagaaaagaatatcttagggttgcctgccagagtaaatctccatgtttattttctctaattaataaaataagattcttttccaattgaataaagtaaaacaaacctcttgcttttaatagcaagtctcacctccaccytctaatgagtctagtgcctcaagtgcaaaacacatgtaattttaccattctagacagtaaaacttcaggtttctgccaatgggaaagacagaatcacctgactatgggaagttagggaggggatctggaaatttaaagacatatcacacatcccagttccagcctcaacttgtacacctgttcgtgcaggtaactggtcattcaaatttaagagagtcttctggagttttctgcttcagcaaaggaaacttgcttgtttccaatttccacctcatccccaacaacataagatttttcatgtctgttgactctgtcagcatgcatcatctgcttttcagttt

SEQ ID NO: 605393 - DNA, 534 bp, Homo sapiens
gaaaattcaatgttttacacttcaagcttctgatttttttcatcattctaaaagaaagaaaagaatatcttagggttgcctgccagagtaaatctccatgtttattttctctaattaataaaataagattcttttccaattgaataaagtaaaacaaacctcttgcttttaatagcaagtctcacctccaccctctaatgagtctagtgcctcaagtgcaaaacacatgtaattttaccattctagacagtaaaacttcaggtttctgccaatgggaaagacagaatcacctgactatgggaagttagggaggggatctggaaatttaaagacatatcacacatcccagttccagcctcaacttgtacacctgytcgtgcaggtaactggtcattcaaatttaagagagtcttctggagttttctgcttcagcaaaggaaacttgcttgtttccaatttccacctcatccccaacaacataagatttttcatgtctgttgactctgtcagcatgcatcatctgcttttcagttt

SEQ ID NO: 605394 - DNA, 628 bp, Homo sapiens
tcaatatggccttgtttctgaatgcgtatttgtatatatgtataygtatgagtgtgtgtgtgtatatatatatatattatatatgtaatatgtaattatattaatgtaattgaccaaatagagggcaagaaattaaactctggagtcctaaaaacctggttttgcttcaggccttgccaattaatcactggatgactttagaaagttaccaaaattgtttaagcctcaatcttagcattagaaaaatgggactagtaataatatctgctttgtaaaatttttgtgataatcaaatgagataatgcatatgccattgttgatataatgcatgattgcctagtaagctctcaataaacatataggttttatcagtgtcattattatattattatagattcaaacttttatctcccagccaatacaaacatccttgacttcttatttatcattacatgccctgtgcctaaacttgcttctatttttaagtgctttatttttctttttagcactgttaatattttaatttttataataattacattttatttgtattctcttattatatgaatcccatactggaatataagcacctgaaaaagtctgtattgctcacccctatgtcaccatc

SEQ ID NO: 605395 - DNA, 457 bp, Homo sapiens
catgacatatggctgcagtataagctactctgacacttggggattatgagctggaagttccaagtgtctgtggtagatactgtatagcaggagtcaatattagaataatagcccagtgtctgaggcatttgtargaaggccatatcctattctgacaataaattttgttcattaaaagcagttcttcgtttgctactggaacacaaagtgactatgcacccccaattgcccattatgaactgaatattatctgatctacccaaccataaaattgaatgtgcatagcagcattctgctgtaaaatggaaatggtatgtaaaagacggagactgagcaggatcagaaggaatgagtaaacagcactggcaggtggctcagacttcatatctgcttcctctgctgtgctggttcttcttcaactcatacctttggtcccatacaaagtcaaagttaccta

SEQ ID NO: 605396 - DNA, 520 bp, Homo sapiens
tttttgcttaaagtcttttgtatttaagtatgattaatcctgtttgcttttggtttccatttttttttcatcccttcaatttcagtctgcttgtctttaatggttaggcaagtctcttttaggaagtttagctgggactttttttattgtttcagttactctacatcttttattagagaacttaatccatttacatccaaggttattattcataggtaaggacttacttttgccatttwaaaaaaattattttctagttgtcttgtagattctatgtttctttctttatctcttgttattttattctgtggcttggtggttttccgtgatgctaagctttgtttcctttctctttcccattcatgtatctgctgtaatttatttcttggtagataacatgaaggtaacataacacatcttgtagttatcataaactatatcaagataacaaaaacttaactttgattgcataaaaatattctagatatttccctcctccctacaacttatattttggttg

SEQ ID NO: 605397 - DNA, 477 bp, Homo sapiens
cacattttcacggaacaaatatccagtgtccagagagacattttaaatttcatgacttgtactttaaaatcaaatgagacagtttcttgaaaccttagtgaaaggagtcaagatgtcaaactacttttataattaatctcaggctcatgctttaaaagctgcttgttccacaaagtacaacagcatataaataaacagttcaagtagaaagatctcaatcatatttatgaaatgtctgcctttgagttaattacataacactgttcagatttagtagtgggraaatatctcactggtttctgtagggtgtctctttacataaaggaaaataatgaatatattaagaaagtgctttggaaagtggtaaagcatgcatcagttaatcagaataatctataaatggccttattcaacattcatatttataaaatcaaacacaaagttaaataccatcatgaaatcaatttttgatgccgg

SEQ ID NO: 605398 - DNA, 623 bp, Homo sapiens
attgtaatagtcactatattttgtacatcatttaaaaatgctcccgcataaaggttagaactccaatttgcttgtaaaagaaactgaggccaagaaaggcttactaacttgtttaacacccggaattcaaaccaagataaatattgttgctaagctttttcaggtatactgatwgcatatagctacacttcaagaggaaatatctaatttaacaaacctgttttcataatagagaggtaggagaaatcattcttgtagtcatctatctttctgttctgcttcactcaccataattaaaaatacaacttttcaagatagagcactgatcaaatttaactattaataatccactccactgtcatttttagaaaattaaccatacaaatgaaaccaaccttagaattcttatgagtttagagaactagctatactagttattgttttatttttagataaactattgtcacttttaaaatatcatgtttcctacaaatgcagtatttaaaaataactcattagctatggtttataggttctatgtggacttgtcaataaagatttaacttatgaaggtaataattatagccagaaggatggttgtggttgacatcatacaggacaac

SEQ ID NO: 605399 - DNA, 499 bp, Homo sapiens
atctgcttccctgtatttttgaccaaatgaaaacaaagaatagagattgctcatatgaagaatagtaatttcacttcacattttaactcacagtaaccctaatgaattcttgttattgaactgatagatgatcaattttytgagtcagagaagcagttcaaaagtagttcttctacttacaattacttccctaaatccccatcgtgatcatttaggctttctttttttcccttttcttctagaaagaaatgagtcttttgcacaaaaataaaggcctgctttatcctcataaaagacatttgcattttggatgcatgggcataataatgatggggactatattaaatatgcactacccatgtaaatagccaacatttctcctatattttcctaatgccataagcaggaattcacaaagactagatttttcatggtgctgacaaagtgaacttgagcagtaggaaacctgaaaagctctaaccacagtggtactttatat

SEQ ID NO: 605400 - DNA, 499 bp, Homo sapiens
atctgcttccctgtatttttgaccaaatgaaaacaaagaatagagattgctcatatgaagaatagtaatttcacttcacattttaactcacagtaaccctaatgaattcttgttattgaactgatagatgatcaattttctgagtcagagaagcagttcaaaagtagttcttctacttacaattacttccctaaatccccatygtgatcatttaggctttctttttttcccttttcttctagaaagaaatgagtcttttgcacaaaaataaaggcctgctttatcctcataaaagacatttgcattttggatgcatgggcataataatgatggggactatattaaatatgcactacccatgtaaatagccaacatttctcctatattttcctaatgccataagcaggaattcacaaagactagatttttcatggtgctgacaaagtgaacttgagcagtaggaaacctgaaaagctctaaccacagtggtactttatat

SEQ ID NO: 605401 - DNA, 499 bp, Homo sapiens
atctgcttccctgtatttttgaccaaatgaaaacaaagaatagagattgctcatatgaagaatagtaatttcacttcacattttaactcacagtaaccctaatgaattcttgttattgaactgatagatgatcaattttctgagtcagagaagcagttcaaaagtagttcttctacttacaattacttccctaaatccccatcgtgatcatttaggctttctttttttcccttttcttctagaaagaaatgagtcttttgcacaaaaataawggcctgctttatcctcataaaagacatttgcattttggatgcatgggcataataatgatggggactatattaaatatgcactacccatgtaaatagccaacatttctcctatattttcctaatgccataagcaggaattcacaaagactagatttttcatggtgctgacaaagtgaacttgagcagtaggaaacctgaaaagctctaaccacagtggtactttatat

SEQ ID NO: 605402 - DNA, 620 bp, Homo sapiens
gtaattgaaacttgcccaattgtgcatggactaacctaacttcagagtagcacaattcatcttagtcagtatttcaatcaaataaccaagtttcagtaaacagcaagagcctttactccatgtattatcagctttgatgtcctgaatgtgtttctgcttttgcaaatgatggtacatgtaaatagcattctggcagattctgattacgaagtcaggcaggcagaaaaattcatttatggttaaaagaacagcaaatgttagaattctcagtcttcggcaaaacartaatcattttacctacagctaagttatccattgccatgacatacattttttgcaagttaattttttatgattcttttgattcattccttttttaccagaacactgtttttcagctatcttcatttacattctattttctgatattgggatcttgtgtgttaaactaattacactggagcagcaagttcacttaaaaatgagaaatacaacttccataattgcattttctatgtgaatggtatgtaaattttctgccatgatccctgagtatgtgcattataaaaatttcttttaacttttgagtgacaagccagaccaaaaatataaataaataa

SEQ ID NO: 605403 - DNA, 599 bp, Homo sapiens
taatgaaatatttcacctttcttttctgctaagtctttaaaatgcagtgcatagtttacattttagtttggacaagctacttacaaatactcaacagctgcatgtgagttaaagctaccgtattgaacagcacagttctggacgtcttaagatagttyataattgccattctgaacagaatatttttattttattatattttcttggaattctttgtttcacatgatagctatttttttgtacactttgtgtttttttatttttgtattttgtgggtacatagtagacacatatttttggggtgcatgggatattttggtgtaggcgtacaataatcacatcatagaaaactgggtatctaaccgctcaagcatttatcttttgtgctatcagcaatcccattgactcttttagtcattttaagatacacgactaaattattattgactatagtcaccctatagttgtcatcctatactgtactattgtacaatcaaatactgggtcttattcattctttctgtttgttgtttctacctgttagctatccccacttcttcccccacttcctcactacccttcccaaactctagtaaccg

SEQ ID NO: 605404 - DNA, 457 bp, Homo sapiens
gttcataattgccattctgaacagaatatttttattttattatattttcttggaattctttgtttcacatgatagctatttttttgtacactttgtgtttttttatttttktattttgtgggtacatagtagacacatatttttggggtgcatgggatattttggtgtaggcgtacaataatcacatcatagaaaactgggtatctaaccgctcaagcatttatcttttgtgctatcagcaatcccattgactcttttagtcattttaagatacacgactaaattattattgactatagtcaccctatagttgtcatcctatactgtactattgtacaatcaaatactgggtcttattcattctttctgtttgttgtttctacctgttagctatccccacttcttcccccacttcctcactacccttcccaaactctagtaaccgtccttctactct

SEQ ID NO: 605405 - DNA, 599 bp, Homo sapiens
taatgaaatatttcacctttcttttctgctaagtctttaaaatgcagtgcatagtttacattttagtttggacaagctacttacaaatactcaacagctgcatgtgagttaaagctaccgtattgaacagcacagttctggacgtcttaagatagttcataattgccattctgaacagaatatttttattttattatattttcttggaattctttgtttcacatgatagctatttttttgtacactttgtgtttttttatttttgtattttgtgggtacatagtagacacatatttttggggtgcatgrgatattttggtgtaggcgtacaataatcacatcatagaaaactgggtatctaaccgctcaagcatttatcttttgtgctatcagcaatcccattgactcttttagtcattttaagatacacgactaaattattattgactatagtcaccctatagttgtcatcctatactgtactattgtacaatcaaatactgggtcttattcattctttctgtttgttgtttctacctgttagctatccccacttcttcccccacttcctcactacccttcccaaactctagtaaccg

SEQ ID NO: 605406 - DNA, 583 bp, Homo sapiens
attgaatgtaaagggactaaactctccaatcaaaccataaagcggcagaatgaatgaaaaaacaagacccattaacctgttgcctacaagaaacacacttcacctataaagacatacatagactaaaaataaagggatggaaaaagatattctatagcaatggaaaccaaaaaatagcaggagcagctatacttacaacagtccaaatagatttcaagaaactaactataatgagagacaaagaaggtcactggataatgatraaggagtcaattcaccaagatgatataacaattttaaatatatatacaacattggagcatccaaatatataaatgaaatatcattagaactaaaaagagagcggggccccaatgcaataataactagagacttcaacaccccactttcagcattagacagatcttatagatggaaaatcaataaagaaacatcggaattagtctgcacatagacccaatggatctaatagatatttacagaacatttcatttaacagctgcagaatgcaaattcttttcctgagcacatggattgctctcaggaatagaccatatgttag

SEQ ID NO: 605407 - DNA, 512 bp, Homo sapiens
tcgttcatctctgcatgaaaatggaggggcagtgaggctcttatttgaaggaagcaggtgcactggatacttggaattatacctgggtgtgaataggagagggagtcaatgcactaagaactccgcacaggaagggakaggtgacccaggtccctgatccagtcaagcgggtgtgttgaatgcttggaattatgcctgggtgtggagcggaggggaagcccttgcaccaagaactctgcatagaaatggaaggattactcaggctcttaatcctggcaattgggtgcaccaaatgcctataaatacatgccacagtgagaagtaaagtaactgctgcagtgtggattaattgctgctgcaacaaggtctttgcatggagagggaagggcaactcaggcacctattccatgtcaataggtgtgctaagtgcctggaaatatgtccagtcacggagcagagggggcatcgctgcaccaagttctttgccatagaaggaggatgtgccccatcct

SEQ ID NO: 605408 - DNA, 573 bp, Homo sapiens
cttatatctggatatctagatctctagcaaaaacagagaagtcgttcatctctgcatgaaaatggaggggcagtgaggctcttatttgaaggaagcaggtgcactggatacttggaattatacctgggtgtgaataggagagggagtcaatgcactaagaactccgcacaggaagggagaggtgacccaggtccctgatccagtcaagcgggtgtgttgaatgcttggaattatgcctgggtgtggagyggaggggaagcccttgcaccaagaactctgcatagaaatggaaggattactcaggctcttaatcctggcaattgggtgcaccaaatgcctataaatacatgccacagtgagaagtaaagtaactgctgcagtgtggattaattgctgctgcaacaaggtctttgcatggagagggaagggcaactcaggcacctattccatgtcaataggtgtgctaagtgcctggaaatatgtccagtcacggagcagagggggcatcgctgcaccaagttctttgccatagaaggaggatgtgccccatcctcccaatcctggtgagcaaga

SEQ ID NO: 605409 - DNA, 512 bp, Homo sapiens
tcgttcatctctgcatgaaaatggaggggcagtgaggctcttatttgaaggaagcaggtgcactggatacttggaattatacctgggtgtgaataggagagggagtcaatgcactaagaactccgcacaggaagggagaggtgacccaggtccctgatccagtcaagcgggtgtgttgaatgcttggaattatgcctgggtgtggagcggaggggaagcccttgcaccaagaactctgcatagawatggaaggattactcaggctcttaatcctggcaattgggtgcaccaaatgcctataaatacatgccacagtgagaagtaaagtaactgctgcagtgtggattaattgctgctgcaacaaggtctttgcatggagagggaagggcaactcaggcacctattccatgtcaataggtgtgctaagtgcctggaaatatgtccagtcacggagcagagggggcatcgctgcaccaagttctttgccatagaaggaggatgtgccccatcct

SEQ ID NO: 605410 - DNA, 630 bp, Homo sapiens
ctgcttataagtgagaacatgcagtatttggttttctcttcctgcattaatttgtttaggatgatagcctccagctctatctgtgttcctgcaaaggaaatgatctcattcttttttcattactacatagtattccatggtatatttatatatatcacattttatttattcagtctactgttgatggacattcagtttgattctagtttttgctattgttaatactgctctgataaagatatgcatgcatgtgttttatcgtagaataatttatatcactttgggtatatacccaataatggaattgctgggtcraatagtaattctattttaagttctttgaggaattgtcacattgctttccacaagagttgaactaatttacattcccaccaacagtatgtaagcgttcccttttctccacaacctcaccagcatctgttagtttttgacttttttaatagtagccattctgactggtttgagatgttatctcgtggttttgatttgcatttctctgatgattagtaatgttgagcattttttcatattcttgttggaaagtaatgttagaagcatattagaagttcatttttcttctattttcctttttacatatgcataagtgag

SEQ ID NO: 605411 - DNA, 630 bp, Homo sapiens
ctgcttataagtgagaacatgcagtatttggttttctcttcctgcattaatttgtttaggatgatagcctccagctctatctgtgttcctgcaaaggaaatgatctcattcttttttcattactacatagtattccatggtatatttatatatatcacattttatttattcagtctactgttgatggacattcagtttgattctagtttttgctattgttaatactgctctgataaagatatgcatgcatgtgttttatcgtagaataatttatatcactttgggtatatacccaataatggaattgctgggtcaaatagtaattctattttaagttctttgaggaattgtcacattgctttccacaagagttgaactaatttacattcccaccaacagtatgtaagcgttcccttttctccacaacctcaccagcatctgttagtttttgacttttttaatagtagccattctgactggtttgagatgttatctcgtggttttgatttgcatttctctgatgattagtaatgttgagcattttttcatattcttgttggaaagtaatgttagaagcatattagaagttcatttttcytctattttcctttttacatatgcataagtgag

SEQ ID NO: 605412 - DNA, 409 bp, Homo sapiens
gaattctggccatggaggctttcccctactccagaacaagtgctccaatatccagctggagactaaaatgcctgcagcagctgtcacttcctggtcaccaaactatgacttactttgtatgagtccatttgaaaatgacatcctcctcttagtcctgggtctgggaaaatgccttcagtgttttcctgtgtctttccctctcacattctcccaacctatccccaagttatctccaagacttaggagaaacaaggtgctctcctgtgacctgggtggcacagacccctactggaaaagtgaatcacagagggagtctctttgcytccatcatgtaactggagcttcattcacttttttcagtaatatgccatcatgcaggctgcttgccaaccttctcttctctgggatt

SEQ ID NO: 605413 - DNA, 575 bp, Homo sapiens
cttatagcctgttaaaccactttgttgcaagtaaagtcttttaaaaaccataatctgtgttttggctatcagaagcaaatgttattacatatagtccatcatgagaaaccagtgaaaattagtgggatagtctacttattgttttgttgtatgcctcttaaaaatataatgagtttcaacatttttataaatagtacattgtgatggttaattttagctgtcaactttattaggccacaggatgcccagatatgtcattaaatattatttctgggtgtgtctatkagggtgtttctggaagagattagcatttgaacttctggattaaatgaagcagatagccttctcaatggaggtaggtagcatccaatctgctgagggcctaaatagaacaaaaaggtggaggaaggttaaattccctctctgccagactgtttgagctgagacatcaatcttctcctgtccgtggcactcctagttttcagaccttcagatttagactggaatctacaccgctggctctctagctttcaggctttcaaattaaaccacaggctttcctcggtctctagatt

SEQ ID NO: 605414 - DNA, 565 bp, Homo sapiens
tagggattctgtgtgtatgtgtgtgtgtgtgtgtgtgtgtgtgtgtgtgtctctgtctctctctctctctctctatatatatatatatttttaatttttgggtatgtagtaggtatatatatttatgtggtatatgaaatattttaatacaggcatgcaataygaaataaacacattatggagaatggggtgtccatcccctgaagcattccccctttgaggtacaaagaatccaattttattctttaagttacttcaagatacaaaattcagttattatttactgtaggtaccctattatgctataaaatataggttttattcgttattttctcttctttttgtacccattaaccatccccacctcccctccaaacccccactagccttcccagactctggtaaccatccttctactctctatgtccgtgagtcaaattgttgtcatttttaggcgccaaaaataagtgtgatgtttgtctttctgtgcctggcttatttcacttaacataatgacctctagtttcatccatgttgttgcagatgatgggatctcatttttatt

SEQ ID NO: 605415 - DNA, 603 bp, Homo sapiens
ttagacccttacctcacaccatatacaaagataaattcaatatggaataatagtggaatatatttgcaaactctatatctgataataagttaatacaaaaaatgtataaggaactcaaacaattcaagagtaagaaagcaacctgattttaaaaagggcaagggaccaaaacagacatttctcaaaagaagacatacaggtggccaataggtatatgaaacaatgttcaacgtcagtaattatgatgggaattrcaaagtaaaatcacaagatatcacctcatacttgttaggatggctattatcaaaacaatgaacaataactgctagcaagaatgtggagaaaagaaaagccttgcacattattgataggaatgtaaattaatgtggccattatgaaaaacagtataaaggttcctcaaacaattaaaaatagtaccaacatatgatccagagttcccactactgtgtatatatatttcaaaggatatataatcatcagtatatcaagagacatttgaactcctatgcctattgcagcacatgcacatagccaaagtctagaatcaacctaagtgtctatcaacagatgaatgaataaagt

SEQ ID NO: 605416 - DNA, 442 bp, Homo sapiens
gtggtcatctgatcctgggcttttgttttttaagggttttttaaaaattattgatccccttattagttataggcctgtttatattttctgatacttcatattttaatcttggtagaatgtgcatttttagaaatttgttcattttatctatgttatctattttttgtatacaattgttcaaaatactttcttataatcctttttgtttctgtaaaattgatagcaatgtcctctcttcatttctgattttagtaatttgggtttccttcactttcttagtcaatctagctaaaggtttcttcatttagttgatttttttttatgaaatcaactcttgctttcatcrattttctctgatattttctattctctgttttttttttttactactgctctaatctttattatttgtttccttctggtagctttgtgttgaattctt

SEQ ID NO: 605417 - DNA, 442 bp, Homo sapiens
gtggtcatctgatcctgggcttttgttttttaagggttttttaaaaattattgatccccttattagttataggcctgtttatattttctgatacttcatattttaatcttggtagaatgtgcatttttagaaatttgttcattttatctatgttatctattttttgtatacaattgttcaaaatactttcttataatcctttttgtttctgtaaaattgatagcaatgtcctctcttcatttctgattttagtaatttgggtttccttcactttcttagtcaatctagctaaaggtttcttcatttagttgatttttttttatgaaatcaactcttgctttcatcaattttctcygatattttctattctctgttttttttttttactactgctctaatctttattatttgtttccttctggtagctttgtgttgaattctt

SEQ ID NO: 605418 - DNA, 579 bp, Homo sapiens
tattagttataggcctgtttatattttctgatacttcatattttaatcttggtagaatgtgcatttttagaaatttgttcattttatctatgttatctattttttgtatacaattgttcaaaatactttcttataatcctttttgtttctgtaaaattgatagcaatgtcctctcttcatttctgattttagtaatttgggtttccttcactttcttagtcaatctagctaaaggtttcttcatttagttgatttttttttatgaaatcaactcttgctttcatcaattttctctgatattttctattctctrttttttttttttactactgctctaatctttattatttgtttccttctggtagctttgtgttgaattctttttctagtttcttacattgtaagtttaggtttttaatttgagacttttcttcatcctttttttttttttcttagagacaggatcacactctgtcacccaggctgaagtccagtgatgtgatcatagctcactgcagcctcaaatgcctgggcttaagtgatcctcctgccccagcctgctgagtagctaggaccaca

SEQ ID NO: 605419 - DNA, 595 bp, Homo sapiens
tttttaaattttattattttatttttattttattttattatttcaaaatctaaattttaaataaggctagtgccttattttacatgttttataaacctgtaaaataaaaaacaagttagttactttgaagatataatgaggatacaggcattgggtaaatacatccattccaaatgggataaattggctaaaacaaagtaggtaaaggcctcayacaagtctgaaacccagcaaggcagtcattaaatcttagagcttcaaaataatctcctttgactccatgtctcatatccagggtacactgatgcagggagtgggctcccaaggccttggggagctctggccctgtggctttccagggtacagcccccatggctgcttttgcaagctggcattgattatctgtggctttttcaggctcacagtgcaagctgttggtggatctactattctgcagtctggaggatggtggcccacttttcacagctctactaggcagttccccagtagggactctgtgtggtggctccaaccccacatttcccctttacactgccctagtagaggttctccatgagggcccctgcaacagact

SEQ ID NO: 605420 - DNA, 574 bp, Homo sapiens
aaacaataagattgccccagagctgcagcaggcagctcaggagtgccaagtcacaatctacagccagcattcaaggggaagaggaacccatgctttcagagcattgagaggaaacatggctgcaactgtgaggaaacagggaagccacacaacaagcaagagtttaccaactgactaataagcctacgtgccacctgctggatcatactgtaaaggtttatcaccaaaaacacctcactaacatacctctgccgaaaccagagacaagaaggtagcttcaaataaagaccctgcacaaagcctaggcctggcaaaaaacatccagaaaagaagtctattgactacccaatctacactgcagctaaaacaacagccacatgtagagataagaaagaatcaatgcaaaaacacaaagaaatccctgtttgagggtctggagtgaatctccaggaaactccaacagatctgcagctgaggaacctgactgttagaaggaaaactaacaaacagtaaggaatagcatcaacatcagcmaaaaggatatccacaccaaaaccccatctgtaggtcacca

SEQ ID NO: 605421 - DNA, 582 bp, Homo sapiens
cactgcgttcatcccaggacatgtgggaactgtgggagttacaattcaagaggagatatgggtggggacacagccaaaccatatcagacttcatgaacaataaagtacaacaaaaacaaaggtaaatagatgtgacttaattaaattaaaaaacttctgaacagcaaaagaaataatcagcagagtaaccagacaacacacagagtgggagaaaatcttcatagtctatatatccaacaaaggactaatatccagaatatacaaggaactcaaacaaatcagcaagaaaaaaaacraataatcccatcaaaatgtgggataaggacatgaatagacaattctcaaaagaagacatacaaatggccaacaaacatatgaaaaaatgctcaacatcactaatgattagggaaatgcaaatcaaaaccgcaatgtgataccaccttacttcttcaggaatggccataatcaaaacaattaaaaaataatagatgttggcatggatgtggtgaaaagagaacacttttacactgctggtaggaatgtaaactagtacaaccactatggaaaacagtatggagattc

SEQ ID NO: 605422 - DNA, 550 bp, Homo sapiens
tatattgcttgatgaatttagtcaatctcatacacctacaatagatagttaaggctttcattatttagtttccctatcccagaagtaattggttttggtttgaaaagagtctcctaacatatgtttttttttaaaaaaaaaaaaaaaaaagaatgaatgagatcttaacagtaggatggccagcaagtggagatgacaattcttataatggggtgttaaaactatcattacctcaaatcaccttgccttggaacttcatattgtgcacatacacatacacaaatacatgtgtatgcatccatgtgtgtacatgtgattgtgaattaaattttactaagatttttttggagaagtagtgtgagaataatgcaagtattcggtaaaggcataaaattttaactagattaaaaaaataactctaggggaaatgttgagtgcagtgaggaggacaaaaaaaacctcataggagtgattatttaggaagctattatagttgtccaggtgaragatatggagagtgctatcataatgaaaatggggagtgagaaca

SEQ ID NO: 605423 - DNA, 550 bp, Homo sapiens
tatattgcttgatgaatttagtcaatctcatacacctacaatagatagttaaggctttcattatttagtttccctatcccagaagtaattggttttggtttgaaaagagtctcctaacatatgtttttttttaaaaaaaaaaaaaaaaaagaatgaatgagatcttaacagtaggatggccagcaagtggagatgacaattcttataatggggtgttaaaactatcattacctcaaatcaccttgccttggaacttcatattgtgcacatacacatacacaaatacatgtgtatgcatccatgtgtgtacatgtgattgtgaattaaattttactaagatttttttggagaagtagtgtgagaataatgcaagtattcggtaaaggcataaaattttaactagattaaaaaaataactctaggggaaatgttgagtgcagtgaggaggacaaaaaaaacctcataggagtgattatttaggaagctattatagttgtccaggtgagagatatggagagtgctatcataatgraaatggggagtgagaaca

SEQ ID NO: 605424 - DNA, 610 bp, Homo sapiens
ctgaaagagaaccagggtccctgaatttatcayagttggtttactttaaattttagaaaaaatatatatatttaaatagtcttaaataggtatgtacttagtcagaaaaaaaaagtaaagtagaatacagaagctccttgacttataatagagttatgtcctgataaacccagcataagttgaaaatattgttaaataaaaaatgcttttaatacagctagcctaacaaatatcatagttttaacctagccaaccttaaacatactcataacacttacattgcctacagttgggcaaaatcatctaataccaagcctgttttataataaagtgttaaatatcttatgtaatttattgaatattctactgaaagtgaaaaataaaatgattgtatggatactggaagtatggtttctactgaatggctattgttttgtaccatcatggtaaaaaaatagtaagtcaaagcatcataagttgggggttcctgtacattacataatagattagttagtagactatatacgtatattgtaaatcctccaaaatgtgtcacattaaaacatttaatacagataatatgttattttcattatatacatacattttt

SEQ ID NO: 605425 - DNA, 406 bp, Homo sapiens
ggggtttatatggtcatgacagccaaatttgtatgttcatcaacattcttataatggcctaggagacgctacatgacctggcccattgtttcttttcagatctcaacttttactacctttctcttccttcactctgctctatttatgcatgtcttctttatttacttatttatttaattattwttttttttttttgagacagagtttcgctctttttgcccaggctggagtgcaatggcgcgatctcagctcaccgcagcctctgcctcctgggttcaagggattctcctgcctcagcctcctgagtagctgggattacaggcatgcaccaccatgccaggctaattttgtatttttagtagagatggggtttctccatgttgatcatgccaggctcaaatgcctg

SEQ ID NO: 605426 - DNA, 472 bp, Homo sapiens
ttgttacccacagtgagttggaacccaaatatgaggaagaaattttcagtatttagctaaatagtcaatcatctgacttactaatagtctgctgggaagtactgaaaagtcatcctggaaagcagtttgggagctagaccttagaatgccctgaatgctgagtctttggagtttttgatgcagtgaatggggagtcatggcaagtttttaaatgaggacatgggggaggtgrcatcgtcagacttgtacttttatgaaattgatgtgaaatttctgtatttatctgaaaagagacattatggggaaaagggaaagagttagtaagttatttcaataaatcaggcatgagataataaagacctggtctaggactgttagggtgaatatattgattaaaaacaaagagagaattctgggaaataactgaccttagtgagataaatgatacatttatttaagtatattaaaatta

SEQ ID NO: 605427 - DNA, 472 bp, Homo sapiens
ttgttacccacagtgagttggaacccaaatatgaggaagaaattttcagtatttagctaaatagtcaatcatctgacttactaatagtctgctgggaagtactgaaaagtcatcctggaaagcagtttgggagctagaccttagaatgccctgaatgctgagtctttggagtttttgatgcagtgaatggggagtcatggcaagtttttaaatgaggacatgggggaggtggcatcgtcagacttgtacttttatgaaattgatgtgaaatttctgtatttatctgaaaagagacattatggggaaaagggaaagagttagtaagttatttcaataaatcaggcatgagataataragacctggtctaggactgttagggtgaatatattgattaaaaacaaagagagaattctgggaaataactgaccttagtgagataaatgatacatttatttaagtatattaaaatta

SEQ ID NO: 605428 - DNA, 401 bp, Homo sapiens
gtttcaaaaaagctatgaaagttttaacaggttatattcaagagtaactgcagaaagacaggttttaagtaaggtgataaggaaatacctctttggggaggtaatatttkagctgcaatgataacaccagcctagtccagtaaaagcctgggaagtagcattataggaaggataaaaaaatacaaagttcttgaggtaatatataatttagcatattcaaacaactgataataaaaatatctttttaagtacttactatatacagtaattttagaggttttattatgtttattttttgtaatcacagtgggatgtagatgtcaatatgaatcccaattcacagttataaaactgaggaacagagagcttaagtaacttgtaaaagatcatacaattagtaa

SEQ ID NO: 605429 - DNA, 622 bp, Homo sapiens
tacaggtactgttttgagttcaattgtgtccttcaaaagttcatatgtaccttagagtacccgctgtgtgccccagcacctcagaatgagaccttatttggaaatggggtctttgcggatgtagtcaagttacaatgagatcattaggttaggccctmatccagtatgaccagggtccttataaaaagggggaagtttggacagagacgaatgcacagggaaaatgctgtgtgagagttggagttatgctgccacaagccaaggaaatcaaggatggctggctgtcccccgaagccagggcagaagcaggggccagattctcccttgtggcttccgaaggaaccagccctgccaacaccttgattttgggcttctggcatccagaactgtgcgacaacaaatttctattgttcaaagccacccagtctgtggcactttgttacagcagccctgaaagacgaatgcaggcaccgtgaggtagaacatccctcgcgaacagggcacattgaggagaggtgaaggaggacttccagtttttaatcccacacatctctttattgtgcttgtgatttaaaaaaattaattgtaggtataattactgctaaataccctgaaaataacg

SEQ ID NO: 605430 - DNA, 498 bp, Homo sapiens
tagaacatccctcgcgaacagggcacattgaggagaggtgaaggaggacttccagtttttaatcccacacatctcttyattgtgcttgtgatttaaaaaaattaattgtaggtataattactgctaaataccctgaaaataacgaactcctgtgtctctagatatttaaacctctcagttagcaacagcctctgaccgtgtgtccatctatcagggaattcttcaaaatagtcatggagtgtctgtttgcaggcaaagcacatttagacgtttaagtcacagacacacgtgagtcaaataatttaccatctaactgggaccaggagaactgaacagtaacaacatagcaaggcagtttgtgatctttgccccatatccgttgtggaggaggggagctcccaccggccagaaggattaggggccatatcacaaaggacggggaaaagggcacttcagccaggactggtgagtttgaggggtgaaggggaccaggcaggg

SEQ ID NO: 605431 - DNA, 498 bp, Homo sapiens
tagaacatccctcgcgaacagggcacattgaggagaggtgaaggaggacttccagtttttaatcccacacatctctttattgtgcttgtgatttaaaaaaattaattgtaggtataaytactgctaaataccctgaaaataacgaactcctgtgtctctagatatttaaacctctcagttagcaacagcctctgaccgtgtgtccatctatcagggaattcttcaaaatagtcatggagtgtctgtttgcaggcaaagcacatttagacgtttaagtcacagacacacgtgagtcaaataatttaccatctaactgggaccaggagaactgaacagtaacaacatagcaaggcagtttgtgatctttgccccatatccgttgtggaggaggggagctcccaccggccagaaggattaggggccatatcacaaaggacggggaaaagggcacttcagccaggactggtgagtttgaggggtgaaggggaccaggcaggg

SEQ ID NO: 605432 - DNA, 654 bp, Homo sapiens
tttgcagtttcatgtgcacattctgctgtgttcctgtctccttaggcacatgtctgagtagaaagcctgggaggagaactgtatgtgagcctcccatttaccagctactgctacactgttcctgttgctccacatcctctccaaatttgaaactgtcagacctcaaaattgttgccaatattatgtgagggaagagaccaaatttaccttactcactaaagtattcccagcaccagcctggacctggcacatagtggggagtcacagggttaaagagttgaatgtggaaacaggtaatcgaaaacactcacgctattgcactgttttgcctgagaccagcccaggtttccagttgcttaataatggccagttgggtgggcgtggtggctcatgcctgtaatcgcagcactttgggaggctgaggcgggtggatcacctgaggtgaggagttcgagaccatcgagaccagcctgaccaacatggtgaaaccccatctctactaaaaatgcaaaaattagctgggtgttgtggcacgtggctgtaatcccagctcctcaggaggctraggcaggagaatcacttgaacttgggaggcggaggttgcagtgagccgagattgtgccattgcactccagcctgggtgataaagcgaga

SEQ ID NO: 605433 - DNA, 512 bp, Homo sapiens
caaatgtctccaaaatttagcagcttaaaacaataaacatttataatttctgtaggtcagaaaataagaaaattttccattcaagatgttggccaggtgacagatttaccccttggtggtagtttactgacccttagtctggtgtgtttagtgtttaacaagcaaacmagttacatagaggaaacatagttacttttctgttttggagaaccgcaaggactttctcttagaccttctaacaaaaggacactatgaaaagcaaaagaagaactaaaacaaacatctaaacattctttattatgaatgatactttcttatactcaataataaaagcaatcaaccggtatttacattatttcaattttaaaaatatgaaatgtatccttaatcaaaagagtagattggtatagtttatgtaattaaataatatgataggaaagcagttagcaatgattcttcaccaacttgtgaaatgtaactttgtttttttttttcttttcatttcaggtatt

SEQ ID NO: 605434 - DNA, 596 bp, Homo sapiens
taaagggtcgcaagtcagaaytgagatggaggcaatacaaatatataaccagcggcctcagacaagttcccaaaattgggaagaatgaagagatagggaatgactgcagagcctttttcaggaaagcatgagattggaagatgaatgctcaagtaaattagaactcaggaaaagtactgaacagcaggatcatatcatcaaaaatctggctgataggttttgaactcactgaactgaatctatttagaagtacattttgggaagactaaataaacatcaacactatggtctattctaattcaggctcttgctttgtctattttccaggtgataaaacactgattgttattagtgttatcatcaagcatattgagcagtcaatctgtaagttaatagcaatacacagccatatagtcctggaactagaaggaaagaaaatgaattttttcttttttttttttctttttttttctgtagaggggaagaaaaattcaacaccttgagtcagctgcgactcaagggtccattataacttcgagatttttaacagcctgtgcctagggtatgggagatgaattttgttccaaagtggtgac

SEQ ID NO: 605435 - DNA, 517 bp, Homo sapiens
gtgcttttttattcttatagagctgaactagtaagtgctaggcagggaaatatttatttcctactcaacatgtttccatggtgaggaatttttattagaagaagatgtgagcttcttcctttccccccaccccctccactgagggcaggagagtgacttatctgattgaagagtttggaagagggaattgggcatttgtggattagccactcttgtacattttgggcatgactgcttgcagagaggatacattctggtttgcagtctccaccatgctacgacttagcaaaatatgctctatacctgtgggtgagatatgcacctgtttagtgctgcctatggctgggtaggtaaatctgactagctcagcaactattagcaagtccayttggttgtatgtctttaattcaactttcaccagaaataaagctaatattttcaatctctcacttctgtgtctacttttaattggtttcaaacttagatgggaaagagaagtgttatgaattaactactt

SEQ ID NO: 605436 - DNA, 588 bp, Homo sapiens
atataaaataaccataagaaacatgaggattttcagagacaatgaggaagaatctcccatgtgtaagaaaacaagaaaaggacaattgataaagcaactcagagaaagttttagaatctagagcagcagttatccagttatggtgctcaggcaggtctctgggtgtcccaatacacttttagggggactctggagccaaaactatayttattgccataatattaagaaacgtttacgcctgtaatcccaacactttgagaggccgaattgggcggatcacgaggtaaagagatgcagaccatcctgtccaacatggtgaaaccctgtctctactaaaaatacaaaaattagccgggcgtggcggcgggcgcctgtagtcccagctacactactcgggagggaggctgaagcaggagaatggcgggaacccgggaggcggagcttgtggtgagccgagatcacgccactgcactccagccttggcgccagagagagactccatctcaaaaaaaacaaaacaaaacgaaatgtatttgtctttttcactgtgctaacattgcataaggggagcaaaactagtggcgcatc

SEQ ID NO: 605437 - DNA, 588 bp, Homo sapiens
atataaaataaccataagaaacatgaggattttcagagacaatgaggaagaatctcccatgtgtaagaaaacaagaaaaggacaattgataaagcaactcagagaaagttttagaatctagagcagcagttatccagttatggtgctcaggcaggtctctgggtgtcccaatacacttttagggggactctggagccaaaactatatttattgccataatattaagaaacgtttacgcctgtaatcccaacactttgagaggccgaattgggcggatcacgaggtaaagagatgcagaccatcctgtccaacatggtgaaaccctgtctctactaaaaatacaaaaattagccgggcgtggcggcgggcgcctgtagtcccagctacactactcgggagggaggctgargcaggagaatggcgggaacccgggaggcggagcttgtggtgagccgagatcacgccactgcactccagccttggcgccagagagagactccatctcaaaaaaaacaaaacaaaacgaaatgtatttgtctttttcactgtgctaacattgcataaggggagcaaaactagtggcgcatc

SEQ ID NO: 605438 - DNA, 619 bp, Homo sapiens
taaactattaataatgcacttaaaagaactgaagtgggagcataaacaaagatatctatggcagctcattcccgggtgctggctgatgcctctcatagggtctactgaaatcaattttagaaagaaattctttgctctctagtataatacatgtacttaaccacaggaaaccttttaaataaacagggtgcttatgtgtcattattcacactgtgtagccacaatccagcatcagagaaaagcaaagagctgacaagacatacttatataaaaagaatgatatcttgtgatggaagacatgatatattctcaaaatacatatacaccagctttaaatgggaggccaarataacggaaagaaagaatgaggtttcgattgaggatgcttagataagaaaagcgcagagccccctttcctgggtcaagttgcttttcagtgccagctcacctttgtcaacttcctaggtcaaatgtcatgggaaaggaaaataatgatccaaatcagtaactttaaatgatagaataaatagagaaaacaattggctgagagaaagctgactcgattgtaacgtttagctactagagaagatgaaagttcaaagaacttaacatgaagtgt

SEQ ID NO: 605439 - DNA, 506 bp, Homo sapiens
tttgagacctgtctggccaacatggagaaacccatctctattaaaaatacaaaaaattagccgggcatggtgatgcccacctgtagtcccagctacttgagaggttgaggcaggagaattgcttgaagctctgagrcagaggttgcaagactccatctcaaaacaaaacaaaacaaaaaacaccgaagcaccacaaactgagtggctttaaacaacagaaatttagtctttcactgttctggaggctaaaagtccaagattaaggtataggctgggccatgctgcctccaaagcctctaggggaggattctcctagcaccaaggttgcttggtgtgcagcagcctccaccttcatgtgtctgtggcttcacatggcattctcctctgggtgtgtccctgtgcaaatttccctcttcttataagaacatcactcatattagatttgggcccacccaatgacttcatctttccaaagatttgacttcattgcaaacaccctttttcca

SEQ ID NO: 605440 - DNA, 589 bp, Homo sapiens
ccccagagtgctcaatgttaagtcatattaaaatggaaatgtaatagtttctccaacacgtgactcttcctcatttctttacctcttacagtaaacagacttgatgtgttctcctctaaaagcagggctttaactggagggaaaggagtgagagggaaagtgcgtttcacagtgcatggtacatagcaggctctcaaaaaggttagtcctctagctgggctgctggtggaaaaaggtggaaaaaggaaaactaatgttttcagccctattagattttgtacttaccagayaatttttattcaagccaggcctgattgtgggtctctaaccctgatggggaaaatcccactgggctgattatccataggaaactaaagttgttaccagcaaagagaagaaatatgataagagacagggagttagtaggatttttggccctaatattttgattaagatttttttaaaggtgctattatcctgaatctttgtatattttatttattttgcatgcctgtttctccatggtgtattcacatgcaagctttttgaggacagaattgggtgttctacttgaaagcatcaatgacag

SEQ ID NO: 605441 - DNA, 595 bp, Homo sapiens
atttaaatcctgttcttctctagtggtgctagagttttttttcttttttcattttacctgcctctagctaaatatgtgccacaaggccacgtaaaatagaaaccctataaatctggggatattggaaagaaaatccttctcatattacccttaggaagacaagtccagctcagagaatgaatacagatacgtagattggcaagaaacctgtggtgataagcatctcatttcaatatatctgtatagaaagcaataaaatatccaggctgggtttctacggtgagccacaggggtaagatattcagtggcactaaatggctcactcaccctgatgaagcaagtatctttcatgcttggtgtcttacaaaagataataagcaaaagargctccctgttgtaatacataatctcacacgcagacagcttaaaacagcaatattttgcagagaactgcaccttaatgtcttaaggatagaaatatcttgacctggaagcactaacatagtgattgcggtgcttcctcttaccaagtaattaaacaggagctccttgcaatgggcagggtcctcaatacccagatggcattccaactaac

SEQ ID NO: 605442 - DNA, 488 bp, Homo sapiens
cagctatctttaaaaatagtaaaactaatttttaaaatatttgaaaggggataatatggtagaaagaacataggctttcaatcagcactgaattcaaactctgtctctgccaattattacctgtatgactttggacacgttatgtaatgtgacagatgccacacaattaccaaaacccatttcatctccctactgaaaacccaactctgtgatgtcttccagcctctctggcagcctaaagtgtctgtgtgactaagctctggcaaatgcactgtggacagaagtgatatatgtcacttccaggtctaggccattaaaacttcttgtgccctggaagcttgccttaatttgaacatcaatctgaaatgtatataactcagaaaagtcaagctgaaatctaattttgtctcacctataaagcctttattgattgtataaacagtatttctaamaggaacattcagaggattcagttgaagactttacgt

SEQ ID NO: 605443 - DNA, 624 bp, Homo sapiens
gcttaagatgaaaatattttgaagataatctaataaaatatgctaatgctttgagtacttgttatgcaagaagtaatgagtagatcattccatagattgttgagttagaggtattttacacaaatttatagcagtcttattttatatgattgtatcttagacacgtttcaaaaatattacacagggagttctcagtcagctgcccatttcattttaaccattagtgaatgtaaatttggtcttcttctgaagcgaaagaagagcttgagaactgtagaaggtagaaaaacccttaagattaggccatgctttcatttatttctttatgaacacatgttgagaagtccttataagaaagctaataataaagtgccatgaaaatttaaataaatgctgtaccttaaaggattccatgttatactagacatccagatacatctatagctaactaaatacaaatgacccatayacttgaaacattttttgaaatgagagataacaaggtaatatgtaacatatccagaaaaaaataaattcatgtttgaaagcaatacatcaaagaggttttcatgtctagtttcgtccactctgggtctgcaaacttgatactaagatgaagttggg

SEQ ID NO: 605444 - DNA, 624 bp, Homo sapiens
gcttaagatgaaaatattttgaagataatctaataaaatatgctaatgctttgagtacttgttatgcaagaagtaatgagtagatcattccatagattgttgagttagaggtattttacacaaatttatagcagtcttattttatatgattgtatcttagacacgtttcaaaaatattacacagggagttctcagtcagctgcccatttcattttaaccattagtgaatgtaaatttggtcttcttctgaagcgaaagaagagcttgagaactgtagaaggtagaaaaacccttaagattaggccatgctttcatttatttctttatgaacacatgttgagaagtccttataagaaagctaataataaagtgccatgaaaatttaaataaatgctgtaccttaaaggattccatgttatactagacatccagatacatctatagctaactaaatacaaatgacccatacacttgaaacattttttraaatgagagataacaaggtaatatgtaacatatccagaaaaaaataaattcatgtttgaaagcaatacatcaaagaggttttcatgtctagtttcgtccactctgggtctgcaaacttgatactaagatgaagttggg

SEQ ID NO: 605445 - DNA, 626 bp, Homo sapiens
  misc_feature 620, 621, 622, 623, 624, 625, 626: n = A,T,C or G
ttgatactaagatgaagttgggacatccaatgcagatatcaattcctggaggctatatgggcayagtgattactggtgcatgctggctgcacaggtttaaagccagatgccaccacttcatagctagatgagattgtgtatgatattacagagaacagaacgattgagaacagtgcagtaaaacaattagtggaaggatattttattttaataaaaaagaaattacctggaggtaattttgatagctattgcttacttctacttcataagggttgcacaatcctatactctttccataaaagtctaacagtgtttgtttctccatggtctcatcaataaaacatatcaacaactttttaaaaaagtattttctgccaatataataggtgaggaaagatatctagtttcattttgcatatcttttattatgactaatgagtcttttcatattgtaatgccatttgcattccctttttctatgaactggctagctcataaaaataagcattgaacaattcgattggattattggggttattttatatcaattacagaagctcctttgcgtataaaaagattgaccttttatcataatagtgcaatgttcactaattgaattnnnnnnn

SEQ ID NO: 605446 - DNA, 626 bp, Homo sapiens
  misc_feature 620, 621, 622, 623, 624, 625, 626: n = A,T,C or G
ttgatactaagatgaagttgggacatccaatgcagatatcaattcctggaggctatatgggcatagtgattactggtgcatgctggctgcacaggtttaaagccagatgycaccacttcatagctagatgagattgtgtatgatattacagagaacagaacgattgagaacagtgcagtaaaacaattagtggaaggatattttattttaataaaaaagaaattacctggaggtaattttgatagctattgcttacttctacttcataagggttgcacaatcctatactctttccataaaagtctaacagtgtttgtttctccatggtctcatcaataaaacatatcaacaactttttaaaaaagtattttctgccaatataataggtgaggaaagatatctagtttcattttgcatatcttttattatgactaatgagtcttttcatattgtaatgccatttgcattccctttttctatgaactggctagctcataaaaataagcattgaacaattcgattggattattggggttattttatatcaattacagaagctcctttgcgtataaaaagattgaccttttatcataatagtgcaatgttcactaattgaattnnnnnnn

SEQ ID NO: 605447 - DNA, 626 bp, Homo sapiens
  misc_feature 620, 621, 622, 623, 624, 625, 626: n = A,T,C or G
ttgatactaagatgaagttgggacatccaatgcagatatcaattcctggaggctatatgggcatagtgattactggtgcatgctggctgcacaggtttaaagccagatgccaccacttcatagctagatgagattgtgtatgatattacagagaacagaacgattgagaacagtgcagtaaaacaaytagtggaaggatattttattttaataaaaaagaaattacctggaggtaattttgatagctattgcttacttctacttcataagggttgcacaatcctatactctttccataaaagtctaacagtgtttgtttctccatggtctcatcaataaaacatatcaacaactttttaaaaaagtattttctgccaatataataggtgaggaaagatatctagtttcattttgcatatcttttattatgactaatgagtcttttcatattgtaatgccatttgcattccctttttctatgaactggctagctcataaaaataagcattgaacaattcgattggattattggggttattttatatcaattacagaagctcctttgcgtataaaaagattgaccttttatcataatagtgcaatgttcactaattgaattnnnnnnn

SEQ ID NO: 605448 - DNA, 626 bp, Homo sapiens
  misc_feature 620, 621, 622, 623, 624, 625, 626: n = A,T,C or G
ttgatactaagatgaagttgggacatccaatgcagatatcaattcctggaggctatatgggcatagtgattactggtgcatgctggctgcacaggtttaaagccagatgccaccacttcatagctagatgagattgtgtatgatattacagagaacagaacgattgagaacagtgcagtaaaacaattagtggaaggatattttattttaataaaaaagaaattacctggaggtaattttgatagctattgcttacttctacttcataagggttgcacaatcctatactctttccataaaagtctaacagtgtttgtttctccatggtctcatcaataamacatatcaacaactttttaaaaaagtattttctgccaatataataggtgaggaaagatatctagtttcattttgcatatcttttattatgactaatgagtcttttcatattgtaatgccatttgcattccctttttctatgaactggctagctcataaaaataagcattgaacaattcgattggattattggggttattttatatcaattacagaagctcctttgcgtataaaaagattgaccttttatcataatagtgcaatgttcactaattgaattnnnnnnn

SEQ ID NO: 605449 - DNA, 664 bp, Homo sapiens
ttttcctctgtttatagtattaatagttgcacaattttttgaactttgatgaagtccaatttgtctatttttcttttgttgactgtgccttttgtatcatatctaagaaatcattgccaaattcaatagactgttttttayggtttaatttcatccttataactgtgagatggattatttttcttgttgtgccattatgtatagcaaatgaaacctactgaataaaagttgagtttgaagtgatagcaacctatagtgattaatcttcacttcagatggaattttctatttactttaacatgaaaagtttcctaggaagaagtattgccatctccttgagatatggtgaagggtaaacgtgagctttgttggatttttcctcccttgagtgcttcataaataatagaaactctgtctgacaaagtaaaaaagaaagaaggatagtaagttaattttagataaaggtaatatgcaaggtgagacaactgctgttctaagtatgtaatgtgagtggatcatacttcacaatgatcaaatagaaatgcaattttaaaaaacaaactacacatggaatgtgttatacacgcctatcatgattcaagttaaacagccatttacatgggcaatgctgagattgtagtctacattccctatccccattccc

SEQ ID NO: 605450 - DNA, 664 bp, Homo sapiens
ttttcctctgtttatagtattaatagttgcacaattttttgaactttgatgaagtccaatttgtctatttttcttttgttgactgtgccttttgtatcatatctaagaaatcattgccaaattcaatagactgttttttacggtttaatttcatccttataactgtgagatggattatttttcttgttgtgccattatgtatagcaaatgaaacctactgaataaaagttgagtttgaagtgatagcaacctatagtgattaatcttcacttcagatggaattttctatttactttaacatgaaaagtttcctaggaagaagtattgccatctccttgagatatggtgaagggtaaacgtgagctttgttggatttttcctcccttgagtgcttcataaataatagaaactctgtctgacaaagtaaaaaagaaagaaggatagtaagttaattttagataaaggtaatatgcaaggtgagacaackgctgttctaagtatgtaatgtgagtggatcatacttcacaatgatcaaatagaaatgcaattttaaaaaacaaactacacatggaatgtgttatacacgcctatcatgattcaagttaaacagccatttacatgggcaatgctgagattgtagtctacattccctatccccattccc

SEQ ID NO: 605451 - DNA, 609 bp, Homo sapiens
tctaatgtggaaaatgcacagactggactgctgcacatggttacgttggtcatgtgagactgagaaatgtgctttctggaattgctgtctgcccacctgtgccttggggccctatgcatagaggaggggggatctaacccaacccaagagtgtgcgacaagggaagacatctcagaggagagaaagcctgggctgtgtcttaaggggtgagtagtaggcaggcagagaaccgtcggagaggaaggaagtccaggtgaaaggaagcactccacattcgaagctgtcttagttatttccacattggtctgtttcctctccagactacaagtgctttgaargcagggagagggttttttaacttctgcgttatgcacacagaatgcccagaatttatggtgacggaatgacttcctgtctgcttgagcctttttgcctgcctccttgacttactgaattcttatacatgttcctatcttaaacaggggtgtccaatcttttggcttccctgggccacattggaaggagaaggactgtcttgggctacccataaaatacactaacactaacggcagctgatgagctaaaaaaagaaaacaatcccccaaaaac

SEQ ID NO: 605452 - DNA, 565 bp, Homo sapiens
gggcagaaactctgaaggcaggaggaggaggacaggggtgcttatctcattagtcttgcacttcccacccactttggggcttcatcaaaacctactggcccagatrttgctgtgaagactttcctctgccagattcagcctcctgggtctggcttgtagcatttaacagcatctgtgctagattatctaaaatcctgggcacctggtggtgatctacaggtgaataggaatttgtccctcctctttaaccctttttgcttttccatcttatagggaaaaacaggttctctgcatactgctttaccacactagttaagatacgtggttatgagaagtttatagaatgatcaagtggtggctcatggaacccaaaccccctaatgcagctgggatctcggagaggactggacctaggacccaaaaaactgctgcctcatctctatctaaaaaaaaaaaaaaaaaaaaattcctttctctgtctcctggtccactcagagggtagaagacggccatctagagacctggtgtgtatatgttaataggtcagccatatgcagaaatggtc

SEQ ID NO: 605453 - DNA, 583 bp, Homo sapiens
tcctgccttctgggatcgtgcttctgccagtccacagattggcatttcgtgatcactgttgtaaactgccacaaattttcaagtagaggaaaagggtaatagtagtaaaaatatcttattatacatatgtacagagcctgaaatttatgtctgccacctgtattatttttttttcatatgcattacttcagttatggatgaacattttacggcagacagcacccttttctctcatgaagtctttcttggtcaccctcatacctggtgagaaggatgctcttctctttcctgccacttctcaacctcactgatagctcttaacagagcttatcatgttgtattrgaaataattctgcagacaccttcctcccctcctgagttcctcaaggacagggactaagtctcattcaaatttgtgtttccagaagttttagtacagggcatgtagtcaacaatgtttattaacatctactgtatgtctagcactagggacacagcagtgagccagggggagcaagggctgtccccatgcaccagatggcccacagtgatcacaactgggtaattgtacatatgaaagctg

SEQ ID NO: 605454 - DNA, 583 bp, Homo sapiens
tcctgccttctgggatcgtgcttctgccagtccacagattggcatttcgtgatcactgttgtaaactgccacaaattttcaagtagaggaaaagggtaatagtagtaaaaatatcttattatacatatgtacagagcctgaaatttatgtctgccacctgtattatttttttttcatatgcattacttcagttatggatgaacattttacggcagacagcacccttttctctcatgaagtctttcttggtcaccctcatacctggtgagaaggatgctcttctctttcctgccacttctcaacctcactgatagctcttaacagagcttatcatgttgtattggaaataattctgcagacaccttcctcccctcctgagttcctcaaggacagggactaagtctcattcaaatytgtgtttccagaagttttagtacagggcatgtagtcaacaatgtttattaacatctactgtatgtctagcactagggacacagcagtgagccagggggagcaagggctgtccccatgcaccagatggcccacagtgatcacaactgggtaattgtacatatgaaagctg

SEQ ID NO: 605455 - DNA, 583 bp, Homo sapiens
tcctgccttctgggatcgtgcttctgccagtccacagattggcatttcgtgatcactgttgtaaactgccacaaattttcaagtagaggaaaagggtaatagtagtaaaaatatcttattatacatatgtacagagcctgaaatttatgtctgccacctgtattatttttttttcatatgcattacttcagttatggatgaacattttacggcagacagcacccttttctctcatgaagtctttcttggtcaccctcatacctggtgagaaggatgctcttctctttcctgccacttctcaacctcactgatagctcttaacagagcttatcatgttgtattggaaataattctgcagacaccttcctcccctcctgagttcctcaaggacagggactaagtctcattcaaatttgtgtttccagaagttttagtacagggcatgtagtcaacaaygtttattaacatctactgtatgtctagcactagggacacagcagtgagccagggggagcaagggctgtccccatgcaccagatggcccacagtgatcacaactgggtaattgtacatatgaaagctg

SEQ ID NO: 605456 - DNA, 329 bp, Homo sapiens
atattttggaatggccctgcaaagccatctcatgtggggaaaatttacattctgtaaggaatctccttccatttccaggtcttttcctgatccaagagattaactaagagtctgacaccttttaagttctgataagagacatttaccatctattctccctaaggctgctacctggaggcttcatctacataacaggaccttggcttccacaatcccccttatcttaacccatgcatttcttcccgctgccttcaacaattcaggtgaagctkaactctttcaaccaattgtcaatcaggaaatctttgaatccacctatgacttggaag

SEQ ID NO: 605457 - DNA, 329 bp, Homo sapiens
atattttggaatggccctgcaaagccatctcatgtggggaaaatttacattctgtaaggaatctccttccatttccaggtcttttcctgatccaagagattaactaagagtctgacaccttttaagttctgataagagacatttaccatctattctccctaaggctgctacctggaggcttcatctacataacaggaccttggcttccacaatcccccttatcttaacccatgcatttcttcccgctgccttcaacaattcaggtgaagctgaactytttcaaccaattgtcaatcaggaaatctttgaatccacctatgacttggaag

SEQ ID NO: 605458 - DNA, 539 bp, Homo sapiens
aaaactggttttgtttctcgggaacaactgaattctcccatgcactcaccgatgtgagcagacttttataatgctctttgaaaattaagcccggccaggagaggtggctcacacctgtaatcccagcactttgggaggctgaggtgggtggattacttaaggccrggagttcgagaccagcctggccaacatggtgaaaccccatctctactaaaaatacaaaaattagccaggtgtggtggcttatgcctgtaatcccagctacttgggagcctgaggcaggagaatcgctagaacccaggaggcagaggttgcagtgtaccgctaaggtcgaaccactgcactccagcctgggcaacagagcaaattgtctacaaaaaaaaaaaaaaaatttaagcccaagtctgggcaacacagggagacctcatctctaccaaaaattttaaaaattagctgggcatagtggtgtgtacctgtagtcccagctactcaggaggctaaggtgagaggattgcttgagcctgggatgtcaaggctgc

SEQ ID NO: 605459 - DNA, 539 bp, Homo sapiens
aaaactggttttgtttctcgggaacaactgaattctcccatgcactcaccgatgtgagcagacttttataatgctctttgaaaattaagcccggccaggagaggtggctcacacctgtaatcccagcactttgggaggctgaggtgggtggattacttaaggccaggagttygagaccagcctggccaacatggtgaaaccccatctctactaaaaatacaaaaattagccaggtgtggtggcttatgcctgtaatcccagctacttgggagcctgaggcaggagaatcgctagaacccaggaggcagaggttgcagtgtaccgctaaggtcgaaccactgcactccagcctgggcaacagagcaaattgtctacaaaaaaaaaaaaaaaatttaagcccaagtctgggcaacacagggagacctcatctctaccaaaaattttaaaaattagctgggcatagtggtgtgtacctgtagtcccagctactcaggaggctaaggtgagaggattgcttgagcctgggatgtcaaggctgc

SEQ ID NO: 605460 - DNA, 539 bp, Homo sapiens
aaaactggttttgtttctcgggaacaactgaattctcccatgcactcaccgatgtgagcagacttttataatgctctttgaaaattaagcccggccaggagaggtggctcacacctgtaatcccagcactttgggaggctgaggtgggtggattacttaaggccaggagttcgagaccagcctgkccaacatggtgaaaccccatctctactaaaaatacaaaaattagccaggtgtggtggcttatgcctgtaatcccagctacttgggagcctgaggcaggagaatcgctagaacccaggaggcagaggttgcagtgtaccgctaaggtcgaaccactgcactccagcctgggcaacagagcaaattgtctacaaaaaaaaaaaaaaaatttaagcccaagtctgggcaacacagggagacctcatctctaccaaaaattttaaaaattagctgggcatagtggtgtgtacctgtagtcccagctactcaggaggctaaggtgagaggattgcttgagcctgggatgtcaaggctgc

SEQ ID NO: 605461 - DNA, 397 bp, Homo sapiens
taaggaaaattaagaaagctgggagcaaagacagaagtggcaagagcagtctaattctagagttgccaccagaaaagggagaatgcatggaaggccacacttgaagacatgagacaagaggacttctccccaaaaaagaaagacccagtgtcagattgcaagatctttccagtgttgaccagacaacaaatggaataaaaggaatacttaaaccatcgtaytgaaatttcagaacatcaaagatagatatatcattaaaaactaatcaaaactaaaaaaatagctaagctgcaaaggaacaagaaccagactgatgtctatgctcatcagcaaatctgggtaggagtaagataataaagcagggtgccagagaaaaagaattttgaatctagaattc

SEQ ID NO: 605462 - DNA, 470 bp, Homo sapiens
catggctcccaacttatcaggttacatgagttttcacaaatcacttagctttctcagagccttaattttctaatacataaagcaggaattatagtccctgccaatctcagagagttgtctatcttgtcagcaaaaatgttttatattgttgttaggagactgagaagactggcttaacaaattaagtgtagccatataatgaggtgccatagctctgtagttcactgctctgggaagatgctcagaatgtattgttttaaaaaaatactgcataattccattttatgttaaaaagtgcatgtttatttgtgtacacatacatacacatacatatttatatatacatacatgcrttaaaaattggccgatactggaaggcagcacacataactgtgagtgcaatgtgattggagagttaatatcatttcatctcatttctgatatctacatttctctaagtggtaggattc

SEQ ID NO: 605463 - DNA, 596 bp, Homo sapiens
tggtgactacaaaataaaatttttggtgataattgaaatgagcttcatatttgatttgtaaaattcaatgctctcaatagctaatgcatgcagggcttawtacctaggtgatcggctgatctgtgcagcaaaacatcatggcacatgtttacctatgtaacaagcctgcacatcctgcacatgtatcacagaacttaaaaaagaaaagagttcaatgctctcattcgcatggtcacagatagttacctataaatatttccggaatattgatggtaggaatcgatatccatgcaggcaacttgaacacaagaagctcagtttcatttgagtactctgttctgttcttagtaagctcaagcattaaatgacaaatttaaggtttaactggtgtggctataaacagctctgtacaaacctctacctactttaagaaattacttccatgggatgtcttcctgaggttattttatttcaaccatgccttccctttatttctaaagctttgattgaggttctaagactgtgcatgaaatacttaggattttgtctgttgtgtaaagtgtgatataattctagatcaacagagagctcacatt

SEQ ID NO: 605464 - DNA, 596 bp, Homo sapiens
tggtgactacaaaataaaatttttggtgataattgaaatgagcttcatatttgatttgtaaaattcaatgctctcaatagctaatgcatgcagggcttattacctaggtgatcggctgatctgtgcagcaaaacatcatggcacatgtttacctatgtaacaagcctgcacatcctgcacatgtatcacagaacttaaaaaagaaaagagttcaatgctctcattcgcatggtcacagatagttacctataaatatttccggaatattgatggtaggaatcgatatccatgcaggcaacttgaacacaagaagctcagtttcatttgagtactctgttctgttcttagtaagctcaagcattaaatgacaaatttaaggtttaactggtgtggctataaacagctctgtacaaacctctacctactttaagaaattacttccatgggatgtcttcctgaggttattttatttcaaccatgmcttccctttatttctaaagctttgattgaggttctaagactgtgcatgaaatacttaggattttgtctgttgtgtaaagtgtgatataattctagatcaacagagagctcacatt

SEQ ID NO: 605465 - DNA, 627 bp, Homo sapiens
accctctgactcttggacagatgggcactggcatcacttgagcttcactttcagtgctctttctaggcctttttacccacacgtagccttccttcatttttaaaaaaattaattagatcagattaaacattattagcaactttctttttctcttaatgtatctttgatagctttccttatttgtatatgtctaccctatcttaaagcagtataatatatctcatagtgtgtgtgtaccaaggcaatgaaatgaatctgcrttaataaacttttaggatgtctggcttttacaaagcttgctgagtgatccttggtcatgtgcatttttgtgtacattttcgaatatttttgtatgatagaattctaagggtggaatcgggttttgaattttgtagtacacttccatgtgatttttttctaaaagctgtaccagtctatatttatatgacaatctacgagagtacccatttccacttagacaaagcagcaatgaatatcatcagtctttttaggttgtgcaatctaaaggatgtcaaatgtgtttttaattcttataatttgtgtattacggactactgttaagttgagcatctttttataagttcttggtcaattttattagttgga

SEQ ID NO: 605466 - DNA, 510 bp, Homo sapiens
aagttttccctctgggttgcaggtttcatccggaaccagcactctggtctttcagctttcaggctgctttaagcttgaagcgggggtctcacccgagacccttccctagctgcctaggcatttgtctgcctcctgcctttattagagcaagattgaaagaggctggccagagagccccttgcccaggtctgagagctcaacacagctgyggggaaccttggaagtatggacgtcttcatcacttgagggctgatgtccagctggggtgatctcagggggagtttctgtagtttgctcctcttcccctttggctctatgaggctgagagagaaggaagatagagaaggaaaggcagaaaagacatgagagaccagtttgggcacccttatacctactgtagttgtctgacctgcaggctaggcctgggttaaaggggaggagaaagttgtaaatgtgatcttggtgttttgatatgactctactggactttcaatatctaagagtgagtct

SEQ ID NO: 605467 - DNA, 561 bp, Homo sapiens
aaagttgtaaatgtgatcttggtgttttgatatgactctactggactttcaatatctaagagtgagtcttaaagtgaatgaaagtggtgggagctgcctgagctcttgtccagggatggracagaaagctttgacgtagcagaccagcaatgggagaaaaaagaagtgtttcctggttgtaccttgttgtgaccatctcatgtaataagccacacagaacctgatatgttgctgtaaatggcaaattcttggtaagtgctaagtgaaaggcagttttgtgatcatcctttttatcttccctgtgtatcaagtgagtcagaactaaatcaccactttgcagacacagagggcacgaggtaacaagagttaagcaatgcctgacaaccaaaaatccaagaatgtcagtaatcaaatcatactttaaagttcaccctctgacccacttgcctgggaaaatgccaaggaaataaacaggaaagacgaagtctcttaatacacaatacgcatttgtattgaacaaatgtgctgtccctcccagggagcaggatgatgttgacacac

SEQ ID NO: 605468 - DNA, 561 bp, Homo sapiens
aaagttgtaaatgtgatcttggtgttttgatatgactctactggactttcaatatctaagagtgagtcttaaagtgaatgaaagtggtgggagctgcctgagctcttgtccagggatggaacagaaagctttgacgtagcagaccagcaatgggagaaaaaagaagtgtttcctggttgtaccttgttgtgaccatctcatgtaataagccacacagaacctgatatgttgctgtaaatggcaaattcttggtaagtgctaagtgaaaggcagttttgtgatcatcctttttatcttccctgtgtatcaagtgagtcagaactaaatcaccactttgcagacacagagggcacgaggtaacaagagttaagcaatgcctgacaaccaaaaatccaagaatgtcagtaatcaaatcatactttaaagttcaccctctgacccacttgcctgggaaaatgccaaggaaataaayaggaaagacgaagtctcttaatacacaatacgcatttgtattgaacaaatgtgctgtccctcccagggagcaggatgatgttgacacac

SEQ ID NO: 605469 - DNA, 561 bp, Homo sapiens
aaagttgtaaatgtgatcttggtgttttgatatgactctactggactttcaatatctaagagtgagtcttaaagtgaatgaaagtggtgggagctgcctgagctcttgtccagggatggaacagaaagctttgacgtagcagaccagcaatgggagaaaaaagaagtgtttcctggttgtaccttgttgtgaccatctcatgtaataagccacacagaacctgatatgttgctgtaaatggcaaattcttggtaagtgctaagtgaaaggcagttttgtgatcatcctttttatcttccctgtgtatcaagtgagtcagaactaaatcaccactttgcagacacagagggcacgaggtaacaagagttaagcaatgcctgacaaccaaaaatccaagaatgtcagtaatcaaatcatactttaaagttcaccctctgacccacttgcctgggaaaatgccaaggaaataaacaggaaagaygaagtctcttaatacacaatacgcatttgtattgaacaaatgtgctgtccctcccagggagcaggatgatgttgacacac

SEQ ID NO: 605470 - DNA, 561 bp, Homo sapiens
aaagttgtaaatgtgatcttggtgttttgatatgactctactggactttcaatatctaagagtgagtcttaaagtgaatgaaagtggtgggagctgcctgagctcttgtccagggatggaacagaaagctttgacgtagcagaccagcaatgggagaaaaaagaagtgtttcctggttgtaccttgttgtgaccatctcatgtaataagccacacagaacctgatatgttgctgtaaatggcaaattcttggtaagtgctaagtgaaaggcagttttgtgatcatcctttttatcttccctgtgtatcaagtgagtcagaactaaatcaccactttgcagacacagagggcacgaggtaacaagagttaagcaatgcctgacaaccaaaaatccaagaatgtcagtaatcaaatcatactttaaagttcaccctctgacccacttgcctgggaaaatgccaaggaaataaacaggaaagacgaagtctcttaatacacaatacgcrtttgtattgaacaaatgtgctgtccctcccagggagcaggatgatgttgacacac

SEQ ID NO: 605471 - DNA, 558 bp, Homo sapiens
tgcctcattacctggcaaattaattttagctcaccagcaacatggtaccactagatttgaagatcctgccaatgagtagtttaatacattctttgcaaggaggtgacaactgccacagtgaagagtatgcatcattttaaaatgaaagtaaattcctgtagagtactattgaggtaaaaatcagagtgatctcttaacgtctagaaatgaataaaatgaccaagggttatgtgtaagtgatttgtagtgaataattgcagacttaagatggaaaatgaaatagattaaatcttaaagacttgagacaaggattctgtttctgaagcgaatgcggtgcagtatctgtatcttactagtgaggagagaaagaagaatggcattctgatgaaagaaacctgtccacagcgatgagttctctaagggcctattttcattgtcagaaaatccaagagaaaaattaygttgcaagggcacagaattaatctttctctgaacagcaacaataacaaaaatgccattaaaatatatagatttacacctggaagtcaatctgttcaa

SEQ ID NO: 605472 - DNA, 478 bp, Homo sapiens
cacagtgaagagtatgcatcattttaaaatgaaagtaaattcctgtagagtactattgaggtaaaaatcagagtgatctcttaacgtctagaaatgaataaaatgaccaagggttatgtgtaagtgatttgtagtgaataattgcagacttaagatggaaaatgaaatagattaaatcttaaagacttgagacaaggattctgtttctgaagcgaatgcggtgcagtatctgtatcttactagtgaggagagaaagaagaatggcattctgatgaaagaaacctgtccacagcgatgagttctctaagggcctattttcattgtcagaaaatccaagagaaaaattatgttgcaagggcacagaattaatctttctctgaacagcaacaataacaaaaatgcmattaaaatatatagatttacacctggaagtcaatctgttcaaaaggatgcagttcctctttgagtgtcaggtgag

SEQ ID NO: 605473 - DNA, 649 bp, Homo sapiens
ttgtggaatttattttctattctttggtctattagtatcttatcagtatagttagagtagttgctattccctgatcaccaggaccaatcaacatcacatcatcaatgtaacggacatcctgtggagggraaaggcagtcaaggtccctgcaaacttgatcatgacgtaggtctggagagttgatataccactgaagtaggtcactaaaggtatttggcctgtcttcctagctggaagcaaactgcctctgatggtctttactaatagatctagaaaaaaaaataatttcccaaataaattcctgcataacaagtaccaatggatgtgtttccaaatgaaaccacatttggaagaacagctgcaattggagtccccacctaattacacttgtcatagttcactgtcattctccaagacctgccttcttcagaagccaaacagtcaagctgaataggaatgtgttaggagttgggaataagcacccctgcatcttttaagtccttgatcatggcattaatctttgcaatttctacaagaatggtatgacttttggtttactattttcctaagtaaaggcagttctagtggcttccactggactttcctacagtactaagccttattccatggtcagggaaccaatgcggat

SEQ ID NO: 605474 - DNA, 649 bp, Homo sapiens
ttgtggaatttattttctattctttggtctattagtatcttatcagtatagttagagtagttgctattccctgatcaccaggaccaatcaacatcacatcatcaatgtaacggacatcctgtggaggggaaaggcagtcaaggtccctgcaaacttgatcatgacgtaggtctggagagttgatataccactgaagtaggtcactaaaggtatttggcctgtcttcctagctggaagcaaactgcctctgatggtctttactaatagatctagaaaaaaaaataatttcccaaataaattcctgcrtaacaagtaccaatggatgtgtttccaaatgaaaccacatttggaagaacagctgcaattggagtccccacctaattacacttgtcatagttcactgtcattctccaagacctgccttcttcagaagccaaacagtcaagctgaataggaatgtgttaggagttgggaataagcacccctgcatcttttaagtccttgatcatggcattaatctttgcaatttctacaagaatggtatgacttttggtttactattttcctaagtaaaggcagttctagtggcttccactggactttcctacagtactaagccttattccatggtcagggaaccaatgcggat

SEQ ID NO: 605475 - DNA, 492 bp, Homo sapiens
ccaaataaattcctgcataacaagtaccaatggatgtgtttccaaatgaaaccacatttggaagaacagctgcaattggagtccccacctaattacacttgtcatagttcactgtcattctccaagacctgccttcttcagaagccaaacagtcaagctgaataggaatgtgttaggagttgggaataagcacccctgcatctttyaagtccttgatcatggcattaatctttgcaatttctacaagaatggtatgacttttggtttactattttcctaagtaaaggcagttctagtggcttccactggactttcctacagtactaagccttattccatggtcagggaaccaatgcggatattcttccagtttgtaagcatatctattccaattacgccttcttgaaatggtgtaaaaaccatacattgtgtttagactcactgggcctactataacagacctgagccaaactccattgatctccattcacc

SEQ ID NO: 605476 - DNA, 543 bp, Homo sapiens
ttcaagaaagagcagaaggaaaagtagaagggatatcaggagagcatgaggtcagagaagccaagagagaaatattgtgcaagatggaagatgtggccaccattatgagttctactgactggtraagtaaccgtgggagccatcagtggccttgacaagagacatttcctgggatgatggttggaacctagactagagcagattgaggagacacccagtagtaggctacagagaaaagggaacacttacacactgttggtgggaatgtaaattggttcatccactgtggaaaacagtttggagatttctcaaagaacttaaaacagaactaccatttgactcagcaatcccatactgggtatatatccaaagaaaataaatcatcctaacaaaaagacgcattttctcatatgttcatcacaatactattcacaataccaaagacatagaatcaacctaatactcatcaacagtggattggaaaaagaaaatgtagtaatatataccatgaagtaccacagagccataaaaaagaatgaaatc

SEQ ID NO: 605477 - DNA, 543 bp, Homo sapiens
ttcaagaaagagcagaaggaaaagtagaagggatatcaggagagcatgaggtcagagaagccaagagagaaatattgtgcaagatggaagatgtggccaccattatgagttctactgactggtaaagtaaccgtrggagccatcagtggccttgacaagagacatttcctgggatgatggttggaacctagactagagcagattgaggagacacccagtagtaggctacagagaaaagggaacacttacacactgttggtgggaatgtaaattggttcatccactgtggaaaacagtttggagatttctcaaagaacttaaaacagaactaccatttgactcagcaatcccatactgggtatatatccaaagaaaataaatcatcctaacaaaaagacgcattttctcatatgttcatcacaatactattcacaataccaaagacatagaatcaacctaatactcatcaacagtggattggaaaaagaaaatgtagtaatatataccatgaagtaccacagagccataaaaaagaatgaaatc

SEQ ID NO: 605478 - DNA, 543 bp, Homo sapiens
ttcaagaaagagcagaaggaaaagtagaagggatatcaggagagcatgaggtcagagaagccaagagagaaatattgtgcaagatggaagatgtggccaccattatgagttctactgactggtaaagtaaccgtgggagccatcagtggccttgacaagagacatttcctgggatgatggttggaacctagactagagcagattgaggagacacccagtagtaggctacagagaaaagggaacacttacacactgttggtgggaatgtaaattggttcatccactgtggaaaacagtttggagatttctcaaagaacttaaaacagaactaccatttgactcagcaatcccatactgggtatatatccaaagaaaataaatcatcctaacaaaaagacgcatkttctcatatgttcatcacaatactattcacaataccaaagacatagaatcaacctaatactcatcaacagtggattggaaaaagaaaatgtagtaatatataccatgaagtaccacagagccataaaaaagaatgaaatc

SEQ ID NO: 605479 - DNA, 602 bp, Homo sapiens
cagcagcatgtgcatttgatattactgaaatagatatttgtagttggaggcataattccttattcttttgaagagcaaaagccgagtataataagatctaaggaaagaagattccctcaagtagatgaagctgtgttatgtttgtggagatatctgtacaaggattgtggaccccatggctacataagtaactgaagatggagaaattataaaactcctcagtatacatgaaaaatgtcaaagccacaaaaactgtgtattgaagagaactatgattatagcattaaatcactgaacaacaattkgtcagaaacttcttgctaactttgaacagagaagttgattaatttctagcaacatatgattcaattgagggaaaacgtatgaattaaatgggaaatgttgatgaaacctcagtggtttttggcatgcctagaaatttatactaatggtacttaagagataaagcacttgatcatggattggaaagcaccatatcctttaataatacacataattgcactggtcaaaagtcaccatatttaattgagtccacaaaaatatatcaaataatgagatattcctcaaagaggaaagaaatg

SEQ ID NO: 605480 - DNA, 557 bp, Homo sapiens
tgaatatttgagatacatgatgataagttgactgtcactattgggtccttcctctgtgcccttctattgacatgaggcagcttcttctggaatccctatccagggttgggagttttgacagggtgtgtttggatgctctccggtgccactctgcatctgtgggcagaggccatctctgcctaaacactctccattcccagttctcctccacctctactattgctgatctgccaaaaatcttctgaatggaaagttgatattttgttattagaatgattggtttggatactttgtcatttaattgtaggttacaaggagtgcarttatgcatgaaaacaattgaaagggcaataaaagcatcagtctcaattggctacattccactatatagtcattcatttattccacaaatgtgtatttgatcacctaatatgtcaaggctttctaataggtgctgaaataaaaggtgaaaaagtgtaattccggctgtgaaagactgacaatgccactgtcaagacagacacattaaagtgttttattacaattccacagggtaa

SEQ ID NO: 605481 - DNA, 663 bp, Homo sapiens
gagtgctttagagatactgagtagagctggaattcaggtaaggagcaatggaagagggcaataatgagatcatcaaggcaggtaaatatagggagaagatgaccaaagatggaactctgagcttatccaacagttatggagttaacagaaacaaccaccactacaacaagaaaaagtgggatcagagaggcaggagggcagccaggtgctctggcaggtaaaggggtggagagcattagggaggggcaggtggccagcagtgttgttgctgccatgagatccaggagggtgaagagttcattgaggcctttgagtctggacataaggaggtctatggtgttcttaggaccttcacctttacagtgtgaaggcagatgataaagcagactagaagacaatgaccaactgcagcttgtacttaggagacaattgacagtaaaaaaaacaaaccagaasacaaaatgagaacaaggggaaaagagctatattttcatggaaattgagggaactaatataattattgtaacttttcttgtaatgaaatttaagtttataggctgatggataggaaggaagaaaggaagaagggaacagtgagatatgaaaatagagagggctgaaaaaaatggaatgtggttctgaatagcatggaaaaggatggac

SEQ ID NO: 605482 - DNA, 663 bp, Homo sapiens
gagtgctttagagatactgagtagagctggaattcaggtaaggagcaatggaagagggcaataatgagatcatcaaggcaggtaaatatagggagaagatgaccaaagatggaactctgagcttatccaacagttatggagttaacagaaacaaccaccactacaacaagaaaaagtgggatcagagaggcaggagggcagccaggtgctctggcaggtaaaggggtggagagcattagggaggggcaggtggccagcagtgttgttgctgccatgagatccaggagggtgaagagttcattgaggcctttgagtctggacataaggaggtctatggtgttcttaggaccttcacctttacagtgtgaaggcagatgataaagcagactagaagacaatgaccaactgcagcttgtacttaggagacaattgacagtaaaaaaaacaaaccagaagacaaaatgagaacaaggggaaaagagctatattttcatggaaattgagggaactaatataattattgtaacttttcttgtaatgaartttaagtttataggctgatggataggaaggaagaaaggaagaagggaacagtgagatatgaaaatagagagggctgaaaaaaatggaatgtggttctgaatagcatggaaaaggatggac

SEQ ID NO: 605483 - DNA, 430 bp, Homo sapiens
atgaaggggacccaactgagctggcaaggtgagtcattatacatttatgttgctaaagaatgaggaataataatcatttactatgtgctaagcaatatactaagcattttacaataataattttataataacattttactaaatataactccctatgtggcatatgtcatttccattttacatgcgaggtaactgaggctcaatgatttattcatgcagctaatgagtggcagagtcagaatgagccaccagctstttctggctgcacatctggggcgttttatattcatactatcctgtctccatgggagctgagcttgcaggctggaggcatactttagctcaaatgcagagctaagccagagagcaagtcccatcgcttttggattttagcttccctgtgtgtaaaactgacaggaggtgttgggat

SEQ ID NO: 605484 - DNA, 543 bp, Homo sapiens
attttaaaattaataaactggagtcacagtgtggcagggacaggtacagacataaatagcttaaatacaaggtaattctcctttttgtattttttcagaaattattttatgawttctttaaaaaaatagatttaggggatataagtgcagttttgttacatggatatattgcttattggtgaagtctgggcttttgttagagacatcacctgaacagtgtacttgtacccattaagtaatttctcatccctaacccccttcctgcacttcctagactccaatgtctattattctactctctatgtgtgtgtgtacatattatttagctctcacttataaatgagaacatatggtacttggctttctgtttaagttatttcacttaagataatggcctccagtttcattcatgttgcttcaaaagacatgatttcattctgctttatgatgaaacattaaacattattccatggtgtatatataccacatctttctctctctcttttttttttttttttttttttttgagacgtagtctcactc

SEQ ID NO: 605485 - DNA, 549 bp, Homo sapiens
attctcattagttttgaattgggtgagttggtgcaaaattgtgtttgctcatgtgtgtagatataatatagatgagatttataatagaaattcagaaataaattttataagcactttaaattctggaaattgaaggaaaatataacaaaacgamcaaaaagtgtatatatttggaatgtaatctggtgataagttgggtaagaatggtatggtgaaatactatgttagaaattcttaggataagagaaagatcttttaaaattataaggagttatactgagttctatctagcatatattgaccaagcacatggctagactcgtatttacaagagcagagtcaagctgtttttgaaagtactttgtacatccatctccctctggcatctctattatttctctgcaattgctctgctggcttttattaagctacagatatctcatcccactgtgaatctaaatcttttgcttctatcacttcagcgcacacattgcattttagaagaggccagtatgcaattctcggtgtgcgaagaaggaaagagagttt

SEQ ID NO: 605486 - DNA, 414 bp, Homo sapiens
tatttcttttagcataatgaatgaaaagctcatccattgtagcatgtgttaattgtcttccattttaaggctgactattccactatccacattttatttctccattgatggacacttgggttgtccttttggctgttgtgaataaaatgctgctgtgaacattggtgtacaggtatctgtttaagtccttgctttaaattctttatgggcatatacccagaagtgaaattgctggatcatatagtaatatgttgaacattttgcggaaaggtcaaacttttccrtagcagctgtgcccatttcttaccagtaatgcacaagatctcccatttctatatatccttgccaacattattttgtgttttaaaaaatataatagctattagcaggtatgaagtagttaaatatacttct

SEQ ID NO: 605487 - DNA, 600 bp, Homo sapiens
caggagtgtgaccattgcaagacaatgaaagcagccaaccagaagtgatcccatagggagaaatctgggggaccaaatattcccacttctctctcctctttcctaccagtttctcaccaggatttcacactggctgatcccaagggaaactagagcttcagagctggttgggtagtcctcacaggtcagccttagctgagtagagcaggtttgcattgattgcatgtggtatcacatgctacctgtcctttatttcttctctttgacatctgaggtgggcatgcaatgcctggagcaccccatctccattagtcatcctttctttcccacatcattgatctttccctttccactgactccttcctatcacaggatacttcagctcatttctttcatcttaaaaataaccactgccacccaagcttttgctccatgccatggatccttttagctttcttaaagatttggcagttaagacctgaggactgagttggtgttagccaggtgaagagtgcattccaggatgggaaaaccatagcctcagcmaaattcctaatgaagaagcaagggtcagtgtgtttgaagcctggtgaccaaggc

SEQ ID NO: 605488 - DNA, 603 bp, Homo sapiens
acacaatctctcagtctattgaaagattttgagcaaacagtaatgtgaaccaatctgtgttttacaaagatcactcattgctgctcatactatagagagtgaagaaaactgtggcagcctatggaggcaatgcaggcatggggtgatggtggcttgatgtaaagcactggcagtggagttggaggggcaatgcagaaatttataaagtgaagtaaagttatatagagactgtattgacaartcttggtgaagggctgtgcagagtgtgacttctaggtttttggggttgaagctactaggtagttgccagtgccatttaccgagaatctgcaggcgggaggagaagcaattaattctgaagcagaaaaatcaaggttttggttaagatgagtgttaaattgcttttgggacaactaagtggacttttcaagaggctggctgcacgttcgtgtctggagctcagaaaataattctgatccagaaatacaattatggtagtcatgatatacaaagccatgagaatggaagagatatgcttaggagaagcctgcagagagaggagagagaaaatcttaggtgaaggaactgagaacctgtatctga

SEQ ID NO: 605489 - DNA, 578 bp, Homo sapiens
gcttttgggacaactaagtggacttttcaagaggctggctgcacgttcgtgtctggagctcagaaaataattctgatccagaaatacaattatggtagtcatgatatayaaagccatgagaatggaagagatatgcttaggagaagcctgcagagagaggagagagaaaatcttaggtgaaggaactgagaacctgtatctgaacttccaaaggaagtggaaatggccagagattgtatttttggtggggaaaaaatagatatatataatatgtaaaatatataatgtagatgtgtctgtaaaatatagaatatgtatattctgtatcaagattttatatttatgtgggttagaaaattgtatatatacaatatattatataaatatatatttaaatattatatatagtatgtgtataatatatattgtatatgtatacaatttctaacctaatatacaattcaatatgcaatttcctagcccatgtaaaataatacaaaatctctgtcaaaaaactggaaatgttaaatacgcctctccaattacctttaaaaagagcttttcctttttcatcaagc

SEQ ID NO: 605490 - DNA, 578 bp, Homo sapiens
gcttttgggacaactaagtggacttttcaagaggctggctgcacgttcgtgtctggagctcagaaaataattctgatccagaaatacaattatggtagtcatgatatacaaagccatgagaatggawgagatatgcttaggagaagcctgcagagagaggagagagaaaatcttaggtgaaggaactgagaacctgtatctgaacttccaaaggaagtggaaatggccagagattgtatttttggtggggaaaaaatagatatatataatatgtaaaatatataatgtagatgtgtctgtaaaatatagaatatgtatattctgtatcaagattttatatttatgtgggttagaaaattgtatatatacaatatattatataaatatatatttaaatattatatatagtatgtgtataatatatattgtatatgtatacaatttctaacctaatatacaattcaatatgcaatttcctagcccatgtaaaataatacaaaatctctgtcaaaaaactggaaatgttaaatacgcctctccaattacctttaaaaagagcttttcctttttcatcaagc

SEQ ID NO: 605491 - DNA, 598 bp, Homo sapiens
gtgagcacagacatgtaaacacacatacacacatgcatactcacatccatattcacacacatataaacagatgcacatatgtatttattacatgaacgaattaagctatatacaaagaatacttaagtaaatacaatgaggaggggttattttgggctattttgtgcctaattgaaacttccgtacttcyagtcaccaaaccctagtttaaaaatgactctgtaatgccagctctttgggaggctgaggtggtggatcacctgaggtcaggagttcaagaccagcctggccaacatggtgaaacactgtttctactaaaaataaaaaaaaataaaaaaaaaaatttgccaggcatggtgccgcatgcctgtagtcccagctacttgggaggctgaggcaggagaatagcttgaacccaggaagcagaggttacagtgagcccagatcatgccactgtactccagcctgggtgacagagcaagactatatctccaaaaaaaaaaaaaaaaaaaaaagaaagaaaaaaaagactccaagtttctctaacataattttcttatagtaaattgtctgtttctaaggtaattttcttaggcca

SEQ ID NO: 605492 - DNA, 352 bp, Homo sapiens
aagaaagaaaaaaaagactccaagtttctctaacataattttcttatagtaaattgtctgtttctaaggtaattttcttaggccagaattgtcttgaaaattttgttttgctttctgattgtacagtttttctaaaaatctgctttctcattatgatgatcaagattcccggttgaaattaacacatgtattccaagcagattctaggcaatcatttaaccaaccaactatttattttcaggacaaacattggattatctattacccaatctgtctactcacattagctaayccagatagctatctctataggagtttttttgcaaagtatgattttttttccagtttaaag

SEQ ID NO: 605493 - DNA, 617 bp, Homo sapiens
ttgcttatcaaatagaggctgacagagaacagcatacttcctttcaaaattgtgaacttcctcattgaatttggcttctatctgtgcacatttaacttacaggtgtttgagagcattcacttgttttttaactaccctaggcaggctttcaatgtatcctgttggtgtttctattagaccatcaagtctttcttgaagggctgcaagaatctgaggattttgcatcatctgaacagttagctgatgtgctttgatttttgtttcttcaccagttccttcttctactttttcagcgtcatccaaatsttgatcaagttcagactgttctttgttgtcaatgtctgccatgttgtaagaactccaaatattggcagctagtatggggagccaggcggccagagctgtgcaggcagtgactcagggttgcagcggtggctccatgagtagatggcgccaaaaaagccatcacacattttcaagattggtttctagatacagtagtgacaactgattaggtaactttcaccactaaaattttcaaatatagtaaataataatccattgcacatttctaaatcactgagagtaagtttcaagtgttctcaccacaaaacatg

SEQ ID NO: 605494 - DNA, 399 bp, Homo sapiens
ggtaactttcaccactaaaattttcaaatatagtaaataataatccattgcacatttctaaatcactgagagtaagtttcaagtgttctcaccacaaaacatgacaagtacttgaggtcatgactatgttaattaggttgatttaattatttctcactgtattcataaatcatwgcatcacattgtactccataaatatatacaactataatttgttaaactacaataaaaataaagattaaaaaaatcaacctgttttttaaggtcatatgaatggctttttctgattctttcctgagaacttttttttaataggaagagaactcaaggatacagtacgtggaatccaggaaggataacatggacacacaggaagggttatggcagggaaagaatgta

SEQ ID NO: 605495 - DNA, 566 bp, Homo sapiens
ttaagcttggaaatggtgccacgattttcatcccrttttccggaccaaagcaacccacatggccaggcctgacatcaatggagcagaaagcaaaatcatcccactggaaggatcagcaaataattaggaataaaaataaaaactaccacagtgatctacagaattacagacacttataatggggtaaaatatggaaatgcacagtaaaaacgaagttgcataaaagagaaaaatcaagaggggcctcaatataaaaatagaggtacaaggacaaaatttagtgtgttattaagaagatagacttttgcttatttggaacaacttgttttctgactcatttgaaataattttagttgcagtcatttaaatgcttcatggaacagagctttaaggctgctgacatatatgtgcgtcaagtccaatcaatagcaattttttttttatctgaacccttacgaaatttgatgttttgtgttggcaggtttgtttcatctttatctttccagtaagtacagcttcaccacttgccatttgtgaaatgatttgttcgtctatttggaaacaga

SEQ ID NO: 605496 - DNA, 566 bp, Homo sapiens
ttaagcttggaaatggtgccacgattttcatcccattttccrgaccaaagcaacccacatggccaggcctgacatcaatggagcagaaagcaaaatcatcccactggaaggatcagcaaataattaggaataaaaataaaaactaccacagtgatctacagaattacagacacttataatggggtaaaatatggaaatgcacagtaaaaacgaagttgcataaaagagaaaaatcaagaggggcctcaatataaaaatagaggtacaaggacaaaatttagtgtgttattaagaagatagacttttgcttatttggaacaacttgttttctgactcatttgaaataattttagttgcagtcatttaaatgcttcatggaacagagctttaaggctgctgacatatatgtgcgtcaagtccaatcaatagcaattttttttttatctgaacccttacgaaatttgatgttttgtgttggcaggtttgtttcatctttatctttccagtaagtacagcttcaccacttgccatttgtgaaatgatttgttcgtctatttggaaacaga

SEQ ID NO: 605497 - DNA, 599 bp, Homo sapiens
gtgttggcaggtttgtttcatctttatctttccagtaagtacagcttcaccacttgccatttgtgaaatgatttgttcgtctatttggaaacagaatgttaaaagtttgtcagggaaaatgatgagaaaacaaaccctgttttgaaatcttaaaagtttcccagtgtaagaaacttcgtagaaaccttctggaactctaagatgagaactcraaggatcagccagtcagtcagccaactcttactgccagtctgtaacataaatgcttccaatattcaaagctgttctgtcaattgatatattttaatgtggaatctcacctcctacaactgtattgggagtttttgaaacatgaaaatttcatatgtaagctcccagaattattatgtgtttaacatatttaaacatttttttcccttaaatttcaatctggagtagtaaaaagattgatacattgtggtttaaagagagtttaggaaaaacatttatgagccattatctctttattctcttttactccccataaacttatttcatagccactataatgtactgtgaggcattatatattgattataaaagaccctttccctttggaa

SEQ ID NO: 605498 - DNA, 609 bp, Homo sapiens
ctcagttttgtgatcccacagagctatctgtcttgtaatcctagctgggagttaactaatagtggagttaactaatagtgacttcaggctgttaccttccagaraatatttgaattcaaatgagtgattggaaggagcagcaactctaatgattttatttcaagtagataatggatgaaattttggaggttaggaaattctcagatcttaccccatagatagcagtttgcctatgctgctatgggctggtccgtgtaatgaacacagatgatacatagacaaggtgagacattgagggtattagtccaattcttcatctagactgccattttttttattatactttaagttctgggatacacatgcaggatgtgcaggattgttacataggtatacatgtgccatggtggtttgctgcacctatcaacccatcatctacattaggtagatttcttctaatgctatccctccccttggcccccacctcccaacaggacctggtgtgtgatgttccccttcctgtgcccatatgttcttattgttcaactcccacttatgagtgaaaacatgcagtgtttggttttctgttcgtgtgttagtttgctgagg

SEQ ID NO: 605499 - DNA, 609 bp, Homo sapiens
ctcagttttgtgatcccacagagctatctgtcttgtaatcctagctgggagttaactaatagtggagttaactaatagtgacttcaggctgttaccttccagagaatatttgaattcaaatgagtgattggaaggagcagcaactctaatgattttatttcaagtagataatggatgaaattttggaggttaggaaattctcagatcttaccccatagatagcagtttgcctatgctgctatgggctggtccgtgtaatgaacacagatgatacatagacaaggtgagacmttgagggtattagtccaattcttcatctagactgccattttttttattatactttaagttctgggatacacatgcaggatgtgcaggattgttacataggtatacatgtgccatggtggtttgctgcacctatcaacccatcatctacattaggtagatttcttctaatgctatccctccccttggcccccacctcccaacaggacctggtgtgtgatgttccccttcctgtgcccatatgttcttattgttcaactcccacttatgagtgaaaacatgcagtgtttggttttctgttcgtgtgttagtttgctgagg

SEQ ID NO: 605500 - DNA, 617 bp, Homo sapiens
atgtaagaatccttgcaagtggacttgctcttccccctgctggctttgaagaaacaattggccatgctatgagaaggcaatggagagggccatgtggcaaggaactgtgagtggcctttgggagctgcgagtggcagtgcttaggagctgaccagggcaaaggagtggattctatttaacagccccagtgagcttggaagatttgttgccagttatgcctttagaggagacctgagccctggtggacatcttggtagcagcttacagaggacccatataagctktgcccagaatcctaagctgcagaaatagtgagataataaatatgtgttgttttaagctgccaagtttgtggcaatttttaatgcagcatagaaaactaatatataatatgaggcctggcatggtggctcacacctgtaatcccagcactttgggaggctgaagtgagtagattgtttgaggccaagagtttgaggccagcctgggcaatatggcaaaacttgtctctacaaaaagtacaaaaattagctgggtgtggtggcttgcacctgtagttccaactacattggaggatatggtgggaggattgcttaagcctgggaggtcgaggctgg

SEQ ID NO: 605501 - DNA, 617 bp, Homo sapiens
atgtaagaatccttgcaagtggacttgctcttccccctgctggctttgaagaaacaattggccatgctatgagaaggcaatggagagggccatgtggcaaggaactgtgagtggcctttgggagctgcgagtggcagtgcttaggagctgaccagggcaaaggagtggattctatttaacagccccagtgagcttggaagatttgttgccagttatgcctttagaggagacctgagccctggtggacatcttggtagcagcttacagaggacccatataagctttgcccagaatcctaagctgcagaaatagtgagataataaatatgtgttgttttaagctgccaagtttgtggcaatttttaatgcrgcatagaaaactaatatataatatgaggcctggcatggtggctcacacctgtaatcccagcactttgggaggctgaagtgagtagattgtttgaggccaagagtttgaggccagcctgggcaatatggcaaaacttgtctctacaaaaagtacaaaaattagctgggtgtggtggcttgcacctgtagttccaactacattggaggatatggtgggaggattgcttaagcctgggaggtcgaggctgg

SEQ ID NO: 605502 - DNA, 542 bp, Homo sapiens
tccaataaaaccttatttacaaaaacaatatggaactagaaaaaaaaccaaggcttaaaagaattttaagtggaatcatacaatatttgcccttttgtgactggcttattttacttaacatgatgtcttcaasgttcatctatgttgttgcacatgtcagaatttccttcctttttaaggatgaataataccccattatatatatgtatatatgtcacattttgcttatttgttcttctactgatggacatctggttgggttcacttttagtctattgtgaatagtgctgttatgaacattgatgtacaaatacttgtttttgtgcctcagtttatttcttttgtgtatatacctagaagtggaatgtctgagtcataagataattccatgtttaactttttgaggaatcaccatataatttttccacagtgtttgcaccattttacattcctactagtaatgcacaagagttctaatttctccatgtccttgtcaacacttgttattttctgtttttttaaaattataatagccaccttaa

SEQ ID NO: 605503 - DNA, 542 bp, Homo sapiens
tccaataaaaccttatttacaaaaacaatatggaactagaaaaaaaaccaaggcttaaaagaattttaagtggaatcatacaatatttgcccttttgtgactggcttattttacttaacatgatgtcttcaacgttcatctatgttgttgcacatgtcagaatttccttcctttttaaggatgaataataccccattatatatatgtatatatgtcrcattttgcttatttgttcttctactgatggacatctggttgggttcacttttagtctattgtgaatagtgctgttatgaacattgatgtacaaatacttgtttttgtgcctcagtttatttcttttgtgtatatacctagaagtggaatgtctgagtcataagataattccatgtttaactttttgaggaatcaccatataatttttccacagtgtttgcaccattttacattcctactagtaatgcacaagagttctaatttctccatgtccttgtcaacacttgttattttctgtttttttaaaattataatagccaccttaa

SEQ ID NO: 605504 - DNA, 592 bp, Homo sapiens
gctacttgcccagagttatatarcaagtggctgaatcaggatttgaactcaggtcagtctaacaccagagcctaagcttaaccactgaaacactgtgcggagcagatacaagctgcatttggaaacagaaagcacaccaactaggttggaggaaaggctgtgtgttgagaagtggaggtagctaaagtaaatgtagatttgaaccaaatttcaggtggccttacatggcaggctgtagattttggactttatcctgagaactgtgggggcttagataataaaaatcagtctagagttgtgaaaaatcaaagggcatgagaagaggtgaggcagagagagctttggcaggttgcagtagtattcgagcacaatgataaagccttgaactgggatgccataaattcaaaactagataataagaagtcatgaatctgcattctcagagtaatgacctctaaaggtatttctaggttaatttagaagagatgttggttgtccctctcctgtccctgtgtccttggctgaatttttcatctaccacgtggagaatactgggagatatgccacaataaaaatgggaaacaggattcag

SEQ ID NO: 605505 - DNA, 510 bp, Homo sapiens
aagttttccctctgggttgcaggtttcatcyggaaccagcactctggtctttcagctttcaggctgctttaagcttgaagcgggggtctcacccgagacccttccctagctgcctaggcatttgtctgcctcctgcctttattagagcaagattgaaagaggctggccagagagccccttgcccaggtctgagagctcaacacagctgcggggaaccttggaagtatggacgtcttcatcacttgagggctgatgtccagctggggtgatctcagggggagtttctgtagtttgctcctcttcccctttggctctatgaggctgagagagaaggaagatagagaaggaaaggcagaaaagacatgagagaccagtttgggcacccttatacctactgtagttgtctgacctgcaggctaggcctgggttaaaggggaggagaaagttgtaaatgtgatcttggtgttttgatatgactctactggactttcaatatctaagagtgagtct

SEQ ID NO: 605506 - DNA, 650 bp, Homo sapiens
aatcaaatctaaatgcaaacattaaaatgcaaggcactatgactaggtctagggtagtcattcaagtgatgtggagcaggcttatgtttttttctccctccagattatcatagacatgggaacacaacatttaaacgccctggtagaatttcaaaagtatgtctagagatcctaatggagtcacaaaccccagattatgacacacatcaagttcaagggtctagaaactttttctggaaaaggtcagatagtaaataatttagactttgggggccatatggtctttgttctaaccaattctaccagcatgcaagcagccataggcatttggtaagcaaatggggcacagaattttttatttcttgtagagacagggtcttgctatgttgcccagccatgttccaataaaactttattaacaaacacaagcactggatttggcctgaaggccatagtttgccaatccctactctacttactgtgtgaatrataagatgggaagacctcctgactatcagctctgtattcttccaattttcagtttgtgtttggttcacatcttcaatgtatgtctttatcatgggatttagaaagtggatgttcattcaaccaggcatataagatttttcgttgcctacagttctgctctt

SEQ ID NO: 605507 - DNA, 409 bp, Homo sapiens
ctggtgtctcattggtggcctccccatgggaggaratgatgtggtacctctgtcaccctatcaatcagtgcctggatgatgtggtacctctgtcaccctatcagtgcctggaagagtactccagtgaatggaaaatagtactcatgctacagaaactcggcttcacccatagtttacctctacatctctcctgtatattttcagaaacttacttggggtttcacagacaggatttacagtcaagaccacctggggtagtccctgaaggaggaaaggcttgtctggattaaaagtgagaatgctctcaaatcccaccctagtggcacacctcatggcaggtggaagtgagacaagctcttctcaccatggcttccctccaccacctcctttgtcagaagctaaacaagcc

SEQ ID NO: 605508 - DNA, 539 bp, Homo sapiens
agaaagatctgttcatacaactgttttggctaccatttattgaggactgactacttgtaatgccaggctctacacatacatctcctcctctggtcacacagtccctgcaaagatgccattacactcatttttccaaatcacgaaactgaggctcatagaggaatttggccaatgtcccatagctaaaaagtgagagagatagtcccctaacctacttctttcagactctaaaacccatctgytttccattaccctgcattccctcttactgtttccctagaagttgtatggagcaaaagttttccaccaatttaggcctttagcatatgactgtgtattgaaaaaagctcctgctaaaacatcccctatttttcctgccagaaaaagtgtgttttccagaggttcctgatgtgcagccatcctgggtcttgctcccagatggagaaagacttgacccagccacaggctgcctcttggttgggccaccggtgtccccacccacccgccctggacacttgctccaggacagacttgaattc

SEQ ID NO: 605509 - DNA, 429 bp, Homo sapiens
gaatctgtttatcacagagcggttcatggaactgacatcttgtgaaacacattttgaggaactcggtatcagagccactgtggagttgtacacatgattgacttaatttttttttcttctcttacgtccaggctgccttccagcaacttcgagaacagagttgggcattccaagcctgggagaccctgtctcagaacatctaggctcccaggttggtcctcattggaacatgaggggacgtggttacatctgcaattgaaagacctcatctagggggtaaatgtgaaaggaaaggtccaggaaggaccagggcagagggctcccctacaattctctgatgttcattccttcaaacatccttagccatgcagacacacttgcaagtwgagagtttgcaaagccattaatagaaacaaaagtagtaagtaa

SEQ ID NO: 605510 - DNA, 607 bp, Homo sapiens
aatgtgcctattgagtacttgaaatgtggctagtgtaaccgaggaccaacatttttttaaattttatgtaattttaatgaatttaaatttaaatagcctcatgtgactagtggctactatattgggcaatgcagataggrccttaatgctaaacctaagctacacagagaaggcttctgggccagtcactcctgcatttctgcagttgccttcccccagagccaacccttctccatcccaagccccaggcccacgtgcagccatttgtaaataatcactgagttcccccagaaaacttgaagagggaactaactctagatagggtcagagctcatgggctgcccatagggtctgttgagggctaggaccaaaagggccagcccaccctgagatcactcccacctcctatggggcctcagttttccctatcagccccagtacctccaggtcatagcttggaaggcaatggcaaatttgtcaccatgaagccattatgaagctcagaacttaattatctgatcagccacctccctgggtcctgagggagcagaccctaggagtgagagacagtctttgagagagaaagaaaaagaaacatgacattgcc

SEQ ID NO: 605511 - DNA, 432 bp, Homo sapiens
cataaatgtgagacaactctagacttttttctaagtcactgaagctctgtttatctttttttttttccttcctttttastctttttttctctctgtgcttcactttggatatttttgattgctctgtgttgaaacttactaatattgttttatatagtgtcagatatggttcgggtttgtgtccccacccaaatctcttgtcaaattataactccggtattggaggaggggcctggtgggagatgagtggatcacagggatggatttccctcttgctgttctcatgacagtgagtgagttctcatgagatctggttgtttaaaagtgtgtagcacctcccccttcactctcttcctcttacatgctctggccatgtaagatgtgcctgcttccccttttgctatgacttaaagtttcttaaggcctccccag

SEQ ID NO: 605512 - DNA, 618 bp, Homo sapiens
ggctggtgggctagctccttgcccattctttcaacatattattactactactattgccactacttcaattatttgctattagtggccttttttctatcttctctctccatttcttcccagtacatcaaatgctgttctgaggtcagtgcatctatgtacattggaagagcattaatatctatagggcagcccaggttctgggaacctggccacatcatcttacgtatactgtatctattcatcctcagaatagacctccttagcagctattattactccatatgacaatggggaaactgagcctgggagcttgaggaacttgtcagaagacacacagctaggaagtggcagagagcaagtgtctgactccaaagtccacgctctttctacttttcataatggttgcatcccagctctaaaatttgtttatttcttctttcayatactccgtcttttcagaaaggatttgatagagatgacacatttgttattgttcctaagctctggcttctgcctccatactgcttaagcccaggagattgaggaggatggcgtgggctggaggtggactgtgcgagaaagctcttcctgtcaccagaacccttgcttgtcaccaag

SEQ ID NO: 605513 - DNA, 378 bp, Homo sapiens
ccttagcagctattattactccatatgacaatggggaaactgagcctgggagcttgaggaacttgtcagaagacacacagctaggaagtggcagagagcaagtgtctgactccaaagtccacgctctttctacttttcataatggttgcatcccagctctaaaatttgtttatttcttctttcacatactccgtcttttcagaaaggatttgatagagatgacacatttgttattgttcctaagctctggcttctgcctccatactgcttaagcccaggagattgaggaggatggcgtgggctggaggtggactgtgsgagaaagctcttcctgtcaccagaacccttgcttgtcaccaagtggcccacttgcaacag

SEQ ID NO: 605514 - DNA, 516 bp, Homo sapiens
gacacctccattctttttcgagtggaagcaaaagacatgtaactcctgcaggtaaaactgtgaccaacaccataaaactgtgatcaacaaacatttattaaactatactatgaggaaaacatgaaatattagaataaaaggtagacagtgataattagtttaaaggacatgcagagatggaggtttagaagagacaggaattacagttggggaagagaacatgaaaggcttcctggagagcatggtgtttgcactggatcttggtagtttgggaaaggaaagcaatctaagtggaagttagtatgaatggaaggagtggggaccaggttacagaaaggaaatagtaagtgagctagtttgaatggaaaacttttgaagaaaagaagtggagaataaggcaagagagggttaagctccttctggaagatagggaccacatgtctgacaagattgttttatgagggctcrgtatattcttgggggcaagctcaatctcacaaaccacaagagtagatc

SEQ ID NO: 605515 - DNA, 548 bp, Homo sapiens
tgttgtcttggagattaggcygggctaaacctaccacccatgtaagcctaaaggaggtacactgcttttaaagaagcttcattgtctgtcactacatcagagagtttgactggtatccaaggaaatctcatacaggaggggaggtaagttctcagatgataaacggaaatgatttcccctgagaggatcttatccagagaactattcagagccactcttttgttattattttttatttgcataaatttaggggtacaggtgtagttttgatacatgaatacagtgcatagtggtgaagtctgggcttttagtacaaccattacctgaatagtgtacattgtacctgttaagtaatttcccatccctcaccccctccctctctcccacctttccaaatcttcagtgtctattattccacactctatgtccatgtgtacactttatttagctcccactcataagtgagaacattcagtatttgacattttgtttccgagttgtttcacttaggataatgggcctctagttccatccatgttgccgcaaca

SEQ ID NO: 605516 - DNA, 628 bp, Homo sapiens
caaacaaacaaaaaaatcattaaacatgcaaaaacccccaaaaacaaaacaaaacaaaatataaaaatgtgacctatagccaagaaaaaggtcaaccatagaaacagacatacagmtctctcaggtgaaattggtagccacgggctttaaaatgactgtaataaatacattaaaggatcttcaggaaaaatgaatgacgagacaggcaatttcaggagacagatggaaactccaaaagagaaacagatgataaacctagaatttaaaaatacagtatttgaagtttcaaaagcattgttaagatcagtagcaggttggacagtgcaaagtagaggatcagtaaaggtgaagacaggtcagtaggaattattaaaactgaagcacggaaagcaaaatgattgagaaaaattgaacagaactttaataaattaagcaaaagtatcaagtggtcaaacacacatatacttaaagtctcaggagagaaaagagagataagagaaaaaaatatgagggaatattggacaaaattttgccaaatttgatgaataatatcaacacatagatccaaaaagcatagcaaatcctaaataggataaattacacaactagacacatttactgaaaacca

SEQ ID NO: 605517 - DNA, 530 bp, Homo sapiens
ctaatttatgtatttttagtagagacggggtttcaccatgttggccaggatggtctagaaatactggattaaagtgatccacccacctcggcctcccaaagtgctgggattacaggcatgagccaccgcacctggctttcactgtcctttctaaaaatatttcattacattaagaaaaaaatgaattataagtagtatgtatttattgagaacatctactataagaaaaagcaattattcttcaaaagratctttttaaggtaccccatatttttccttctaacatttcttcttaaaataatttcagtaaattcaaaactagtagaactttccatctgaaaataggtcagatgtatttggggtaagaaacttagttcacatttctgaaatgagctcatcaagtggtcctttacatttccccagcatcttttatgaacctttgccccggatagatattcaattaggtagagtagctgaattgctcaaataacatttctaaactggatttgtttgtcctagtaaagtcttac

SEQ ID NO: 605518 - DNA, 608 bp, Homo sapiens
ttttatctttaaatctgtatgtttatctgttttcaaacactagaaagtctcaagaatgtgttagtcttgcttgacacttcttttggttaaaaaaaatcaaattgtctctattttctaggcttaccaagagactaaagagtgaatccttgaaatccgactttacaatagatttaaaacatgaggtatgtcatgttttgtttgattaaaaatcttactaatcaagaattcatgtcctttgatgtaaaaggtattttgcattccctaatcttgcattttccccacccacatctactccccacagagataatttcatagcactccagcgaattaggtgcttttattttaagctcatttcagttatgtagrtgaagacagaacagtgaaaaaggttgcatcttgtgattcatgattctttacttttaagctagatgaatgggtccagaggtagatttctaaaaaaatgcaaaaatgtcattaaaagtacctctgctcttacttgatgcttcggttgtacgtatgccagtgtagattgaatgatcatgtccccgcccccctaattcataccttgaaacctgagccccagtgaaatggtctttggaggtagacct

SEQ ID NO: 605519 - DNA, 608 bp, Homo sapiens
ttttatctttaaatctgtatgtttatctgttttcaaacactagaaagtctcaagaatgtgttagtcttgcttgacacttcttttggttaaaaaaaatcaaattgtctctattttctaggcttaccaagagactaaagagtgaatccttgaaatccgactttacaatagatttaaaacatgaggtatgtcatgttttgtttgattaaaaatcttactaatcaagaattcatgtcctttgatgtaaaaggtattttgcattccctaatcttgcattttccccacccacatctactccccacagagataatttcatagcactccagcgaattaggtgcttttattttaagctcatttcagttatgtagatgaagacagaacagtgaaaaaggttgcatcttgtgattcatgattctttacttttaagctagatgratgggtccagaggtagatttctaaaaaaatgcaaaaatgtcattaaaagtacctctgctcttacttgatgcttcggttgtacgtatgccagtgtagattgaatgatcatgtccccgcccccctaattcataccttgaaacctgagccccagtgaaatggtctttggaggtagacct

SEQ ID NO: 605520 - DNA, 608 bp, Homo sapiens
ttttatctttaaatctgtatgtttatctgttttcaaacactagaaagtctcaagaatgtgttagtcttgcttgacacttcttttggttaaaaaaaatcaaattgtctctattttctaggcttaccaagagactaaagagtgaatccttgaaatccgactttacaatagatttaaaacatgaggtatgtcatgttttgtttgattaaaaatcttactaatcaagaattcatgtcctttgatgtaaaaggtattttgcattccctaatcttgcattttccccacccacatctactccccacagagataatttcatagcactccagcgaattaggtgcttttattttaagctcatttcagttatgtagatgaagacagaacagtgaaaaaggttgcatcttgtgattcatgattctttacttttaagctagatgaatgggtccagaggtagatttctaaaaaaatgcaaaaatgtcattaaaagtacctctgctcttacttgatgcttcggttgtacgtatgccagtgtagattgaatgatcatgtccccscccccctaattcataccttgaaacctgagccccagtgaaatggtctttggaggtagacct

SEQ ID NO: 605521 - DNA, 608 bp, Homo sapiens
ttttatctttaaatctgtatgtttatctgttttcaaacactagaaagtctcaagaatgtgttagtcttgcttgacacttcttttggttaaaaaaaatcaaattgtctctattttctaggcttaccaagagactaaagagtgaatccttgaaatccgactttacaatagatttaaaacatgaggtatgtcatgttttgtttgattaaaaatcttactaatcaagaattcatgtcctttgatgtaaaaggtattttgcattccctaatcttgcattttccccacccacatctactccccacagagataatttcatagcactccagcgaattaggtgcttttattttaagctcatttcagttatgtagatgaagacagaacagtgaaaaaggttgcatcttgtgattcatgattctttacttttaagctagatgaatgggtccagaggtagatttctaaaaaaatgcaaaaatgtcattaaaagtacctctgctcttacttgatgcttcggttgtacgtatgccagtgtagattgaatgatcatgtccccgcmcccctaattcataccttgaaacctgagccccagtgaaatggtctttggaggtagacct

SEQ ID NO: 605522 - DNA, 562 bp, Homo sapiens
tctttaaaaattacaaaatcttaaaagcctattaggagcattagaaacaaaccttccaaagccagatgcattgatttactgctgttaatttgaatctgggatcattaaagcatgaggcctaaaatgtatcatgaagttttcatatttgggtttctgtggtaagccgtttttcaacttggatatgtttgtttgaaaagatagtctaaggcaacaggatttcagtgactttgaagtccattttgcatgacttcatgtagcctgccaagccaccactgggctctgcccctcattttagaagcctagtccagccatcagttggcccaaagagttatccagtaataccagttacaaggataacatcacactaactgcttctaactgctaatatttcttacattttctggttgtgttttttacatatgttctattacctaagtttcatgttgacacttcctcgkgatatgataattattgttattcacttgttgtggaaaaagctgagtatggaatgatacacaactggctcagtttcttgtatcctattgagtagcagagccaaaga

SEQ ID NO: 605523 - DNA, 511 bp, Homo sapiens
aaaaaaaaaaaaaagaaaagaaaagaaaagaaaaaagaaaaaaagaaaaggcttggcttaaaatgcagctgtttctagagacctgacatggtactcttcaaaccacttctttttcctcattttctccaggagctactggaaatgaagtattttggctgaatccatgcaacctcyacactctgcaccacccacacacccaaatagagctcaagacctacaaggagggtcttccgtgactccgagccaacctgaaatctgtgaaggtgacttgaagggaagagcctgggggaagtagtcagggataactcagaggcacagaagcagttttttattttatatacaacatatggaacatgtgaaaatgaaaaccctttggctaaactagaggatacaatatttgatctacctcatgtgcaaaaattactttactttttaaagttctctaaacacattaaaataccctgataacaaaaagttttggtcgagaaatgtaatccttaattactcaggc

SEQ ID NO: 605524 - DNA, 581 bp, Homo sapiens
gtatagaggtctctaagcagctaggttagctccatttggtctaaagcagaaaatgtaatccaacctctgacccgccgacctctgcccccaataatgaaacccttttaagcatcctgacttctgatttttttttagagaggggggcagtatttgcaggttgccttgcctggaaccataatgtatctctggttctgcctatttctcagctcctgccttaattytaaacactgtcctacccctctccccaaatattccttctacagtggcttacttctctgctccccatccaaagtgattccctgggcaagcaagaccctggccttgtgctgaggttaaagttcctactttagtgtcttcaaatggtgcctggattcttgctttactagaacctactgaaagcaatgcaattatgctttatcttctctccttcattgtttccaatttaatcttacgtaaagttcctctggagaacaacaatggttttagacaggtgttaatatgcttttgaaactacaggaaagattgtttcagcatgggatccgcttggtggctagaccccaggttctagaaggaaaaaaaaa

SEQ ID NO: 605525 - DNA, 581 bp, Homo sapiens
gtatagaggtctctaagcagctaggttagctccatttggtctaaagcagaaaatgtaatccaacctctgacccgccgacctctgcccccaataatgaaacccttttaagcatcctgacttctgatttttttttagagaggggggcagtatttgcaggttgccttgcctggaaccataatgtatctctggttctgcctatttctcagctcctgccttaattctaaacactgtcctacccctctccccaaatattccttctacagtggcttacttctctgctccccatccaaagtgattccctgggcaagcaagaccctggccttgtgctgaggttaaagttcctactttagtgtcttcaaatggtgcctggattcttgctttactagaacctactgaaagcaatgcaattatgctttatsttctctccttcattgtttccaatttaatcttacgtaaagttcctctggagaacaacaatggttttagacaggtgttaatatgcttttgaaactacaggaaagattgtttcagcatgggatccgcttggtggctagaccccaggttctagaaggaaaaaaaaa

SEQ ID NO: 605526 - DNA, 644 bp, Homo sapiens
tgggcaagcaagaccctggccttgtgctgaggttaaagttcctactttagtgtcttcaaatggtgcctggattcttgctttactagaacctactgaaagcaatgcaattatgctttatcttctctccttcattgtttccaatttaatcttacgtaaagttcctctggagaacaacaatggttttagacaggtgttaatatgcttttgaaactacaggaaagattgtttcagcatgggatccscttggtggctagaccccaggttctagaaggaaaaaaaaaaaaaaagactcaggtgacagctttgccatcacaacataaattcaagatacttaatagtatcatctctagaacctgagctgtttgctcttttgtttcatgtaactaacaaaatatttaatataagaatttttacacaaatatccactccagaaggaattttaagtcaaaaaaacagatgtcaaatcataattgacacagatgcagtgcacataataggcatctgaacaaaataaactcaaacaggtgatttattagatcattgcacaaactctccttatgggtttctgtctgtctcacctccactttgctttttgtttgcatacctctttaaatagtcagtctcgatcacttcacattaccctt

SEQ ID NO: 605527 - DNA, 541 bp, Homo sapiens
tgatggaggaaactgaagacacaaataaatggaaagatatccatgtccatgggttggaagaattaatatcagtaaagggtccccactacccaaagcaatctacagattcaatggaatccctatcaaaattccaatggcatttttcacagaaatactttttatcctaaaatttatatggaaccacaaaagatgccagatagccaaagcaatcttaacaaagaaaaataaagctaaaggcatcaaagtctctgatttcaaactatattgcaaagctatggtaatcaaaacagtatggtattgacataaaaccrtacacataagtcaatgaaacacaataggaatcccagaaataagcttacacatatatggtcaactaatctttgacaagggtgtgaagaatacacaatgaagaaagaaaaatctctttgataaatggtgttgggaaaactggatatccacaggcaaaagagtgaagtcggacttgtgttttataccacatacaaaagttaacttgaaatggattagagactttataagatct

SEQ ID NO: 605528 - DNA, 541 bp, Homo sapiens
tgatggaggaaactgaagacacaaataaatggaaagatatccatgtccatgggttggaagaattaatatcagtaaagggtccccactacccaaagcaatctacagattcaatggaatccctatcaaaattccaatggcatttttcacagaaatactttttatcctaaaatttatatggaaccacaaaagatgccagatagccaaagcaatcttaacaaagaaaaataaagctaaaggcatcaaagtctctgatttcaaactatattgcaaagctatggtaatcaaaacagtatggtattgacataaaaccgtayacataagtcaatgaaacacaataggaatcccagaaataagcttacacatatatggtcaactaatctttgacaagggtgtgaagaatacacaatgaagaaagaaaaatctctttgataaatggtgttgggaaaactggatatccacaggcaaaagagtgaagtcggacttgtgttttataccacatacaaaagttaacttgaaatggattagagactttataagatct

SEQ ID NO: 605529 - DNA, 541 bp, Homo sapiens
tgatggaggaaactgaagacacaaataaatggaaagatatccatgtccatgggttggaagaattaatatcagtaaagggtccccactacccaaagcaatctacagattcaatggaatccctatcaaaattccaatggcatttttcacagaaatactttttatcctaaaatttatatggaaccacaaaagatgccagatagccaaagcaatcttaacaaagaaaaataaagctaaaggcatcaaagtctctgatttcaaactatattgcaaagctatggtaatcaaaacagtatggtattgacataaaaccgtacacataagtcaatgaaacasaataggaatcccagaaataagcttacacatatatggtcaactaatctttgacaagggtgtgaagaatacacaatgaagaaagaaaaatctctttgataaatggtgttgggaaaactggatatccacaggcaaaagagtgaagtcggacttgtgttttataccacatacaaaagttaacttgaaatggattagagactttataagatct

SEQ ID NO: 605530 - DNA, 638 bp, Homo sapiens
catagccattaccaagcagtccactgagatagagaactctctttagcaacacctataaatatgagggaaagtgctttctttctctttttcaaacttttattttaggttcataggtacatgtgcaggtttgttacatagggaaactcttgtcatggggattgattgtacagattatttcatcacctaagtactaagtgtagtacataataattatttttttctcttcctctccctcctcccaccctccaccctaaggtaggccccagtgtctcttgttttcctctttgtgtccatgtgttctcatcatttagctcccacttgtgggtgagaacatgtggtatttgattatctgttcctgtgttagtttgctaaggataatagccttcagttccatccatgttcttgcaaaggatatgatcttattcttttttatggctgcatagtatcccatggtgtatatgtacattttctttatccagtccaccagtgacgggcatttaggttgattccatgtctttgctrttatgaatagtgctgcaatgagcgtatgtgtgcatgtgtctttatggtagaacaatttatattcctttgggtatatccagtaatgggatcgctgggtcaaatagtagttctgtttt

SEQ ID NO: 605531 - DNA, 541 bp, Homo sapiens
tgatggaggaaactgaagacacaaataaatggaaagatatccatgtccatgggtyggaagaattaatatcagtaaagggtccccactacccaaagcaatctacagattcaatggaatccctatcaaaattccaatggcatttttcacagaaatactttttatcctaaaatttatatggaaccacaaaagatgccagatagccaaagcaatcttaacaaagaaaaataaagctaaaggcatcaaagtctctgatttcaaactatattgcaaagctatggtaatcaaaacagtatggtattgacataaaaccgtacacataagtcaatgaaacacaataggaatcccagaaataagcttacacatatatggtcaactaatctttgacaagggtgtgaagaatacacaatgaagaaagaaaaatctctttgataaatggtgttgggaaaactggatatccacaggcaaaagagtgaagtcggacttgtgttttataccacatacaaaagttaacttgaaatggattagagactttataagatct

SEQ ID NO: 605532 - DNA, 588 bp, Homo sapiens
attattgtgttgctggtaggctgtggagaacagcgaatgcatatacattgttggtgggagtgtaaattagtttagctactgtggaattaagtttggagatttctcagagaacttaaaacagaactaccattcaacccagcaattatacyaccaaaaagcatgtgcactcaaatgtttatcacagcaccattcacaatagcaaagaggtggaatcaacctaggtgctcatcaatggtggattggatcaagaaaatgtggtacacatatgccatggaatactatacaaaaagaatgaaagatgaaaaaggtatacaaaaagatgaaaaagaataaaatcatgtcctttgaagcaacatggaggcagctggaggccattatcctaagtgaattaatgcagtaacagaaaaccaaatgccacatgttctcacaagtgggagctaaacattgggtactcatgaacataaaaatggcaacagtagatactgaggactactagagtgggagggagagggggcaattgttgaaaaactactgggtactatgctctctacctagatgatgggatcaatcataccctaaacctgagca

SEQ ID NO: 605533 - DNA, 584 bp, Homo sapiens
gctctacctcactgtggctgagctggtacctaaggtgcaagacaaagtgccctttacttttcactctgattttcttaagcaggagtctttcaccatagctgggaatgtgttggctctcacctgaagccagcacatctcagaatctcaaccaaggcctatggcatcctacctgggtatcactgctgattatttaggatccaagggctctttagtaagcagctgatgggactcagtcaagactgcatccttctcttcaaggcaacaggttcccttctggcctagggtttgtctagacatgacatccaggtgctagggcccagaatggggacctcatgactctgcccagtgccctatctgattgtggctgagttcttattcaagatgcaagacaaagtcctctttactcttcactcttctctcctcaagtagaaggaaggagtcactttctttgctgccagctatgctgcctgagataggggaaggggtggttcaagcactctcttagctgccccagctgttgtctccctaggtcatgtgmcaccctagtccactggctctaagcccagcccactaccatgagttgc

SEQ ID NO: 605534 - DNA, 496 bp, Homo sapiens
aactgatataaaattttagcattttgatttttatgtagtattaatgagcaattaaagaatacatttcatgcttgagtatattkttcaaattcagtaagatattttattttcaaatgcaataaaaatgtctttatccccccaaattttactccttaaatttaacacttcgtttcaccgatttagacaccaataaaagcaagtgattacacagaatcacagagctgaggtggttgttctttgcctttataatcacatgctataatttttaatttcatgtacttttaaagtgtagacatatgtgtcatatattaccacagggactgcagtctggaagtatgctcaaagcaagctcaaactgaggtaggaggcaggacttgactccagaggcgggggcttggacagcagacccaattgaggactagctaaaccaggtctagggcagaagcagctttccttaagccttgtctagcaatgtggcatgtcaatttaccgttgc

SEQ ID NO: 605535 - DNA, 496 bp, Homo sapiens
aactgatataaaattttagcattttgatttttatgtagtattaatgagcaattaaagaatacatttcatgcttgagtatatttttcaaattcagtaaratattttattttcaaatgcaataaaaatgtctttatccccccaaattttactccttaaatttaacacttcgtttcaccgatttagacaccaataaaagcaagtgattacacagaatcacagagctgaggtggttgttctttgcctttataatcacatgctataatttttaatttcatgtacttttaaagtgtagacatatgtgtcatatattaccacagggactgcagtctggaagtatgctcaaagcaagctcaaactgaggtaggaggcaggacttgactccagaggcgggggcttggacagcagacccaattgaggactagctaaaccaggtctagggcagaagcagctttccttaagccttgtctagcaatgtggcatgtcaatttaccgttgc

SEQ ID NO: 605536 - DNA, 496 bp, Homo sapiens
aactgatataaaattttagcattttgatttttatgtagtattaatgagcaattaaagaatacatttcatgcttgagtatatttttcaaattcagtaagatattttattttcaaatgcaataaaaatgtctttatccccccaaattttactccttaaatttaacacttcgtttcaccgatttagacaccaataaaagcaagtgattacacagaatcacagagctgaggtggttgttctttgcctttataatcacatgctataatttttaatttcrtgtacttttaaagtgtagacatatgtgtcatatattaccacagggactgcagtctggaagtatgctcaaagcaagctcaaactgaggtaggaggcaggacttgactccagaggcgggggcttggacagcagacccaattgaggactagctaaaccaggtctagggcagaagcagctttccttaagccttgtctagcaatgtggcatgtcaatttaccgttgc

SEQ ID NO: 605537 - DNA, 521 bp, Homo sapiens
ttcgtggaacccttggatcattctaaagttctggactaggaacatgtttagcttttaaccagaaaaagagatgcaaygataatcatcaaccacaaatgcatctattttaataagcagggttatggtgaggtttgcaaatgcagaagtcatagttagaagggatcatatagtaaaaggatccaagttcagaaaactatcaatggcaaaatctaaactaggtaaaaatgcctaaactagacttctaagagaatttttccatgggctgtacctgtattatccttaaccagtcaatcattttgatcactacagtgtgggttcaggaggggtgggtggggagacaaattttggcattatgtactaagtgcttactgaatgccaagttctttaagtggattatctcatttaattattacaactcaggatgaagatactgttattatcaccatcttatggaagaggaaaccgaggctcacacagatcgtgatttgtttatgatcatagcctataagggcagagcttag

SEQ ID NO: 605538 - DNA, 521 bp, Homo sapiens
ttcgtggaacccttggatcattctaaagttctggactaggaacatgtttagcttttaaccagaaaaagagatgcaacgataatcatcaaccacaaatgcatctattttaataagcagggttatggtgaggtttgcaaatgcagaagtcatagttagaagggatcatatagtaaaaggatccaagttcagaaaactaycaatggcaaaatctaaactaggtaaaaatgcctaaactagacttctaagagaatttttccatgggctgtacctgtattatccttaaccagtcaatcattttgatcactacagtgtgggttcaggaggggtgggtggggagacaaattttggcattatgtactaagtgcttactgaatgccaagttctttaagtggattatctcatttaattattacaactcaggatgaagatactgttattatcaccatcttatggaagaggaaaccgaggctcacacagatcgtgatttgtttatgatcatagcctataagggcagagcttag

SEQ ID NO: 605539 - DNA, 553 bp, Homo sapiens
ggccaaaaagatattaggatatttagtaagccattgagaggccagtccgtagagctattcagggatttgaacatctaatcagtaagtagttttacagattattgaatcagagtgtcaaaaggcatttcaaatcattatgcatttacaaatatttacagatcttttaaagatcaagtyggtcattatcagtttctgtgctgcatattgtcagtatccacagtgaccccagaggagcctgtgctggcaggagtaatgctgtggtatgttcagctctgctggatctccatagaggggggctggaatgccttgtggaacaatgccctaggctccagagagcaaagaatgaagggcagcctagtttgataaccacattaaagcactaccaacatctgttcaagccaaagacaacactatctccaggaattaaccttctgaaccactgaatcattaccctcagcagagtgaaagttggacaacaacagcctatttgtcagtggttcctcagagagacgtggtaagccgtattttactgcaaacagcgtgagaaggcctg

SEQ ID NO: 605540 - DNA, 521 bp, Homo sapiens
ttcgtggaacccttggatcattctaaagttctggactaggaacatgtttagcttttaaccagaaaaagagatgcaacgataatcatcaaccacaaatgcatctattttaataagcagggttatggtgaggtttgcaaatgcagaagtcatagttagaagggatcatatagtaaaaggatccaagttcagaaaactatcaatggcaaaatctaaactaggtaaaaatgcctaaactagacttctaagagaatttttccatgggctgtacctgtattatccttaaccagtcaatcattttgatcactacagtgwgggttcaggaggggtgggtggggagacaaattttggcattatgtactaagtgcttactgaatgccaagttctttaagtggattatctcatttaattattacaactcaggatgaagatactgttattatcaccatcttatggaagaggaaaccgaggctcacacagatcgtgatttgtttatgatcatagcctataagggcagagcttag

SEQ ID NO: 605541 - DNA, 521 bp, Homo sapiens
ttcgtggaacccttggatcattctaaagttctggactaggaacatgtttagcttttaaccagaaaaagagatgcaacgataatcatcaaccacaaatgcatctattttaataagcagggttatggtgaggtttgcaaatgcagaagtcatagttagaagggatcatatagtaaaaggatccaagttcagaaaactatcaatggcaaaatctaaactaggtaaaaatgcctaaactagacttctaagagaatttttccatgggctgtacctgtattatccttaaccagtcaatcattttgatcactacagtgtggsttcaggaggggtgggtggggagacaaattttggcattatgtactaagtgcttactgaatgccaagttctttaagtggattatctcatttaattattacaactcaggatgaagatactgttattatcaccatcttatggaagaggaaaccgaggctcacacagatcgtgatttgtttatgatcatagcctataagggcagagcttag

SEQ ID NO: 605542 - DNA, 489 bp, Homo sapiens
agctttcttgtggagtcttcagatttttccaaatagaagatcatattatttgcaagcaatgataatttgacttcttccactccactttggatgcygtttatttctcttgtctgtttgccctacctaggacttccagtactgtgttgaataacaatggtgacaatggccacccttttcatgctccagatcttagaggaaagagctttagttttttcccattctgtgtgatactacctgttggtctgtcatatatgatttttattatgttgaggtatgttccttctgtccccaatttcctgagggtttgtattatgaagggatgttgaattttatcaaatgcttttcagcagcaattgaaatgataatatggtttttatcctttattctgttaatatgatgcatcatattaattgatttgtgtatgcatttttacatcccagggataaataccactcggtcatgatgaatgatctttctgatgtattgttc

SEQ ID NO: 605543 - DNA, 576 bp, Homo sapiens
ggctaagtatctgcttctgaagctggaacatagaatccctgagttcatcatcatctttcaacactttgtccagtgaactcaggagcaaccaaccaactttattatgttccttggttctccacatgtagtcaaaggtattatgtatagagtaacttgcctcttatgagcagtgaatcaggaatgtcaaatgactttattttgcatatctctctaaacagttcatgccaaggactatcagtgttctccatacttttagaagtagagtccttagcattttggggtctaatcgtattaagcagccaactccagaaaccccaaaaccaatgaaagaacattatccttaatattctgttcctctagaaccaytcctggtaccataatctgtattagagttctctagagggacagaactaataggatatatatatattaatttattatatttaataatataattatttatatatataataaacatatatatatatatatatatatatatatgagtttattaaggagtattaaactcacatgatcacaaggtcccacaataggccacctgcaagctgaggagga

SEQ ID NO: 605544 - DNA, 612 bp, Homo sapiens
ctaaacttgccctttcttctttttaagtatatattttaagagttcctttagtgaccctctctgacctgtaaaatagcaggctgagcatgtgtaaaaatactttgatctaccctcactcttgaaattatttttatctagcactttaagataacactattttttactgatgataaatatactgtgagtctaattgattctttcataggtaatcaatgttttctggtagttttaaagatagtatcttaatccttaatgttctgcagttttattatgatgtatctagctgtatatttccatttatcctgctcaaatctcatgtatactacagaactgagaactcaagcattcaattctggatgttttttcagttatcatatcagcaaacattacttctctgcgatattcttcacyacttctgtcattcctacagaatatttgttgaagcctctcaatctatagctcatatgtcattattctgtttttaaaaaatcattctctttgctatatttagaatttctcagtactctgtcttgcaatttaatatgttctctctgactatatgcaacccaaagtttatgttcttttgaattttttatttaaatgacttttttt

SEQ ID NO: 605545 - DNA, 564 bp, Homo sapiens
tgaaaaaaaatacaattacgcaaagttaacttaaggggaaatccatgcaagcatgttaagagaggattactgcctaatgttgtgataaagcaggtaggtaccaaaattcctgacccagctcagccctaggcttgtcatgaaagtaaataattgcacagccatcttcaccttgatgatggaggctcagattagaattttyccaaccaaaaatgactgggcgcagctgtcccctattttgtctagtcagcattcagcatggcagataagtgaatattactgcattaactggaattaatctttgcagaacttaaaaagactaagctctatttctatgaagatgaaagaaaaagacaaggacaaagtgggaccacttgcaaggccaaaatctgagagcttgtggaaaaagggtaggatctatatttttaattaatagcttttaggcaaaggcctctcaaagaccttgcataggagagggtggtatttggggttcactactgaggtcagtaagcaattgggttttttgttgttgttgtttgtctattaactaggtgtgtagcaggacat

SEQ ID NO: 605546 - DNA, 481 bp, Homo sapiens
aatataattcctcatttgaagaagttgattcattaacaaattctagttgtacttgtacagtgtatattcaccttcctttgtgaaagatggtgaacatatacaccctgagacaagtgctgattgtatcataattgataagacccartcctttcacacaaggaactcatactctattgaggagagagacaaagtgtcattcaaatattccacaatagtgcagtgataaagaaatgaacatgtgccatggaagcacagataacgcagactagagatgagagggaaagcttcctggaggaggcaaagcagggcaacagcgtaaacaagggtccagaggtgttaaccagcaagataagattaaggtgagattagggcattttgatttgctagactacaaaatggaagcaggaagtggcaagtcattaatatatataaaaacatttataaatatgtgtatatacacgttattataatcacataaatt

SEQ ID NO: 605547 - DNA, 557 bp, Homo sapiens
gaatgaataaagaaaaagaagtaaatatcccaggcagagaatttcaaataatttatatagatatttcaccctaaatgaagtggaatataactgtctgactccataagtgtggccttcgtgtggtgacttccttctgagtaaagtatagaaagcgggaaggaagagtaactttacagtggagaaacctgacaaacactgtcttagccaggttcaaggtcaacatcaacagtgctctcacattgatrgtaggtatctttgatatgatgtgatgaaagagcactttacctctatggtcttcctcccagaaacccatgtcttagtccattttgtcttgctataatagaatacttaaggcttggtaatttatgaagaaaagaaatctatttagttcacaatcctgcaggcttggaagctcaagaagcatagtgctggtatctactcagcttctggtgaaagtctcatgctacttccactcatcatagtggaaagcagaaggggagtggacatgtacaaagagatcacatggcaagagaaaaaacaagagagagagaaaccaa

SEQ ID NO: 605548 - DNA, 544 bp, Homo sapiens
gtcaaatgcataaagtcaaagcattttcttagtcaggtctctggccttgaaggagaatctactcaagtattttcagtgttcaaaatatttcccgatttgggtcaacaaatagctgacaaaaaattgaagcgttatcctaattttgtttttttacaaaagtgaatgtgaacatgctggagaaagtatactctcatatactggtggtaaaaatatgaattgttatagtctgtctggaccagaatctggtattatctactaaattaaatatatagctacatttcrtcctagcaatgccactcatgggaatctactccacagaaataaaagcactggaaatggaaggcatgtttgtgagaaggggtatggctgagtgaactgcatatctaaaccatggccttttatgccagcacttaaaggaatgaggtggtttccatggtgtattattaagtgaaaaaagcaagatgtggtagtatatatacgatacttggatgccactgttgtaaaatcaaataaccaaaacctcccttttgtatatgtaatataa

SEQ ID NO: 605549 - DNA, 647 bp, Homo sapiens
gcacttttcactgtcctttgttgcttttgaatttcacacaatatgcatgtgctactgactcaaaataagaaataaaacttaatttgtgttgtatcccaagaaccacagactctcttaraggccaatgatttaccatcagtttcttcagtgggcatcatcagcctgctcttgttcctttagcacatccttttcttttccactgtagggcctgggttcctgcagtccactctgtccagataacttccttcatacacaaagggagtacaggaaagatatttagttgccttcttacctgcccttttgatcttggctcgaacacttctcctcgcccatgcaactaaaataaatctgctgttctatctcccagtcatgtattgtatatgtatgatttggtttggctctgtgtccctacccagatctcatcttgaattgtactcccataattcccatgtattgtgggagggacccagtgggagataactgattcataggggcggtttcccccatactgttctcctggtagtgaataagtctcataagatctgatggtttgataagaggaaatttgtttcacttggccctcattctctcttgccaccaccaagtaaaaagtgccttttgccttccaccatgattgtgaggtctca

SEQ ID NO: 605550 - DNA, 647 bp, Homo sapiens
gcacttttcactgtcctttgttgcttttgaatttcacacaatatgcatgtgctactgactcaaaataagaaataaaacttaatttgtgttgtatcccaagaaccacagactctcttagaggccaatgatttaccatcagtttcttcagtgggcatcatcagcctgctcttgttcctttagcacatccttttcttttccactgtagggcctgggttcctgcagtccactctgtccagataacttccttcatacacaaagggagtacaggaaagatatttagttgccttcttacctgcccttttgatcttggctcgaacacttctcctcgcccatgcaactaaaataaatctgctgttctatctcccagtcatgtattgtatatgtatgatttggtttggctctgtgtccctacccagatctcawcttgaattgtactcccataattcccatgtattgtgggagggacccagtgggagataactgattcataggggcggtttcccccatactgttctcctggtagtgaataagtctcataagatctgatggtttgataagaggaaatttgtttcacttggccctcattctctcttgccaccaccaagtaaaaagtgccttttgccttccaccatgattgtgaggtctca

SEQ ID NO: 605551 - DNA, 560 bp, Homo sapiens
cgtctctattaaaaaatacaaaaattagctgggcgtggtggcgtgcgcctctagtcccagcttctcgggaggctgaggcaggagaatcacttgaacctgggaggcggaggttgcagtgagccgagatcatgccactgcactccagcctggctacagagcaagactccatctcaaaaaaaaaaaaaagaaaagaaaagaaaaaaaaagaaaagggagtacagggagctatcacagcaatatactaaaatatgtcttgctcatatatgtgctatatttttaatgtagatagatatagctatgattgattcatttaaagtgcagttgaattcataggtttatttgcccatggacttcttcckcagtcgctatattctaatagcacaactattatagatgtggcagttgggagggtgggacaggaagaggtacctcataaaaactacaaacattaaaaaggggtctctacacatgtccatactttgagagaaaccttgggctttctaagtgaatgttggattgctatgctacagaccccaaatggatttgaaaatgattattga

SEQ ID NO: 605552 - DNA, 560 bp, Homo sapiens
cgtctctattaaaaaatacaaaaattagctgggcgtggtggcgtgcgcctctagtcccagcttctcgggaggctgaggcaggagaatcacttgaacctgggaggcggaggttgcagtgagccgagatcatgccactgcactccagcctggctacagagcaagactccatctcaaaaaaaaaaaaaagaaaagaaaagaaaaaaaaagaaaagggagtacagggagctatcacagcaatatactaaaatatgtcttgctcatatatgtgctatatttttaatgtagatagatatagctatgattgattcatttaaagtgcagttgaattcataggtttatttgcccatggacttcttccgcagtcgctatattctaatagcacaactattatagatgtggcagttgggagggtgggacaggaagaggtacctcataaaaactrcaaacattaaaaaggggtctctacacatgtccatactttgagagaaaccttgggctttctaagtgaatgttggattgctatgctacagaccccaaatggatttgaaaatgattattga

SEQ ID NO: 605553 - DNA, 497 bp, Homo sapiens
ctgcccaaagcagtctacagatttcgacgttattcctgtgaaacgaccaacatcacttttcacagaattgggaagaaactattctaaaattcatatggaaccaaaaagagccagaatagtcaaaggacttctaggcaaaaagaacaaagctggaggcatcacactacctgacttcaaactatactacaaagctacagtgaccaaaacagcatgatagtggtacaaaaacacacataaaccaatggaacagaatagagagctgagaaataaacccacacaccaacagccatctgatctttgacaaagtcaataaaagttagcagtgaggaaacagcagtcttcawtaaatggtgctgggatagctggctagacatatgcagaagaataaaactggacccctacctttcaccatataaaaaagtaactcaaggtggattaaagatttaaatgtaagacttcaaactttaagaatcctagaagaaaacctaggaaacaca

SEQ ID NO: 605554 - DNA, 518 bp, Homo sapiens
tccctcagttgaattttgttgtcaccactgaatcctacccctccatccttccaacatggattacaaaggaagtcctgaccaaactttaaggctccacttaaatgttaaaccctccacaatgcctgacagagccagccagaattaatctcttctttaccaattctccattggcaatatataatacatttctactatagcatttagcaaattttccttcatattagagttattttcttctaaacctctttagaccaagttctttgggagcagggcccacatcttaattatctctgtgtcccacacagagactgacaatgtaatttacacatgggaaaccctcagttactgcttattggattgttaaataaatggccagagagaaatccaaatcatattaaggtctaggaaaccagggggaaggttcctawtaagatgtattctgtgctttttcaaagttgttctctttaaaatgtaacttgagatgcttcacaaatccagacctcattgatttatgtcat

SEQ ID NO: 605555 - DNA, 527 bp, Homo sapiens
agtgccacgtgctacacaaatacaatggttatagtttttggcttgatgattggtttcctcccttccaaaaattctggttttctttaagggtaaaatcaattgagagtgactgtttcccgcagccagacactcattctaaaccttgcccctgactttacmaggtagttgttaaaccagctccgcaaaaaaagtctaagattagatttatagagatggttattttactgttaaaaaaaaaaaaaaggattcagggccctaaaggaaacgatagtaattttgcaaatgtattttcaagtagtctttctgtaactagaaaaacaaaattgactgtaacattattcattccaattctcttgctcaacggcaagaaattggcagtagatgcctgcaacacttaaccaagcccaggtaccacggtctgacttggaaacctgagctgcctgaggtagccaataagcactttgttttcctgactcttttttttttttgagaggggtctcgctctgtcacccaggctggagtgcagt

SEQ ID NO: 605556 - DNA, 527 bp, Homo sapiens
agtgccacgtgctacacaaatacaatggttatagtttttggcttgatgattggtttcctcccttccaaaaattctggttttctttaagggtaaaatcaattgagagtgactgtttcccgcagccagacactcattctaaaccttgcccctgactttaccaggtagttgttaaaccagctccgcaaaaaaagtctaagattagatttatagagatggttattttactgttaaaaaaaaaaaaaaggattcaggkccctaaaggaaacgatagtaattttgcaaatgtattttcaagtagtctttctgtaactagaaaaacaaaattgactgtaacattattcattccaattctcttgctcaacggcaagaaattggcagtagatgcctgcaacacttaaccaagcccaggtaccacggtctgacttggaaacctgagctgcctgaggtagccaataagcactttgttttcctgactcttttttttttttgagaggggtctcgctctgtcacccaggctggagtgcagt

SEQ ID NO: 605557 - DNA, 593 bp, Homo sapiens
aatggtgattattcaaaagtcaggaaacaatagatgctggtgaggcaatggagaaataggaacacttttacactgttggtgggagtgtaaattagttcaaccattgtggaaaacagtatgacgattcctcaaggatctagacccagaaataccatttgactctgcaatcccattactgggtatatacccaaatgaatataaatcattctattataaagacacatgcacatgtatggttattgaattgtatatttttcaaagggagatggggaatctaaattgctctgtggctggtattaacctgaaaaaataaaactggataaaataagcactaaaattgtattttagttttgaacatagtgataaagatgtaagtgcacaaaagayaggacaagagcaaaacaagtcattgaggagcttggtgttgtggcccattcctgtagactggagtctgacttaagtatgaatcctgactctagagtgttgcagaagttactcatactctctgcttccaatgcttcctttgaaaattaggataatatttaccttttaagatcattgcaagaattaaatgaaataagatgtaataatta

SEQ ID NO: 605558 - DNA, 574 bp, Homo sapiens
aatttacctatttgaaaattgatgacaaaataatcgttattttaaggtgctatgattagaaaaatagaaaatgcaaaagaggcaactacaaaatactgcaagtaatagaagtaaactggatgattataaactaaatatacaaaatcaataatttccttataaatgagayattacaggttagaaaatataatagaaatatatatttgaagaaacaatgaaattgtaaaataaaataaaaaattaatacaaataacatagataatatcttaagaaattttagaaattactgagagacttaagaaatggaaatttaaaattccatctttctggacgaattcacttgaatatatacatataatgtatctccacatgacattaattcacctttattaatttcgaaacataaaaattattctgtcacctaaaattacgtgaaattattttaaaaagtaaaaacaagaaaaccttcatgaatcatcactgaaatatataataggcaaatcagaacaagagtgaatgttttgctatcagcctagatgtaccgagtccttgactacattataatatctaaaca

SEQ ID NO: 605559 - DNA, 202 bp, Homo sapiens
ataccctccaccttcaagtaggctgtggtatttactgttccatgttttgtgttcccgtgtactcattgtgtaactcctacctataagtgagaatatgtggtatttggtttctttttctgcattaattcatttaggataatrgcctccagctccatccatgttgctgcaaaagacacaattttcttctttattatggctgcat

SEQ ID NO: 605560 - DNA, 451 bp, Homo sapiens
tgtcattgtgtcccattttaatgtggcagcctacctcaggtgagtgtacactattracaacctggtaatgtgacattgtagaaggttgtctccgacaaatggccccagcactccatggctcacattatgtgcatgagaacataaacctgacttcagcatagacagccaggataccatatacaatggtcctggcttgcaggaaataccactgactctactatctgtcttttgccatgtgatattatggaaagaacaaaggattaagtatcaggagaatttttttcaagttcctgctttgggatctcaatcttcctccctctgccagatattcctcacttgtaaaatgaggaatctgatcagttcaggtgttctcaatcttggctgttcattgatattctaggaagattctttaacatgcaaactcctagccaccgcacttcatctattgaat

SEQ ID NO: 605561 - DNA, 474 bp, Homo sapiens
cattgtgtcccattttaatgtggcagcctacctcaggtgagtgtacactattaacaacctggtaatgtgacattgtagaaggttgtctcygacaaatggccccagcactccatggctcacattatgtgcatgagaacataaacctgacttcagcatagacagccaggataccatatacaatggtcctggcttgcaggaaataccactgactctactatctgtcttttgccatgtgatattatggaaagaacaaaggattaagtatcaggagaatttttttcaagttcctgctttgggatctcaatcttcctccctctgccagatattcctcacttgtaaaatgaggaatctgatcagttcaggtgttctcaatcttggctgttcattgatattctaggaagattctttaacatgcaaactcctagccaccgcacttcatctattgaatcataatgtccagggaccggctctaga

SEQ ID NO: 605562 - DNA, 474 bp, Homo sapiens
cattgtgtcccattttaatgtggcagcctacctcaggtgagtgtacactattaacaacctggtaatgtgacattgtagaaggttgtctccgacaaatggccccagcactccatggctcacattatgtgcatgagaacataaacctgacttcagcatagacagccaggataccatatacaatggtcctggcttgcaggaaataccactgactctactatctgtcttttgccatgtgatattatggaaagaacaaaggattaagtatcaggagaatttttttcaagttcctgctttgggatctcaatcttcctccctctgccagataytcctcacttgtaaaatgaggaatctgatcagttcaggtgttctcaatcttggctgttcattgatattctaggaagattctttaacatgcaaactcctagccaccgcacttcatctattgaatcataatgtccagggaccggctctaga

SEQ ID NO: 605563 - DNA, 446 bp, Homo sapiens
ttgtgtcccattttaatgtggcagcctacctcaggtgagtgtacactattaacaacctggtaatgtgacattgtagaaggttgtctccgacaaatggccccagcactccatggctcacattatgtgcatgagaacataaacctgacttcagcatagacagccaggataccatatacaatggtcctggcttgcaggaaataccactgactctactatctgtcttttgccatgtgatattatggaaagaacaaaggattaagtatcaggagaatttttttcaagttcctgctttgggatctcaatcttcctccctctgccagatattcctcacttgtaaaatgaggaatctgatcagttcaggtgttctcaatcttggctgttcattgatattctasgaagattctttaacatgcaaactcctagccaccgcacttcatctattgaat

SEQ ID NO: 605564 - DNA, 451 bp, Homo sapiens
attgtgtcccattttaatgtggcagcctacctcaggtgagtgtacactattaacaacctggtaatgtgacattgtagaaggttgtctccgacaaatggccccagcactccatggctcacattatgtgcatgagaacataaacctgacttcagcatagacagccaggataccatatacaatggtcctggcttgcaggaaataccactgactctactatctgtcttttgccatgtgatattatggaaagaacaaaggattaagtatcaggagaatttttttcaagttcctgctttgggatctcaatcttcctccctctgccagatattcctcacttgtaaaatgaggaatctgatcagttcaggtgttctcaatcttggctgttcattgatattctaggaagattctttaacatgcaaactcctagccaccrcacttcatctattgaatcata

SEQ ID NO: 605565 - DNA, 593 bp, Homo sapiens
ggtagttacagcacagcttctggactgcaatcctatatatctccagaaacttagaatgcacttaagaaaaggtgggtatcctgctaagagtaagagattaagaaaccaccttctcagaccccagtgtgcattgttcacctcaagagaaagaagtgtgaagtccattttaatagctgacacttttaattagctatgggaattctattcaaaaagcatttattgagagttgaaaatatgcaaaggcacataggtacatatgtgaataagacagctaaacaaaggttgttcataaaagaggtagtattggtactggagacagattggtatgtaaaagttataaaacagtgcttttataataaaagggaaatacaatcgaagaattctttaaaaagataatgggtggaaacaattcagagctaaaaaaaaaaaaagcaacctggtatcttcgagatggaagacatagggratttaaattcagacatatgtaacatggaaaaaagggactagctagattttacttgagaagcaaatgttttggtccatatgatccagattcatatgtctttgcaaacttggcctaactgcaccatgct

SEQ ID NO: 605566 - DNA, 606 bp, Homo sapiens
attctcagcaaactaacacaggaacagaaaagcaaacactgcatgttctcasttataagtgagaggtgagcaatgagaacacatgggcacagggaggggcacaccacacacgggggccagttgggggagactgttgggggagagagttttagggaaaacagctaatgtatactgggcttaatacctatgtgatgggttgataggtgcagcaaatgaccatgaaacatgtttacctatgtaacaaaccagcacattctgcacatgtacctcggaacctaaaaaaataaaataaaaattgttttaaaaataaaaaggcattcattgtgcctcgagaacctgatagaaatttggcataggtaaaacagttgtttggcaaaatgattgcttagttgtctgaactcttcagcatgtaccagtggctttttagaactccgttttctcctcttgtgtagaccttcagtcattgaatgtcatttataatgaagcaattttaacagactttaactcacagatgcagaaacagagcttagcactgatgtgaagatcatattctcttagatatcgtttcttaacgtggaagctactctttcctccaaataaaacaat

SEQ ID NO: 605567 - DNA, 606 bp, Homo sapiens
attctcagcaaactaacacaggaacagaaaagcaaacactgcatgttctcagttataagtgagagstgagcaatgagaacacatgggcacagggaggggcacaccacacacgggggccagttgggggagactgttgggggagagagttttagggaaaacagctaatgtatactgggcttaatacctatgtgatgggttgataggtgcagcaaatgaccatgaaacatgtttacctatgtaacaaaccagcacattctgcacatgtacctcggaacctaaaaaaataaaataaaaattgttttaaaaataaaaaggcattcattgtgcctcgagaacctgatagaaatttggcataggtaaaacagttgtttggcaaaatgattgcttagttgtctgaactcttcagcatgtaccagtggctttttagaactccgttttctcctcttgtgtagaccttcagtcattgaatgtcatttataatgaagcaattttaacagactttaactcacagatgcagaaacagagcttagcactgatgtgaagatcatattctcttagatatcgtttcttaacgtggaagctactctttcctccaaataaaacaat

SEQ ID NO: 605568 - DNA, 579 bp, Homo sapiens
ctcagcaaactaacacaggaacagaaaagcaaacactgcatgttctcagttataagtgagaggtgagcaatgagaacacatgggcacagggaggggcacaccacacacgggggccagttgggggagactgttgggggagagagttttagggaaaacagctaatgtatactgggcttaatacctatgtgatgggttgataggtgcagcaaatgaccatgaaacatgtttacctatgtaacaaaccwgcacattctgcacatgtacctcggaacctaaaaaaataaaataaaaattgttttaaaaataaaaaggcattcattgtgcctcgagaacctgatagaaatttggcataggtaaaacagttgtttggcaaaatgattgcttagttgtctgaactcttcagcatgtaccagtggctttttagaactccgttttctcctcttgtgtagaccttcagtcattgaatgtcatttataatgaagcaattttaacagactttaactcacagatgcagaaacagagcttagcactgatgtgaagatcatattctcttagatatcgtttcttaacgtggaagct

SEQ ID NO: 605569 - DNA, 590 bp, Homo sapiens
ataaatattaaactaattaaaacatattttagacataatacatgttggtcaataaggatttatgaaaacgtatttcaaacttcaggaaakcaaatagtctcaaattctaccttcaaatattaataaatacatcaactgcatgtgtccagttgaaaaactcagtaacatcacttgcattagttaaaatgagacattcataactggctaatatctaacttgatactcattttcctgaaagcaacgctaactacatatatgcattatataacttcacttcaggcttgttgaagctagctaattctcaatattttgctagtcttagcatcatgataatcttttgtcaatatcaaaaacactattttgctaatgtgtcctaatgatgatacctctgaatgtcaaataacaagtctttacattgggagaagaggactcaacacaagcacacagttgccagggcactaccagtccaggatatattttcttacacttcactttcatacttcaattgcctcccttccaagccaattgtaaaaattcatgcataatctcaagaaatgccttaaaacagaccaatacgttcaggtaatgtg

SEQ ID NO: 605570 - DNA, 606 bp, Homo sapiens
atagctgcatctcatgcttttacaaatatttttaagaagaaatacattttccatgccccgatttgttcttcatttcttttaacacttctgtttctatcacatccaatgtttttactaatatttttgtgtccaatgtttttactagtattttttctgcaatatttttttctacaaagaaacctcttttctactaaaatcttggccctaaatccatttttkattccaaaaagaaataaaatgtgggtgtataatccatttgaaaattaacaaataatgatttatgtgaaagaaattagttactttattatttttaatagcagcatcgttaaatacttgcattctaggtttgaagagccttacctatgtatgttgacccagtaagttgaagtggagattgaaatctagtttttagaaaaacattcatgtgtttctgttgcagctgtttcacaagatcaaaactctgccagaaggatacgcctcctgtcattttataccagaaatagtcaaaattatcccatgtctgcaagttagaaatttaaaattctccttgtcattttaataattaatttcaatattccaaacactgttttattttgaatgccatgg

SEQ ID NO: 605571 - DNA, 606 bp, Homo sapiens
atagctgcatctcatgcttttacaaatatttttaagaagaaatacattttccatgccccgatttgttcttcatttcttttaacacttctgtttctatcacatccaatgtttttactaatatttttgtgtccaatgtttttactagtattttttctgcaatatttttttctacaaagaaacctcttttctactaaaatcttggccctaaatccatttttgattccaaaaagaaataaaatgtgggtgtataatccatttgaaaattaacaaataatgatttatgtgaaagaaattagttactttattatttttaatagcagcatcgttaaatmcttgcattctaggtttgaagagccttacctatgtatgttgacccagtaagttgaagtggagattgaaatctagtttttagaaaaacattcatgtgtttctgttgcagctgtttcacaagatcaaaactctgccagaaggatacgcctcctgtcattttataccagaaatagtcaaaattatcccatgtctgcaagttagaaatttaaaattctccttgtcattttaataattaatttcaatattccaaacactgttttattttgaatgccatgg

SEQ ID NO: 605572 - DNA, 606 bp, Homo sapiens
atagctgcatctcatgcttttacaaatatttttaagaagaaatacattttccatgccccgatttgttcttcatttcttttaacacttctgtttctatcacatccaatgtttttactaatatttttgtgtccaatgtttttactagtattttttctgcaatatttttttctacaaagaaacctcttttctactaaaatcttggccctaaatccatttttgattccaaaaagaaataaaatgtgggtgtataatccatttgaaaattaacaaataatgatttatgtgaaagaaattagttactttattatttttaatagcagcatcgttaaatacttgcattctaggtttgaagagccttacctatgtatgttgacccagtaagttgaagtggagattgaaatctagtttttagaaaaacattcatgtgtttctgttgcagctgtttcacaagatcaaaactctgccagaargatacgcctcctgtcattttataccagaaatagtcaaaattatcccatgtctgcaagttagaaatttaaaattctccttgtcattttaataattaatttcaatattccaaacactgttttattttgaatgccatgg

SEQ ID NO: 605573 - DNA, 335 bp, Homo sapiens
caaagaaaaaaaaataccagaatctctgggacacagctaaggcggtgttaacagggaaatttatagcattaaatgtccacatcaaaatgtaaaaggatctcaaacaacctaacrtcacaactaaaagaactagagaagcaagagcaaacaaaacccaaagctagcagaagacaaaaaagtaaccaaaatcagagctgaactgaaggagatagagatgcaaaaaactattcaaaacatcagtgaatccaggagcttgttttttgaaaaaaaaaattaatgaaatagatagatcactagctagacaaataaagaaaaaaaaaaagaaggttcaaata

SEQ ID NO: 605574 - DNA, 501 bp, Homo sapiens
ttttaactttttctcagcaatgtttatgtgttacagtgtataatttttgcatgtattttgttaaattcatatccaattgtttcatattgtgttagtttgagtgatattttaaatctctttccaattgtttgttactagtaagcaaaaaatctattttttctatatattcacactgtatcctgaatatgtgcaaaagtcatttgctagcgctagtagattttctgtgcattttttactatattctacatctatgatcatrtaatcttcatataaggagagctttaattcttgcttctcaggctgaggccttgcatattttttcaaccttgtcttacttgttatggctttcattacaattttgacttcaaatggtgtgcacagatacccttttcttcttccccagtttagagctcagtttttcaccaataaatatgatataaattgaaggttttcttagatgttatttatcagataaaggaaatgcacttctaattttctgat

SEQ ID NO: 605575 - DNA, 501 bp, Homo sapiens
ttttaactttttctcagcaatgtttatgtgttacagtgtataatttttgcatgtattttgttaaattcatatccaattgtttcatattgtgttagtttgagtgatattttaaatctctttccaattgtttgttactagtaagcaaaaaatctattttttctatatattcacactgtatcctgaatatgtgcaaaagtcatttgctagcgctagtagattttctgtgcattttttactatattctacatctatgatcatataatcttcatataaggagagctttaattcttgcttctcaggctgaggccttgcatattttttcaaccttgtcttacttgttatggctttcattacaattttgacttcaaatggtgtgcacagataccyttttcttcttccccagtttagagctcagtttttcaccaataaatatgatataaattgaaggttttcttagatgttatttatcagataaaggaaatgcacttctaattttctgat

SEQ ID NO: 605576 - DNA, 535 bp, Homo sapiens
taccaccactccaatttccgtctgaacccctgaatcctggtaatcagagaaacagcgctatatcttgaacactgattaagctgaattgcattcaattccattgaaggggaatcctcccagtgacctgctatagcaaaaataccatagactggatagtttaaacaacaaaaatgtatttctcatggttctggaggttgggaagtctgagataagattgccagtattgctggattttggttatggccttcttcctagtatgcagaagratgtctttttactgtgtcctcacatgttgaaaaccaaacaccaagaaaagaagccgtggtttatcttcttataagggcaattttcatttgtcttagtccgtttgagctgttataacaaaatatcttagaatgaataatgtataaataacagaagtttatatcacacagttttggagtctgcaaagtccaagatgaaggcactgacaagttttgtgtctggcgaaggcccattcctcatagatggcacacccttgctatgtcctcacatg

SEQ ID NO: 605577 - DNA, 591 bp, Homo sapiens
cttgctctgtcgcccaggctggagtgcggtggcgcgatctcrgctcactgcaagctccgcctcctgggttcacgccattctcctgcctcagcctctccagtagctgggactacaggcgcccgccaccacgcccggctaattttttgtatttttagtagagatggggtttcaccgtgctagccaggatggtctccatttcctgacctcgtgatctgcccacctcggcctccgaaagtgctgggattacaggcgtgagccaccacgcccggccgtgtatttattttctattcagtatatttagattacagatccatggaaatttagaggtgaaagaattcaaattccaacgcctctacttatgatctcactaactttgatctactcacttaatccaaagcctcagttagtgtacctgtaaataagtaaagtaatagctgcatcacaaaggtgtttctgagatatataacaaatgtgttacacagtgcttaacacagagtcttgaatgtagtaagtgctcaacttgttaggtttttttatttctgttactctatatataagacaattggtctaaattagttaaacataaaataa

SEQ ID NO: 605578 - DNA, 589 bp, Homo sapiens
ctgccattttacgtctctgtttctaagagtttgactactttaaaaacctcatataagaaggatcatgcagcactgtgtttgtatttttgtgactggtttatttcacttagtatagtatccccaaggtttatctatgttatgacatatgaaaggatttcctttttttttaaggctgaataataatttattgtgtatataccactttttaaaatccattcatctcttgacagatatttaggttgcttttacctcttggctattatgaataatgctgcaatgaacatgagatgaacaagctccttttttatctctttacttttgttagaagcttttaattcctgattaatgagttctgaacgtatgcagaggtctctacctggcagtgacctaaagccttgtcttctgccaccccactcagccttcagattcacgtctctagattcttgaggttgggaaatgtttcyctagcagccatggttttgcattcattggccattcaggttttctgctttgccatcttcccccgggggtttccttatcctcctggaagcacaactaggcatttaagtccatgttgactgtattttac

SEQ ID NO: 605579 - DNA, 577 bp, Homo sapiens
attatttctccaccgtggcctcatatatgtcgttgccattctcgttcctgtggaactggaaagatttactgtttctgttctgaatttcaaccctcaatgtaagcagtgggaaacaaagcaccctgtccatgaggaaaaataataaagaaaacatttaacctagaaaacaataaatgtttgtttcaaaatgttttgtattcagtcaaagggtgactgaatacaaaataaaacaaatcaaggagaattttcatctaaatttaacaaagtgggagacatcaagagtaactaactgtcaatgagcttgagaaacagatctcaaagtaaatctctgaaaacccattcaagatcctgatgtgtaagaacggcaatcaagcaaggaagcacaggtaagcaaacaaaacatctaaaagaaggcttttacattaaaaaaatcagaaaatagtrcctgacgaacttctaataaaattcaaaaccctcatgaaaaatgggaggaagaaatgccacgttaactgcccctgctctattgtactcaaaactcctgcaggtgcacagatgcagggaagagagagtgttgtgg

SEQ ID NO: 605580 - DNA, 577 bp, Homo sapiens
attatttctccaccgtggcctcatatatgtcgttgccattctcgttcctgtggaactggaaagatttactgtttctgttctgaatttcaaccctcaatgtaagcagtgggaaacaaagcaccctgtccatgaggaaaaataataaagaaaacatttaacctagaaaacaataaatgtttgtttcaaaatgttttgtattcagtcaaagggtgactgaatacaaaataaaacaaatcaaggagaattttcatctaaatttaacaaagtgggagacatcaagagtaactaactgtcaatgagcttgagaaacagatctcaaagtaaatctctgaaaacccattcaagatcctgatgtgtaagaacggcaatcaagcaaggaagcacaggtaagcaaacaaaacatctaaaagaaggcttttacattaaaaaaatcagaaaatagtgcctgacgaacttctaataaaattcaaaaccytcatgaaaaatgggaggaagaaatgccacgttaactgcccctgctctattgtactcaaaactcctgcaggtgcacagatgcagggaagagagagtgttgtgg

SEQ ID NO: 605581 - DNA, 538 bp, Homo sapiens
gtgttttgcaataagggcttttcaagatacccataacttgtggctaaaaatgaggtttgttccaatgtgccttagaaatatccagtttcatacttacctggcagggcagataccatgatcttaaaggcagttttcccagggcaaggcttatcsattccactctggatccatcatagggatatgctgatccctggaattgccccaaatgtgggaagctctactgcaaaatttttggtagtgagcgatggcattatgcattcatgtatgaattcaactgagtatccagtttcatagaaataataataacatcttctataaaatgtattcttgtgtattaacacatggggctctctagtactcctgctgagatatatgggaatctaccctagttttgccattttctcctaacatcagtctacttcttttaatattcattgcttctccccatttctgtagttcagtgcatgttcctttcctctgcaggaactatttctctttcctcacccaactcataaatccctgcctcccaccctaaggg

SEQ ID NO: 605582 - DNA, 538 bp, Homo sapiens
gtgttttgcaataagggcttttcaagatacccataacttgtggctaaaaatgaggtttgttccaatgtgccttagaaatatccagtttcatacttacctggcagggcagataccatgatcttaaaggcagttttcccagggcaaggcttatccattccactctggatccatcatagggatatgctgatccctggaattgccccaaatgtgggaagctctactgcaaaatttttggtagtgagcgatggcattrtgcattcatgtatgaattcaactgagtatccagtttcatagaaataataataacatcttctataaaatgtattcttgtgtattaacacatggggctctctagtactcctgctgagatatatgggaatctaccctagttttgccattttctcctaacatcagtctacttcttttaatattcattgcttctccccatttctgtagttcagtgcatgttcctttcctctgcaggaactatttctctttcctcacccaactcataaatccctgcctcccaccctaaggg

SEQ ID NO: 605583 - DNA, 513 bp, Homo sapiens
tttggtagtgagcgatggcattatgcattcatgtatgaattcaactgagtatccagtttcatasaaataataataacatcttctataaaatgtattcttgtgtattaacacatggggctctctagtactcctgctgagatatatgggaatctaccctagttttgccattttctcctaacatcagtctacttcttttaatattcattgcttctccccatttctgtagttcagtgcatgttcctttcctctgcaggaactatttctctttcctcacccaactcataaatccctgcctcccaccctaagggtaggcacatgacccaacctgggagatcaaaatgtcacacccccaatacaggattggtttgtgagtaggcagatgattctgtccatgcacagaactaagtagaagagagtttttatacctcagcttagcttgatgctagcagagagctactggagttctatttcctcctctagggaagaaaaggattttggtttggagataaagcc

SEQ ID NO: 605584 - DNA, 614 bp, Homo sapiens
cacactcctggatagttgcccaagagaaatgaaaacatatgtacccataaatacttgcatgcaaatattacagtgggtttattcacactagccaaaaactggaggaaaagaaaaaaaaatcaaaatttccatcaactggtgaataaattctggtacatttatacacctgaactctacgaarcaatgaaaaggaaacaactactgatacgatcaagaacgaatgaatatcaaaaatattagtctacatgaaagaaacgaggcacagactgtgtttccatttagatgccattctagagaaggcaacactaggaacagaaagcagacgagtggctgcagggctgggtctcaggaaagacgaccgcctgccatgaggcagggaaaattggggatgacggacacattctgcatcatgactgcggcgatcgtgaagtacgataaggatttgttttcctctttcattgttaggttcataactgagagtcgaaaacacaagattaacaagagaaaggcatacatatttatttaacacaagttacacataacgtgaagacttcacaagtgaaggcctaacaaaacagcaaaacctgtgtatttttatgctaaatttggtgaag

SEQ ID NO: 605585 - DNA, 614 bp, Homo sapiens
cacactcctggatagttgcccaagagaaatgaaaacatatgtacccataaatacttgcatgcaaatattacagtgggtttattcacactagccaaaaactggaggaaaagaaaaaaaaatcaaaatttccatcaactggtgaataaattctggtacatttatacacctgaactctacgaagcaatgaaaaggaaacaactactgatacgatcaagaacgaatgaatatcaaaaatattagtctacatgaaagaaacgaggcacagactgtgtttccatttagatgccattctagagaaggcaacactaggaacagaaagcagacgagtggctgcagggctgggtctcaggaaagacgaccgcctgccatgaggcagggaaaattggggatgacggacacattctgmatcatgactgcggcgatcgtgaagtacgataaggatttgttttcctctttcattgttaggttcataactgagagtcgaaaacacaagattaacaagagaaaggcatacatatttatttaacacaagttacacataacgtgaagacttcacaagtgaaggcctaacaaaacagcaaaacctgtgtatttttatgctaaatttggtgaag

SEQ ID NO: 605586 - DNA, 576 bp, Homo sapiens
gtgagggtacaaaagtgctcggtaaaggttttcttttttagtgaaaaggagacccaaagtcactttctaagaagagcagcctgtaagatggagctgcagacatagacaagccagctgcaagcttgcacgggtgaaggtcagcaggaaaaacctacggggactaggcatgttcaaaatggcagctccatctccctttccctttgccaaccacgtgtacaggaaggagcagacaagatggcaccggtcaagtggaaagcccaattgcataataatgttagggtggggcggccagccttctcctyatgctatgtaaacctcacacctgatataaccaatctgtgggtcctacataagtcggacactaccttctcaaacctgtctataaaacttggcgcactctgccattggccagtctttccctttcagaagcccttgtctctctcaccagagagagagctattctcctttctcttttttctgcctattaaacctctactcctaaactcctccatgagtgtctgtgccctaaattttcttggcatgagacaatgaaccccaggtatttacaccagacaa

SEQ ID NO: 605587 - DNA, 513 bp, Homo sapiens
tttggtagtgagcgatggcattatgcattcatgtatgaattcaactgagtatccagtttcatagaaataataataacatcttctataaaatgtattcttgtgtattaacacatggggctctctagtactcctgctgagatatatgggaatctaccctagttttgccattttctcctaacatcagtctacttcttttaatattcattgcttctccccatttctgtagttcagtgcatgttcctttcctctgcaggaactatttctctttcctcacccaactcataaatccctgcctcccaccctaagggtaggcacatgacccaacctgggagatcaraatgtcacacccccaatacaggattggtttgtgagtaggcagatgattctgtccatgcacagaactaagtagaagagagtttttatacctcagcttagcttgatgctagcagagagctactggagttctatttcctcctctagggaagaaaaggattttggtttggagataaagcc

SEQ ID NO: 605588 - DNA, 604 bp, Homo sapiens
aatgttgactaatagcttcaaggtagggctggtcaccaaaaagaccaaggaaggattagagggttgggacttccagacccacccatcaacctcctgggaggggagaggggttgaaggtcawgttgagcaccaatggccaatggtttaatcagtcatgcctatgtcatgaagcctccataaaaccccaaaaggacaaggttgggggcatttccacatacctggacacagggaggttcctagagggtgatgcccagaaaaagcatggaagctccttgcttcttcccccatacctcaacttacgcatctcttcatctgtgtcctttgcaatatcctttataataatctgataaatgcaagtaagtgtttccctggttctgtgagccattccagcaaattaattgagccaaagagggagtcatgggaaccccaaattgaagcccattaatcagaagttccagaagcccagactggagactagtgtcagggtggagggcagtcttggggactgagcccccaacatgtggaatctgatgctgtctccaggtagataatgttggaatagaattgaaggacactcacctggtgtctgctgcagaattgattg

SEQ ID NO: 605589 - DNA, 528 bp, Homo sapiens
tctttgttagaaaaataatgatttgggggccacttttgattaaaaggaaaactttactgaggacttctgtaccctcactaactgactaagtaatttcttttcaactcctatatcatatgcacttgtgatgctgtgaaatatatatttggccttccttctgttttccccctgcctgagatacaactcctaacgtccttagaatctctaagtgctgtctttttgcatgctaatgttgactaatagcttcaaggtagggctggtcaccaaaaagaccaaggaaggattagagggttgggacttccagacccacccatcaacctcctgggaggggagaggggttgaaggtcaagttgagcaccaatggccaatggtttaatcagtcatgcctatgtcatgaagcctccataaaaccccraaaggacaaggttgggggcatttccacatacctggacacagggaggttcctagagggtgatgcccagaaaaagcatggaagctccttgcttcttcccccatacctcaacttac

SEQ ID NO: 605590 - DNA, 604 bp, Homo sapiens
aatgttgactaatagcttcaaggtagggctggtcaccaaaaagaccaaggaaggattagagggttgggacttccagacccacccatcaacctcctgggaggggagaggggttgaaggtcaagttgagcaccaatggccaatggtttaatcagtcatgcctatgtcatgaagcctccataaaaccccaaaaggacaargttgggggcatttccacatacctggacacagggaggttcctagagggtgatgcccagaaaaagcatggaagctccttgcttcttcccccatacctcaacttacgcatctcttcatctgtgtcctttgcaatatcctttataataatctgataaatgcaagtaagtgtttccctggttctgtgagccattccagcaaattaattgagccaaagagggagtcatgggaaccccaaattgaagcccattaatcagaagttccagaagcccagactggagactagtgtcagggtggagggcagtcttggggactgagcccccaacatgtggaatctgatgctgtctccaggtagataatgttggaatagaattgaaggacactcacctggtgtctgctgcagaattgattg

SEQ ID NO: 605591 - DNA, 500 bp, Homo sapiens
caaggatttcatgaacaagaacccataagcaaatgcaataagaacaaraataaatagctgggacctaatcaaactaaagagcttttgcacagcaaaagaaacagtcagcagagtaaacagacaacacacagagtgggagaaaatcttcacaatctatacatctgacacaggactgatatccagaatctacaatggactcaaacaaattagcaagaaacaaacaaataatcccatccaaaagtgggctaaggacatgaatagacttttaggtatttgtgtgtgcagacctcttggtgtcaaggctaaactgttcctttctctgacacataggaaattgatgcacaataccttgcagtgtataattccaggcccctaggctttggagactgggttatcttttcactcaactgacagttgatacattgtttgcactgaaaaatctggctttgttgaaccacaccagtttatgtttttaattccaaatgttaccttgttatgaa

SEQ ID NO: 605592 - DNA, 493 bp, Homo sapiens
ttcatgaacaagaacccataagcaaatgcaataagaacaaaaataaatagctgggacctaatcaaactaaagagcttttgcacagcaaaagaaacagtcagcagagtaaacagacaacacacagagtgggagaaaatmttcacaatctatacatctgacacaggactgatatccagaatctacaatggactcaaacaaattagcaagaaacaaacaaataatcccatccaaaagtgggctaaggacatgaatagacttttaggtatttgtgtgtgcagacctcttggtgtcaaggctaaactgttcctttctctgacacataggaaattgatgcacaataccttgcagtgtataattccaggcccctaggctttggagactgggttatcttttcactcaactgacagttgatacattgtttgcactgaaaaatctggctttgttgaaccacaccagtttatgtttttaattccaaatgttaccttgttatgaa

SEQ ID NO: 605593 - DNA, 626 bp, Homo sapiens
aaccaaggattcacgaatgacaattcctggggggttctggagcatggagattaggaagagaagtgacatgtaacatgacacaagggattacgaaaggcagataatatgagggaaagtcatgagggagctggatttattatcctgaattagaaaataatgcagagtctcaaagtatccataaaggagaagctcctcccatgacaagtgtggtttcccatgcagtgggggaggccctggccctggccctggcccttcattcctcccattygctacctggtgggttcttgaagacattcattctcacttccccattccccttcacttaaggggccctgaggggtgaggggaaggccagacctgtactctgtacattacaagtacccacctctctctctctttctctctttccttccttctctctctccccatttttagcacacagtttgttcagactcctgaccccccaccaccagtcacaggcatggcatggcgtagcctcatagattaattacattcatccccactaaattctgcattgtgctctgtgtgacaatcaatataataatgtgcttatattcttagaagttttatactcatgacaaataagatattaataggagtggctt

SEQ ID NO: 605594 - DNA, 626 bp, Homo sapiens
aaccaaggattcacgaatgacaattcctggggggttctggagcatggagattaggaagagaagtgacatgtaacatgacacaagggattacgaaaggcagataatatgagggaaagtcatgagggagctggatttattatcctgaattagaaaataatgcagagtctcaaagtatccataaaggagaagctcctcccatgacaagtgtggtttcccatgcagtgggggaggccctggccctggccctggcccttcattcctcccatttgctacctggtgggytcttgaagacattcattctcacttccccattccccttcacttaaggggccctgaggggtgaggggaaggccagacctgtactctgtacattacaagtacccacctctctctctctttctctctttccttccttctctctctccccatttttagcacacagtttgttcagactcctgaccccccaccaccagtcacaggcatggcatggcgtagcctcatagattaattacattcatccccactaaattctgcattgtgctctgtgtgacaatcaatataataatgtgcttatattcttagaagttttatactcatgacaaataagatattaataggagtggctt

SEQ ID NO: 605595 - DNA, 493 bp, Homo sapiens
ttcatgaacaagaacccataagcaaatgcaataagaacaaaaataaatagctgggacctaatcaaactaaagagcttttgcacagcaaaagaaacagtcagcagagtaaacagacaacacacagagtgggagaaaatcttcacaatctatacatctgacacaggactgatatccagaatctacaatggactcaaacaaattagcaagaaacaaacaaataatcccatccaaaagtgggctaaggacatgaatagacttttagrtatttgtgtgtgcagacctcttggtgtcaaggctaaactgttcctttctctgacacataggaaattgatgcacaataccttgcagtgtataattccaggcccctaggctttggagactgggttatcttttcactcaactgacagttgatacattgtttgcactgaaaaatctggctttgttgaaccacaccagtttatgtttttaattccaaatgttaccttgttatgaa

SEQ ID NO: 605596 - DNA, 489 bp, Homo sapiens
tgaacaagaacccataagcaaatgcaataagaacaaaaataaatagctgggacctaatcaaactaaagagcttttgcacagcaaaagaaacagtcagcagagtaaacagacaacacacagagtgggagaaaatcttcacaatctatacatctgacacaggactgatatccagaatctacaatggactcaaacaaattagcaagaaacaaacaaataatcccatccaaaagtgggctaaggacatgaatagacttttaggtatttgtgtgtgcagacctcttggtgtcaaggctaaactgttcctttctctgacacatakgaaattgatgcacaataccttgcagtgtataattccaggcccctaggctttggagactgggttatcttttcactcaactgacagttgatacattgtttgcactgaaaaatctggctttgttgaaccacaccagtttatgtttttaattccaaatgttaccttgttatgaa

SEQ ID NO: 605597 - DNA, 514 bp, Homo sapiens
cttaggcaaggatttcatgaacaagaacccataagcaaatgcaataagaacaaaaataaatagctgggacctaatcaaactaaagagcttttgcacagcaaaagaaacagtcagcagagtaaacagacaacacacagagtgggagaaaatcttcacaatctatacatctgacacaggactgatatccagaatctacaatggactcaaacaaattagcaagaaacaaacaaataatcccatccaaaagtgggctaaggacatgaatagacttttaggtatttgtgtgtgcagacctcttggtgtcaaggctaaactgttcctttctctgacacatagkaaattgatgcacaataccttgcagtgtataattccaggcccctaggctttggagactgggttatcttttcactcaactgacagttgatacattgtttgcactgaaaaatctggctttgttgaaccacaccagtttatgtttttaattccaaatgttaccttgttatgaactattttt

SEQ ID NO: 605598 - DNA, 564 bp, Homo sapiens
ttaaattgttagcaactactagactataaaattcttactaaacaggcactttcttgaaagctcagaccattttttattcawtttttgcaattagtagaatttgtctccctggtgatctctcaattaagattaaatagggccctcaaagatgctggggagaaaaaacgagaaaacaaaaaattaaatggggaatgaagaaaataaaggagaaaatgagaaaagaaatagggaagggagaaaggtaaaaaataaatggcatgccaatcattaactctaaaatccaggtggagagatatatcaaaccaggcaggcaggccaaattagtcagagcaatgtttgctggccactataacaagcaacccaaaatctcagtggcttaaaataaaacttacgtctttctcattcgaagtcattgtcccttcagtggccctacttggttggtctcctccgagtggtaactcagagataggagctgcttccatactataactctgccacctggaacatgtgggttcctggattcccacaggaggaaagaagagagtagtgtcttatggtcaactc

SEQ ID NO: 605599 - DNA, 482 bp, Homo sapiens
ttcatgaacaagaacccataagcaaatgcaataagaacaaaaataaatagctgggacctaatcaaactaaagagcttttgcacagcaaaagaaacagtcagcagagtaaacagacaacacacagagtgggagaaaatcttcacaatctatacatctgacacaggactgatatccagaatctacaatggactcaaacaaattagcaagaaacaaacaaataatcccatccaaaagtgggctaaggacatgaatagacttttaggtatttgtgtgtgcagacctcttggtgtcaaggctaaactgttcctttctctgacacataggaaattgatgcacaataccttgcagtgtataattccaggcccctaggcwttggagactgggttatcttttcactcaactgacagttgatacattgtttgcactgaaaaatctggctttgttgaaccacaccagtttatgtttttaattccaaatgttac

SEQ ID NO: 605600 - DNA, 500 bp, Homo sapiens
caaggatttcatgaacaagaacccataagcaaatgcaataagaacaaaaataaatagctgggacctaatcaaactaaagagcttttgcacagcaaaagaaacagtcagcagagtaaacagacaacacacagagtgggagaaaatcttcacaatctatacatctgacacaggactgatatccagaatctacaatggactcaaacaaattagcaagaaacaaacaaataatcccatccaaaagtgggctaaggacatgaatagacttttaggtatttgtgtgtgcagacctcttggtgtcaaggctaaactgttcctttctctgacacataggaaattgatgcacaataccttgcagtgtataattccaggcccctaggctttggagactgggttatcttttcactcaactgacagttgatacattgtttgcactgaaaaatctggctttgttgaaccacaccaktttatgtttttaattccaaatgttaccttgttatgaa

SEQ ID NO: 605601 - DNA, 414 bp, Homo sapiens
tgggggagcacctggtcctagatgtcatctgttcacttcagcatccaatgagatgctgccatcctcttggggtgctccctcatccacacacacacacatgccacctatgstcacacacttctgtacatgtgttctctttctggttggtggatatcttgactgcttctataccatagatggagacacaggatctggccttacatttctgtgccacccaacattatgggagacttcatgactgtttctatggcatttatgcccaggctctctgcagccctctccctccacctcctcaccactctttccagacagaggtcatctctgctctcagatctcacaaagctttctcaggatttgcagacaacccagagctgtggctgatagacaaaaagcaggcctttcctctctaggaac

SEQ ID NO: 605602 - DNA, 522 bp, Homo sapiens
tccaatgagatgctgccatcctcttggggtgctccctcatccacacacacacacatgccacctatggtcacacacttctgtacatgtgttctctttctggttggtggatatcttgactgcttctataccatagatggagacacaggatctggccttacatttctgtgccacccaacattatgggagacttcatgactgtttctatggcatttatgcccaggctctctgcagccctctccctccacctcctcaccactctttccagacagaggtcatctctgctctcagatctcacaaagctttctcaggatttgcagamaacccagagctgtggctgatagacaaaaagcaggcctttcctctctaggaacccctacctaacactagcgtgccctgctccacacagaggggctcttccagtcttggaaacgggagagaaggaacccttttcttctctttgcttcctggagtcctcttctgattccctaacagcattgatgtttataataaactcaaggaagc

SEQ ID NO: 605603 - DNA, 581 bp, Homo sapiens
ctttccagacagaggtcatctctgctctcagatctcacaaagctttctcaggatttgcagacaacccagagctgtggctgatagacaaaaagcaggcctttcctctctaggaacccctacctaacactagcgtgccctgctccacacagaggggctcttccagtcttggaaacgggagagaaggaacccttttcttctctttgcttcctggagtcctcttctgattccctaacagcattgatgtttataataaactcaaggaagccagacttttctagattttccacactgtygtatcttgccactgaagcaaggaccacagaatggtccacaggcttggattcagcaggcttggattaggggggagcagaagggctacaaataaatgattccatgtactcacttctgctgtggtttatcacaaacaccaaagccaatggaaaatgaggagagagcaacagagatccctgggggaggggggccatttgaaatgtatcaggctataagaaatggtgcttttaaaaacatattgaataacatgatggagagaaagattttcttgtttttgtttttgtttttgt

SEQ ID NO: 605604 - DNA, 577 bp, Homo sapiens
aaccaccaaccactgacagtaatgtctttactagatattttgcttcttttgattaatttgtctctatttcctttgttctaaagcctatagtgagtaatcatatttggaataatagtagagctccctgctgtgttttcatttgcttaaatcaagacttagctgatgtattgaggaaccaagactgagatgtggggctaggagggcctasggtctgtcaggcactcttcagtgacttgaggtgctgaatgactcacactgtactgggagatgaccacctgtgtgcatccaacactgtcacagatgtgccattgagccaccaggagcagccacagaccatcagtggttgtgctttggaatacgcaattttgtgtttctggtgagctgtaatcttttcttttcccgtataattatttttcattgaattatgctattaaaactcatctttgggtttcttgtaacgtcattgccgagaacattatttttgcatttcacagtgatttcttgaggaggaagtaagaagtaattgttttctggactcactgtctgaaaaacttgcactttactgaagcgattgttt

SEQ ID NO: 605605 - DNA, 404 bp, Homo sapiens
acaacttttattcaactttgttgaaaagaacaaaaaaattgcatctctggttgaatttggtggctctttttctggttaatataaaacgtgactgtcagaatcccatctctaaatctytgtcaaattcgtgtggcctcctttgtgtgcagtttactagtacagccccataatactggataagattttccctaaacttctgtgatttaaatgagatggtggttgcctgcactcagactggtaaatgggttggtcccgagaacacttacagaagcaccttgccttgttatttggctttagcattgtattaaaaagttagtagatatttgtaagcattctagagatcatttattacctattcactctttaagttaaattcttgtctatgtaacagtgacctaaattgt

SEQ ID NO: 605606 - DNA, 577 bp, Homo sapiens
aaccaccaaccactgacagtaatgtctttactagatattttgcttcttttgattaatttgtctctatttcctttgttctaaagcctatagtgagtaatcatatttggaataatagtagagctccctgctgtgttttcatttgcttaaatcaagacttagctgatgtattgaggaaccaagactgagatgtggggctaggagggcctagggtctgtcaggcactcttcagtgacttgaggtgctgaatgactcacactgtactgggagatgaccacctgtgtgcatccaacactgtcacagatgtgccattgagccaccaggagcagccacagaccatcagtggttgtgctttggaatacgcaattttgtgtttctggtragctgtaatcttttcttttcccgtataattatttttcattgaattatgctattaaaactcatctttgggtttcttgtaacgtcattgccgagaacattatttttgcatttcacagtgatttcttgaggaggaagtaagaagtaattgttttctggactcactgtctgaaaaacttgcactttactgaagcgattgttt

SEQ ID NO: 605607 - DNA, 470 bp, Homo sapiens
aatttcagtcctgaggtaaaaataatcttaatattaccatcttaattacaataataagggctcaatgactttaggatcatccaataagccatacgtttataaaacagaaagagctcaacagatgacattaaggtaggaaacagcctttcaataggagaagaaacacccgatctggagcaatccaatgcttgtgggcaccttagtgaacacatttggccaactcaatgcagaaattgctgtttgcaacatggccccaaaatatgctttgcataggggaakgctgactttacataatatccactaaataaatgttagctctcacagtacaactttcattacacagcctgaggctctgttttcctgctggagaaatttctaccactgacatagatttgtaaatacttctagttcttgtttcttgtctgttctgcctcaagaagaacttacttgtgagaaagatactcaattct

SEQ ID NO: 605608 - DNA, 558 bp, Homo sapiens
gcctatgaagaaagaacaagtaataatcttcattctacagcaatggtaatttccccaagatcgttaactcttccaaacctgttttccctggatctcaaattggagcctagagaaggcatttttgctaaaggttagtttgccgcaagggctcagatcaatgaaatttttatcagcttgagtttggctgaaaggctggttttgggggtgtgtgggttggtgagagggcaaagtcttagcctgtacttataaataaataaatawatatatatatatttacataaatacattacacacgtatatattaacaaatatatattatttctgtacaatattttacatatatatgtaacttgataaacttttggtatgcatgggagtgggttacctaaaagcatattatacagaattgttctctattaatattggagtattctttctaccagtgtgaggtcatactgtgcacactgctttagagtctctcctttgtactgtgaacacttccaatgacatcaaatatttgtataaataacaagtctaaagttgcctaacagatatatc

SEQ ID NO: 605609 - DNA, 580 bp, Homo sapiens
tattgaggaaccaagactgagatgtggggctaggagggcctagggtctgtcaggcactcttcagtgacttgaggtgctgaatgactcacactgtactgggagatgaccacctgtgtgcatccaacactgtcacagatgtgccattgagccaccaggagcagccacagaccatcagtggttgtgctttggaatacgcaattttgtgtttctggtgagctgtaatcttttcttttcccgtataattatttttcattgaattatgctattaaaactcatctttgggtttcttgtaacgtcattgccgagaacattatttttgcatttcacagtgatttcttgaggaggaagtaagaagtaattgttttctggactcactgtctgaaaaacttgcactttactgaagcgattgttttatttacactaagtaacaatatgagttttgttagcyttttggatggactacaaagcataaaaccaactttgttcctcatctctggcaaagatggagggttgttggcttgcattgtgtgatgagtcttatacctggctctgtctgctcttgccttttgccttacatttc

SEQ ID NO: 605610 - DNA, 591 bp, Homo sapiens
tttagtaaaacttaccacatgtgagtacatgtcttccaggagtagaacagctcactttgacctgagagattgtcaatgaggtattcaggctctgtagttacaagcataatsttcggtgtggtcaatggaatggctgactccaattcatcctgccttcctcatcctgactcagattacctatgggtgaacgcacctcctccctcactgactctgagcttagccttctgacttgctttgggcaatgacacatgagcagacttccagtacaccgtgtccaaccagtggctcccaaagagctcatcaggtgcagcttgccttccatgccatgagaggaacatgcccctgggcctgctctccaatctgggtctggatatgaaaggcacatggaagagtcctaactcaaccacaggcagcccgcacagcaacctgggagaacagatcgtttgttattgtaagtcacaagatgcggagccctagcaggctgacaccctggctgttaaattccacccacagaggcatgctggactgcagaacagaacagagacagtgaaggaaaggaaaatgcctttggagggggcgtatttgtccaga

SEQ ID NO: 605611 - DNA, 591 bp, Homo sapiens
tttagtaaaacttaccacatgtgagtacatgtcttccaggagtagaacagctcactttgacctgagagattgtcaatgaggtattcaggctctgtagttacaagcataatgttcggtgtggtcaatggaatggctgactccaattcatcctgccttcctcatcctgactcagattacctatgggtgaacgcacctcctccctcactgactctgagcttagccttctgacttgctttgggcaatgacacatgagcagacttccagtacaccgtgtccaaccagtggctcccaaagagctcatcaggtgcagcttgccttccatgccatgagaggaacatgcccctgggcctgctctccaatctgggtctggatatgaaaggcacatggaagagtcctaactcaaccacaggcagcccgcacagcaacctgggagaacagawcgtttgttattgtaagtcacaagatgcggagccctagcaggctgacaccctggctgttaaattccacccacagaggcatgctggactgcagaacagaacagagacagtgaaggaaaggaaaatgcctttggagggggcgtatttgtccaga

SEQ ID NO: 605612 - DNA, 580 bp, Homo sapiens
tattgaggaaccaagactgagatgtggggctaggagggcctagggtctgtcaggcactcttcagtgacttgaggtgctgaatgactcacactgtactgggagatgaccacctgtgtgcatccaacactgtcacagatgtgccattgagccaccaggagcagccacagaccatcagtggttgtgctttggaatacgcaattttgtgtttctggtgagctgtaatcttttcttttcccgtataattatttttcattgaattatgctattaaaactcatctttgggtttcttgtaacgtcattgccgagaacattatttttgcatttcacagtgatttcttgaggaggaagtaagaagtaattgttttctggactcactgtctgaaaaacttgcactttactgaagcgattgttttatttacactaagtaacaatatgagttttgttagccttttggatggactacaaagcataaaaccaactttgttcctcatctctggcaaagatggagggttrttggcttgcattgtgtgatgagtcttatacctggctctgtctgctcttgccttttgccttacatttc

SEQ ID NO: 605613 - DNA, 584 bp, Homo sapiens
ggttgtgctttggaatacgcaattttgtgtttctggtgagctgtaatcttttcttttcccgtataattatttttcattgaattatgctattaaaactcatctttgggtttcttgtaacgtcattgccgagaacattatttttgcatttcacagtgatttcttgaggaggaagtaagaagtaattgttttctggactcactgtctgaaaaacttgcactttactgaagcgattgttttatttacactaagtaacaatatgagttttgttagccttttggatggactacaaagcataaaaccaactttgttcctcatctctggcaaagatggagggttgttggcttgcattgtgtgatgagtcttatacctggctctgtctgctcttgccttttsccttacatttcaaagacctcacttttttttttctttttttaaaaaatattttatcacgtgattttatatacattttaataaaatttcttttttgtaaaaaaagcaaagcataaataaaatagggtagccatttcttctaaggttatgttgaatctaacccaaactcttatcagagaaaactcttctttaga

SEQ ID NO: 605614 - DNA, 559 bp, Homo sapiens
cccataataaaggcacgacaccacagggtgctagccaggacaatatacttgagaatctagagccaaggtggacaggctggtaatggaagtctgccttgtcactgcggttatttctctccaggggtgatttacaaggtgataaaagacttcaagatgcaaaaagtacttaggctgttaaaaaccagccttttatgatcccttgttccttatagtacatgttttttcattaatcaaatgcttattctattagaagtcccaaacctttaagatggtgggacatttcatttttattgtcctgaagtggcattaaaatccacatggtcctcagcaggccactggtgaattcctcatgttcgaactcattccaccctctgtcttctctgatcctatctattttgtattactcttttagaagaattttttktgtgtgtgtgttcttgctgggatagatgctgaactgttagccaaaagcctgtttttttcttcccctgcctgtatttgaagtctggagccagtcgctgatgtcattctcaagcccatgtttttgcactgtggacct

SEQ ID NO: 605615 - DNA, 576 bp, Homo sapiens
tattctattagaagtcccaaacctttaagatggtgggacatttcatttttattgtcctgaagtggcattaaaatccacatggtcctcagcaggccactggtgaattcctcatgttcgaactcattccaccctctgtcttctctgatcctatctattttgtattactcttttagaagaattttttgtgtgtgtgtgttcttgctgggatagatgctgaactgttagccaaaagcctgtttttttcttcccctgcctgtatttgaagtctggagccagtcgctgatgtcattctcaagcccatgtttttgcactgtggacctcatctcytttggcctcttctgctggctctgtcttaccatcagtgggcaaaattccatgttcccatttggttagccgagagcaaagcctgtccttgtcctctcccttgtctatggtgggtttcatcaaggaatctcttactgtatattttaatgaccaaaatgatgaaaatttgtcatttagattgatattttctagtttttaagactattcagagtaaattaatgattatttgtaaatatcaatagtacaatttgt

SEQ ID NO: 605616 - DNA, 576 bp, Homo sapiens
tattctattagaagtcccaaacctttaagatggtgggacatttcatttttattgtcctgaagtggcattaaaatccacatggtcctcagcaggccactggtgaattcctcatgttcgaactcattccaccctctgtcttctctgatcctatctattttgtattactcttttagaagaattttttgtgtgtgtgtgttcttgctgggatagatgctgaactgttagccaaaagcctgtttttttcttcccctgcctgtatttgaagtctggagccagtcgctgatgtcattctcaagcccatgtttttgcactgtggacctcatctcctytggcctcttctgctggctctgtcttaccatcagtgggcaaaattccatgttcccatttggttagccgagagcaaagcctgtccttgtcctctcccttgtctatggtgggtttcatcaaggaatctcttactgtatattttaatgaccaaaatgatgaaaatttgtcatttagattgatattttctagtttttaagactattcagagtaaattaatgattatttgtaaatatcaatagtacaatttgt

SEQ ID NO: 605617 - DNA, 576 bp, Homo sapiens
tattctattagaagtcccaaacctttaagatggtgggacatttcatttttattgtcctgaagtggcattaaaatccacatggtcctcagcaggccactggtgaattcctcatgttcgaactcattccaccctctgtcttctctgatcctatctattttgtattactcttttagaagaattttttgtgtgtgtgtgttcttgctgggatagatgctgaactgttagccaaaagcctgtttttttcttcccctgcctgtatttgaagtctggagccagtcgctgatgtcattctcaagcccatgtttttgcactgtggacctcatctcctttggcctcttctgctggctctgtcttaccatcagtgggmaaaattccatgttcccatttggttagccgagagcaaagcctgtccttgtcctctcccttgtctatggtgggtttcatcaaggaatctcttactgtatattttaatgaccaaaatgatgaaaatttgtcatttagattgatattttctagtttttaagactattcagagtaaattaatgattatttgtaaatatcaatagtacaatttgt

SEQ ID NO: 605618 - DNA, 576 bp, Homo sapiens
tattctattagaagtcccaaacctttaagatggtgggacatttcatttttattgtcctgaagtggcattaaaatccacatggtcctcagcaggccactggtgaattcctcatgttcgaactcattccaccctctgtcttctctgatcctatctattttgtattactcttttagaagaattttttgtgtgtgtgtgttcttgctgggatagatgctgaactgttagccaaaagcctgtttttttcttcccctgcctgtatttgaagtctggagccagtcgctgatgtcattctcaagcccatgtttttgcactgtggacctcatctcctttggcctcttctgctggctctgtcttaccatcagtgggcaaaattccatgttcccatttgsttagccgagagcaaagcctgtccttgtcctctcccttgtctatggtgggtttcatcaaggaatctcttactgtatattttaatgaccaaaatgatgaaaatttgtcatttagattgatattttctagtttttaagactattcagagtaaattaatgattatttgtaaatatcaatagtacaatttgt

SEQ ID NO: 605619 - DNA, 567 bp, Homo sapiens
atgtttttccatcttttgttttttatgctttcttatcctgcctaagccacaccctatctgtttttctgaacaagcttaagccctacttgctggatgacagctgtaaccaacggtgtgacttcctttcaaatctctaactgtgcttcactatctgtcccatgcacatgggctcttgactcctcactaagtatttgcacagcacctactgagtactgagccttattctagatcctaggaatacgaaagcaagcatctagatgtgagccctgccctcagtgsgtggatgtttgttggaggaagaggcacaaccacatcaccacaaggtagtgaattccagatattacaaaagaggagttgctatggaggaaccaagagcagggacatcttccctccttgaggaaatcagatctgccctcagggagaagtagaaactgaagaatgaggagcagttagctgatgaatgaaagaagtgggggctgggggtgctgtggggagggctggacgaggaaggggaggttggtagcataggagagaagcatatttcaaggacatgatatgggagggagt

SEQ ID NO: 605620 - DNA, 567 bp, Homo sapiens
atgtttttccatcttttgttttttatgctttcttatcctgcctaagccacaccctatctgtttttctgaacaagcttaagccctacttgctggatgacagctgtaaccaacggtgtgacttcctttcaaatctctaactgtgcttcactatctgtcccatgcacatgggctcttgactcctcactaagtatttgcacagcacctactgagtactgagccttattctagatcctaggaatacgaaagcaagcatctagatgtgagccctgccctcagtgggtggatgtttgttggaggaagaggcacaaccacatcaccacaaggtagtgaattccagatattacaaaagaggagttgctatggaggaaccaagagcagggacatcttccctccttgaggaaatcagatctkccctcagggagaagtagaaactgaagaatgaggagcagttagctgatgaatgaaagaagtgggggctgggggtgctgtggggagggctggacgaggaaggggaggttggtagcataggagagaagcatatttcaaggacatgatatgggagggagt

SEQ ID NO: 605621 - DNA, 613 bp, Homo sapiens
attcgagctcggtatccactctaacctgattaagcatgcacttgtcaytttaaaaaagaggaaactggcatacatgtttcagcaaagaatttgccacacctacattgtgtatgcagctggtttaattacagacataatgtatttagcatagtatgtacaaagctgcatcacaccttaacatctcatttgatatatttcctgagacctatttgctactgttctttcctttgtgactgtccttacagaattaatatttttataactattatataattaattatactttaggacctaattgaaactgcaatcttattccatcacatttggaaatgagtgtacgcttatagctccttttgaagataatgaggcatcacagaaggagtcatgatctacatttccttgaacatccagaaagcagaaattacgatactgtgactggccctggctgtgttttgatgagattgtcttggtcatcactttctcagtttcttagcaccaagttcttgggtgaccagttgcacagaacaccacttgcattactgaatacaaactgacttggggtctatagggtgacggtggttgaaggttgacagcagtgctgtaggaacaagac

SEQ ID NO: 605622 - DNA, 613 bp, Homo sapiens
attcgagctcggtatccactctaacctgattaagcatgcacttgtcattttaaaaaagaggaaactggcatacatgtttcagcaaagaatttgccacacctrcattgtgtatgcagctggtttaattacagacataatgtatttagcatagtatgtacaaagctgcatcacaccttaacatctcatttgatatatttcctgagacctatttgctactgttctttcctttgtgactgtccttacagaattaatatttttataactattatataattaattatactttaggacctaattgaaactgcaatcttattccatcacatttggaaatgagtgtacgcttatagctccttttgaagataatgaggcatcacagaaggagtcatgatctacatttccttgaacatccagaaagcagaaattacgatactgtgactggccctggctgtgttttgatgagattgtcttggtcatcactttctcagtttcttagcaccaagttcttgggtgaccagttgcacagaacaccacttgcattactgaatacaaactgacttggggtctatagggtgacggtggttgaaggttgacagcagtgctgtaggaacaagac

SEQ ID NO: 605623 - DNA, 613 bp, Homo sapiens
attcgagctcggtatccactctaacctgattaagcatgcacttgtcattttaaaaaagaggaaactggcatacatgtttcagcaaagaatttgccacacctacattgtgtatgcagctggtttaattacagacataatgtatttagcatagtatgtacaaagctgcatcacacctkaacatctcatttgatatatttcctgagacctatttgctactgttctttcctttgtgactgtccttacagaattaatatttttataactattatataattaattatactttaggacctaattgaaactgcaatcttattccatcacatttggaaatgagtgtacgcttatagctccttttgaagataatgaggcatcacagaaggagtcatgatctacatttccttgaacatccagaaagcagaaattacgatactgtgactggccctggctgtgttttgatgagattgtcttggtcatcactttctcagtttcttagcaccaagttcttgggtgaccagttgcacagaacaccacttgcattactgaatacaaactgacttggggtctatagggtgacggtggttgaaggttgacagcagtgctgtaggaacaagac

SEQ ID NO: 605624 - DNA, 581 bp, Homo sapiens
tgcacagaacaccacttgcattactgaatacaaactgacttggggtctatagggtgacggtggttgarggttgacagcagtgctgtaggaacaagacttgaatcacagagggagtctacatggagcaatgtggtgatatatttccaagcacacaatttctacaacaggtcaactgcaatccccacacagctaacccagccctaaagtgaatattgagtaaaagcaatcatatctttattccaaaccatctgaatttgctgatttttataaatatgttattttattctatcaaataaattctactcctggattccctaaaacaactcctgcattactttgtaggtcaagctatcaaaaaatttgcataattacttcatttgaagttattaaactgctaaggcagcaaaattcattaagctacattttactaaattctaatcattaagtgaaacaatatttttccctcaaaaaaggtaatagtttcccggaaatattcttcatggctttatttcctctgctaattgatccaggtcatttaattcaataatttttataaaggtaaaattataggagtttaattg

SEQ ID NO: 605625 - DNA, 581 bp, Homo sapiens
tgcacagaacaccacttgcattactgaatacaaactgacttggggtctatagggtgacggtggttgaaggttgacagcagtgctgtaggaacaagacttgaatcacagagggagtctacatggagcaatgtggtgatatatttccaagcacacaatttctacaacaggtcaactgcaatycccacacagctaacccagccctaaagtgaatattgagtaaaagcaatcatatctttattccaaaccatctgaatttgctgatttttataaatatgttattttattctatcaaataaattctactcctggattccctaaaacaactcctgcattactttgtaggtcaagctatcaaaaaatttgcataattacttcatttgaagttattaaactgctaaggcagcaaaattcattaagctacattttactaaattctaatcattaagtgaaacaatatttttccctcaaaaaaggtaatagtttcccggaaatattcttcatggctttatttcctctgctaattgatccaggtcatttaattcaataatttttataaaggtaaaattataggagtttaattg

SEQ ID NO: 605626 - DNA, 492 bp, Homo sapiens
aacccaaactcttatcagagaaaactcttctttagatgtagcctaaagcaggaagcaacaaacctgtatacagccaaagtatcatctcaagggcctgcattcaartctcacacatgtggcttgaaagtgatctctttcgcccttatttcaaggcctaatcttaggttacatactgcttaaagaagcttcagtatgcaatttcaaagcctgtagtagatgtaaaatgagaaaattagaaataaggagaaaagctgctacatgaggacactgacagcaaggaaagggagagaaaaactcacaaagtaagtggaaaaatagaccaatgcaaataaccccacatagtttaacagacctcatcatatctattgtgtacatgtttgtatgacatagattatatctattatatgtaacccagtgttcatagtgttgacttagaaattatcaaccaaattcaaagcttttaggctttgaaaattgtttgaaaagattttc

SEQ ID NO: 605627 - DNA, 590 bp, Homo sapiens
atcaaataaattctactcctggattccctaaaacaactcctgcattactttgtaggtcaarctatcaaaaaatttgcataattacttcatttgaagttattaaactgctaaggcagcaaaattcattaagctacattttactaaattctaatcattaagtgaaacaatatttttccctcaaaaaaggtaatagtttcccggaaatattcttcatggctttatttcctctgctaattgatccaggtcatttaattcaataatttttataaaggtaaaattataggagtttaattgacttttgcttagcttccaattatgtctaatttgtttctgttcagtctcattagatccagttatgtttggactgatagtaattactcccaatagttaatgtacttaaaaataaggactctcttctgttattttcaagtaatttttcatcagggttaggcagggcttcttaatcatattaatacaaatggtttcctatgtgcatgagtaagtttgcatttagtacgtaggcaatcctatgtaacttagcaaagctagcaagtccctagacatggcacagccactgtagaggtggcctc

SEQ ID NO: 605628 - DNA, 593 bp, Homo sapiens
catggcacagccactgtagaggtggcctcccactagcatcattaatatcaattgtaattggtaggcaatcacttagtttcacatttcattacccgagttatacaaatgtgtaaaaaaaatacagttttaataaaagggagtaaaggataatatgagtaatattcacartctctagttggaagaggtagtgttttctcagaaatgatgcattcctggagcaaggtcattttgtgtttggtttgttaaatatctatttccattttgacaaaccattggaaaagcccagcttcacaaggactctccatgaaagcgatcacacaaaagaacacccataacacaaaatcaaaacaagggtggtccgggcttcacattaaagactcattaccaagttttcttagaagagataaagaacacaaagttacttttatgtgatggaaaacagagagaaagagtaaatggaacaataagcgttaggaaacagcagtgaaaaccaagctgtggaaaaaaaatgaatggaattatgttttgtttgctattgatttcctatcctgatatcagaaaatatgggaaagaacaaggcacattttttgaga

SEQ ID NO: 605629 - DNA, 593 bp, Homo sapiens
catggcacagccactgtagaggtggcctcccactagcatcattaatatcaattgtaattggtaggcaatcacttagtttcacatttcattacccgagttatacaaatgtgtaaaaaaaatacagttttaataaaagggagtaaaggataatatgagtaatattcacagtctctagttggaagaggtagtgttttctcagaaatgatgcattcctggagcaaggtcattttgtgtttggtttgttaaatatctatttccattttgacaaaccattggaaaagcccagcttcacaaggactctccatgaaagcgatcacacaaaagaacacccataacacaaaatcaaaacaagggtggtccgggcttcacattaaagactcattaccaagttttcttagaagagataaagaacacaaagttacttttatgtgatggaaaacagagagaaagagtaaatggaacaataagcgttaggaaacagcagtgaaaamcaagctgtggaaaaaaaatgaatggaattatgttttgtttgctattgatttcctatcctgatatcagaaaatatgggaaagaacaaggcacattttttgaga

SEQ ID NO: 605630 - DNA, 620 bp, Homo sapiens
tggacttcagttgaattgctaatttcagtttggataatacatgtgtgctgcaccacaagtggtgtgtctaaaccctcatgttggtcctaaaaataattaaatctagcatttggcagctggaagccattgcaatcttttaagtattcctgaagcttattttatcagtgtatcaagataaaatgctaataacgcggtagatataaagtctgttagcaactatcagtgctgtgttatctcagaagactttgtaaggataatgataagaagtggatcaagtaaaacagcctgaattgacccccaagatccactaaaatgattaactattccattcatgaaaattcactacagtcaaactatctaaacttgctgttcctgagctgaygttattccagttctacatggcagtattaattgcaccttcatttggctaagcatcatgaataacagcagtcttaacaatgtatcgccacttccttatatacctgtttacacttgtgatcataataatgtcaactttaatactctcaccaaaaaaatgttgaaaaaaataccccttttgcaacgtaaagctaaagatctaggcttgcataaatgatcaaaagctaaaaggtagcaccagt

SEQ ID NO: 605631 - DNA, 647 bp, Homo sapiens
tgtgtctaaaccctcatgttggtcctaaaaataattaaatctagcatttggcagctggaagccattgcaatcttttaagtattcctgaagcttattttatcagtgtatcaagataaaatgctaataacgcggtagatataaagtctgttagcaactatcagtgctgtgttatctcagaagactttgtaaggataatgataagaagtggatcaagtaaaacagcctgaattgacccccaagatccactaaaatgattaactattccattcatgaaaattcactacagtcaaactatctaaacttgctgttcctgagctgatgttattccagktctacatggcagtattaattgcaccttcatttggctaagcatcatgaataacagcagtcttaacaatgtatcgccacttccttatatacctgtttacacttgtgatcataataatgtcaactttaatactctcaccaaaaaaatgttgaaaaaaataccccttttgcaacgtaaagctaaagatctaggcttgcataaatgatcaaaagctaaaaggtagcaccagtaatctctgttagtgctgcaaaaagacatcaagttcagtatcaacttaataaaaaagacagttattaaccagcaactgaactttaaagtt

SEQ ID NO: 605632 - DNA, 647 bp, Homo sapiens
tgtgtctaaaccctcatgttggtcctaaaaataattaaatctagcatttggcagctggaagccattgcaatcttttaagtattcctgaagcttattttatcagtgtatcaagataaaatgctaataacgcggtagatataaagtctgttagcaactatcagtgctgtgttatctcagaagactttgtaaggataatgataagaagtggatcaagtaaaacagcctgaattgacccccaagatccactaaaatgattaactattccattcatgaaaattcactacagtcaaactatctaaacttgctgttcctgagctgatgttattccagttctacatggcagtattaattgcaccttcatttggctaagcatcatgaataacagcagtcttaacaatgtatcgccacttccttatatacctgtttacacttgtgatcataataatgycaactttaatactctcaccaaaaaaatgttgaaaaaaataccccttttgcaacgtaaagctaaagatctaggcttgcataaatgatcaaaagctaaaaggtagcaccagtaatctctgttagtgctgcaaaaagacatcaagttcagtatcaacttaataaaaaagacagttattaaccagcaactgaactttaaagtt

SEQ ID NO: 605633 - DNA, 630 bp, Homo sapiens
ttgcttgcaactgaaatacgagcctattcacaaacacagacgatattcacatgaacatmcctgctaaactctacctgacctcaccatgagagtaaaccgggaggaggggtagagatgatagctctccatatataatgcttgaatctccaggaggcaacagaagaggatcattgccccaccatggctccttcccatctgttttgatcatccaggcagacctatagtgaaacaaaatgaaagcactaacagtttcctgggctgtatttttcttagtatcctacagagaaacacctagtcacactgccactgactgcactcctaaccctggattttgcattctcactctgtgggttacaagaggcaaacagcaacgtagatccatcgctatcatcggatataattcaaataagacacttgctgtggatggctgatcataacaataacatgatctgggggcatcagaagtcctgcttgactcttattttctaacatttttgcaggctgctggctgacctccaccccacttcaggaacaacaggatagactacagctgggccgatccataaactcaccagtagcccaggagatggcctgacatgaaaagttctgcacaagcaggagcaaaatgag

SEQ ID NO: 605634 - DNA, 568 bp, Homo sapiens
ctctttcgcccttatttcaaggcctaatcttaggttacatactgcttaaagaagcttcagtatgcaatttcaaagcctgtagtagatgtaaaatgagaaaattagaaataaggagaaaagctgctacatgaggacactgacagcaaggaaagggagagaaaaactcacaaagtaagtggaaaaatagaccaatgcaaataaccccacatagtttaacagacctcatcatatctattgtgtacatgtttgtatgacatagattatatctattatatgtaacccagtgttcatagtgttgacttagaaattatcaaccaaattcaaagcttttaggctttgaaaattgtttgaaaagattttcacccaaaatatttaaattattwaaaaaaattattgttgattaaagttgtaatcctcaattaattagaagttttggctatccagagaccttatattccaaagactttagagagctgtttgttagatgacataaattattaccattatcctacatttaaacttctaatttacgtaaatagtgagcaaaattgagagccacacaaatatt

SEQ ID NO: 605635 - DNA, 565 bp, Homo sapiens
cagtatcagtcttatggggtgggrcatttattgttacatggcaagggctaaggcgtgatcgtggggctgggcctcatgggatggtggaggaaagagtgtcgtgggagagaaagctaaggatttgagagctcactgctcagtggattatctacgcgcaagctgaagtcactgaaaatggtaacaagagtaggtagagatgaagatggagccagccgctgaagtccgtggtggatgaaggaaagaacgtgggaggtctgaagatggcagggaaacgcaggtggtgtagtcagatggcgtgtgctccaaaggaattggaggcttttggaggagaaagaaggagatatcgtgtgaatacagcagtgggagtaagggcgtgcttgccccacctgcaggccatggcttatgtacaatatgggaggaaaaacattcctgtggagaaggaggctgggaaagtcatgctcgctgatagctaggggtgaagagaatttttaaagaggaactacagtatgcaagagaggatttagggagctgatatatacgagcaggatgcagaggaaaagtttgg

SEQ ID NO: 605636 - DNA, 618 bp, Homo sapiens
gttatctaatcaaagcacagtaacaaaaattcctgcatataagaaccacgaaaagccaggactgcttatatactgctgtaagatttttatattacttgggagatgatataatagtacttaagaataaactgtgataagttaacaatatatatggtaaacgcttgagcaataactttaaacaaaaatacatagtgcaactattgagccaatagttgcaataaaatgtaatactgatatggtttggctgtgtccctaaccaaatctcatmttgaattgtagttcccataatccccacgtgtcctgggagggacctggcagaaggtaatgatacttattgagcatctactatatcaggtgcagccagtgtagctcttgaacgagacagagaaaattatcatacctctaccagggtcatatttgatcttcatttatctaccatttataacattttatttgtcttttattggaaacccttcaaatcctttctgaagtagatatagttgaaataaagatataagttgagactgagatcatatactgtgttatttcccttgcaaattcatattaattatagtgaatatctcattttgtttttctttttgtttggagagaaggagt

SEQ ID NO: 605637 - DNA, 568 bp, Homo sapiens
ctctttcgcccttatttcaaggcctaatcttaggttacatactgcttaaagaagcttcagtatgcaatttcaaagcctgtagtagatgtaaaatgagaaaattagaaataaggagaaaagctgctacatgaggacactgacagcaaggaaagggagagaaaaactcacaaagtaagtggaaaaatagaccaatgcaaataaccccacatagtttaacagacctcatcatatctattgtgtacatgtttgtatgacatagattatatctattatatgtaacccagtgttcatagtgttgacttagaaattatcaaccaaattcaaagcttttaggctttgaaaattgtttgaaaagattttcacccaaaatatttaaattattaaaaaaaattattgttgattaaagttgtaatcctcaattaattagaarttttggctatccagagaccttatattccaaagactttagagagctgtttgttagatgacataaattattaccattatcctacatttaaacttctaatttacgtaaatagtgagcaaaattgagagccacacaaatatt

SEQ ID NO: 605638 - DNA, 601 bp, Homo sapiens
ttcatttatctaccatttataacattttatttgtcttttattggaaacccttcaaatcctttctgaagtagatatagttgaaataaagatataagttgagactgagatcatatactgtgttatttcccttgcaaattcatattaattatagtgaatatctcattttgtttttctttttgtttggagagaaggagtagttcctgtcttgctacttttctttctaaccgtgccatgatttaagttccttcattcatcatgttggctctcttgaagataaatccagacacctgccttacactggaagcagcaagggcttttcctcgccrgctcccgtgcagctctcaggcaggcctgtgaccagcccatggctttcagtcgctctccctccaggcttggactcttgatccgtgatgagagaacagcagaggcacgtgatatttatcacagcaccagtgcgctgagtgaacccttcctgcctagagacgaatgcagggtccttgcttccccagtccctttgatttctatttccaagcctagtttctcagcttccagtttattctttgagccttgctctcattgctaccaccaacatttttcagga

SEQ ID NO: 605639 - DNA, 601 bp, Homo sapiens
ttcatttatctaccatttataacattttatttgtcttttattggaaacccttcaaatcctttctgaagtagatatagttgaaataaagatataagttgagactgagatcatatactgtgttatttcccttgcaaattcatattaattatagtgaatatctcattttgtttttctttttgtttggagagaaggagtagttcctgtcttgctacttttctttctaaccgtgccatgatttaagttccttcattcatcatgttggctctcttgaagataaatccagacacctgccttacactggaagcagcaagggcttttcctcgccagctccygtgcagctctcaggcaggcctgtgaccagcccatggctttcagtcgctctccctccaggcttggactcttgatccgtgatgagagaacagcagaggcacgtgatatttatcacagcaccagtgcgctgagtgaacccttcctgcctagagacgaatgcagggtccttgcttccccagtccctttgatttctatttccaagcctagtttctcagcttccagtttattctttgagccttgctctcattgctaccaccaacatttttcagga

SEQ ID NO: 605640 - DNA, 500 bp, Homo sapiens
tatagtgcataaaagacataaggaagattgggaaaatcatggatgatctttctacttaaatgaaattgtatccaaaaccaaaaaacaaaaacaagagtgagagatagaactttttctatgggtttcccactgtggaaatctccctacagacacttcatgtgttctytgattatttggctggttggattattttctctctcttctggctgtttgctaactgaggttttcattacagaggccctctatcgtccgggtaccaattcctgattaataaaaagataccatctcttgacatggtaccctccaggtttgattgacgctgctttgagctttgagcatgcatcggttatgtgaccccgggcctcttgtttgctcaactgttttcattttgtggtatagaaactttacatgtccagccactactaagcagaaacacaaagaagcaattatctgttcaattgatgtttcccagatgcaagttatttaatgcttttattaac

SEQ ID NO: 605641 - DNA, 500 bp, Homo sapiens
tatagtgcataaaagacataaggaagattgggaaaatcatggatgatctttctacttaaatgaaattgtatccaaaaccaaaaaacaaaaacaagagtgagagatagaactttttctatgggtttcccactgtggaaatctccctacagacacttcatgtgttctctgattatttggctggttggattattttctctctcttctggctgtttgctaactgaggttttcattacagaggccctctatcgtccgggtaccaattcctgattaataaaaagataccatctcttgacatggtaccctccaggtttgattgacgctgctttgagctttgagcaygcatcggttatgtgaccccgggcctcttgtttgctcaactgttttcattttgtggtatagaaactttacatgtccagccactactaagcagaaacacaaagaagcaattatctgttcaattgatgtttcccagatgcaagttatttaatgcttttattaac

SEQ ID NO: 605642 - DNA, 594 bp, Homo sapiens
gacatagattatatctattatatgtaacccagtgttcatagtgttgacttagaaattatcaaccaaattcaaagcttttaggctttgaaaattgtttgaaaagattttcacccaaaatatttaaattattaaaaaaaattattgttgattaaagttgtaatcctcaattaattagaagttttggctatccagagaccttatattccaaagactttagagagctgtttgttagatgacataaattattaccattatcctacatttaaacttctaatttacgtaaatagtgagcaaaattgagagccacacaaatattcaatctctgaagctcttatggcagcattgatcaaataggttagagagcacatggatacagctttattgccttctagttttactgcaaacgtgctatttaatagtatgcaaatgattggctagaggtacagaccgccagggccttcatagcaaacaggttttgtgtttaccctagcatacaaaaatgcttcayctacgatgtatgctgtaactgtgtgtattgtctaccctagcatgcaaaaatgcttcatctaaaatgtatgctataactatgtgtat

SEQ ID NO: 605643 - DNA, 663 bp, Homo sapiens
actgttaggacatataaacaaattaagatttcaggatataaaatcaacgtacaaaaatcagtagcgttctatatactaataacaaatatttaaaaagtaaatttcaaaaaaaatcccatttacaatagcaacaaaataaataaatacttaggtattaatttaacccaggaggtaaaagacctgcatactgaaaactataaaatgctgatgaaagaaaatgatgaaaacacaaataaatagaaatattttccatgtttatgggtagaagaaataatgttgtgaaaatgtacaaactacccaatatgttctatagattcagtccagcccttatcaaatattcaaggtcatttcttacagaaatagaaaacacaatccttaaattcatatggaactacaaaagaccttaaatagccaaaacaatcatgaaggaaaagaacacagctggaggyatcacactccctcattttaaactcttttagcagttgcaattagtacaccctagaactggcataaaaaacagacaaatcaatcaatggaacaggatggaacacccagaaataatcccccacatttatggtcaactgatttttgatgagggtgccaagaacacacaatggggaaaggagagtctctccaacaaatgatgttggaaaaactgcatat

SEQ ID NO: 605644 - DNA, 663 bp, Homo sapiens
actgttaggacatataaacaaattaagatttcaggatataaaatcaacgtacaaaaatcagtagcgttctatatactaataacaaatatttaaaaagtaaatttcaaaaaaaatcccatttacaatagcaacaaaataaataaatacttaggtattaatttaacccaggaggtaaaagacctgcatactgaaaactataaaatgctgatgaaagaaaatgatgaaaacacaaataaatagaaatattttccatgtttatgggtagaagaaataatgttgtgaaaatgtacaaactacccaatatgttctatagattcagtccagcccttatcaaatattcaaggtcatttcttacagaaatagaaaacacaatccttaaattcatatggaactacaaaagaccttaaatagccaaaacaatcatgaaggaaaagaacacagctggaggcatcacactccctcattttaaactcttttagcagttgcaattagtacaccctagaaytggcataaaaaacagacaaatcaatcaatggaacaggatggaacacccagaaataatcccccacatttatggtcaactgatttttgatgagggtgccaagaacacacaatggggaaaggagagtctctccaacaaatgatgttggaaaaactgcatat

SEQ ID NO: 605645 - DNA, 444 bp, Homo sapiens
tatttaaccaatcctcaaagttggttatttaatttatttttaatatttctgctaccataaataacgytgtgctgagcacttgcacttcaggttttctgtgcttcttcactgcggtcttacgataaatatctagagcgaaagggaatttacacggctaaaaaatgactcctagagaacttcagaatctcccagacagcctattcaattctttctatggttcaacaaatggaataatatttcaacaggcacttcacagaagagatgaacaaaatggaaaaaaagaaagagaatgaagtatgcgcttactcccgaatccagagcagcagtctcactggtgcagacacgtccctgagggtagatgttacttatgggggatctggcgtcagcggctgtcctggaccctggccacactatgccgtcctcatcgttcctgctccaggaaga

SEQ ID NO: 605646 - DNA, 444 bp, Homo sapiens
tatttaaccaatcctcaaagttggttatttaatttatttttaatatttctgctaccataaataacgctgtgctgagcacttgcacttcaggttttctgtgcttcttcactgcggtcttacgataaatatctagagcgaaagggaatttacacggctaaaaaatgactcctagagaacttcagaatctcccagacagcctattcaattctttctatggttcaacaaatggaataatatttcaacaggcacttcacagaagagatgaacaaaatggaaaaaaagaaagagaatgaagtatgcgcttactcccgaatccagagcagcagtctcactggtgcagacacgtccctgagggtagatgttacttatgggggatctggcgtcagcggctgtcctggaccctggccacaytatgccgtcctcatcgttcctgctccaggaaga

SEQ ID NO: 605647 - DNA, 589 bp, Homo sapiens
ggtaaaaatcagaagtttcttattctgagcgcaagggcaagatcattgagcagacattgacctcccttcagacatttcttgggagaaacagaatgagaatttcaggggccagtgcctgcaccctactagctgtggcagcctggtgctcatctacttctccagcttgggaaggcctakgttaaccccagtctttggaggcattgttattcctcttctctccctgcttccccgtgtttgtgttctgggcccggtgtaacactgaggttcagaattgctttcaagagaggagcccatttctgtgtctatgcaaggctggacaatttctccaagtggttcagcctgtgggggttaagggggcaaaagcatctcagctagtaataaacactgctttgcctcttgcttttttatttttatttttgcaaaacttctctgtaggtgtgtatttctctagaggatttcaaaaattctctgtaggtgcgtatttgtgtagaggaaggagtggtgactgggccagggtgaatggattatttgatctatattatcttgaattttatatcttttattttaaaatttgggtatattttgaagt

SEQ ID NO: 605648 - DNA, 335 bp, Homo sapiens
ttcagttgcaatcagcgagaaagaagctgcaggaacttgtttcatcttgaccatycatacatattgaactgatgtgtttgttacattctaccgtctcttgagtgtaatcaaataaaagagcatctgatgtaataggaaaatagagcaggctttgctaaccagctcatcctccctccgcagacaccacacagaacgttggttcctggaggctccaatccatgttgaggattggcataatgggaacggaatgatcttgggtcataggttttgcttttttttttttttttttgcttctattcagaaaaaattatactttagaattctgattaaaaatc

SEQ ID NO: 605649 - DNA, 335 bp, Homo sapiens
ttcagttgcaatcagcgagaaagaagctgcaggaacttgtttcatcttgaccattcatacatattraactgatgtgtttgttacattctaccgtctcttgagtgtaatcaaataaaagagcatctgatgtaataggaaaatagagcaggctttgctaaccagctcatcctccctccgcagacaccacacagaacgttggttcctggaggctccaatccatgttgaggattggcataatgggaacggaatgatcttgggtcataggttttgcttttttttttttttttttgcttctattcagaaaaaattatactttagaattctgattaaaaatc

SEQ ID NO: 605650 - DNA, 335 bp, Homo sapiens
ttcagttgcaatcagcgagaaagaagctgcaggaacttgtttcatcttgaccattcatacatattgaactgatgtgtttgttacattctaccgtctcttgagtgtaatcaaataaaagagcatctgatgtaataggaaaatagagcaggctttgctaaccagctcrtcctccctccgcagacaccacacagaacgttggttcctggaggctccaatccatgttgaggattggcataatgggaacggaatgatcttgggtcataggttttgcttttttttttttttttttgcttctattcagaaaaaattatactttagaattctgattaaaaatc

SEQ ID NO: 605651 - DNA, 335 bp, Homo sapiens
ttcagttgcaatcagcgagaaagaagctgcaggaacttgtttcatcttgaccattcatacatattgaactgatgtgtttgttacattctaccgtctcttgagtgtaatcaaataaaagagcatctgatgtaataggaaaatagagcaggctttgctaaccagctcatcctccctccgcagacaccacacagaacgttggttcctggaggcwccaatccatgttgaggattggcataatgggaacggaatgatcttgggtcataggttttgcttttttttttttttttttgcttctattcagaaaaaattatactttagaattctgattaaaaatc

SEQ ID NO: 605652 - DNA, 568 bp, Homo sapiens
ttcactttggagaaactgaacaactgtctgagtgagagcacactcttatcatcctgtgtgatcagtggcactttgctaatgatccaagaagtgagagacaacaggtggagcagaaattagagtccaccaggccatattactcccactggggagggctgcacccagtgatacactgaaaaacstgtaacacgtcactccctgaaaaaggctgtgctttgtagcatttgtcaatttccgtggtctaaatattgacccactttttgttcccaacacaatgtccctaaaaatggcgatgggaagctttgcaccccaggctcttatgagccggcacgagctggctccagcacaccactggtttccacttgaaatagtgagaatatctagtttttattgagaacgtggctgtgcacagcctagaacaggatttctcagcctcacttctacaggccttctgggctggcacatcctctgttatgaggcctcactgtccatggtaagatgtttggcagcatccctggcctttacccaccatgggccagtagtattctcccagttgtgacaactaaaa

SEQ ID NO: 605653 - DNA, 488 bp, Homo sapiens
aagatgtttggcagcatccctggcctttacccaccatgggccagtagtattctcccagttgtgacaactaaaatatcttcaagctttgtcaaatgtcccytgtgggcaaaattgtgcccgttggagaaccactggcctagaagaagaagggtgagttggctcagtatggaagctgtttatttgttttgaggtcctgctaacatttgaaggcaaagagaaggcctgacatttgctgtgggcttgggcttcataaatgcccgtcaaagaatggtctatgcaaaggcagtgatttcacatatgtctgaatgtggatttatacatttttttctagttggtgtgtgtcaggtgtagaatccctacattctgtttgctctataaggtagtatttttaacagtgatttaaacattttaaactattgatttttcatcatagtttttgctccagtagaaattaggaattgatcaattctttttaacttcaggtgtgc

SEQ ID NO: 605654 - DNA, 488 bp, Homo sapiens
aagatgtttggcagcatccctggcctttacccaccatgggccagtagtattctcccagttgtgacaactaaaatatcttcaagctttgtcaaatgtcccctgtgggcaaaattgtgcccgttggagaaccactggcctagaagaagaagggtgagttggctcagtatggaagctgtktatttgttttgaggtcctgctaacatttgaaggcaaagagaaggcctgacatttgctgtgggcttgggcttcataaatgcccgtcaaagaatggtctatgcaaaggcagtgatttcacatatgtctgaatgtggatttatacatttttttctagttggtgtgtgtcaggtgtagaatccctacattctgtttgctctataaggtagtatttttaacagtgatttaaacattttaaactattgatttttcatcatagtttttgctccagtagaaattaggaattgatcaattctttttaacttcaggtgtgc

SEQ ID NO: 605655 - DNA, 375 bp, Homo sapiens
tccaaatactcagagaagcacaagaatagactgtttacaccctggagagtcttgcacagtctgtttccagctcatgcaccrtgaaggctgctatgagagtaataaactgtgtttctttcaagggaggtgatgaaaattggagaaggtggtgaggatgcttgattgaagtgagtccacagcaggcttcacagggactgtggaggcctctgccaggtgcatgtccagccccctcagcttctttgtggacatcctgggcccttcagggctctctcggggtaaggcgtgagaccagatcctcacataacttccaagagaactgaaaccaggacagggatgcaacacactcaactgttcactctccagaacgattttcag

SEQ ID NO: 605656 - DNA, 395 bp, Homo sapiens
ttggtccattttatatggtccacatstcaaattacaatgtttattttgaaggcactccagagaaaagaaagaaaaaaagacaccacacatgacttagagaacagattttataatactttgaaaatgaggtacctcgttgtaaatttaaaatccgcctcctgattgttttagagttgataagtatattgacggttgtgaatgactgtgagctgtggcttttgggtgtagcggatgtgacaacctttgttggtgaagcaaagaaaacaagtttgatttgaccatgagaacatatgaattcctgaactgttaaaaataataactcttgtttgtgtcattctccaaagttttaaaataaaattagatcattgtgcccaaaccaaaaagttctgaagtca

SEQ ID NO: 605657 - DNA, 633 bp, Homo sapiens
tatattgacggttgtgaatgactgtgagctgtggcttttgggtgtagcggatgtgacaacytttgttggtgaagcaaagaaaacaagtttgatttgaccatgagaacatatgaattcctgaactgttaaaaataataactcttgtttgtgtcattctccaaagttttaaaataaaattagatcattgtgcccaaaccaaaaagttctgaagtcattgaagtgacggaatcataggatgcactgcaggggctgaaattccaaaccttgtagggacaggaaggtaacgtgaatgtatgaatcggactaaatgtggatagcagggaagagtgggttctatggaaaactagaaagaatatgcttctaaggatgttcaaatttggatttagaaaacaaataccaagcctgcaaaacaagagacctggaataaattatcagctttgaaaaaatcagagtttgaaaaaatatattaattcttatttcagagacatccatgtaatttagtgtctttcacaaggcagacaaaaagagcttaggagagagagacaaaggaaaatagaaacaaacaaaaggtgttaagcttctaaaaaacaggcactgtgttgggctttgaacatatagaatagcatgaattct

SEQ ID NO: 605658 - DNA, 395 bp, Homo sapiens
ttggtccattttatatggtccacatctcaaattacaatgtttattttgaaggcactccagagaaaagaaagaaaaaaagacaccacacatgacttagagaacagattttataatactttgaaaatgaggtacctcgttgtaaatttaaaatccgcctcctgattgttttagagttgataagtatattgacggttgtgaatgactgtgagctgtggcttttgggtgtagcggatgtgacaacctttgttggtgaagcaaagaaaacaagtttgatttsaccatgagaacatatgaattcctgaactgttaaaaataataactcttgtttgtgtcattctccaaagttttaaaataaaattagatcattgtgcccaaaccaaaaagttctgaagtca

SEQ ID NO: 605659 - DNA, 633 bp, Homo sapiens
tatattgacggttgtgaatgactgtgagctgtggcttttgggtgtagcggatgtgacaacctttgttggtgaagcaaagaaaacaagtttgatttgaccatgagaacatatgaattcctgaactgttaaaaataataactcttgtttgtgtcattctccaaagttttaaaataaaattakatcattgtgcccaaaccaaaaagttctgaagtcattgaagtgacggaatcataggatgcactgcaggggctgaaattccaaaccttgtagggacaggaaggtaacgtgaatgtatgaatcggactaaatgtggatagcagggaagagtgggttctatggaaaactagaaagaatatgcttctaaggatgttcaaatttggatttagaaaacaaataccaagcctgcaaaacaagagacctggaataaattatcagctttgaaaaaatcagagtttgaaaaaatatattaattcttatttcagagacatccatgtaatttagtgtctttcacaaggcagacaaaaagagcttaggagagagagacaaaggaaaatagaaacaaacaaaaggtgttaagcttctaaaaaacaggcactgtgttgggctttgaacatatagaatagcatgaattct

SEQ ID NO: 605660 - DNA, 595 bp, Homo sapiens
actgcaggggctgaaattccaaaccttgtagggacaggaaggtaacgtgaatgtatgaatcggactaaatgtggatagcagggaagagtgggttctatggaaaactagaaagaatatgcttctaaggatgttcaaatttggatttagaaaacaaataccaagcctgcaaaacaagagacctggaataaattatcagctttgaaaaaatcagagtttgaaaaaatatattaattcttatttcagagacatccatgtaatttagtgtctttcacaaggcagacaaaaagagcttaggagagagagacaaaggaaaatagaaacaaacaaaaggtgttaagcttctaaaaaacaggcactgtgttgggctttgaacatatagaatagcatgaattctcaccatgactacctgcagtagccagtattattcccacttcatggatgaaagattcaatcttagagagtttacgtaacttataacagyagaaaagcaagattttaattacaaatcctatgttctcttctctatactaaatgtatgaactcaagcaagttatttatcctctttattcttcatgttttaatgggcataataatg

SEQ ID NO: 605661 - DNA, 595 bp, Homo sapiens
attggcttccacaattatagaggctgagaagtcctgtgatctctagttggcaagctgaagcctggagaccttgcagagctgatggtatagttccagcctgtctgaaggcctgagaacctggagggctgatggtgtgatttacagttcaaaagccagtgygctcaagacccagaagatctaatgtttccatttgagtcagaagccaggaaaagactggtgatgttccagctcaagcagccgggcagaaggagttcccttgttccacaagagggccagacattttgttttattcaggccttcagttggttggataagattcacctacattaggaggacaattggctttactctataaatttaaatgttagtctcctcctgaaactctcacagccctcacagacataccaagaataatgtttggcttaatatctgggcaccctgtagcccagtcaagttgacacataaaagtaatcatcacatatggtaatatgtaataggataaactgtaatgagttaggaaatggtctgatgttaacaaaataataaagaaagcaaatgtgttgaatgcctatgggaacttgtaacgagatagtca

SEQ ID NO: 605662 - DNA, 595 bp, Homo sapiens
attggcttccacaattatagaggctgagaagtcctgtgatctctagttggcaagctgaagcctggagaccttgcagagctgatggtatagttccagcctgtctgaaggcctgagaacctggagggctgatggtgtgatttacagttcaaaagccagtgcgctcaagacccagaagatctaatgtttccatttgagtcagaagccaggaaaagactgktgatgttccagctcaagcagccgggcagaaggagttcccttgttccacaagagggccagacattttgttttattcaggccttcagttggttggataagattcacctacattaggaggacaattggctttactctataaatttaaatgttagtctcctcctgaaactctcacagccctcacagacataccaagaataatgtttggcttaatatctgggcaccctgtagcccagtcaagttgacacataaaagtaatcatcacatatggtaatatgtaataggataaactgtaatgagttaggaaatggtctgatgttaacaaaataataaagaaagcaaatgtgttgaatgcctatgggaacttgtaacgagatagtca

SEQ ID NO: 605663 - DNA, 468 bp, Homo sapiens
gttccagctcaagcagccgggcagaaggagttcccttgttccacaagagggccagacattttgttttattcaggycttcagttggttggataagattcacctacattaggaggacaattggctttactctataaatttaaatgttagtctcctcctgaaactctcacagccctcacagacataccaagaataatgtttggcttaatatctgggcaccctgtagcccagtcaagttgacacataaaagtaatcatcacatatggtaatatgtaataggataaactgtaatgagttaggaaatggtctgatgttaacaaaataataaagaaagcaaatgtgttgaatgcctatgggaacttgtaacgagatagtcatgcacatggtgaagaaatttgttagctgaagaagttcaatacactggctcctccaagataactttcccacagaaaactttgggagctactcagg

SEQ ID NO: 605664 - DNA, 593 bp, Homo sapiens
gatgttccagctcaagcagccgggcagaaggagttcccttgttccacaagagggccagacattttgttttattcaggccttcagttggttggataagattcacctacattaggaggacaattggctttactctataaatttaaatgttagtctcctcctgaaactctcacagccctcacagacataccaagaataatgtttggcttaatatctgggcaccctgtagcccagtcaagttgacacataaaagtaatcatcacatatggtaatatgtaataggataarctgtaatgagttaggaaatggtctgatgttaacaaaataataaagaaagcaaatgtgttgaatgcctatgggaacttgtaacgagatagtcatgcacatggtgaagaaatttgttagctgaagaagttcaatacactggctcctccaagataactttcccacagaaaactttgggagctactcaggtattgcatcctctgggagtaattaactattcactaacaggaggtttgcgtgtaaccagcaacagcaggtaaaatttcaggtgcttctatcaaagaactagagagatagctcagccactgcta

SEQ ID NO: 605665 - DNA, 579 bp, Homo sapiens
tttgttttattcaggccttcagttggttggataagattcacctacattaggaggacaattggctttactctataaatttaaatgttagtctcctcctgaaactctcacagccctcacagacataccaagaataatgtttggcttaatatctgggcaccctgtagcccagtcaagttgacacataaaagtaatcatcacatatggtaatatgtaataggataaactgtaatgagttaggaaatggtctgatgttaacaaaataataaagaaagcaaatgtgttgaatgcctrtgggaacttgtaacgagatagtcatgcacatggtgaagaaatttgttagctgaagaagttcaatacactggctcctccaagataactttcccacagaaaactttgggagctactcaggtattgcatcctctgggagtaattaactattcactaacaggaggtttgcgtgtaaccagcaacagcaggtaaaatttcaggtgcttctatcaaagaactagagagatagctcagccactgctagatcctgtgcaaagatccctggagaatgcaccttccctgagggatgat

SEQ ID NO: 605666 - DNA, 659 bp, Homo sapiens
gggtctatttactcccagttgattttcaggatcatcatttttatatattctcaacaaacctgtccctctctctcctcatggtaaccacctggcacaactctatcccttgtaaatccagctctccacagagctgagtgtggctggagaagcccacagtgacgctgattgctcttcccttacatttgtgatcactaaccggggctggctgcctgatttgcagggcccagggcaaaatgaaagtgtgsggctgttaattcagaagacattttaaaaaagcctcattaaatgcactaaaatctaaggtgttttcattttaaaaataatttgtgacttataaaccataaaacaggcaacagtgacacacgagaaataacataaacttacaaattgcaaaaattatgtgtgactccacagtcacacacattaagccaccaatgcagctggccctgtcgctaaccgctagtaggctcctagcacacctgccattccaatgccttccctcgctcattcatgtttctgggaggctccttcagattctctctcctcttaagcctctaatgttttctctcccatcctcactctcagttaatgactttggggtatatgtcactgaaagaaaaacaaatttaagccaaaaccagaataagatgagagcttct

SEQ ID NO: 605667 - DNA, 560 bp, Homo sapiens
ccctggagaatgcaccttccctgagggatgatgtgacacttacaatatacactgatgtatattgtatatgttttattgagttggagccagatggggtctatttactcccagttgattttcaggatcatcatttttatatattctcaacaaacctgtccctctctctcctcatggtaaccacctggcacaactctatcccttgtaaatccagctctccacagagctgagtgtggctggagaagcccacagtgacgctgattgctcttcccttacatttgtgatcactaaccggggctggctgcctgatttgcagggcccagggcaaaatgaaagtgtggggctgttaattcagaagacattttaaaaaagcctcattaaatgcactaaaatctaaggtgttttcattttaaaaataatttgtgacttataaaccataaaacaggcaacagtgacacacragaaataacataaacttacaaattgcaaaaattatgtgtgactccacagtcacacacattaagccaccaatgcagctggccctgtcgctaaccgctagtagg

SEQ ID NO: 605668 - DNA, 586 bp, Homo sapiens
gggtatatgtcactgaaagaaaaacaaatttaagccaaaaccagaataagatgagagcttctgcaaactgctacttcctcatcaccccccacctggctctatgtccaaacactgtcttcctttttgttacccataagttaaactggagcactaaatcccaatrtctctctcgaatttcagcaattctccttctacctcccacaatgtcgacttttctgtctctactggagtgttcctatcaacatgcacagttgaattttcccatctggcactacctgtcctgatcttatgttcctttcaaactactgcactatttctgctttcttcagagtgaaattctttgaaagtgttttcatatttaccatctccaatttttgtcttcattcttcctcttagatccactaggtctgacagtttcctctgtcctttcacagaaattgctcatttcaaaatgtgaatatcttccatgttgttacagcccatgatcgattcttaaccctcttctcacttagccatgaatagcatttacacagctggttgttgcctgaccctcaaacactttctcacttggctccatgaccccaca

SEQ ID NO: 605669 - DNA, 586 bp, Homo sapiens
gggtatatgtcactgaaagaaaaacaaatttaagccaaaaccagaataagatgagagcttctgcaaactgctacttcctcatcaccccccacctggctctatgtccaaacactgtcttcctttttgttacccataagttaaactggagcactaaatcccaatgtctctctcgaatttcagcaattctccttctacctcccacaatgtcgacttttctgtctctactggagtgttcctatcaacatgcacagttgaattttcccatctggcactacctgtcctgatcttatgttcctttcaaactactgcactatttctgctttcttcagagtgaaattctttgaaagtgttttcatatttaccatctccaatttttgtcttcattcttcctcttagatccactaggtctgacagtttcctctgtcctttcacagaaaytgctcatttcaaaatgtgaatatcttccatgttgttacagcccatgatcgattcttaaccctcttctcacttagccatgaatagcatttacacagctggttgttgcctgaccctcaaacactttctcacttggctccatgaccccaca

SEQ ID NO: 605670 - DNA, 634 bp, Homo sapiens
taggcctctgtctgcaacatcctttctccaacatctttgtgggtggctctctcacttttacaggtcttgctcatgggccttctggcaagcccttccctgatcaccatgcttgcatggcaggctggcactctgtctgccctgtttagttttcttcatgagaacagaaagtcctgtttgtcttctttactgctttatgaccagggcctagaagcacttggcacaactaggcattcagtacagatttattaattgaatgactaaatagcagttgtgaatcagaacacaatggaatctatatctccaaaaytttgtgatgaataaaactggctaaaatatgagaattttatgtaacttagtcacatatcataagattttctaagtagaattcatacttggttgtatgtcctaagatctttttagggaggtttcctctttctaaggggattcaaagatatcagtgaaacctgaaaattgtcttgggttaagtagtgcattgtggagtaccaaatggcatgaaagaacaaaactgctgtcattgtgactgccatagtcaatgtcaatgttggatatgactgcatgagctgacagcccctggagcatgtgaaatatatgaaatgcacactggacataacag

SEQ ID NO: 605671 - DNA, 590 bp, Homo sapiens
attcatacttggttgtatgtcctaagatctttttagggaggtttcctctttctaaggggattcaaagatatcagtgaaacctgaaaattgtcttgggttaagtagtgcattgtggagtaccaaatggcatgaaagaacaaaactgctgtcaytgtgactgccatagtcaatgtcaatgttggatatgactgcatgagctgacagcccctggagcatgtgaaatatatgaaatgcacactggacataacagagcatttttgcagggagctggaccaactcttttatatgactaagatgctatttgcaatttatataaaggaaaaaagcaaatatgctccatgcagtgcctaaaagagccctagtggcttccgggtagaaagccatcccacttctcttcagcagagcatgaaatcaacctactaccttttatcaggttacttacataaaggaattgtgcctattaataaaacatcatgcatcttatttctccaagagcaatgataaccaaactctcctttcccgttccctcttccttccttctctggggtcactttttgctgccctgtgttctgttcagcatgcattggcca

SEQ ID NO: 605672 - DNA, 590 bp, Homo sapiens
attcatacttggttgtatgtcctaagatctttttagggaggtttcctctttctaaggggattcaaagatatcagtgaaacctgaaaattgtcttgggttaagtagtgcattgtggagtaccaaatggcatgaaagaacaaaactgctgtcattgtgactgccatagtcaatgtcaatgttggatatgactgcatgagctgacagcccctggagcatgtgaaatatatgaaatgcacactggacataacagagcatttttgcagggagctggaccaactcttttatatgactaagatgctatttgcaatttatataaaggaaaaaagcaaatatgctccatgcagtgcctaaaagagccctagtggcttcmgggtagaaagccatcccacttctcttcagcagagcatgaaatcaacctactaccttttatcaggttacttacataaaggaattgtgcctattaataaaacatcatgcatcttatttctccaagagcaatgataaccaaactctcctttcccgttccctcttccttccttctctggggtcactttttgctgccctgtgttctgttcagcatgcattggcca

SEQ ID NO: 605673 - DNA, 590 bp, Homo sapiens
attcatacttggttgtatgtcctaagatctttttagggaggtttcctctttctaaggggattcaaagatatcagtgaaacctgaaaattgtcttgggttaagtagtgcattgtggagtaccaaatggcatgaaagaacaaaactgctgtcattgtgactgccatagtcaatgtcaatgttggatatgactgcatgagctgacagcccctggagcatgtgaaatatatgaaatgcacactggacataacagagcatttttgcagggagctggaccaactcttttatatgactaagatgctatttgcaatttatataaaggaaaaaagcaaatatgctccatgcagtgcctaaaagagccctagtggcttccgggtagaaagccatcccacttctcttcagcagagcatgaaatcaacctactaccttttatcaggttacttacataaaggaattgtgcctattaataaaacatcatgcatcttrtttctccaagagcaatgataaccaaactctcctttcccgttccctcttccttccttctctggggtcactttttgctgccctgtgttctgttcagcatgcattggcca

SEQ ID NO: 605674 - DNA, 590 bp, Homo sapiens
attcatacttggttgtatgtcctaagatctttttagggaggtttcctctttctaaggggattcaaagatatcagtgaaacctgaaaattgtcttgggttaagtagtgcattgtggagtaccaaatggcatgaaagaacaaaactgctgtcattgtgactgccatagtcaatgtcaatgttggatatgactgcatgagctgacagcccctggagcatgtgaaatatatgaaatgcacactggacataacagagcatttttgcagggagctggaccaactcttttatatgactaagatgctatttgcaatttatataaaggaaaaaagcaaatatgctccatgcagtgcctaaaagagccctagtggcttccgggtagaaagccatcccacttctcttcagcagagcatgaaatcaacctactaccttttatcaggttacttacataaaggaattgtgcctattaataaaacatcatgcatcttatttctccaagagcaatgataaccaaactctcctttcccgttccctcttccttccttctctggggtcamtttttgctgccctgtgttctgttcagcatgcattggcca

SEQ ID NO: 605675 - DNA, 609 bp, Homo sapiens
cagtcacatgtccattttggtggcaacatcgtctgtggttttcttagctgccctgggattgaatttgcttaatcatgttcccttttctttcaggttgtgcttggcttcttgctgcccacacctactccatgatttcatgctaatttctgcccttcttctcagttagtgaaagcttcccygcactcattatcagcacacttgaatgtccacttagtgtcagacatacaatttttaaagtgagaatttcgtccaggacttttacaaagcctctcatgtggccactgactgcagttaaaaaactagcctgttagaatggtcaccttgacatcatagtccaaaagtgtcccaataatggatgtgccaaaaaattctgaaaccatcataggagttaaaaaatgagaacaccagcccacaaagaatggtatcacccaaacatttggaccaagtccacagtttttatatttttgtgccacatagcatagacagcctaatatatttaaagtaacacttaaaatgtactttagggattcaaattttagctgcttgtttctatttgctaatacagaacataaattttgaaaaaataaacttttaattgaaaattttaca

SEQ ID NO: 605676 - DNA, 609 bp, Homo sapiens
cagtcacatgtccattttggtggcaacatcgtctgtggttttcttagctgccctgggattgaatttgcttaatcatgttcccttttctttcaggttgtgcttggcttcttgctgcccacacctactccatgatttcatgctaatttctgcccttcttctcagttagtgaaagcttccccgcactcattatcagcacacttgaatgtccacttagtgtcagacatacaatttttaaagtgagaatttcrtccaggacttttacaaagcctctcatgtggccactgactgcagttaaaaaactagcctgttagaatggtcaccttgacatcatagtccaaaagtgtcccaataatggatgtgccaaaaaattctgaaaccatcataggagttaaaaaatgagaacaccagcccacaaagaatggtatcacccaaacatttggaccaagtccacagtttttatatttttgtgccacatagcatagacagcctaatatatttaaagtaacacttaaaatgtactttagggattcaaattttagctgcttgtttctatttgctaatacagaacataaattttgaaaaaataaacttttaattgaaaattttaca

SEQ ID NO: 605677 - DNA, 592 bp, Homo sapiens
aataatggatgtgccaaaaaattctgaaaccatcataggagttaaaaaatgagaacaccagcccacaaagaatggtatcacccaaacatttggaccaagtccacagtttttatatttttgtgccacatagcatagacagcctaatatatttaaagtaacacttaaaatgtactttagggattcaaattttagctgcttgtttctatttgctaatacagaacataaattttgaaaaaataaacttttaattgaaaattttacaaaaagtraaataaaaaactgcttatatttccatccaagggaaagaagatacacatagtaaatactttaaatgtatgtatattctttcacccacttttaggatttatcctaagtataactagctgttttataaagatgttcatcatcattatttagagtaagaaaaaatgaacctaaatgttgacagataaaattcacggagtgagctatggtgcatgcacacagtggggaattatgcaggactgaacactatgtttaaaagcatttttaatggcatgtcaaacacttattctaatatggaaaatacagtgacttcgtggatatacaaaaa

SEQ ID NO: 605678 - DNA, 592 bp, Homo sapiens
aataatggatgtgccaaaaaattctgaaaccatcataggagttaaaaaatgagaacaccagcccacaaagaatggtatcacccaaacatttggaccaagtccacagtttttatatttttgtgccacatagcatagacagcctaatatatttaaagtaacacttaaaatgtactttagggattcaaattttagctgcttgtttctatttgctaatacagaacataaattttgaaaaaataaacttttaattgaaaattttacaaaaagtaaaataaaaaactgcttatatttccatccaagggaaagaagatacacatagtaaatactttaaawgtatgtatattctttcacccacttttaggatttatcctaagtataactagctgttttataaagatgttcatcatcattatttagagtaagaaaaaatgaacctaaatgttgacagataaaattcacggagtgagctatggtgcatgcacacagtggggaattatgcaggactgaacactatgtttaaaagcatttttaatggcatgtcaaacacttattctaatatggaaaatacagtgacttcgtggatatacaaaaa

SEQ ID NO: 605679 - DNA, 592 bp, Homo sapiens
aataatggatgtgccaaaaaattctgaaaccatcataggagttaaaaaatgagaacaccagcccacaaagaatggtatcacccaaacatttggaccaagtccacagtttttatatttttgtgccacatagcatagacagcctaatatatttaaagtaacacttaaaatgtactttagggattcaaattttagctgcttgtttctatttgctaatacagaacataaattttgaaaaaataaacttttaattgaaaattttacaaaaagtaaaataaaaaactgcttatatttccatccaagggaaagaagatacacatagtaaatactttaaatgtatgtatattctttcacccacttttaggatttatcctaagtataactagctgttttataaagatgttcatcatcattatttagagtaagaaaaaatgaacctaaatgttgacagataaaattcacggagtgagctatggtgcatgcacacagtggggaattatgcagkactgaacactatgtttaaaagcatttttaatggcatgtcaaacacttattctaatatggaaaatacagtgacttcgtggatatacaaaaa

SEQ ID NO: 605680 - DNA, 306 bp, Homo sapiens
ctaaacatgagaaaaaatgcttgctaaaaacagaccaaaatgtagagggctgccactgtgtggtgtgatcggstgactttttgccttttaatttatattttgttggcacagaacattgttctcatgtgcccgaagagatttaaagatgatcttgagatgattagcctcctctcagagtcctgccggggtagataacagggaagattggggcaggtcagaggtgactctgggacgtttgtgcttggtgccctgctgcaagggacagcagctctgcagctccagcccactgtttgtcacaggtccttg

SEQ ID NO: 605681 - DNA, 565 bp, Homo sapiens
cagtatcagtcttatggggtgggacatttattgttacatggcaagggctaaggcgtgatcgtggggctgggcctcatgggatggtggaggaaagagtgtcgtgggagagaaagctaaggatttgagagctcactgctcagtggattatctacgcgcaagctgaagtcactgaaaatggtaacaagagtaggtagagatgaagatggagccagccgctgaagtccgtggtggatgaaggaaagaacgtgggrggtctgaagatggcagggaaacgcaggtggtgtagtcagatggcgtgtgctccaaaggaattggaggcttttggaggagaaagaaggagatatcgtgtgaatacagcagtgggagtaagggcgtgcttgccccacctgcaggccatggcttatgtacaatatgggaggaaaaacattcctgtggagaaggaggctgggaaagtcatgctcgctgatagctaggggtgaagagaatttttaaagaggaactacagtatgcaagagaggatttagggagctgatatatacgagcaggatgcagaggaaaagtttgg

SEQ ID NO: 605682 - DNA, 409 bp, Homo sapiens
cattttggcctcctgttgccactgaaaaagtctcaggatgtcccaggggactttggcccacactttgagaatcaatgttcaggctcctttctgagctgattatgtagctgagcacgytgaacgtcatgtgattgagaacctgccccttccagccttcatctcttccattagcttccctaaaccattcattttttagggcattattttctatcaaatacaaacaccagtggaagagagaacacatgaagccattagtagtttaatgccttaatgtgaataaatttacttcatttcaatttgagagtccatggggtcacaaaggagatgaaagagaaagtacaagagccagacataaggttggaaagaaccctgtccccagtgaaaggccaattttttctttcacagcatc

SEQ ID NO: 605683 - DNA, 409 bp, Homo sapiens
cattttggcctcctgttgccactgaaaaagtctcaggatgtcccaggggactttggcccacactttgagaatcaatgttcaggctcctttctgagctgattatgtagctgagcacgttgaacgtcatgtgattgagaacctgccccttccagccttcatctcttccattagcttccctaaaccattcattttttagggcattattttctatcaaatacaaacaccagtggaagasagaacacatgaagccattagtagtttaatgccttaatgtgaataaatttacttcatttcaatttgagagtccatggggtcacaaaggagatgaaagagaaagtacaagagccagacataaggttggaaagaaccctgtccccagtgaaaggccaattttttctttcacagcatc

SEQ ID NO: 605684 - DNA, 409 bp, Homo sapiens
cattttggcctcctgttgccactgaaaaagtctcaggatgtcccaggggactttggcccacactttgagaatcaatgttcaggctcctttctgagctgattatgtagctgagcacgttgaacgtcatgtgattgagaacctgccccttccagccttcatctcttccattagcttccctaaaccattcattttttagggcattattttctatcaaatacaaacaccagtggaagagagaacacatgaagccattagtagtttaatgccttaatgtgaataaatttamttcatttcaatttgagagtccatggggtcacaaaggagatgaaagagaaagtacaagagccagacataaggttggaaagaaccctgtccccagtgaaaggccaattttttctttcacagcatc

SEQ ID NO: 605685 - DNA, 340 bp, Homo sapiens
caccacttctttctctgagttcttatatttctgcttcatggtcttccacttttgatctgacagctccattaagttttcatttcatggcaaaatatttggttaacattttcatcttgcttttgggattgatttttgttgtgtgatctttctccattgataagtttgcatttttccccatagttttttcttatagtgtctttacataaatcaataattattaattactgaattaattgaaatattttgaaccaataatttgtgaaaagtttctatgaagaagaaaggaggaggcaaagttgtcttgcaaacttarcaacccaacaatcttctccttcaccac

SEQ ID NO: 605686 - DNA, 442 bp, Homo sapiens
tggctaagtcttctccttcaccatcataggattcagtggcttctgcagatacagctaagagcttaacacccaacagtcttctccttcactgccatagaattcagtggcttctgcagatacacctaagtcatcggctctttgtagagcatcaccttctctgagtgamactgagtccagaaaggcttcgatgacctcggtccatagaggttctgaatccattattacaaacaaaaaatacaacttttatatttcagagtccctggccttcagccctttctgaaatcagccaccactgtgcctttaagccatcactgtgcttttcttcctttggtcttccatggcttgcttgatttcagctgtttagagtctctatatgtacttttgtgtctatgatccatttctatttactcctagttcgacttaaaatgaaattgtattttaa

SEQ ID NO: 605687 - DNA, 442 bp, Homo sapiens
tggctaagtcttctccttcaccatcataggattcagtggcttctgcagatacagctaagagcttaacacccaacagtcttctccttcactgccatagaattcagtggcttctgcagatacacctaagtcatcggctctttgtagagcatcaccttctctgagtgacactgagtccagaaagkcttcgatgacctcggtccatagaggttctgaatccattattacaaacaaaaaatacaacttttatatttcagagtccctggccttcagccctttctgaaatcagccaccactgtgcctttaagccatcactgtgcttttcttcctttggtcttccatggcttgcttgatttcagctgtttagagtctctatatgtacttttgtgtctatgatccatttctatttactcctagttcgacttaaaatgaaattgtattttaa

SEQ ID NO: 605688 - DNA, 442 bp, Homo sapiens
tggctaagtcttctccttcaccatcataggattcagtggcttctgcagatacagctaagagcttaacacccaacagtcttctccttcactgccatagaattcagtggcttctgcagatacacctaagtcatcggctctttgtagagcatcaccttctctgagtgacactgagtccagaaaggcttcgatgacctcggtccatagaggttctgaatccattattacaaacaaaraatacaacttttatatttcagagtccctggccttcagccctttctgaaatcagccaccactgtgcctttaagccatcactgtgcttttcttcctttggtcttccatggcttgcttgatttcagctgtttagagtctctatatgtacttttgtgtctatgatccatttctatttactcctagttcgacttaaaatgaaattgtattttaa

SEQ ID NO: 605689 - DNA, 587 bp, Homo sapiens
taggggtgaagagaatttttaaagaggaactacagtatgcaagagaggatttagggagctgatatatacgagcaggatgcagaggaaaagtttgggaaaatgggatagggtgagaaattatagaatgcacaggaagtgatggagaggagttagaaaatggtcaaatgactttgaaaatccaawcatttcaaagcacatagccttctgtgctaaggagaaacacacaactgctttgctaagtcaggcatggcaacattaactgtcctctgctgccccttcccctgtctgccttaaactcagaagccccattctcctgagctttggttgggcatatggctgcctgctggagactgcatatcccagcctccccagtgaaaaagctggaccatgtatctaagtcccccagcagtgaaaggcccttaaaaggagggatttggggctcggtttctcttctcataggattaagcatgggtgtggtggggagtcagtatcgacggcatggacgattagaacatcccgaggaaagccagtgcaatgtcaagggtatcagagccctagatgacttcatgcagcggagctgcttacct

SEQ ID NO: 605690 - DNA, 558 bp, Homo sapiens
gtctgcagcttcattcctgagccagcgagaccgcaaacccaccagaaggaagaaactctgaacacayccgaacatcagaaggaacaaactccagacatgccacctttaagaactgtaacactcaccttgaaggtctgtagcttcattcttgaagtcagtgagaccaagagaacccaccaattctggacacaatcttataccacagaactgtaagttctattcttcttccaattttacaaaacagaaacagacaaacagaggtaattctctgaaagatgtctctctcagtccatttctgctgcaatgtaccttagactaggtaatttataaaacaacagacatgtattgctagtagttttggaggccagaggtcgaagctcaaggcagcagtagactcggtggctgctgagggcccattcatcatagatggagtcttctgtatgtcctcatatggtagcagtaaactcggtgcctgctgagggcccattcatcatagatggagttttctctatgtcctcatatggcagaagaaagaagcaagctctctcagaccttttt

SEQ ID NO: 605691 - DNA, 627 bp, Homo sapiens
tttcacagctatttgtgcctcaggcttatttcctaattcaaagctgtaatgggatcaggttagtaagagcctgcaatggaaaactgaagcacagtgcaaactgatctctcacactgtcgctaatttatcttctaagacatttgcaaaaactctcttcactgactccaaatattgtctgtatgggtgcttggtatcaaactgtgaaatggctctgtgattatgaagtgcaactattaatctcagaagagtgaaagcaacctggcccatcwgcatggagcgctaacacagtgcccggtacaattcaggcagaccccttctctgtcttacaaacaaggtatggaaaagaacagcttgccctagaaaaagcagacgttcaaatgggaggctcactcagcctttcagcttcctctgcctgcggcatcttggagaggcacatgcccagagggagtgttgggctagatcatggtttgctgggctgaatgctggaggatttgaagcaggcccagctgggagggagaattaggagcagtaggacccttcatgctggtctgaatccaatcaggcttgactgagtcacagccaaagaaatgactcaaagaccagcaccaactccaaagacagaggttc

SEQ ID NO: 605692 - DNA, 627 bp, Homo sapiens
tttcacagctatttgtgcctcaggcttatttcctaattcaaagctgtaatgggatcaggttagtaagagcctgcaatggaaaactgaagcacagtgcaaactgatctctcacactgtcgctaatttatcttctaagacatttgcaaaaactctcttcactgactccaaatattgtctgtatgggtgcttggtatcaaactgtgaaatggctctgtgattatgaagtgcaactattaatctcagaagagtgaaagcaacctggcccatctgcatggagcgctaacacagtgcccggtacaattcaggcagaccccttctctgtcttacaaacaaggtatggaaaagaacagcttgccctagaaaaagcagacrttcaaatgggaggctcactcagcctttcagcttcctctgcctgcggcatcttggagaggcacatgcccagagggagtgttgggctagatcatggtttgctgggctgaatgctggaggatttgaagcaggcccagctgggagggagaattaggagcagtaggacccttcatgctggtctgaatccaatcaggcttgactgagtcacagccaaagaaatgactcaaagaccagcaccaactccaaagacagaggttc

SEQ ID NO: 605693 - DNA, 548 bp, Homo sapiens
atatacaaggcatctgaacctcagagacttaaggattgctgaaaatcacaggtcttgtgggaacatggcaagcccctcaccccacctggatgaagatgtgtcctggcctcaggacaagcytgttggtattaaagtttcaggttgtctattctggctcactttatgtgaccacttgcccaggccatcgcacccagataggtggtcaaacactgttctagtcacatattgttatatattccatttctgtgagggtgtgttggaatatgattaatacttcagtcaggggactttgagtaaagctgattgctttctgtaatgtgggtgggcctcatccaatcagttgaaggcctgaatagaacaaaaactgacctcccgcaatcctgagggaatgctgccagccggcggccttcagaagtgcaacgtgggccctttcctgggtctgcagcctgctggtctatcctacagattctggtcctgcagtctccataatcatgtgaactaattccttcaatgaaatctctgtctgtctcaccctcctacacagacat

SEQ ID NO: 605694 - DNA, 625 bp, Homo sapiens
acagcacaaacagccctgaaatggaaaagtgtttcaatgcttcacagacctggaagatcagtgtgtgggggacgtgcaatatgagacgaagccttaagcagattgggaatttggctccagagatggtggtggtatggacaatacagtggtgagaccccaactcctgccctttgtttccactcaccaacggcagattccccctgaagatgggctgggagataaacgtcccgttcaaatggaccctaagtgaagaggctcatggggaaaaccttcctcccattgcacacccactgcaggcagagccttcccaagctctgtccaggcctcctgcctagttatctacggggtgaatcagtccacagagaaacactcaccaaaatgtcagctggacttcaacaggaagggtcaagctcaaaggaaattatatgaggtttttagaaaactacaacaaattcaactctttgtagtcagtacctaactcagygcctagcatataaggctcaacaaatcatatggaaagttatctggtgtaaatacccagggttcatggtcttgtgccaggaagatttagaacacaaacacacaggaagagtttaggagcagatgtttaataggcaaaagaaag

SEQ ID NO: 605695 - DNA, 525 bp, Homo sapiens
ttactatgcaaatggactttccacttgactggtgccatcttgtctgctccttcctgtacacgtggttggcaaaggaaaggggagatggagcctccgttttgaacatgcctagtccccgtagctttttcctgctgcccttcacccatgcaagcttgccgctggcttttctatgtctgcagctccatcttacaggctgatctttgttagacaatgattttggggctgcttttcattaaaaagcaaaacctatgaggattcccataccctcactatctgcctaagcagtttcttcttaacgcctatatcattaagagagatattatgcagcttagagttattagggtttgtgaaataacaaataaagagataaaaggtttttgtgtgtattggtgtgaagatatgtatatatatatatrgacatatatattctgttgtgcctcctggagtttaacccctagtcactttaactggttggtctaggctgttccaaaaattatcttaaacacacatttgcaagccatattg

SEQ ID NO: 605696 - DNA, 563 bp, Homo sapiens
catgctcagaaccacttctgttgactgatatgaaatctcttcattacaatttactagaaataatccctcacaccaaaaaggggagtcatttccccaaagccaaatcacttggtattttccaacccaagactagaaaccagctgtcctgccacccaaacacccaatgcacgctccaccatccttgctgctgggctttaacaaaagaatctcaaaatcagagtgggatttgaagactagaagaagaaagcaaaacaagactatctggcaaggctgggtgaggagctttgcagcmaaccaggactgaggtcttgacacagaaggcctggagaggctgccattattccccagtgaattaagaaagacttgcagcagctacctcttaagatacaacagaagagaagccacctgaggtaagcgggtcagtgagaaggaagcttcagacaaaggaagctgtgagtgaggacaaaatgaagaggaacgaacccagccacacagtgacaaagaaaccacagggtttggcaagtgtctgcttgaccttctctaaagcaaattaaaaatgtaga

SEQ ID NO: 605697 - DNA, 621 bp, Homo sapiens
gaaaccagctgtcctgccacccaaacacccaatgcacgctccaccatccttgctgctgggctttaacaaaagaatctcaaaatcagagtgggatttgaagactagaagaagaaagcaaaacaagactatctggcaaggctgggtgaggagctttgcagcaaaccaggactgaggtcttgacacagaaggcctggagaggctgccattattccccagtgaattaagaaagacttgcagcagctacctcttaagatacaacagaagagaagccacctgaggtaagcgggtcagtgagaaggaagcttcagacaaaggaagctgtgagtgaggacaaaatgaagaggaacgaacccagccacacagtgacaaagaaaccacagggtttggcaagtgtctgcttgaccttctctaaagcaaattaaaaatgtagagctgaatctctaaatttaatatttaggaagaaagaattgcaattcacaatatagaggcagacagggtggtcygaaggtggaaaaagaggactgttcctttgtggtcctgtgagaaagttctttgatattagcaaagttttgggggctggtaaggtctgattggtgggtgactgtggtgggcaaaactagt

SEQ ID NO: 605698 - DNA, 621 bp, Homo sapiens
gaaaccagctgtcctgccacccaaacacccaatgcacgctccaccatccttgctgctgggctttaacaaaagaatctcaaaatcagagtgggatttgaagactagaagaagaaagcaaaacaagactatctggcaaggctgggtgaggagctttgcagcaaaccaggactgaggtcttgacacagaaggcctggagaggctgccattattccccagtgaattaagaaagacttgcagcagctacctcttaagatacaacagaagagaagccacctgaggtaagcgggtcagtgagaaggaagcttcagacaaaggaagctgtgagtgaggacaaaatgaagaggaacgaacccagccacacagtgacaaagaaaccacagggtttggcaagtgtctgcttgaccttctctaaagcaaattaaaaatgtagagctgaatctctaaatttaatatttaggaagaaagaattgcaattcacaatatagaggcagacagggtggtccgaaggtggaaaaagaggaytgttcctttgtggtcctgtgagaaagttctttgatattagcaaagttttgggggctggtaaggtctgattggtgggtgactgtggtgggcaaaactagt

SEQ ID NO: 605699 - DNA, 540 bp, Homo sapiens
cagtgagaaggaagcttcagacaaaggaagctgtgagtgaggacaaaatgaagaggaacgaacccagccacacagtgacaaagaaaccacagggtttggcaagtgtctgcttgaccttctctaaagcaaattaaaaatgtagagctgaatctctaaatttaatatttaggaagaaagaattgcaattcacaatatagaggcagacagggtggtccgaaggtggaaaaagaggactgttcctttgtggtcctgtgagaaagttctttgatattagcaaagttttgggggctggtaaggtctgattggtgggtgactgtggtgggcaaaactagtccttgatttgcagttgttatctcacctgctacagatgaaagtggtctctggttacaacaggcagtttcagccacgggacttgcagacaacagcatttctagagtgacgttatgtaccytgagtgccttttactcagacccctcttctctgatttagttgggtatgacaagaatggaccaatttggataatcaacttgcacaatgctg

SEQ ID NO: 605700 - DNA, 393 bp, Homo sapiens
ttccgtacaactcacccacttaaactgtatgactcaatggttttcaatatattcacaagtaggtgcaaacatcaccacagtcaattttagaacatttttatcacctcaaaaagaaacctagaactctttccaaatggccccatcttctcatcmccatggctaagaaaccatttacctcctttctgtctctgtggacccctccattctggattttcatgtgaacagaatcatagagtatgtggtcttttgtgactgacgtctttcacctgccacgatgttattaaggttcaagcatgttgtaggatgtattagtacttcattatcttttatggctgaatgaggtttcattatgcagatagaccttattttgcttatccattcagctattgaaaa

SEQ ID NO: 605701 - DNA, 568 bp, Homo sapiens
tatgaacaatattattttatatgtatacacacctatcctattgtttctgtttttctggagaacctagactaattcacagggctaagcccaaagtcaaacttggtgacctctataaaattacatggcaaaggctggagaaaaaggaaacagtaaacatttggggtcacatttacaatttaccacagatggcaagaagatagagctgcttttcccgatatctggatgtcggtttccagccacccaaatcttcctaaagacgtggaaatgctgtggccgctgcagcagtgggcagaggagtggtcaggcygggaagaggaggtgctcgggtcatctttcccatccccaggatggctggtggccccctgtgctacgtgcatttgaaggcctcacctgcctcatgggtctgagggaggcagcacataattaaccactactaggaattttagaatgtatttttagttctctggaaatgtctccctcattattctttgttattcaactttgaaacacatgtgtaggaatccactgtgtgtagaagtaagaaactgcctataaccaatgcttttca

SEQ ID NO: 605702 - DNA, 524 bp, Homo sapiens
agcaacccttctagagaatttggtcagggattgggtcaggaaatgttcatggagcaccttctcctttctctgtgtcaggcactgtgctatgttatggagacacaggggtgggcaaaaccagaccccatacctgcccttagcagtatattctgtaagggggctggaggatgtagacctgaatcaaatatttgcatgcacaagtagaaacatgcaacccatgtgtacagtgaaggggaggcccttggtgctgcaaagacccataatcacaggccccgggctgggcagagggcagggagagctttcctggggagcagtgcttgaaatatggtacaaagaaggggttggagttattgagataaatagaagaaacagtgttccaggttagagggtttagaaagtgcaaaggccttatacctgggaaaaaggaaagacaaaggggtggaaggaaaagcagtggctgaagcacagtggctcatgaaagaygagactggatagaataggagcaggtcctcgggcctggagga

SEQ ID NO: 605703 - DNA, 393 bp, Homo sapiens
ttccgtacaactcacccacttaaactgtatgactcaatggttttcaatatattcacaagtaggtgcaaacatcaccacagtcaattttagaacatttttatcacctcaaaaagaaacctagaactctttccaaatggccccatcttctcatcaccatggctaagaaaccatttacctcctttctgtctctgtggacccctccattctggattttcatgtgaacagaatcatagagtatgtggtcttttgtgactgacgtctttcacctrccacgatgttattaaggttcaagcatgttgtaggatgtattagtacttcattatcttttatggctgaatgaggtttcattatgcagatagaccttattttgcttatccattcagctattgaaaa

SEQ ID NO: 605704 - DNA, 536 bp, Homo sapiens
tcctgcactccaaagtcatttttaaatggtaattacacctttgaagagcatctaattagtatgaaaagaactttggatgaatgtggagctcttcatctgacttcaattgatacacagtgataatattcaagaccaatttctgcagcttttattgcctgactgagcattgctctgtttctgaagtttaaagggattttctaatcttttgcttatcagaggctgagcaaagacctgtcatggtttatggaggtaaaagagaggaggtaaaagtatttttaagtgccctgtggaaagtgctgtcaagtccaggctgtgtcaagctcatgctttgtggtgaaacaaggatctaagccacaaaytcctgaaaagaaagtttctagtccctttttgtctgggtcattcaggagcatcgagacagacacacaggagtctggtaagactcctgttcttcatccctgtcatcagtaacgtaacactcttagtgctcgctgtgtgcctggctctgtgttaagtgctatttcagttaaatgttagca

SEQ ID NO: 605705 - DNA, 480 bp, Homo sapiens
agcctatgcacattctccctatactttaaatcatctctagattactggtaacamctactacaatgtaaatgctatgcaaatcgttgttacactgtgtcatttagagaataataaaaagaaaaactttgtacatgttcaatacagtttaaagggctttttttgcaaatatttttgactcctggctgcttgaatcggcagatgcacaactcacagatacaaaggactaacagtgcgtttccttgttgatgtcacatgagctccctttagcaacagatagaaggactaactgtgtgtttccttgttgatgtcacatgagctccctttagtaacagaaggagtaagtgtatgtttccttgttgatgtcatgagctcgcttgagtaacagatacaaaggactaagtgtgtattttcttgttgatgtcaggtgagcttgctttagtaacagatagaaggactaactgtgtttccttgttgatgtca

SEQ ID NO: 605706 - DNA, 480 bp, Homo sapiens
agcctatgcacattctccctatactttaaatcatctctagattactggtaacacctactacaatgtaaatgctatgcaaatcgttgttacactgtgtcatttagagaataataaaaagaaaaactttgtacatgttcaatacagtttaaagggctttttttgcaaatatttttgactcctggctgcttgaatcggcagatgcacaactcacagatacaaaggactaacagtgcrtttccttgttgatgtcacatgagctccctttagcaacagatagaaggactaactgtgtgtttccttgttgatgtcacatgagctccctttagtaacagaaggagtaagtgtatgtttccttgttgatgtcatgagctcgcttgagtaacagatacaaaggactaagtgtgtattttcttgttgatgtcaggtgagcttgctttagtaacagatagaaggactaactgtgtttccttgttgatgtca

SEQ ID NO: 605707 - DNA, 543 bp, Homo sapiens
tattagtacttcattatcttttatggctgaatgaggtttcattatgcagatagaccttattttgcttatccattcagctattgaaaatctggcttttgtgaacaatgctgctatgaacatggacatgaaaatgcctcttcaagatcctactttcaattatttggaacatatgggtaagttgtctttagtggcttcattaaaaaagtaaaacacaaacaggtggaattaattttaataatacgttttacttacttcgatatatcyaaatctcacatcaacaaatcatcaattaaacacgtaataagagagtttgcattcttttccactctaaatctgtgaaatccaggacatagtttgcacttgcagctgacctcagttggaaccagcccatttcacgtgggcaatacgcacaggtgcctagtggctactgtgttgaacaggaccctctaatcctcgaggtgctgggattcaggaggagctgactgtgtggtgatagctgctcctgaacttcaggttgcatcctctttctctctctctctcact

SEQ ID NO: 605708 - DNA, 532 bp, Homo sapiens
cattatcttttatggctgaatgaggtttcattatgcagatagaccttattttgcttatccattcagctattgaaaatctggcttttgtgaacaatgctgctatgaacatggacatgaaaatgcctcttcaagatcctactttcaattatttggaacatatgggtaagttgtctttagtggcttcattaaaaaagtaaaacacaaacaggtggaattaattttaataatacgttttacttacttcgatatatctaaatctcacrtcaacaaatcatcaattaaacacgtaataagagagtttgcattcttttccactctaaatctgtgaaatccaggacatagtttgcacttgcagctgacctcagttggaaccagcccatttcacgtgggcaatacgcacaggtgcctagtggctactgtgttgaacaggaccctctaatcctcgaggtgctgggattcaggaggagctgactgtgtggtgatagctgctcctgaacttcaggttgcatcctctttctctctctctctcact

SEQ ID NO: 605709 - DNA, 543 bp, Homo sapiens
tattagtacttcattatcttttatggctgaatgaggtttcattatgcagatagaccttattttgcttatccattcagctattgaaaatctggcttttgtgaacaatgctgctatgaacatggacatgaaaatgcctcttcaagatcctactttcaattatttggaacatatgggtaagttgtctttagtggcttcattaaaaaagtaaaacacaaacaggtggaattaattttaataatacgttttacttacttcgatatatctaaatctcacatcaacaaatcatcaattaaacacgtaataagagagtttgcattcttttccactctaaatctgtgaaatccaggacatagtttgcacttgcagctgacctcagttggaaccagcccatttcacgtgggcaatacscacaggtgcctagtggctactgtgttgaacaggaccctctaatcctcgaggtgctgggattcaggaggagctgactgtgtggtgatagctgctcctgaacttcaggttgcatcctctttctctctctctctcact

SEQ ID NO: 605710 - DNA, 617 bp, Homo sapiens
cacaaatgcaaatacatggggtcataggtaatttgtttcttcaaagaccatgtagacttctctttggcaattgcaagggaaattctatcaatcatagtccacacatggatataagccataagtaactcttttccatgcttgcttagcacaaagccttatatactctagatttggggttattttttttttttacagtaatatatgtaaagcaatgtcacaaatctgagccccwcatgcatgcaatttaaacactggaaaccaactatgtggagagtatagcaatggtttgactctgaggtaagaagcacggtgaaagaactggaaataaaccctgcatctgagctttatgaagaagcgattataatcaataccaaaatgaaaaaaagaaacatcaacagctactgtgaaccaaggtcttcacagttttgcttctttccactaatcttccaaagaggttattttgagacgatatgttcaaagcactataagccattcttctccaagaagtggtgacaattactttgcttcttgcttcccactcctaaaagggaaatttaatcaatattgtcagttcttacaagaaaaatggaaaacgcacacacatattcaagctctac

SEQ ID NO: 605711 - DNA, 617 bp, Homo sapiens
cacaaatgcaaatacatggggtcataggtaatttgtttcttcaaagaccatgtagacttctctttggcaattgcaagggaaattctatcaatcatagtccacacatggatataagccataagtaactcttttccatgcttgcttagcacaaagccttatatactctagatttggggttattttttttttttacagtaatatatgtaaagcaatgtcacaaatctgagccccacaygcatgcaatttaaacactggaaaccaactatgtggagagtatagcaatggtttgactctgaggtaagaagcacggtgaaagaactggaaataaaccctgcatctgagctttatgaagaagcgattataatcaataccaaaatgaaaaaaagaaacatcaacagctactgtgaaccaaggtcttcacagttttgcttctttccactaatcttccaaagaggttattttgagacgatatgttcaaagcactataagccattcttctccaagaagtggtgacaattactttgcttcttgcttcccactcctaaaagggaaatttaatcaatattgtcagttcttacaagaaaaatggaaaacgcacacacatattcaagctctac

SEQ ID NO: 605712 - DNA, 617 bp, Homo sapiens
cacaaatgcaaatacatggggtcataggtaatttgtttcttcaaagaccatgtagacttctctttggcaattgcaagggaaattctatcaatcatagtccacacatggatataagccataagtaactcttttccatgcttgcttagcacaaagccttatatactctagatttggggttattttttttttttacagtaatatatgtaaagcaatgtcacaaatctgagccccacatgcatgcaatttaaacactggaaaccaactatgtggagagtatagcaatggtttgactctgaggtaagaagcacggtgaaagaactggaaataaaccctgcatctgagctttatgaagaagcgattataatcaataccaaaatgaaaaaaagaaacatcaacagctactgtgaaccaaggtcttcacagttttgcttctttccactaatcttccaaagaggttattttgagacgatatgttcaaagcactataagccattcttctccaagaagtggtgacaattrctttgcttcttgcttcccactcctaaaagggaaatttaatcaatattgtcagttcttacaagaaaaatggaaaacgcacacacatattcaagctctac

SEQ ID NO: 605713 - DNA, 588 bp, Homo sapiens
taaaaagggggaactgaggtattgcagagagtgaaactgcaggggcagccaccagctgtctagggctgaggaacaaaggaaagaagttggggttactagaatccagaagctggaggmggggtccccagagctggggctcagtcccccaagaaggggcactgcccagctggtgctcaggcctttgagaggttcatggggagggtgtctccgggagcacaaaaagaagccaggcatgggaactgatgttatggctactgaccgctgctgccagggtgaagggcattgctgagcagcctgggtagatgacaacgccagtaggaaccggtcccttctcccaccacctgcctcccaggctccctccggtgctcctgaccctggcaggaccaacctggatgccgttgacaaggagggaagcttgtcaagtcctaatttcagcatctgaccgtgacaaattcaaagctgagaaacaataaccaaagaaccagaatatatggtaatccatttgtagcaacataactataggttcctaaaaatctttaggatgtaactatcataactgaggaactaagtctttttggggacaagtag

SEQ ID NO: 605714 - DNA, 588 bp, Homo sapiens
taaaaagggggaactgaggtattgcagagagtgaaactgcaggggcagccaccagctgtctagggctgaggaacaaaggaaagaagttggggttactagaatccagaagctggaggcggggtccccagagctggggctcagtcccccaagaaggggcactgcccagctggtgctcaggcctttgagaggytcatggggagggtgtctccgggagcacaaaaagaagccaggcatgggaactgatgttatggctactgaccgctgctgccagggtgaagggcattgctgagcagcctgggtagatgacaacgccagtaggaaccggtcccttctcccaccacctgcctcccaggctccctccggtgctcctgaccctggcaggaccaacctggatgccgttgacaaggagggaagcttgtcaagtcctaatttcagcatctgaccgtgacaaattcaaagctgagaaacaataaccaaagaaccagaatatatggtaatccatttgtagcaacataactataggttcctaaaaatctttaggatgtaactatcataactgaggaactaagtctttttggggacaagtag

SEQ ID NO: 605715 - DNA, 588 bp, Homo sapiens
taaaaagggggaactgaggtattgcagagagtgaaactgcaggggcagccaccagctgtctagggctgaggaacaaaggaaagaagttggggttactagaatccagaagctggaggcggggtccccagagctggggctcagtcccccaagaaggggcactgcccagctggtgctcaggcctttgagaggttcatggggagggtgtctccgggagcacaaaaagaagccaggcatgggaactgatgttatggctactgaccgctgctgccagggtgaagggcattgctgagcagcctgggtagatgacaacgccagtaggaaccggtcccttctcccaccacctgcctcccaggctccctccggtgctcctgaccctggcaggaccaacctggatgccgttgacaaggagggaagcttgtcaagtcctaatttcagcatctgaccgtgacaaattcaaagctgagaaacaataaccaaagaaccagaatatatggtaatccatttgtagcaacrtaactataggttcctaaaaatctttaggatgtaactatcataactgaggaactaagtctttttggggacaagtag

SEQ ID NO: 605716 - DNA, 582 bp, Homo sapiens
tatgcactgtcaaacgatttttttgctcatctgatgggtaagagcctgtatcgcagtgtagctttaatgttcagttatcttattatgagggaacttgaaaaatctttccatatactttcaggttcttttatatgtctggttgtaaattgccttttcctatcttttgttcattcatatagaagtgctgttcatttccctctatttttaaaaatattttttaaaargaggattaacatttcctccttttggaatttaggttaccaatgttttgttatagtttatttgtctttcaactttgccctgtacaacattttattgttaaataatcagttaccagtgcttatcacatctggatttgagtaagagtcagaagatctcccctagacccaggttaagaggtacagagtttctgtctgggatgatgataaagttctggaaacaggtagtggtggcagttgtaaacactgtgaatgtacttaatgacactgaattgcacgcttaaaaatgattaaaatggtaaagtttatgttatatgcattttttaaaaggttaaattcaactttttttggtacttgtataatt

SEQ ID NO: 605717 - DNA, 582 bp, Homo sapiens
tatgcactgtcaaacgatttttttgctcatctgatgggtaagagcctgtatcgcagtgtagctttaatgttcagttatcttattatgagggaacttgaaaaatctttccatatactttcaggttcttttatatgtctggttgtaaattgccttttcctatcttttgttcattcatatagaagtgctgttcatttccctctatttttaaaaatattttttaaaaagaggattaacatttcctccttttggaatttaggttaccaatgttttgttatagtttatttgtctttcaactttgccctgtacaacattttattgttaaataatcagttaccagtgcttatcacatctggatttgagtaagagtcagaagatctcccctagacccaggttaagaggtacagagtttctgtctgggatgatgataaagttctggaaacaggtagtggtggcagttgtaaacactgtgaatgtacttaatgacactgaattgcacrcttaaaaatgattaaaatggtaaagtttatgttatatgcattttttaaaaggttaaattcaactttttttggtacttgtataatt

SEQ ID NO: 605718 - DNA, 543 bp, Homo sapiens
atctatttcttgattttctattctatcccattggccttttcatacactaattccacactaatttagttttacaggctttacagtgtattttgatgaggcaaaatctagtttctattcaaaacatctccttttctcctatttttattctgagtttaatcaacaaaattaaatacagatatactacatatatataaatatttatcttttttctgttcttatttttgtatttatggctcacagtggcctttgtctttccaaatgcttctttgaggatatttaattcactttggagtgttgtgttacagatttattgtttgtgtgcatgtattttttaaattgggtaacagcaaaaatggtttgctttaccttaattgttttagggtagttccatttgggtgtggtttgtttttcctctttgtatccattttgcatrgatttcagtatgaacttttctattggttctgccccctgaatgtgctgttttcttattggacaattgtgaagaaggattagtgcttttgttttgcttttgtctctgcagga

SEQ ID NO: 605719 - DNA, 543 bp, Homo sapiens
atctatttcttgattttctattctatcccattggccttttcatacactaattccacactaatttagttttacaggctttacagtgtattttgatgaggcaaaatctagtttctattcaaaacatctccttttctcctatttttattctgagtttaatcaacaaaattaaatacagatatactacatatatataaatatttatcttttttctgttcttatttttgtatttatggctcacagtggcctttgtctttccaaatgcttctttgaggatatttaattcactttggagtgttgtgttacagatttattgtttgtgtgcatgtattttttaaattgggtaacagcaaaaatggtttgctttaccttaattgttttagggtagttccatttgggtgtggtttgtttttcctctttgtatccattttgcatagatttcagtatgaacttttctattggttctgccccctgaatgygctgttttcttattggacaattgtgaagaaggattagtgcttttgttttgcttttgtctctgcagga

SEQ ID NO: 605720 - DNA, 535 bp, Homo sapiens
tattgtttgtgtgcatgtattttttaaattgggtaacagcaaaaatggtttgctttaccttaattgttttagggtagttccatttgggtgtggtttgtttttcctctttgtatccattttgcatagatttcagtatgaacttttctattggttctgccccctgaatgtgctgttttcttattggacaattgtgragaaggattagtgcttttgttttgcttttgtctctgcaggatactcaggtttcacttttttattctgtccctcagggcctcccttcccaggggtgcccctcttttccttatgtctgactctcccgtaggtgaaacatggggcttaccgcttttggtcctgcacatttacaagcctcttccctgcctccagtcccgtgaagtatctgtaccctgcacctccttctgaggtgagattgtctgtgctttgtctgagtgcatcacttcactctatttttttttttcatggaatcttgtggcattgggtgggcagtgggagctccagtggaattaaaggtaatatg

SEQ ID NO: 605721 - DNA, 478 bp, Homo sapiens
ttcttttgcagaccactggggtcacttgaatttagaatttaccaggtgcaattttgcaaactatcttaattatcttgacattataaaagcctgtaatcttgtacttctgacatctgagtaattaggactttgaacaccagtgccttctargtcacaggcttgcattttttccactgcagattggctgtcagccattaccacctttctgctccaatggaaacctttctaaatgagagcgggattggacaggatggctttgatttgaatcgctgtaaaaacaactttcatgtattgagctgcattgaatttttatttgcgcactgaactttattttatattttaaaaagacaaataacaagctattatatttggcagataaaaagagacatatgagcgtgataaatttggctgtggatctctctgacctaatctaataatcattttggtttcaaaacccgaatgatttctcagagcagct

SEQ ID NO: 605722 - DNA, 611 bp, Homo sapiens
aattaggactttgaacaccagtgccttctaggtcacaggcttgcattttttccactgcagattggctgtcagccattaccacctttctgctccaatggaaacctttctaaatgagagcgggattggacaggatggctttgatttgaatcgctgtaaaaacaactttcatgtattgagctgcattgaatttttatttrcgcactgaactttattttatattttaaaaagacaaataacaagctattatatttggcagataaaaagagacatatgagcgtgataaatttggctgtggatctctctgacctaatctaataatcattttggtttcaaaacccgaatgatttctcagagcagctttttacttgcttatacagctcagttaagaagaacacaaatagttccccaggcacacccaagatacagaaacattataaaacattgcttattaattgctttttaggttaagaattatggtaaggaaagattttgatttttgagagacattaaagtaaaatgatatttacccttcacatgctaatttacccttgtaagttatgggacatttttatccattctgtaagttgtgtgaagcttttgaaacatcttta

SEQ ID NO: 605723 - DNA, 611 bp, Homo sapiens
aattaggactttgaacaccagtgccttctaggtcacaggcttgcattttttccactgcagattggctgtcagccattaccacctttctgctccaatggaaacctttctaaatgagagcgggattggacaggatggctttgatttgaatcgctgtaaaaacaactttcatgtattgagctgcattgaatttttatttgcgcactgaactttattttatattttaaaaagacaaataacaagcwattatatttggcagataaaaagagacatatgagcgtgataaatttggctgtggatctctctgacctaatctaataatcattttggtttcaaaacccgaatgatttctcagagcagctttttacttgcttatacagctcagttaagaagaacacaaatagttccccaggcacacccaagatacagaaacattataaaacattgcttattaattgctttttaggttaagaattatggtaaggaaagattttgatttttgagagacattaaagtaaaatgatatttacccttcacatgctaatttacccttgtaagttatgggacatttttatccattctgtaagttgtgtgaagcttttgaaacatcttta

SEQ ID NO: 605724 - DNA, 611 bp, Homo sapiens
aattaggactttgaacaccagtgccttctaggtcacaggcttgcattttttccactgcagattggctgtcagccattaccacctttctgctccaatggaaacctttctaaatgagagcgggattggacaggatggctttgatttgaatcgctgtaaaaacaactttcatgtattgagctgcattgaatttttatttgcgcactgaactttattttatattttaaaaagacaaataacaagctattatatttggcagataaaaagagacatatgagcgtgataaatttggctgtggatctctctgacctaatctaataatcattttggtttcaaaacccgaatgatttctcagagcagctttttacttgcttatacagctcagttaagaagaacacaaatagttccccaggcacacccaagatacagaaacattataaaacattgcttwttaattgctttttaggttaagaattatggtaaggaaagattttgatttttgagagacattaaagtaaaatgatatttacccttcacatgctaatttacccttgtaagttatgggacatttttatccattctgtaagttgtgtgaagcttttgaaacatcttta

SEQ ID NO: 605725 - DNA, 599 bp, Homo sapiens
attggatccagtttctttaagtacctttattttcccttgaagaaaataaaggaggagaagggacttagccaaataatgatttaaatttattctagtatttctgagggtgccaagtcaggaggttgctgaggtttctttctctttcctttgctgaggtaaatttccagctcaggcatatggactgacgtggaaaagcaatcagttataaagaaaaaatacatttggggtctgtctctgttggaaacataattgaaagcatgagtgttgtgtggtttctctcaaacttcaaaagtgtgctcaggcacatgaaggggartgccatctgtttgttgttagggtcatgttttactttcctgcttacactttcaatatagtcaaagagctcagctttttataaagaaaattaattactacttaggtttacattagtggcaaatttactcattttcccttttccattagaagaatgttgttagataatagattagaacaatttggcaattaatcacagtcacccactcttagaaattgctcattggccaaaataattagtacaaacactacttagaaaagaaatgatccatcttttgtaaacctaa

SEQ ID NO: 605726 - DNA, 651 bp, Homo sapiens
ttagaaaagaaatgatccatcttttgtaaacctaagaacatgttggcagatttgcaatgcttgataacaatagcttttgtgctgcaatgtacaggaggtgccttgaaatttataggctgttggctaccagcacccatcatccacctcagcacctgcaggagccctgatggtcaataggaaggcatagagggaaaaatactgagcttcggaacttgaacctcagactcaggggcatgtagaaactagtccaaagtaacactattgcttagtggcagaatcgagcctggaatccagttttcctgattcctggctcagtgaccccacggctgcacgtgasggtcctgtggagttagtgtcctcccgtgctaaagtgacacggcttgcgttaatccatagaaacgttccatgctgatcccacagacatgtattgaaggcagactatgttctaggctgtgttagcgaagcctccatatagtcacagtattcatttcctagcttaattgttgtttgactattttcaaggtatgtcaggcctaacctactaattcctcattatctgcaatcttatttaaatacactgtgtcaattgagtgtttgtgatatgagcatcaattttgagataacagggatacaaaagaaggaggatccctg

SEQ ID NO: 605727 - DNA, 507 bp, Homo sapiens
cagtattcatttcctagcttaattgttgtttgactattttcaaggtatgtcaggcctaacctactaattcctcattatctgcaatcttatttaaatacactgtgtcaattgagtgtttgtgatatgagcatcaattttgagataacagggatacaaaagaagraggatccctgcctctaaagagctcgccaacttattatgtggaaataatggaccgaatgccactgatgcaaatgcaccttccctctaggacgtggctccttttttccttttttagttgttctttcaccacgtcagctcttctttcctggtctgctttgaagtcttcttctctcctcttccctctgctggttcctttagccctgggcttccctggggctcagtccgacgttccctcttctattctctcccagggtcatctcatccagtcgtacggcttctattatcatccatagcagaaattatgaacccagagtccatggataaacttttgggcctgtgagttcc

SEQ ID NO: 605728 - DNA, 580 bp, Homo sapiens
gagtgtttgtgatatgagcatcaattttgagataacagggatacaaaagaaggaggatccctgcctctaaagagctcgccaacttattatgtggaaataatggaccgaatgccactgatgcaaaygcaccttccctctaggacgtggctccttttttccttttttagttgttctttcaccacgtcagctcttctttcctggtctgctttgaagtcttcttctctcctcttccctctgctggttcctttagccctgggcttccctggggctcagtccgacgttccctcttctattctctcccagggtcatctcatccagtcgtacggcttctattatcatccatagcagaaattatgaacccagagtccatggataaacttttgggcctgtgagttccttgaaattgtatgcaaatttggtgtatatggtcatagcttctgccagcttggcagaggggacctagactccacagctctactgaagtgggtgatgcccaggactgcatgttcctgagtgtcaggggccagctctgactggccctgggcaccgtggcttggagatctcacagctgcatgaagct

SEQ ID NO: 605729 - DNA, 607 bp, Homo sapiens
attgtatgcaaatttggtgtwtatggtcatagcttctgccagcttggcagaggggacctagactccacagctctactgaagtgggtgatgcccaggactgcatgttcctgagtgtcaggggccagctctgactggccctgggcaccgtggcttggagatctcacagctgcatgaagcttaaagcaatcttatctaattgcagttccccatcccctgcccgcatctctaccttccgcttttgtgtccctgtcatagtaagtagcatcatcaccaggttgtccaactagaaaccagggactttccagactcttctctctccctcattccatacagccatctcatgtgctatgggctctttctccaaaacctctcaaatctattccctcccctccatttcccctgcccggccctctcagctctcctcagcctttactggacacagcagcctcctggctggtcttccctcagtctcactcccatctcttctctctatggaggcaactgagcatgcgttttctttttcctttctttctttctttctttctttctttctttctttctttctttctttctttttttttttgaaacagagtctcgctctgtcacc

SEQ ID NO: 605730 - DNA, 607 bp, Homo sapiens
attgtatgcaaatttggtgtatwtggtcatagcttctgccagcttggcagaggggacctagactccacagctctactgaagtgggtgatgcccaggactgcatgttcctgagtgtcaggggccagctctgactggccctgggcaccgtggcttggagatctcacagctgcatgaagcttaaagcaatcttatctaattgcagttccccatcccctgcccgcatctctaccttccgcttttgtgtccctgtcatagtaagtagcatcatcaccaggttgtccaactagaaaccagggactttccagactcttctctctccctcattccatacagccatctcatgtgctatgggctctttctccaaaacctctcaaatctattccctcccctccatttcccctgcccggccctctcagctctcctcagcctttactggacacagcagcctcctggctggtcttccctcagtctcactcccatctcttctctctatggaggcaactgagcatgcgttttctttttcctttctttctttctttctttctttctttctttctttctttctttctttctttttttttttgaaacagagtctcgctctgtcacc

SEQ ID NO: 605731 - DNA, 607 bp, Homo sapiens
attgtatgcaaatttggtgtatatggtcatagcttctgccagcttggcagaggggacctagactccacagctctactgaagtgggtgatgcccaggactgcatgttcctgagtgtcaggggccagctctgactggccctgggcaccgtggcttggagatctcacagctgcatgaagcttaaagcaatcttatctaattgcagttccccatcccctgcccgcatctctaccttccgcttttgtgtccctgtcatagtaagtagcatcatcaccaggttgtccaactagaaaccagggactttccagactcttctctctccctcattccatacagccatctcatgtgctatgggctctttctccaaaacctctcaaatctattccctcmcctccatttcccctgcccggccctctcagctctcctcagcctttactggacacagcagcctcctggctggtcttccctcagtctcactcccatctcttctctctatggaggcaactgagcatgcgttttctttttcctttctttctttctttctttctttctttctttctttctttctttctttctttttttttttgaaacagagtctcgctctgtcacc

SEQ ID NO: 605732 - DNA, 607 bp, Homo sapiens
attgtatgcaaatttggtgtatatggtcatagcttctgccagcttggcagaggggacctagactccacagctctactgaagtgggtgatgcccaggactgcatgttcctgagtgtcaggggccagctctgactggccctgggcaccgtggcttggagatctcacagctgcatgaagcttaaagcaatcttatctaattgcagttccccatcccctgcccgcatctctaccttccgcttttgtgtccctgtcatagtaagtagcatcatcaccaggttgtccaactagaaaccagggactttccagactcttctctctccctcattccatacagccatctcatgtgctatgggctctttctccaaaacctctcaaatctattccctcccctccatttcccctgcccggccctctcagctctcctcagcctttactggacacagcagcctcctggctggtcttycctcagtctcactcccatctcttctctctatggaggcaactgagcatgcgttttctttttcctttctttctttctttctttctttctttctttctttctttctttctttctttttttttttgaaacagagtctcgctctgtcacc

SEQ ID NO: 605733 - DNA, 590 bp, Homo sapiens
aactagatagtgctcagcgtagatagcatgcttccttcttaattcccagaggatgtctggcactttcgtcatagtctggcgttgcagaggagatgtggggatgtctgctcagcatagacagtatacttcattcttaattcccagaggatgtctggcattttcgtcgtaggctggcattgcagaggagacggggtgggggtggtgtctcactcatttggccagttccccttgcagccacaaccacccagctaccataggtatggctcaatcctcattactggagctgcagcggtgctgcctcaggaccgggtggcttgtggtggacaccattccactcacctcaaatrcagagatacagcacctcatgtcccctagtggtagaagccacccgtgatcagctctcccccttcctcctgaaactatctcccagctccaccagttccacagtggtgccaccctgcgctgtgtcatgctgccatctttcaggcaggggagacagttccacagtggtgctcccttgtgctgtgtcatgctgccatctttcaggcaggggagagagttccatagtggtgccgccctgtgctgtgtcg

SEQ ID NO: 605734 - DNA, 590 bp, Homo sapiens
aactagatagtgctcagcgtagatagcatgcttccttcttaattcccagaggatgtctggcactttcgtcatagtctggcgttgcagaggagatgtggggatgtctgctcagcatagacagtatacttcattcttaattcccagaggatgtctggcattttcgtcgtaggctggcattgcagaggagacggggtgggggtggtgtctcactcatttggccagttccccttgcagccacaaccacccagctaccataggtatggctcaatcctcattactggagctgcagcggtgctgcctcaggaccgggtggcttgtggtggacaccattccactcacctcaaatacagagatacagcacctcatgtcccctagtggtagaagccacccgtgatcagctctcccccttcctcctgaaactatytcccagctccaccagttccacagtggtgccaccctgcgctgtgtcatgctgccatctttcaggcaggggagacagttccacagtggtgctcccttgtgctgtgtcatgctgccatctttcaggcaggggagagagttccatagtggtgccgccctgtgctgtgtcg

SEQ ID NO: 605735 - DNA, 681 bp, Homo sapiens
agaattttatataaacctactttttgactaaaatttactttaaagaaatgatacaatcctttgggcaaactattgaacaaacaaaaattcccttttcactttccattgagttgatttagttgaaaacattcagttgaaaaaatcaatgtacgtattttagaatactttttttagaccaagctgaggatttagggtctgttctttactgtgggggagggaatgaagcctcaaaaatgatcttgtgcaatcggaaaagttgtcagaagcctgtgtgtccgtgagaatgagaagcaggtaaccgtaattggtgaggatgctcaaccagctaccattgcgctccggggagcatgtgaccagtgttactgcggcagaccagagcctgggtcacccccggtataccgactgtgagtcaaccactcccttaaaaaaatggaagcagtgcatcagagtcatgcaaaatatctgctacacctgcctgacgggtcactgctgggccatgctcaccctgcagtgagttcccttagaggcgggttatgrcgagggtcccatccctgcctcctactgctgctttaatgctgctggcctgcccactcaccatcacccagaatagcctaagatcccaccctgggcactaagctctgtttctctgtctttcacagatttccctcccatgtatcgtca

SEQ ID NO: 605736 - DNA, 590 bp, Homo sapiens
aactagatagtgctcagcgtagatagcatgcttccttcttaattcccagaggatgtctggcactttcgtcatagtctggcgttgcagaggagatgtggggatgtctgctcagcatagacagtatacttcattcttaattcccagaggatgtctggcattttcgtcgtaggctggcattgcagaggagacggggtgggggtggtgtctcactcatttggccagttccccttgcagccacaaccacccagctaccataggtatggctcaatcctcattactggagctgcagcggtgctgcctcaggaccgggtggcttgtggtggacaccattccactcacctcaaatacagagatacagcacctcatgtcccctagtggtagaagccacccgtgatcagctctcccccttcctcctgaaactatctcccagctccaccagttccacagtggtgccaccctgcgctgtgtcatgctgccatctttcaggcaggggagacagttccacagtggtgctsccttgtgctgtgtcatgctgccatctttcaggcaggggagagagttccatagtggtgccgccctgtgctgtgtcg

SEQ ID NO: 605737 - DNA, 578 bp, Homo sapiens
ggtggcaggctggacaggaggagcactgtcatttgtcaaaagcatgcagtttacacagatctggtgcaggtacattctcaggctttgcttaagtgatttccacaggtgcatctgctacacatatctccacttcatcataaaagcagaattgtgttcccctgtccttttcccagctttttcatatatgtaagtcgtgacataaaatgcaaactctggtcatttttatcctttttctgcacttttccacttatggctggcttgtcttcaagtctgtttcttcttctttcttatgttcagatatttccatttacttactctctcatcgaagtgccctagaaatggggccagtagtggcttctgcacatagcactgaggttatctttctaaattcttcctctgtactatcctccataacagcacattagcttccatttgggtcaaattaacctcaacttatgaactttaatatccaccatcattayatcctcttgtttcattaggcaccatctaaaccaagtactttcgaagtaataaacataaaaagttaaaaaacttggaacacagtttttactatgact

SEQ ID NO: 605738 - DNA, 614 bp, Homo sapiens
gtgtgcacttggcactgggctgatatttattcaagggccttaattgatgctaagaaacataattttaaaaaccactgttttctttatatttaatgattttagtagtagttatgataccagtaaaatattaatgtttattcagctctcctttgtgctggcatatccaggttttcatccactgtggctgactgaaaagcatggccatgctattttgtagctttcctatcagggcatgatctatttctccaccccttcactctgggctgaacttgtgatttgcggtgactaacagaatgcggtgaaagacccccaagaggccttgcctcttctgccttcactttcctgggacgttgctgccttcatgagaggaagtcaatgatcctctttgagattgaaagacgacctggaaaggaggagctcttgcggttcacccagctgagctcagcctaatccaacacagctgaacccatgcaagatcagcaaaagcacctcttggcccacccagagagctgtgagaaatgtaagtcagtccratttggggtaccttgtctggcagtattgaataactaatgaaccttcaattttaacaagcctgccctttggcacacacactc

SEQ ID NO: 605739 - DNA, 533 bp, Homo sapiens
agattgccagttagcacatctgcctctccaggtaattgaattcttattgaaaatacatcattggcgatgtattagaaatagcgggagaaagaatgaagttagtaggtggaaacactaaaaatagagacaaaagaacggcatgaggcataagaaaataatttagaaagttgtcacttgctgtaagttctattgcatttcaactgggagattagctcccaaaagactaatctattcccattttacttttgtgccacaggctgcagtttcaagacrtgtggtgagcttcctgggcctgctgacttcagtgtcacgtcccagagcttcgtctactgaaacacccggctaatggacccagccacgcttcctaacagtccacccaccaagcctcagctggcttggctctttacagaaattcataatcattccacgtgatagcccaccagcatctcaagtgccagcaaaagccatattattttgctaatatctaacaattcagaggcagatgtcacagcagatagtccatagtttttgag

SEQ ID NO: 605740 - DNA, 533 bp, Homo sapiens
agattgccagttagcacatctgcctctccaggtaattgaattcttattgaaaatacatcattggcgatgtattagaaatagcgggagaaagaatgaagttagtaggtggaaacactaaaaatagagacaaaagaacggcatgaggcataagaaaataatttagaaagttgtcacttgctgtaagttctattgcatttcaactgggagattagctcccaaaagactaatctattcccattttacttttgtgccacaggctgcagtttcaagacgtgtggtgagcttcctgggcctgctgacttcagtgtcacgtcccagagcttcgtctactgaaacacccggctaatggacccagccacgcttcctaacagtccacccaccaagcctcagctggcttggctctttacagaaattcataatcattccacgtgatagcccaccagcatctsaagtgccagcaaaagccatattattttgctaatatctaacaattcagaggcagatgtcacagcagatagtccatagtttttgag

SEQ ID NO: 605741 - DNA, 533 bp, Homo sapiens
agattgccagttagcacatctgcctctccaggtaattgaattcttattgaaaatacatcattggcgatgtattagaaatagcgggagaaagaatgaagttagtaggtggaaacactaaaaatagagacaaaagaacggcatgaggcataagaaaataatttagaaagttgtcacttgctgtaagttctattgcatttcaactgggagattagctcccaaaagactaatctattcccattttacttttgtgccacaggctgcagtttcaagacgtgtggtgagcttcctgggcctgctgacttcagtgtcacgtcccagagcttcgtctactgaaacacccggctaatggacccagccacgcttcctaacagtccacccaccaagcctcagctggcttggctctttacagaaattcataatcattccacgtgatagcccaccagcatctcargtgccagcaaaagccatattattttgctaatatctaacaattcagaggcagatgtcacagcagatagtccatagtttttgag

SEQ ID NO: 605742 - DNA, 533 bp, Homo sapiens
agattgccagttagcacatctgcctctccaggtaattgaattcttattgaaaatacatcattggcgatgtattagaaatagcgggagaaagaatgaagttagtaggtggaaacactaaaaatagagacaaaagaacggcatgaggcataagaaaataatttagaaagttgtcacttgctgtaagttctattgcatttcaactgggagattagctcccaaaagactaatctattcccattttacttttgtgccacaggctgcagtttcaagacgtgtggtgagcttcctgggcctgctgacttcagtgtcacgtcccagagcttcgtctactgaaacacccggctaatggacccagccacgcttcctaacagtccacccaccaagcctcagctggcttggctctttacagaaattcataatcattccacgtgatagcccaccagcatctcaagtgccagcaaaagccatattattttgctaatatctaacaattcagaggcagatgtcacagcaratagtccatagtttttgag

SEQ ID NO: 605743 - DNA, 605 bp, Homo sapiens
caatagaatctttcttagagcaatttttatcagtgtgtaaaataaataaaataaaatacataggattacaattaaaacctattacctgaaagtacagttctatccctgggcttagctgtggtccatggccccaggtgagctactcctaacgagggcctaagggcaaattacaagygtcaacttccaggctgaggaagaaaatggtggagacaacacaggaatgaggggcagcttagaatcaggagcccactgtggttactcacccaacccataggaagaggagccttcccctaggaagactgcagctggtggctaagagtggggttagtgggtggctaagagtggggttagcgggtggctaacactggtgttagagttgagcaaaataaaggctcagagaactaaaaacagctacaggcacaagctgtggtctttgctagactgagacttcccgcctcctccctccctggaagacattgatttttcccttgacaggaagtcatttatatatcagagaatggctccccttagcaatcagggctaaccacacgcgtgacttaattccgtcatcctcttccttcattccagaaactccatatttctga

SEQ ID NO: 605744 - DNA, 534 bp, Homo sapiens
agagtgctgattggtgcatttacaaaccttgagctagacacagagcgctgattggtgtgtttacaaaccttgagctagatacagagtgctgattggtgcatttacaatccctcagctagacataaaagttttccaagtccccactacactcaggagcccagctggtttcacccagtggatcccgcactggggccgcaggtggagctgcccgccagtcccgcaccatgcccccgcattcctcagcccttgggtggttgatgagactgggcgctgtggagcagggggcagcgcttgtcagggaggctcgggctgcacaggagcccayggcaggggggaggctcaggcatggcgggctgctggtcccgagccttgccccatggggaggcagctgaggcccaacgagaattcgagtgcaatgctggtgggccagcactgctgggggactggacgcaccctccacagctgctggtctgggtgctaagcccctcactgcctggggctggtggtgccagctggccactccgagtgtggggc

SEQ ID NO: 605745 - DNA, 637 bp, Homo sapiens
tacccaccacagggaacatattcaatgtgctaccttctccctcacttgtggatgcccgtggacaatactacccaccacagagagtatattcaatatgctaccttctccctcacttgaggatgcctgtggacaatactacccaccacagagagtatattcaatatgctgccttctccctcacttgtggatgcccatggacaatatactacccaccacagggaacatattcaatgtgctaccttctccctcacttgtggatgcccgtggacaatactacccaccacagagagtatmttcaatatgctgctttctctctcacttgtggatgcccatggacaatactaccaaccacagagagtatattcaatatgctaccttctccctcacttgtggatgcctgtggacaatatactacccaccacagagagtatattcagcatgctgctttctcccacacttgtggatacctgtggacaatactacccaccacagagagtatatctaatatgctaccttctccctcccttgcagatgcctgtggacaatatactacccatcacagagagtatattcaatatgctgccttctacctcacttgcagatgcctgtggacaatatactacccaccacagagagt

SEQ ID NO: 605746 - DNA, 637 bp, Homo sapiens
tacccaccacagggaacatattcaatgtgctaccttctccctcacttgtggatgcccgtggacaatactacccaccacagagagtatattcaatatgctaccttctccctcacttgaggatgcctgtggacaatactacccaccacagagagtatattcaatatgctgccttctccctcacttgtggatgcccatggacaatatactacccaccacagggaacatattcaatgtgctaccttctccctcacttgtggatgcccgtggacaatactacccaccacagagagtatattcaatatgctgctttctctctcacttgtggatgcccatggacaatactaccaaccacagagagtatattcaatatgctaccttctccctcacttgtggatgcctgtggacaatatactacccaccacagagagtatattcagyatgctgctttctcccacacttgtggatacctgtggacaatactacccaccacagagagtatatctaatatgctaccttctccctcccttgcagatgcctgtggacaatatactacccatcacagagagtatattcaatatgctgccttctacctcacttgcagatgcctgtggacaatatactacccaccacagagagt

SEQ ID NO: 605747 - DNA, 463 bp, Homo sapiens
tgatgatttttaacattttggaatatcactttatgcctccacctgaaagttgttataataccagaattccagggctgtgttcactgcagtgttttataaaagcaatatttttcttagttattttaagggggtgtaaaatgaaaaaaaattatggcagggatagttttttagtctccttccaaatcaacaatccatattttttcctaactctcactkgttggatattctttcactgcaggattatcagctagtaaatacctcataggaggggaaaaaaatctccttcagacttaattcacattatttgagttcttaccttgcatctctaaatttccaccctttttctcatctctttagtaaggaaatgagatagcatcttttgaaaagggaacacccgaagtcatttctcagtccttgagatgtttctgaaacagatcaatgcccatcaacattgctgctctag

SEQ ID NO: 605748 - DNA, 622 bp, Homo sapiens
tagacagaaatggcatttacaaagtatctagtgaaactactggtagggattatatgctcagtaaatgatgagcactataatcacaaataatttgatctttgaaagtgtaaaatgtatttgtctgtccgcttggtttttctcggaggcatagtttccctctgtcactcaggctggagtgcagtgctgtgctcactgcagcctctgcctctcaggttcaagtgattctcctgcctcagctgggattacaggagsccgccaccatggcccaactaatttttgagtttttactagagatggggtttcaccatgttacccaggatggccttgaaccttggcctcaagtgatccatccaccttggcctccgaaagtgctgggattacaggcatgagccactgtgcccggccacatttattttaattcagagaacaatttttcagtaaggttgtacaaatgattgtcctacattcctgcatgtttgaaactcttattctctttttgcctccatatgagaatgacagtttggctaggtatagaatgcttggattacactttttattgctcataaatcgatagttttatctttgttcccatcctctataccagcttgagtaggattagagt

SEQ ID NO: 605749 - DNA, 542 bp, Homo sapiens
aagtcattagaagccattatattttaaactatcatgaacaacarctaaaaaatattcagtagactgagtctccacttagttaatgaagcacgtgtttctacatgttccatgaatataacaatgcctacattcagtgctgcaaagaaatcaaaaacactaaaacattgaccctcagagtctctcaagtggtaacgccaataatcttcactagcagatatagaaaataccacatagaggtaaaatgaataaacacctggccatttagtccaatgcatttgcctgtagctgtggcctccacttgtttcttgttacaaacaaactctagtccctctaaatcacacagtctttagaacagagaaactaccagagttaaaatggctgtgggtcttgttttcatgaatgcatttctctaatgtggtcataattgttgccttcaagaccttctctacaggcttgtggattatttttaacaacaccctttctggatttttatttttactataaatttttaaagtttttgactttattattacacagaatag

SEQ ID NO: 605750 - DNA, 542 bp, Homo sapiens
aagtcattagaagccattatattttaaactatcatgaacaacaactaaaaaawattcagtagactgagtctccacttagttaatgaagcacgtgtttctacatgttccatgaatataacaatgcctacattcagtgctgcaaagaaatcaaaaacactaaaacattgaccctcagagtctctcaagtggtaacgccaataatcttcactagcagatatagaaaataccacatagaggtaaaatgaataaacacctggccatttagtccaatgcatttgcctgtagctgtggcctccacttgtttcttgttacaaacaaactctagtccctctaaatcacacagtctttagaacagagaaactaccagagttaaaatggctgtgggtcttgttttcatgaatgcatttctctaatgtggtcataattgttgccttcaagaccttctctacaggcttgtggattatttttaacaacaccctttctggatttttatttttactataaatttttaaagtttttgactttattattacacagaatag

SEQ ID NO: 605751 - DNA, 542 bp, Homo sapiens
aagtcattagaagccattatattttaaactatcatgaacaacaactaaaaaatattcagtagactgagtctccacttagttaatgaagcacgtgtttctacatgttccatgaatataacaatgcctacattcagtgctgcaaagaaatcaaaaacactaaaacattgaccctcagagtytctcaagtggtaacgccaataatcttcactagcagatatagaaaataccacatagaggtaaaatgaataaacacctggccatttagtccaatgcatttgcctgtagctgtggcctccacttgtttcttgttacaaacaaactctagtccctctaaatcacacagtctttagaacagagaaactaccagagttaaaatggctgtgggtcttgttttcatgaatgcatttctctaatgtggtcataattgttgccttcaagaccttctctacaggcttgtggattatttttaacaacaccctttctggatttttatttttactataaatttttaaagtttttgactttattattacacagaatag

SEQ ID NO: 605752 - DNA, 598 bp, Homo sapiens
cattagaagccattatattttaaactatcatgaacaacaactaaaaaatattcagtagactgagtctccacttagttaatgaagcacgtgtttctacatgttccatgaatataacaatgcctacattcagtgctgcaaagaaatcaaaaacactaaaacattgaccctcagagtctctcaagtggtaaygccaataatcttcactagcagatatagaaaataccacatagaggtaaaatgaataaacacctggccatttagtccaatgcatttgcctgtagctgtggcctccacttgtttcttgttacaaacaaactctagtccctctaaatcacacagtctttagaacagagaaactaccagagttaaaatggctgtgggtcttgttttcatgaatgcatttctctaatgtggtcataattgttgccttcaagaccttctctacaggcttgtggattatttttaacaacaccctttctggatttttatttttactataaatttttaaagtttttgactttattattacacagaatagcctggacattaggattttttaaagaagcttcctgggtgattccatgtgtgacatttgtaa

SEQ ID NO: 605753 - DNA, 648 bp, Homo sapiens
tgaatataacaatgcctacattcagtgctgcaaagaaatcaaaaacactaaaacattgaccctcagagtctctcaagtggtaacgccaataatcttcactagcagatatagaaaataccacatagaggtaaaatgaataaacacctggccatttagtccaatgcatttgcctgtagctgtggcctccacttgtttcttgttacaaacaaactctagtccctctaaatcacacagtctttagaacagagaaactwccagagttaaaatggctgtgggtcttgttttcatgaatgcatttctctaatgtggtcataattgttgccttcaagaccttctctacaggcttgtggattatttttaacaacaccctttctggatttttatttttactataaatttttaaagtttttgactttattattacacagaatagcctggacattaggattttttaaagaagcttcctgggtgattccatgtgtgacatttgtaaacaattagtctacactacattttctgttaaaaaataaatgaaagtacagaaaagtctaaatttgttaggtaattggcttaattatttaatgcacaaagtaagttttaggcttcacataagttaatcaacagaaatgtagtttccacgagatgtca

SEQ ID NO: 605754 - DNA, 542 bp, Homo sapiens
aagtcattagaagccattatattttaaactatcatgaacaacaactaaaaaatattcagtagactgagtctccacttagttaatgaagcacgtgtttctacatgttccatgaatataacaatgcctacattcagtgctgcaaagaaatcaaaaacactaaaacattgaccctcagagtctctcaagtggtaacgccaataatcttcactagcagatatagaaaataccacatagaggtaaaatgaataaacacctggccatttagtccaatgcatttgcctgtagctgtggcctccacttgtttcttgttacaaacaaactctagtccctctaaatcacacagtctttagaacagagaaactaccagwgttaaaatggctgtgggtcttgttttcatgaatgcatttctctaatgtggtcataattgttgccttcaagaccttctctacaggcttgtggattatttttaacaacaccctttctggatttttatttttactataaatttttaaagtttttgactttattattacacagaatag

SEQ ID NO: 605755 - DNA, 602 bp, Homo sapiens
tgtttcttgttacaaacaaactctagtccctctaaatcacacagtctttagaacagagaaactaccagagttaaaatggctgtgggtcttgttttcatgartgcatttctctaatgtggtcataattgttgccttcaagaccttctctacaggcttgtggattatttttaacaacaccctttctggatttttatttttactataaatttttaaagtttttgactttattattacacagaatagcctggacattaggattttttaaagaagcttcctgggtgattccatgtgtgacatttgtaaacaattagtctacactacattttctgttaaaaaataaatgaaagtacagaaaagtctaaatttgttaggtaattggcttaattatttaatgcacaaagtaagttttaggcttcacataagttaatcaacagaaatgtagtttccacgagatgtcattataatctctctatagttaatatgctaacattgtgaggtaagatcaatgccctttgaaactagaatgtaaacacactctttctagagttaaccagtgttatttttataccttgcatcaacctttccatacctccacccgccaa

SEQ ID NO: 605756 - DNA, 560 bp, Homo sapiens
tagtttccacgagatgtcattataatctctctatagttaatatgctaacattgtgaggtaagatcaatgccctttgaaactagaatgtaaacacactctttctagagttaaccagtgttatttttataccttgcrtcaacctttccatacctccacccgccaacaaccctcccctaaacatgactccttcctgcttcattccaggtggatggccctttaagctttcactaggtgcaagtatcttgactgtgtaattcacagactggcaaagcagctggtttcaggagtgataacaccagtcactacaaggttacaatatctcttctaaagggcaggggcttcccagaaaatttcattcatgctctcagttctgcctgtggggtaaagcgaactaattttactcagtcttctgtgtaaaagctgctacccttccaatgtttgtccctccaaaactcatgttgaaatttcactgtcattgtgatgatattgggaggtgggacctttaagaggtgcttagatcatgagggctctgccttcgtgaatgagctagtgctgttatg

SEQ ID NO: 605757 - DNA, 560 bp, Homo sapiens
tagtttccacgagatgtcattataatctctctatagttaatatgctaacattgtgaggtaagatcaatgccctttgaaactagaatgtaaacacactctttctagagttaaccagtgttatttttataccttgcatcaacctttccatacctccacccgccaacaaccctcccctaaacatgactcmttcctgcttcattccaggtggatggccctttaagctttcactaggtgcaagtatcttgactgtgtaattcacagactggcaaagcagctggtttcaggagtgataacaccagtcactacaaggttacaatatctcttctaaagggcaggggcttcccagaaaatttcattcatgctctcagttctgcctgtggggtaaagcgaactaattttactcagtcttctgtgtaaaagctgctacccttccaatgtttgtccctccaaaactcatgttgaaatttcactgtcattgtgatgatattgggaggtgggacctttaagaggtgcttagatcatgagggctctgccttcgtgaatgagctagtgctgttatg

SEQ ID NO: 605758 - DNA, 560 bp, Homo sapiens
tagtttccacgagatgtcattataatctctctatagttaatatgctaacattgtgaggtaagatcaatgccctttgaaactagaatgtaaacacactctttctagagttaaccagtgttatttttataccttgcatcaacctttccatacctccacccgccaacaaccctcccctaaacatgactccttcctgcttcattccaggtggatggccctttaagctttcactaggtgcaagtatcttgactgtgtaattcacagactggcaaagcagctggtttcaggagtgataacaccagtcactacaaggttacaatatctcttctaaagggcaggggcttcccagaaaatttcattcatgctctcagttctgcctgtggggtaaagygaactaattttactcagtcttctgtgtaaaagctgctacccttccaatgtttgtccctccaaaactcatgttgaaatttcactgtcattgtgatgatattgggaggtgggacctttaagaggtgcttagatcatgagggctctgccttcgtgaatgagctagtgctgttatg

SEQ ID NO: 605759 - DNA, 591 bp, Homo sapiens
taataatttcagtcatgttgccgtgacattgtaatgagaatctttcatatcctgcagtgcctttgtcaactggacctgttctaaggacaaatactggcatctctgtaacaaaactttcatatgcttgctgtgccccttctgaggtccccccaccccaacattagtaaaggaaaatgctaacagggcttagatggcagacaggctcctaaggactcacgcctcacactccaatcgcctttgtggacacgctaccaatttacactgagataaacaacattgtacaaagtaccaaaggcaaactgtatgcgctatttattaatacagagaaagaagcagatatgccaaagtgatrtactaagaaatagagtgatattttaataggaaatttaaaaatagtattgtgaaactgacttactgttgaaggtctaacagcacctttttctctttgcttttttatttgtccttgagaagtttcctattggttaaaaatttgtataaagccaaagacagttgcacaattgaaatcctccctacactacattcaagcctcatctcaacaaaaacactgaaagtgaaaagaggctgtcagaa

SEQ ID NO: 605760 - DNA, 559 bp, Homo sapiens
tatatacaggtattgagcattagaaatgtggctagtccgtaacataaaaatagacacatagccaggtgtggtgcctcacgcctgtaatcccagcactttgggaggccgaggcgggcggatcacctgaggtcaggagttcgagaccagcctgaccaacatggagaaaccccatctctactaaaaatacaaaattagcygggcgtggtgatgcatgcctgtaatcctagctactcgggaggcagaggcaggaaaatcacttgaacccgggaggcggaggttgtggtgagctgagatcgtgccactgcactccagcctgggcaacaacagcgaaactccgtctcaaaaaaaaaaaaaaaaaattagacacatagaccaatggaacagaatagagaactcggacataaatccatacatttacagccaactctgctttgagaaaggcactaggaacatacaatggggacagatagcctcttcaatgaatggttctgggaaaactggatatacacatgcagaagaataaaactagactgttagctatcattatatacacaaaatg

SEQ ID NO: 605761 - DNA, 597 bp, Homo sapiens
taccatcctgaacttcccaggaccccggttctaatcctacctttccaaatgcccagaagcctctcccaaggagatattcttgtggacatctaattcaatattctaaatcrgaatttataaatttttctttccattctacttatcctcatgcatacctgattatgattaaagaaattggtatctctacaggcccctgatgtgaaacattttatctttagcttttaccttttactgctcccttcatccaattaatctattgacaatccttgtaatagcaactactatggcttgaatgtgtcccccaaggttcatgtgtcagtcagaaactctacctcaaatgtggaagtgttgagaggtgaggcttcatggaaggtgcttgggccatggggacatttctctcatgggtggatgaatgccattatcatggtagtgtgtttgttatcataggagtggcttccttataaaaggacaagttcagccatctttgcccaccccctcccccactctctctctcatcctctctttgctcttccaccttctgccatgggatggcaaagcaagaagactctcaccagatgctaatgtcttgatcttgcc

SEQ ID NO: 605762 - DNA, 597 bp, Homo sapiens
taccatcctgaacttcccaggaccccggttctaatcctacctttccaaatgcccagaagcctctcccaaggagatattcttgtggacatctaattcaatattctaaatcagaatttataaatttttctttccattctacttatcctcatgcatacctgattatgattaaagaaattggtatctctacaggcccctgatgtgaaacattttatctttagcttttaccttttactgctcccttcatccaattaatctattgacaatccttgtaatagcaactactatggcttgaatgtgtcccccaaggttcatgtgtcagtcagaaactctacctcaaatgtggaagtgttgagaggtgaggcttcatggaaggtgyttgggccatggggacatttctctcatgggtggatgaatgccattatcatggtagtgtgtttgttatcataggagtggcttccttataaaaggacaagttcagccatctttgcccaccccctcccccactctctctctcatcctctctttgctcttccaccttctgccatgggatggcaaagcaagaagactctcaccagatgctaatgtcttgatcttgcc

SEQ ID NO: 605763 - DNA, 602 bp, Homo sapiens
caatattagagtagagggatagggaaattaaaaaaggtattaattgctcataaaaattctgtgaaatggtgagagtagacattattatcccatttaattaagaggaaattgacacacattatttaagattagtcyaatctcatacatagactaatgatagaaccagaagtaagatcctggtcacctgatcacagatatcccaaataatccacttcaagcagggtagggacaagggaaaaggatgttcatgagacatgagctgtacagcttttttgtttgtttgtttgtttgttcaatttaaattttttattatactttaagtttggggtacatgtgcaaaacgtgcaggtttagcataggtatacatgtgccatggtggtttgctgcacccatcaacccatcatctacattaggtatttctcctaatgctatccctcccctcaactccccgacaggctccactgtgtgatgttcccctctctgtgtccatgtgttctcattgttcaactcccatttatgagtaagaacatgtggtgtttggttttctgttcctgtgttagtttggtaagaatgatgatttccagctacatccatgtccctgc

SEQ ID NO: 605764 - DNA, 586 bp, Homo sapiens
attattcagtcataacaaaaatcctgtcatttgcagtaacatagatggaactggaggtcattagtttaagtgaaataagccaagcacggaaagaaaaatattgcatgttctcactcatgtgggagctaaaaaagtggatcttatgaagacagaatagactggagattaccagaggctacaaaggatagaagggaggtggaggtgaaaagaagttgattaatgggtacaaatatagagtcagatagaagaaataaataaaacctactattctagaktagtaggtggctatagtttacaataatctattctatatttcaaaatagctagaagagaacaatttggatatttctagcatagagacaagacaaataattaaggtcatggatattccaattattctacttgttctttacaaattatatgaatgtattaaattatcacatatatgtgtgtaacatggaactgtgtatatctattgcgcatagataaaacatcgtttaataaaaaaatgtggcaagtctgaattaagatgtgctgttaagtgtaaaatacaccccagatttttaatacctattataaaaaagaa

SEQ ID NO: 605765 - DNA, 586 bp, Homo sapiens
attattcagtcataacaaaaatcctgtcatttgcagtaacatagatggaactggaggtcattagtttaagtgaaataagccaagcacggaaagaaaaatattgcatgttctcactcatgtgggagctaaaaaagtggatcttatgaagacagaatagactggagattaccagaggctacaaaggatagaagggaggtggaggtgaaaagaagttgattaatgggtacaaatatagagtcagatagaagaaataaataaaacctactattctagagtagtaggtggctatagtttacaataatctattctatatttcaaaatagctagaagagaacaatttggatatttctagcatagagacaagacamataattaaggtcatggatattccaattattctacttgttctttacaaattatatgaatgtattaaattatcacatatatgtgtgtaacatggaactgtgtatatctattgcgcatagataaaacatcgtttaataaaaaaatgtggcaagtctgaattaagatgtgctgttaagtgtaaaatacaccccagatttttaatacctattataaaaaagaa

SEQ ID NO: 605766 - DNA, 534 bp, Homo sapiens
ggagaaggagatgaggagggtgtggataatgacagtctggccatggtgggcagccaatagttgcggggcacacatgggaggaactctcagttctctggggtatgaargccagataaggaagggctggagctggagctgggggcagttgtgggggtgggtgtcaggggaaacctattttccatctgagaggcaacacagtgttttcctctgccgcactgttgtagtactcagactagagcttcatgcttaaatactgcctccaactagtccctagttatttcacaaacctgtcttctgtcctcatgcaaatgtgagtactagaaattaatatttctccttctctattttccttaagacattattgtatattagaaagacttgagtttctgaattagattcattgggtttgagtcttgaatccaactcttactagttatatgcgcttaggcaactcttctccattgtctgaaatttagattccttacatataaaatggaggtagtaatatagacctcataaaaatgtaaagattaa

SEQ ID NO: 605767 - DNA, 608 bp, Homo sapiens
agtaacttcatgaataaatcctaagtgctttaagaaataaaaatgactcttaagaacatgttttctttcaagtatagagaaaacactggtgatgttggcttttcttttttagcatcctttttcattttgaatttgaaagccacagaaaagccagttgtttaaggaaatcccaataagagatraagtatatgagatagtaataataacatagagccactcttttatctgtgtaaatggaagtctaggcctttaaaactattattgaccaaaacatagtttaacaacatttttagacaaaacacattgctgcatgctaccattttaaaaagaagataaaaacattctccaaacatgaaaaatgtttttaaaaaagagtgtgtaacagggaggatttggggccctgctaattcagcatttgaaaagaatggtctgagttgttgcttctctattcttgcaacttctgcacaaaggtgctgatgagtagtgaagagataaaaggtacatagcagaaagaaaaggcttaaaaagtaaaactgatagttcgtgatgtgagacccacaagctaaacagacagtccttgaataatggaaagatgatttttgtgtgtg

SEQ ID NO: 605768 - DNA, 600 bp, Homo sapiens
ccatatggcacagcccttatgaatgggatcggtgcctttgtaaaagacacaccagaaagctaccttgtcccttccactatgtgggaatacagggrcaaggtgccatctatgaaccagaaagcaggcactgaatttgctgtaccttgatcttggacttcccagcctccagaattgtgagaatggactaagatgagggaaacaattccatttgtaacaggctacaatgacacagttgagtagttgaagcagaaactgtaaggttctcaaagcctaaaacatttactatctggctctccaccaaagaaatttgccaatgatgtccaaaagtgagagaagacttgcccccagggcaaaggaactaaaagatttggtgacagagtgtttgtgacaagaaaacaaatttccccagtgcatttccacccaagttttaggctcatgttattccttagcaagcaggatgtcaaatgactgtggcaaggaggatagatatggaagaagaaaatccaacatacagaaaattggctttcctgaagaagcaatcaacaatcagaacacaaaggtaattcagtcagtaatggaacttttgtgaaataaacaacc

SEQ ID NO: 605769 - DNA, 620 bp, Homo sapiens
tgttttgtcacttttgcaaatgttatttctcctgctccttacagaaagtctaaaggtagctatttaacaggagaatacagagttggaactattgagtgacttgagccaggagctgagggctgtccagctcaaactctagggcccttttcttccttcccagagaccacactcyaggattccaggggactgttctgacatcaaggcattgcagggtctctaggagtagtatgtggagggattagctaactagcataagaaaatggtttggaaatttgataggattagctatgtagtatgtattatgtggagggattagctagctagctaactagcatggaaaatggcatttgaaattcttctgaagatgactcctatgttttcagtcctcctctcaggtgtactcagatgattttttcagaacctgcaatttttcaaaatatacttagattatataccttatgtatatttctctaaatcatatttctacccacagatattttttaaatgaataaaaaaagattggccaggtatggtatcttgcactggtactcccagctacactggatactgaggaggggaggactgcttgaggccaggaatctgagaccagcttgggcaac

SEQ ID NO: 605770 - DNA, 632 bp, Homo sapiens
agatgtgttttgtcacttttgcaaatgttatttctcctgctccttacagaaagtctaaaggtagctatttaacaggagaatacagagttggaactattgagtgacttgagccaggagctgagggctgtccagctcaaactctagggcccttttcttccttcccagagaccacactccaggattccaggggactgttctgacatcaaggcattgcagggtctctaggagtagtatgtggagggattagctaactagcataagaaaatggtttggaaatttgataggattagctatgtagtatgtattatgtggagggattagctagctagctaactagcatggaaaatggcatttgaaattcttctgaagatgamtcctatgttttcagtcctcctctcaggtgtactcagatgattttttcagaacctgcaatttttcaaaatatacttagattatataccttatgtatatttctctaaatcatatttctacccacagatattttttaaatgaataaaaaaagattggccaggtatggtatcttgcactggtactcccagctacactggatactgaggaggggaggactgcttgaggccaggaatctgagaccagcttgggcaacacaggga

SEQ ID NO: 605771 - DNA, 543 bp, Homo sapiens
tgcttctcatgtgcatcaacagtacacagctggtgcctctgcattcactgcacagttataaggttaaactgtgtatctgaacacctctgtacgctggacggcgacagtcggggctggagaagggagccctgccagggaaggtaaggcgggtagcaagacttgagatttccctccttgacccttaggtagtagcagccaagagtgaacacaagattatctagaagataaaatgccacgatttcatcaaagggctttgtggatgaatagtgggagagttaaatactaaatacaattcttcaggttttaataccttgaagaataaatcatgctcactgtaacmctcacccatgaactataaattcattgcaggtcaggtgttggaccagtaaaacattttgctcggattgtcttctctctactcagcatggctttcttggtacaattataaaacatagtagttttcacttgagccattaattgctgctgctcacaaatccctttctgttcttttcctaatttcttttcaaggcttttcttttattt

SEQ ID NO: 605772 - DNA, 551 bp, Homo sapiens
aggctggagtgcaatggtgcaagctcggctcactgcaatccctgcctcccaggttcaagtgattctcctgcctcagcctcccaagtagctgggattacaggcatgcgccaccatgccyggctgattttgtatttttttttttttttttttagtagagaacaggtttcgccatgttggtcaggctagtctcgaactcctgaccttaggtggtccacctgcctcaggctcccaaagtgctgggattacaggtgtgtgccaccacacctggtctgttcttcattcttctactaccatacttgtcctaagttccttgagtgttagttaaaattagggtctttttcatcttttttctcagtgcagagcatagcagagtgtctgacacatgatgttcactcaataaatgtttttcatggatgaatgaatgtagctaatttctcccatttgcataaaaaaaccaagggccagaggttatttgctccttcctcttaattatgtgatggtctttacgtaattagcaactaagtattttttgtataattgagacattaact

SEQ ID NO: 605773 - DNA, 604 bp, Homo sapiens
tttccaaccatgaggccaatgtttataggttctcagccatcaggctttatctcctcattttgggtaacaaagaagtacttgtcatttctctcaccatccacaggacccacccagagtgcctgacctcttgccccttccctgttggagaagggtcttctcctacaaaaggaaaccacttgtgagggatggttaaaacaaactgtctgcactagaactagaccctttcaacacaataatttcatctttctcttttaagcgctcctcacacagtatggcataatgaaatcacaaactgccctgcgttcatctttttctggaaccatacagaacatttctgtcctctggcagacaatctctgcagtctctgctcaatgtcaggctgtgcaggaggtggcctctcccagcctcaacccaagcatcagcacaacaactagtcatcagccaaaggaagaatgtggttcacttcattataatgtctagaaatttgacatttcttcctaatcatggctttccartttcaactcatcaaaatttccatgcaaacttttaggctttaaagcagtttttaaaagaagctgtttaatttgttaatcctaccattaca

SEQ ID NO: 605774 - DNA, 427 bp, Homo sapiens
attttactttccatttgcattgtttgtatgttttaggcattagcaagaggatgggccctttaaaaasgttttggagtgcctttcctctggcttttttgggtgttcactctctggaggtcctaatttccgcagcctcattctcctgttcctccagtgaaggtgttggactttctatcagaattttagctgcccctgaccagctgccaccacaagagcagccacccacagtcaaaagctacaaaaacaggaactcactttgtgtcggtcacttgttccaaggtttaccaaccctcaaacatctgcctgctcttgtccactgtccagaacccacagaaagttcagtttcgtataccgtacacagttatcagttatgtagtttggggagaatcagtttgttatgtgctcattctttcctaccaaaagtaga

SEQ ID NO: 605775 - DNA, 501 bp, Homo sapiens
gggaaaaactgaaagtcttttctctaagatctggaccaaaacaaggaagttcactttcatcactcctatgcaatatagtactggaagtcctagcccraacaatcatgcaagagaaagaaataaagttcatatgaatttctcaataataataaattagtagcatttatgtacaaaaataatgaaattgctaaaaaaaatgaagaaagtaatcccatttactaaagctataataaataaatacatacatacataggaatgtatttatccaaggaaaggaaatgtctctatgatgaaaagaacaaaacactgatgaaataatttaaacaggccacacatgcacatacacacacacacacacacacacacacacacaaaagaaatacatccaatgattatgggctggaataatcaatattgctaaaatgatcatactacctaaagcaatctatagatccaatgtaatacccatgagattaatgatgacactcttcatataaatga

SEQ ID NO: 605776 - DNA, 486 bp, Homo sapiens
tcttggaataaaattggataaaggtcagaggtagtgtattttgttgtggagccatcagtatacatgataaacaacacatattgaatgacttggattatctcaatattgaataagaatgtaacaaagctgctaacagaatattgagatactcttttaagacagacatagaaagtttccagtaactgagactatgaaaaacactcagagagataagaatgattttatgtattattgtaacacccagaaaactagagatatgtaaacttgagacacctagtttggttacacaaagcctggaataaacytagatccaatcatgttcccaccccaatacatctcttgaggttgctacaaagaaaatataatcagtaattacactgagactcctattttcttttttttaataagcaatttcttttatttttttattttcttattattctactttaagttttagggtacatgtgcacaatgtgcaggttagtt

SEQ ID NO: 605777 - DNA, 524 bp, Homo sapiens
ggccaaaaaacgtctcatgaccctacgtgtgagggggtaagacatgcattttttcattctgcctagaagtagagaaaaaccagatcttggtgagcgctggaagtccctactataatagtgatatcatgcactatttcaaacaaatcagaacatgtaatagtttgggatttttataccaaattaaaatggccatgtgaagatactttgctacctaagatggtgagcatctccttcatgtgaagatttcaagcctaggcaggatgtctatcatttatacratatttcttccaattatttaataattgcaaattaactccaaacaaataagaataaaagagcagtccacatatttacataataattgtatttagaaattacttcattgagaggaaattttactttccaaccaggattctataattgattttccatttgcagccctgttatgtcagattaaaaaaaaatactgcaagttcaatgtttttctgaacaactatctcatttattttaacttctttaaccca

SEQ ID NO: 605778 - DNA, 372 bp, Homo sapiens
attcatacagaatatatgcattcctacagaaaatatacagcatttaacattaaaagacagaatattatctttatcaaaaaactacattatgctctctttccattgctaacctsccaataataatcaccattgtggctttttacactttaaagcttcagagataaattcactggcataatgtcccagcccgttagttattaaattttagaacttatacaatattattctgttgttaccttccattagtttttttgtttgtttgtttttctatggacacattatctaaagttttattgttgcttccatcaggacagtacatcccttttttactagttattcttataatcccttaacataaactttggaaaatac

SEQ ID NO: 605779 - DNA, 534 bp, Homo sapiens
aaacatggagaattgtagacgtatcagatattaagcaccttaccatgtgccagtatggtatcaaatgtagtaccaagcactgcactgtgcaattctccccaagctcaaataaagacatggatctcagggaggttatgtgttaatccaaagccagattctatttttagagcaaagatttgaagctgactttattttactatcaaactcatgcacgttaacccataacatcattaactctagctttaaaattcctctttgaaaaaaaaattcctatttgatccccaaggaaatctagttcaatcaaaagtaaatctatcttcaaccttyctagaagacttttgtctagcacatcagagacttttgggagaattggactgaatatacttcagaggtcactctgaaggcaaaattgtttgaatatgacttgtaaggcaccattaagtaatctaattaaggcttagatattttaagaataaaagcaggtaactattttctcacaataattacccactcccttctaattgctattgagag

SEQ ID NO: 605780 - DNA, 594 bp, Homo sapiens
gaactaatattatccattactataagtagagggaagtactttaagaataattgaatctgttaagaaaaagcctatataatttagaaaacaaataataatcgcttaagaacaatgttcttgaaaatgcttcttttctctatttcatttttttcattgatttgaatcagcagcttatgagtcatatagatatttttaattaatagaaaaattataaattatgtagttttatctagatgttagatatgggtaaatacagttatttctaaggttgaataaattattgtttgcatattgccaattggcctttatttggtgtaaatattgctataaatgattcaaatcgtctcscttattaattgggtgcaatgtgatgcaatctaagaaaagacgaaatattatgaaaagtctgtttggcatatctgagaagtatgtataatctagtggctaatgtgtgggctctggatttaggtttcttggcttcatctctgcacagcttcatttctgtgcaggcttaggcaacatatttaacctctttccctctaaaatgtttcatctggaactaaccatctttcagcgttgttgtgaagattaaat

SEQ ID NO: 605781 - DNA, 643 bp, Homo sapiens
ttcatcttttccttggctttgaatgagattttctgacaaactaatctgttcataacacgcagtgtgagtatacatgcttctcatgcctaagaggtaaaccacagtcatcttaagttggtgtattagagcttcctgtttctccacgtctactttgccagacttattgcactaaaactccatcttctagttgccattccaggcattctgagattaaatttcccaggaagatgagagggttttatgtatttcaaaattttatgaagktattccatttttctgaaatcccctatctccatttttacctggagaacatctactcatattttatagctgagccccattatcaccttctctatgaaaaaaaaaaattaaactcttctctaggttaaatttaaccatttcctcttttatgtcttccctctgtccttttcatatctttaccacacacctccaatgaatctcttatagtgaagctcatatgtcattcctctttgttcattcaacccccagtgcctagaatagcacctggaatacagtggttaattaatattcttcgcttgcacaaatgtctgaataacttaacaaatgaataactgtattaatagtgaatacaaccatgacatgaattttataagaacatggg

SEQ ID NO: 605782 - DNA, 429 bp, Homo sapiens
atgtccactttactccagagactttcagcatctttggtccccagtcctggtttcaccccctcatatgtgtgccctctttcatcttcctcttccgaggcagccagtgtctaaaagacaagacttctctcttctccagttttgggtctattcctaacctagtctcaactggctctttcttcactttttttttttttttaataattcaccaacataattaagtctatgttgtaaaaccagattcaaatattactttrtcttttctttgtattgtagaaaatagaattaaatcttacagaaacagttgtataaaaactaacttgtgagctactatctcttgctaaagaaagctgtagctaattcgtgcagttcttattcatgatttttgcacaaatcataactattttcattgctatgcctattgaaaaatgc

SEQ ID NO: 605783 - DNA, 571 bp, Homo sapiens
ctgaactatacaatcagaactcccaggatgggacccaraaatatttactttaatgaatacttcaagtagcccttacgcacctaaaattggagaagcgctaccatatagatatttgcaaaacattgagtattttcaacaaacagtcacaggattaagttctgcttgcctaagactgctttgaaaacagcgtagaacatgggctaaaggactacaagacagaaagcggacagactggataaacagctaccacaattaacaggtgaaaagatgcagctctgagagaggaaagtgtgcaggccgggctgtagaaacagggcagatctggaagggcggagtcagcagggcatactggccagatgtgagagaggaagctcagttaagaggtttctggttagcatggccattaacctagaccaggggtcaacaaactatggccagagggccaaatccagcctgctggtctgtttttgtaaataaaatcctattggaatgcagtcagacccatttgcttatgtatcgattaagcttgccttccaccgtaacagcatagttgaatagttaacagaaacat

SEQ ID NO: 605784 - DNA, 608 bp, Homo sapiens
ggaaaataatgacttaaggtatcatagagcattcacagagaaaattaggaggcawctctgggttaaagacacaaacttgtttattatggtttcaagatgctaattaaagaagggggtgaatagcaatactagaggagaagtcaaagagtagaaaaaaaggaaacaagagatggagagtaaactggcagaggtcccaaatgcaagaagactgggcagagaagagaaattcagaacagactgcaaggaacaaagaaaactggtgtcatgaaagtctagaggaaggggatgccaaggcaaaggagtaggctgagaatctgagcaaaatgaacagaaaagagatctttgtaactgacaatctgaaaaacatcagagacctcatctaaagcagtttgtgtgtatgcatgttgtgtgtgtgtgtgtgtgtgtgtttgcgtgtgaaagagagagacagaggacaatatatctctgttttcttatttcctgtacatatatatatatatacatacacatatatatattttacacatatatgtatcatatataatgtaactttagtagtagagaaggattaatggttaaatatagtggattaaacatatatgtgtttt

SEQ ID NO: 605785 - DNA, 599 bp, Homo sapiens
aacaattgaggagcatctaggaaagttgaagatgctaatcctatgattaaaaacattccacttatagagaaaccacttgtatgaacaggatatagacaccaaaatattcacagaagcattgtttcatccaaaaatgaaaacaattcaagctccatcagctatagtttaaataactaaattttgtggtatatccatacaatggaaccctcttcaacaggtttctygacctcagcactattgacattttggcccagaaaactgcttgttatgggggttatcctgtatttggtaggatgctaggaacatccctagccccaaccagtagacaccagtattgttcccccctccccaggtgtgacaaccacaatgtttccagacattgtcaaatgtctcctaggggagagctgctcccatggagaactgcagcactactgtatgagcccattaatataaagttcaaaatctgggaaaaccaagctctattttacagagatgcatacatagttgatttaaaaaataagcaaaggaaggcaaggaaatgtattatacaaataaggacaattgctattcttgagagacagaggacagttgtgatttgg

SEQ ID NO: 605786 - DNA, 500 bp, Homo sapiens
tgagaaagaacatgacttctgaaaggtgtgtgtgtgtgtgtgtgtgtgtgtgtgtgtgtgtgtgtgtgttcaacataagcaaagtcagaaagggtcttatatactgaggtaagaggttcagatttgacccaggtagtgatggggagacactaaagtcttttaatctagggatgtgcatttagaaagatcaycatgcatgcactggagaaaatggaggagaacaaattccaaggagttctagaaatccattaaaaggccataggcgatttaggtgagagacactgtccaatagattagggtaatatcctagtcatggaaagatgtagctggattaaaaagatgttagaaggtaaatcaataggacctagtgataaattaaaagtgggggtaaaacaaaggaaagagtcaacgatgtattcgaggtttctagcacgggtgatgctattcactgaaggggaaaatcacaaggaaaagccaacctataattactgtgaaaggta

SEQ ID NO: 605787 - DNA, 581 bp, Homo sapiens
cttctccttcatgtccttccttcacatgtaatttttcaacctaatacaaatagtctttcagccctactgtttcactaaaacaactgtgtcaagatcacccaaagctcagtgttgtcaaagtcactaggtgttactctgtccttgagacctctaaaaaacaatcaacacagtttatcacaatctcctgcttaaagtgctcttatcatgattccataacatgtgtctggttttcctcttgcttcattgcccaaccctcagtagactcctctgtttcctttcacagcctctatcatcctcatggaggcttggtcctggacgggttcttttctctcyctaccctctcttcatagctggtcacatccattccattgaatcacatccattccattgaattccattgaatccacagcattgaattatctgctgacctcctccacatttatatcactaacccaaccctctcctggagctccagattcatcttcacaacagcctatttggcatctccacttgggtgtttcatggatatattataactacatatctaaaatataactctgattttctgactaaacttgttt

SEQ ID NO: 605788 - DNA, 581 bp, Homo sapiens
cttctccttcatgtccttccttcacatgtaatttttcaacctaatacaaatagtctttcagccctactgtttcactaaaacaactgtgtcaagatcacccaaagctcagtgttgtcaaagtcactaggtgttactctgtccttgagacctctaaaaaacaatcaacacagtttatcacaatctcctgcttaaagtgctcttatcatgattccataacatgtgtctggttttcctcttgcttcattgcccaaccctcagtagactcctctgtttcctttcacagcctctatcatcctcatggaggcttggtcctggacgggttcttttctctctctaccctctcttcatagctggtcacatccattccattgaatcacatccattccattgaattccattgaatccacagcattgaattatctgctgacctcctccacatttatatcactaacccaaccctctcctggagctccagattcatcttcacaacagcctatttggcatctccacttgggtgtytcatggatatattataactacatatctaaaatataactctgattttctgactaaacttgttt

SEQ ID NO: 605789 - DNA, 564 bp, Homo sapiens
cttctcaattctattccaatatgtctctcaaatccatgcacttcttgccttctctcctccgcctacgtggataaagccatcatcattttgatattgcgactgtctactgatttatctctctatttccacatgtataaaatagtaacatcttaaagtgtgttttggatcatgtcactatcctcagttaaaccccttaataaactcttattgtaattggaataaaatcccaaatmtttaacataacctataaagtctgcagatgtggactttttctatctcttcaacaacatcttgagtcactttccttttttcttcccattatataggcacagtggtcttcttgtggatcctcaaagccaaccactttcctgcctcagggcttttgcacatacagaatgtttaggacactctctctctttccactgctcgcatggctagatactgttgtttgttttactttcatgtctcagcttaaatgccatgtcctctaaaggtgactcctcctctaaggggacatttagctaagagtcaaagaaaaaaccctcctactgaaagattttattt

SEQ ID NO: 605790 - DNA, 564 bp, Homo sapiens
cttctcaattctattccaatatgtctctcaaatccatgcacttcttgccttctctcctccgcctacgtggataaagccatcatcattttgatattgcgactgtctactgatttatctctctatttccacatgtataaaatagtaacatcttaaagtgtgttttggatcatgtcactatcctcagttaaaccccttaataaactcttattgtaattggaataaaatcccaaatctttaacataacctataaagtctgcagatgtggactttttctatctcttcaacaacatcttgagtcactttccttttttcttcccattatataggcacagyggtcttcttgtggatcctcaaagccaaccactttcctgcctcagggcttttgcacatacagaatgtttaggacactctctctctttccactgctcgcatggctagatactgttgtttgttttactttcatgtctcagcttaaatgccatgtcctctaaaggtgactcctcctctaaggggacatttagctaagagtcaaagaaaaaaccctcctactgaaagattttattt

SEQ ID NO: 605791 - DNA, 453 bp, Homo sapiens
tatcagtaaggcttctaatcaacagtgggctattattggttaagttttggagaagtcaaaagttacatgtggattttcaactgagcgagaggtctgtgcctctaacccagggttgttcaaggataaactctctatccttttattgctattttaagcctctgaataacttcagatctaagaagtaagttgtctcagtaataaacaacatcatttaaaaacaatttatataacattaagctctacttaaatcaatcttttctgtaattcaaagaattaatggcatcttcataaggtatgtgaggtataaaaaatttattacaaatttataagwcagaaacagagacacacactttttttatatatcattggacacaatgtacattttgaatgcaatttgaattctctacttcttttaggtacctgccaaaatcctaggaatataagagtaaaaat

SEQ ID NO: 605792 - DNA, 618 bp, Homo sapiens
tccacagtatctggttcagtgataggtatatactatatgtcgcaaaggttggtgaatatataaaagaagtccactcataatgagaatatgataagaatggctcctcctgaaagattttattataaaacctataggcatttttatcttaaattgagtttaaaaaaaaaaaagaaaaaatctcaattctggccgggcrcagtggctcatgcctgtaatcccagcactttggaaggccgaggcgggtggatcatgaggtcaggagatcaagaccatcctggctaacacggtgaaaccccatctctactaaaaatacaaaaaattagctgggtgtggtggcgggtgcctataatcccagctacttgggaggctgaggcaggataatggcatgaacccagaaggcagagcttgcagtgagcgagatcaggccattgcactccagcctgggcgacagagcaagactctgcctcaaagaaataaacacacaaacaaaaaaactctcaattctttatggtataatctctgacttacaaaaatccttggattattagtaacacttaggttctttataaattttatttaaaatactattcatttgttttgagttttcctaatgccaac

SEQ ID NO: 605793 - DNA, 547 bp, Homo sapiens
tgtccacctgtaagctggcaaattgccaattagtagaaagtctataagtaaatttagctaaatataaaagagtacaacttaaagtacaatacattcaagttaagaatataaaactaatatattgtttaatagtagctatgatgagattatcatagcccaggtggtactattgaaatattgagagtaagatgtgtgtccatgtttaatgttgtatacagtaggatttttattaaaaacaaaaaaactaaaaaacctgtaggcaacttaaattttaaaacatagataaaatagatacatatattttttattattattatcctttaagttctagggtacatgtgcacaacgtgcaggtttgtcatgtatgtatacatgagccatgttggtgtgctgcacccattaactcatcatttacattaggtatatctcctaaagctatccctyccccctcccccaacccccaggacaggccctggtgtgtgatgttccccaccctgtgtccaggtgttctcattgttcaattcccacctataagtgagaacatgca

SEQ ID NO: 605794 - DNA, 558 bp, Homo sapiens
atccttttgtacaactatggaaatatcttcaatcttgaaagactcattttaaatgagcaaactgagaaatgtaaaccttttgatagataagccttaccatattgaaagaaaaccttaccttgacatttgtagaggcttggatttacggagtgaccaagtggcagatcaaaggcacacacaagaaataccatcaaattgaacctagggaaccttgcattgcccaaggccaagtgcttactgaccattttgtcacagaaatctatgaccaacatgtgaaacagtgaattgggaatatgaagtctgagtttctggttgatttgaattctgctatcaacctgttatctgactatgacaatactttaatacagaaggaatcaagctttctttttctttttcatttggacatcrgtaaaaatatgagtggaaaaagcccactactcttatgtcttctgtataacatcatttgtctgaagcatttgtgtagtattgacagttgcagccactatgatagatgggtgtcagggtatttgctgtattgttaactgattccaggtcatt

SEQ ID NO: 605795 - DNA, 611 bp, Homo sapiens
gctttcagttgctagtcacaaaacaatttgactaatagtgatgtaaaccataaatatatatatttgrgcttttttttttaattaagtagtttggagataggcagtatcaatataaggtcagtgggcctggtgcagtggctcacacctgtaatgccagcactttgggaggccgaggctggtggatcacttgaggtcaggagtttgaaaccggcctggctaacatggtgaaaccccatctctattaaaaatacagaaattagccaggcatgctggtgggtgcctgtaatcccagctacttgggaggctgaggcaggagaattgtgtgaacccggggaggcagaggttgcagtgagtagagatcgtgccactgcactctagcctcggcagcagagcaagactccatctcaaaaaaaaaaaaaaaaaaaaaaagtaaataaggtcagtggctccattatgcttttaaggacccaggctccttggctcctttgatctgccattttcggcatgtcaacaatgtcttttctcatctggttagtaatactgtgtcctatctgaaggacaacaggtttagaaaaagggagagcccaaagagaaaaaaattattctaatat

SEQ ID NO: 605796 - DNA, 565 bp, Homo sapiens
tgcctacttactgctgggtctctttaatttgattcaagcatccaccctaaattccaggcatccagtcccactggaatgcaccacaagcaatgtcagtctctgtcctcagtgttgatgaaggaaaaacatcacttcccacaaatcccgatctgatttaaattttccctagtcccctgttttgaacatgcgtgcgcgtgcacacatacacacacacacacacatactcatttcttccttcaggtgactcatactgaggcaatagagaggtgtggagaaccctggaaggaccatctctcagcattaaccccatcggcaggattaaccccatcatgcttccactggcagctctggtcagcaggtcggcagyagcagcccttgaggttagcaccagggcttggtggtttcttccagctgttctgaggaagagtgtcagcagtcgtctcgctgcagcagttcttgttaatacacagggttttccatgcgtgccctggttcctcagctgtctcctcaagtactacatcaacatcattattactgagaactcacagtgcagtatctgtcccag

SEQ ID NO: 605797 - DNA, 565 bp, Homo sapiens
tgcctacttactgctgggtctctttaatttgattcaagcatccaccctaaattccaggcatccagtcccactggaatgcaccacaagcaatgtcagtctctgtcctcagtgttgatgaaggaaaaacatcacttcccacaaatcccgatctgatttaaattttccctagtcccctgttttgaacatgcgtgcgcgtgcacacatacacacacacacacacatactcatttcttccttcaggtgactcatactgaggcaatagagaggtgtggagaaccctggaaggaccatctctcagcattaaccccatcggcaggattaaccccatcatgcttccactggcagctctggtcagcaggtcggcagtwgcagcccttgaggttagcaccagggcttggtggtttcttccagctgttctgaggaagagtgtcagcagtcgtctcgctgcagcagttcttgttaatacacagggttttccatgcgtgccctggttcctcagctgtctcctcaagtactacatcaacatcattattactgagaactcacagtgcagtatctgtcccag

SEQ ID NO: 605798 - DNA, 574 bp, Homo sapiens
tatgtaacttttttttcttttctttttgcattagtggccaggaattttgaactcaatttaacgtcctaatgaggtaatacatttatttcaggtgcttgctagcatctatttcaataccgcagcttgcttcaacagttataaccctagctgcaagttagaaacttctgtttaaaaatacctgatgtctgagatagtgtccagcccagatctaagggtggggccaaggaactggaatatttcaaatgatctccaaggtgatgcaaatgtagagggagatttcagaaccatttctatggatgttgtaaatttgttttgttttaattttagttgtyttatttgtacactaatttatttacatgaactcaagttcttttgaaagaaaagaatcgtaatatacaaatgcataaaccatcaatcttatactattgaacagatctacatctcaccagtatgtgtcaattttggctgtccatcagcatcacttggtgagctgataaaatcctaatgcctagaccatatccaaaccaattaaatcatagtctctgaaggtgagactgaggcactgatcattttt

SEQ ID NO: 605799 - DNA, 659 bp, Homo sapiens
ccaatttctccccattctcactaatacttgckttttattttttttttatgatagccatcataacaggtgtgaggtaatatctcattgagtttctgatttgtatttccctgatgattagtcacattgagtatcctttcatatacgttttgaccatttgcatgtcctctttggagaaatgtgtaagtcgttagcccattttttatataaggttattagttgttttgctatcgacttgcaggaaggagttccttatatatttggaagttaccctttatcagatgcaaacattagaagtgacttacttcttttcatcttcttttatcataaaatacattctgctatttaagattcagctaaatcagagataaagagataaggtgcctgcttcatgctcacctcttatttgcagtcctaactacccctccccccacacatgcccccaccctttagggaaagagttctttggcaatagtacttcaaagttcactctaataagctgggagctagacagagctgattcagaatttattctatcactacacttcatgatatggttttgctctgtgtccgcacccaaatctgacctagaagtgtaatccccacatgtcaagggagggaagtgattggattatgggggtggtttccctcatgctgttctc

SEQ ID NO: 605800 - DNA, 582 bp, Homo sapiens
gagaatgcactggggggaaaacatagggacataacatatcagactcccaacagctattttagatggcattcatttctaggaatggcctagtctttaagctactttcaaatcagatgttcaccaacaggattgtcaatttttccccaagtatcaagtgtagcagtgtcctgacatgaattcttayaatcaatgtctgttcattcagctagtatttatcgggcacacatcatgtatcaggtgctagggacaaaatgattcttaaccccatggtgttatattcttgatgggaaaaatgatactgaactcatgtaatagggctgacatgcttccacaactgataatgtggaatctgaaaaaaattagcaagaaagactgcagtttgatggttgcctgccagtttacatctagcagtggcaatctcaagttccttcccaaggtttttgttatggagaaaatgtaaatttttggttataaaaaaataatgagagtagatacttatcattctgtgagaaaggtagaaaaatatactcacttttggtttgaaaggccatctctcatatcttggtatatagtaccaaagtt

SEQ ID NO: 605801 - DNA, 596 bp, Homo sapiens
aatgtttttcttttcaaggctaacctttgaattaaccttatatcaaggtagtatgatttcacttggaggggaaaagagggagagagtgatggagaatgcactggggggaaaacatagggacataacatatcagactcccaacagctattttagatggcattcatttctaggaatggcctagtctttaagctactttcaaatcagatgttcaccaacaggattgtcaatttttccccaagtatcaagtgtagcagtgtcctgacatgaattcttataatcaatgtctgttcattcagctagtatttatcgggcacacatcatgtatcaggtgctagggacaaaatgattcttaaccccatggtgttatattcttgatgggaaaaatgatactgaactcatgtaatagggctgacatgcttccacaactgataatgtggaatctgaaaaaaattagcaagaaagactgcagtttgatggttgcctgccagtttayatctagcagtggcaatctcaagttccttcccaaggtttttgttatggagaaaatgtaaatttttggttataaaaaaataatgagagtagatacttatcattct

SEQ ID NO: 605802 - DNA, 559 bp, Homo sapiens
gcttccacaactgataatgtggaatctgaaaaaaattagcaagaaagactgcagtttgatggttgcctgccagtttacatctagcagtggcaatctcaagttccttcccaaggtttttgttatggagaaaatgtaaatttttggttataaaaaaataatgagagtagatacttatcattctgtgagaaaggtagaaaaatatactcacttttggtttgaaaggccatctctcatatcttggtatatagtaccaaagttactgggaatttgcatacaggtmtaagaagcttcagggaaggaaaagaatcaggaaccacaggctttctcttctgagaatcacaatcctggagcctctcaaaggaatcaagatagctctaacttgaatggcttgtgtaacagcagtgttgggagaaccacagtcctgctcccctgggatacaactacaactggtcaaaataattgcaaaaataattaaagtaactggagatggtataaagaagatacaaatgtgtcttcatacagaaaatgaagatacatttgttcaagaaaattactatct

SEQ ID NO: 605803 - DNA, 590 bp, Homo sapiens
gatctacactaggagagaggagagtcaagctgaaaagaccagagactacagtccttgcttaattccctaatcacaaagcatgggtatcrttttggagcagcaggcactaaccctaccttcagctctggtggttcagagattttgcctaggtagagaagcaggttataggaactgagagcactaacaatcttcccaatggaactgatttatttatgacagagtatgagaaagttcaggcctacaggagttcttaaaaacaatgaagattttggtagtaagcaattaagaagaaagctgatagctttatgaaagcacaagataactataggttagctactttatcagaaggaatcagagaaaaagaccaaatagaagagctttcctgaggtgagaacaaacctcaaagtctggcctcaatactgactttacaaaacggcttgaatttaattggatcagactgtggagacatgtatgccccagcatgtagtctaaacaacaaagcaacagtcagcacttagtggagcctaacagttgagtttgataccaacagaggcaaacatcttaacaaaggaatcagagggaaagacagt

SEQ ID NO: 605804 - DNA, 428 bp, Homo sapiens
ggggaaggctggtgcatttgtgcctccattaaggacagagagaatgtgtataatttatttgagacaaaatggtgcattgcttaagtgtagaaagtaaagggcgagagagaaccaagtgaggcaggggttaagctggggtgactccatgcwggcattgtaagccatgggacttactttgaaaaacttttcattttgaggccagatgcagtggctcatgcctataatcccaacacttttggaggccaaggtgggtggaccacttgaacccaggtgtttgagaccagcctgggcaatacggcgaaaccttgtctcaacaaaaaatacaaaaattagttgggcttggtgggtcatgcctgtggtcccagctacttgggaggctggggtgggaggatcacctgagcctgggaggttgaggttgcagtgagctg

SEQ ID NO: 605805 - DNA, 504 bp, Homo sapiens
tagtggagcctcctatcaacctccaaagggaaacctttgtmcacttagagaggtgacaaatggggaagaagtcactgtgagagtacatgttcccttttctatgtctgatttggctgtatataaagaggagtttggtcatttctctgaagacccgggaaaattcatagataagtttgagaaattaactctgacgtatagtttaacttggcaggatctgcatgttttattgtctctgtgttgtacagtggaagagaaacaacacattttgggggcagctaggacccatgcacacgaggtattggcttgcaacccaaaccatgatatatatcaggcaggaggtatagcagttccagatcaagatccagagtagaactatcaaagggacagtgaggacttggggaggagaggttatatggtcactctttggttggaagggatgagaaatgtatgaaaaatcctgttaactatgggaaggttaaggaagtttctcagggcaaagaggaa

SEQ ID NO: 605806 - DNA, 504 bp, Homo sapiens
tagtggagcctcctatcaacctccaaagggaaacctttgtcsacttagagaggtgacaaatggggaagaagtcactgtgagagtacatgttcccttttctatgtctgatttggctgtatataaagaggagtttggtcatttctctgaagacccgggaaaattcatagataagtttgagaaattaactctgacgtatagtttaacttggcaggatctgcatgttttattgtctctgtgttgtacagtggaagagaaacaacacattttgggggcagctaggacccatgcacacgaggtattggcttgcaacccaaaccatgatatatatcaggcaggaggtatagcagttccagatcaagatccagagtagaactatcaaagggacagtgaggacttggggaggagaggttatatggtcactctttggttggaagggatgagaaatgtatgaaaaatcctgttaactatgggaaggttaaggaagtttctcagggcaaagaggaa

SEQ ID NO: 605807 - DNA, 564 bp, Homo sapiens
ttccataaagttgggaggaatcttatttatagcggcaaactagcatcaagaaaaaggaaagacctagagagaaatatttgattagaaaggcagrgattttggaagcagaagccatgtctcctgtgagggagatagtgcttagagttctgatttatttgtttgagaaagataatgtctttttttttttttttttgatggtaagaagattgttaggctgaaaaaataatttagtcctaagacattttttaggttctaatagtttacttaatatttttagccattcctttaaaaaaatcacagatatgaaaataaaaagggaacattcatatgtttacattgttaatgtgatatagacattattggcatgatagctaccttagtaatatcacttttgggggatagttctgaaaatcagaatattttctaattgattctactgtaaaacatcattgaagtggtatctgctgtctggcttagttgtggactaaaataaagccataattctgagtctccagcaaggttaggccttacatggcaggctggacaaattgaatcttaaaagat

SEQ ID NO: 605808 - DNA, 564 bp, Homo sapiens
ttccataaagttgggaggaatcttatttatagcggcaaactagcatcaagaaaaaggaaagacctagagagaaatatttgattagaaaggcagggattttggaagcagaagccatgtctcctgtgagggagatagtgcttagagttctgatttatttgtttgagaaagataatgtctttttttttttttttttgatggtaagaagattgttaggctgaaaaaataatttagtcctaagacattttttaggttctaatagtttacttaatatttttagccattcctttaaaaaaatcacagatatgaaaataaaaaggraacattcatatgtttacattgttaatgtgatatagacattattggcatgatagctaccttagtaatatcacttttgggggatagttctgaaaatcagaatattttctaattgattctactgtaaaacatcattgaagtggtatctgctgtctggcttagttgtggactaaaataaagccataattctgagtctccagcaaggttaggccttacatggcaggctggacaaattgaatcttaaaagat

SEQ ID NO: 605809 - DNA, 523 bp, Homo sapiens
caagctatatcttatggattaaaagatgtaagattcaggtaattataaatactagatataattagtttaacctcaaataaaacttagaaataaatgttaaaaaggggaatttactaatcagcctgtaaagaattgcaggatgagccatattgaataaagaataaataacgmagaaaaatctgattactttcttgatagaattctggaagattaagtcagtgaaattggtatattatactttgattttggttttacagatcatgaaattacatttgcaaattttatgcaaatttactaagagattaatgttgtcatgttctgtagacctaggagaaagaaaatcctgttaacaacattggttaaaaaatgtacaaagagatgccaaggtcagggatactgtgtccagaagaactagatggtttcattctctttatagccacatttctcaccttttcctggatgcacatagcccataaatggttacagctgattacaataatgggccggggaagtcagcacacct

SEQ ID NO: 605810 - DNA, 643 bp, Homo sapiens
  misc_feature 205: n = A,T,C or G
tataggtctaattaggaagataacatttgaacaaagacttaaatgtcataagtgagttgrccgtatcagggagaaatgtgttccaggaagagggaacagacagcatgcaggtcctaagaagggaatatggatctggggagctcagtagtagatgaagtcagaattaacaggggacccaactgtgttaagtcttttttggccattngtagcactttagctattatactgagtgttagaagagtcattggatagttttgaatagaggagagaaatgatttaacttggttaaaaggatcattctggcaactgttaaaaaaatactctaagtggacaaggatagaagcagcatgaccccttagaaggctcttaaagcaacacaaggtttgctttatagaatgtaattattttaggagccacaaccttgaattttatagcccaaattccatgaaggcaaatatttttatttcagtgtacatttaaaattaaattatttccaagagtcatttattgaaacactatttgatcctcaaattttcaagaccataaatcaaatacataatttaattagtgtaatgatttatgtgtgcaatactttacagctttctatatgctttcacaggcaaaaacttatttaaaccatgca

SEQ ID NO: 605811 - DNA, 643 bp, Homo sapiens
  misc_feature 205: n = A,T,C or G
tataggtctaattaggaagataacatttgaacaaagacttaaatgtcataagtgagttgaccgtatcagggagaaatrtgttccaggaagagggaacagacagcatgcaggtcctaagaagggaatatggatctggggagctcagtagtagatgaagtcagaattaacaggggacccaactgtgttaagtcttttttggccattngtagcactttagctattatactgagtgttagaagagtcattggatagttttgaatagaggagagaaatgatttaacttggttaaaaggatcattctggcaactgttaaaaaaatactctaagtggacaaggatagaagcagcatgaccccttagaaggctcttaaagcaacacaaggtttgctttatagaatgtaattattttaggagccacaaccttgaattttatagcccaaattccatgaaggcaaatatttttatttcagtgtacatttaaaattaaattatttccaagagtcatttattgaaacactatttgatcctcaaattttcaagaccataaatcaaatacataatttaattagtgtaatgatttatgtgtgcaatactttacagctttctatatgctttcacaggcaaaaacttatttaaaccatgca

SEQ ID NO: 605812 - DNA, 643 bp, Homo sapiens
  misc_feature 205: n = A,T,C or G
tataggtctaattaggaagataacatttgaacaaagacttaaatgtcataagtgagttgaccgtatcagggagaaatgtgttccaggaagagggaacagacagcatgcaggtcctaagaagggaatatggatctggggagctcagtagtagatgaagtcagaattaacaggggacccaactgtgttaagtcttttttggccattngtagcactttagctattatactgagtgttagaagagtcattggatagttttgaatagaggagagaaatgatttaacttggttaaaaggatcattctggcaactgttaaaaaaatactctaagtggacaaggatagaagcagcatgaccccttagaaggctcttaaagcaacacarggtttgctttatagaatgtaattattttaggagccacaaccttgaattttatagcccaaattccatgaaggcaaatatttttatttcagtgtacatttaaaattaaattatttccaagagtcatttattgaaacactatttgatcctcaaattttcaagaccataaatcaaatacataatttaattagtgtaatgatttatgtgtgcaatactttacagctttctatatgctttcacaggcaaaaacttatttaaaccatgca

SEQ ID NO: 605813 - DNA, 405 bp, Homo sapiens
  misc_feature 20: n = A,T,C or G
taagtcttttttggccattngtagcactttagctattatactgagtgttagaagagtcattggatagttttgaatagaggagagaaatgatttaacttggttaaaaggatcattctggcaactgttaaaaaaatactctaagtggacaaggatagaagcagcatgaccccttagaaggctcttaaagcaacacaaggtttgctttatagaatgtaattattttaggagccacaaccttgaattttatagccyaaattccatgaaggcaaatatttttatttcagtgtacatttaaaattaaattatttccaagagtcatttattgaaacactatttgatcctcaaattttcaagaccataaatcaaatacataatttaattagtgtaatgatttatgtgtgcaat

SEQ ID NO: 605814 - DNA, 592 bp, Homo sapiens
taaataaagatgtttgaactaaatacacgttagtgtttatcaatgttctttctatattttctttgcataacaaaggattaagtcttttgttatrtaattaatcaagtcttctgggaatcagtttatatgtgaaatgttaaggttggacaggtgatgtccaaagttctcttcagttctaaaatactgtgacagtaaaacatctcaaaatattaggtttggtgtccttacatgctgctctttttggattatgaatacatcgtttaactcatgagtattacctttacccacaaaccttcattttcaaacctgtttcctcaggagtcacatgggatgaaatgttagctttagctcatccaaatttcaggaagatatataaagtgcctaattcctggtggaaatttaataatagtattgattgatgataatgaactctactattagagaactggcgtcacctttcctttcatggaagatcactcacagggaggtgtgaatttggtcgcatgatagcacaatcttatcaaattttagatctaggatggtttagggctaccctgcattcacccagtgggaaatagaacaaggaaaaaaa

SEQ ID NO: 605815 - DNA, 592 bp, Homo sapiens
taaataaagatgtttgaactaaatacacgttagtgtttatcaatgttctttctatattttctttgcataacaaaggattaagtcttttgttatgtaattaatcaagtcttctgggaatcagtttatatgtgaaatgttaaggttggacaggtgatgtccaaagttctcttcagttctaaaatactgtgacagtaaaacatctcaaaatattaggtttggtgtccttacatgctgctctttttggattatgaatacatcgtttaactcatgagtattacctttacccacaaaccttcattttcaaacctgtttcctcaggagtcacatgggatgaaatgttagctttagctcatccaaatttcaggaagatatataaartgcctaattcctggtggaaatttaataatagtattgattgatgataatgaactctactattagagaactggcgtcacctttcctttcatggaagatcactcacagggaggtgtgaatttggtcgcatgatagcacaatcttatcaaattttagatctaggatggtttagggctaccctgcattcacccagtgggaaatagaacaaggaaaaaaa

SEQ ID NO: 605816 - DNA, 592 bp, Homo sapiens
ggaattagggtcactttcataatagcatttttgtctgtagggggatatrttcaaatctttaaaacaatggtttataaaacacatctaacattgtacctgactttctgtgattgaagattcatttacatgaatgtgttaatttaatttttaccttttattataggatggagggtgataaggctcagctaggttgactcttctgtggaaacaacgtggaggatggcctgtgtctggaagtcccagctcaagatgatggtgagtgaagtacactcttctccattcctcctctactaatccaggggaggcattcctgtgaggttgactttacaaagacagaaataccgtgaaatatgttttttaggattcatagcaatggaaggtgatacttcttattttgggaggaaaaatccccagcactctgtcttatatttgtcccatctgtacgtattgctcctattcttttttcctttttctttaataccatgcaggttctctggctgtatatagtactctgggttgtgattgcaatagaaaatctcagatagacaaaagtatccagacaacaaatctcccttcagcccatctcacccta

SEQ ID NO: 605817 - DNA, 565 bp, Homo sapiens
agacttgtagaatctacacctccagaacaaccgacctccatcttctggacaactcrtcttctaaagtgcaggacagactagttgggggagaaaggaggaaatgaaagagatagactaaaagggagggagagaacagatattttttaagtacctgttatgttctggatacagcacagagtacattgtatctattattataaggcataaagaaagatttctcaggtttttggagtcagattgcaatataaaataatagacagaaattgaagacaaatggaataagcatttcctcatgtaaaccctaagctatctctgtaatttagaatgtgggactagatagactagagatccaatatattatactaattctttagtacttctttcctgttctgaaattctcacagaagtcagtgagcagatgaacctcttcaccaaatctgtttgacaactactttctgtgatgtcatgaggcaaattacaatttattatgttattataaatgttaggagtaacatggacgtgttagacattttttttcttctattttctctcctaccttctttaa

SEQ ID NO: 605818 - DNA, 565 bp, Homo sapiens
agacttgtagaatctacacctccagaacaaccgacctccatcttctggacaactcgtcttctaaagtgcaggacagactagttgggggagaaaggaggaaatgaaagagatagactaaaagggagggagagaacaratattttttaagtacctgttatgttctggatacagcacagagtacattgtatctattattataaggcataaagaaagatttctcaggtttttggagtcagattgcaatataaaataatagacagaaattgaagacaaatggaataagcatttcctcatgtaaaccctaagctatctctgtaatttagaatgtgggactagatagactagagatccaatatattatactaattctttagtacttctttcctgttctgaaattctcacagaagtcagtgagcagatgaacctcttcaccaaatctgtttgacaactactttctgtgatgtcatgaggcaaattacaatttattatgttattataaatgttaggagtaacatggacgtgttagacattttttttcttctattttctctcctaccttctttaa

SEQ ID NO: 605819 - DNA, 565 bp, Homo sapiens
agacttgtagaatctacacctccagaacaaccgacctccatcttctggacaactcgtcttctaaagtgcaggacagactagttgggggagaaaggaggaaatgaaagagatagactaaaagggagggagagaacagatattttttaagtacctgttatgttctggatacagcacagagtacattgtatctattattataaggcataaagaaagatttctcaggtttttggagtcagattgcaatataaaataatagacagaaattgaagacaaatggaataagcatttcctcatgtaaaccctaagctatctctgtaatttagaatgtgggactagatagactagagatccaatatattatactaattctttagtacttctttcctgttctgaaattctcacagaagtcagtgagcagatgaacctcttcaccaaatctgtttgacaactactttctgtgatgtcatgaggcaaattacaatttattatgttattataaatgwtaggagtaacatggacgtgttagacattttttttcttctattttctctcctaccttctttaa

SEQ ID NO: 605820 - DNA, 617 bp, Homo sapiens
cctgttctgaaattctcacagaagtcagtgagcagatgaacctcttcaccaaatctgtttgacaactactttctgtgatgtcatgaggcaaattacaatttattatgttattataaatgttaggagtaacatggacgtgktagacattttttttcttctattttctctcctaccttctttaatcccttaacttcttccttttcttctctacacctacctaccttccctccctctctctctcttcccctctctccctcccttgttccttccctccctctctccctccctctgttctcagtaattaaaaactagatagaatagtttttcaggttatatccctgactttagtcatcacacttattatcacaaaatttgattttttgtaactattcagtaatcatttcttgttattgtactagagatatactttcctaatcagaataaattcaaggatacccaaactacaataggaagaaattggttaatgaatgtgatatccatatttattgttccctatgtaggctttttcctctgttatggattctagaatgtcatacacaaaaaaaggctgcagagagatttcatatctgaagtgaagttaattttaacagatgtaa

SEQ ID NO: 605821 - DNA, 564 bp, Homo sapiens
gtctctactaaaaatacaaaaattagctgggagtggtagtgtcgggcctgtagtcccagctagtcgggaggctgaggcagaattgcttgaacctgggaggtggaggctgcagtgagccaagattgtgccactgtactccagcctggtgacagcaagactctgtctcaaaaaaaaaaaaaaaaaggataaagggcaagtgagactcatcctgatggtttcagggcagrcagtaggtgcagaggtgctgggtgttaggaaacaaaaggatagggtcttgccacagggccctggagttctgggtcccctcttcagtcctgaaggagtgatatggagggtaggagataggccacctaatctggagttcctggagtacctggaccctcattcctacttccaaagttgttgaggatgggcctggcttgggggctctcctgcatagcacatattgcctaatgctgtcattaacccagaactagatcagggtcttaccacagatgacaaaaattccgaggataattattactgttcaggtttgtagctaagtatatttttcctatagctaaa

SEQ ID NO: 605822 - DNA, 564 bp, Homo sapiens
gtctctactaaaaatacaaaaattagctgggagtggtagtgtcgggcctgtagtcccagctagtcgggaggctgaggcagaattgcttgaacctgggaggtggaggctgcagtgagccaagattgtgccactgtactccagcctggtgacagcaagactctgtctcaaaaaaaaaaaaaaaaaggataaagggcaagtgagactcatcctgatggtttcagggcagacagtaggtgcagaggtgctgggtgttaggaaacaaaaggatagggtcttgccacagggccctggagttctgggtcccctcttcagtcctgaaggagtgatatggagggtaggagataggccacctaatctggagttcctggagtacctggaccctcattcctacttccaaagttgttgaggatgggcctggcttgggggctctcctgcatagcacatattgcctaatgctgtcattaacccagaactagatcagggycttaccacagatgacaaaaattccgaggataattattactgttcaggtttgtagctaagtatatttttcctatagctaaa

SEQ ID NO: 605823 - DNA, 603 bp, Homo sapiens
atgcgtttgagtactacttgaatctagtggctagaggccakggatgttacatatcctataatgcagaggacagctccctctcccaccctgcaaaacaaagaattatccagcccaaaatgtcaatagtgccaaggtgagaaaccttggtttgaattaagaggatctcaggaaaacattccttgaattggagcaggcggaagtttaagtagaattcagaataattttctttaatcaaatttacttccttattactagcccttccttcttagtaaacacttaactgccaatgatggcttccttccttttcagaattttctcacagagcttcttacagcctattccttgccatttctgcactctatgcacatcagcctcccccacaacccagttcaactccttatcttttttagctctgtagagactgaaaggccaatataagaaatggtcattgagctaatcactgatcaaaatgaattttgatttttaattatcattaaaggataggaattactatttttgattaagaggagagaaaacatagcagacctctattggagacttctgttttgggtttctgtctcagaagactatctacttgaccca

SEQ ID NO: 605824 - DNA, 603 bp, Homo sapiens
atgcgtttgagtactacttgaatctagtggctagaggccatggatgttacatatcctataatgcagaggacagctccctctcccaccctgcaaaacaaagaattatccagcccaaaatgtcaatagtgccaaggtgagaaaccttggtttgaattaagaggatctcaggaaaacattccttgaattggagcaggyggaagtttaagtagaattcagaataattttctttaatcaaatttacttccttattactagcccttccttcttagtaaacacttaactgccaatgatggcttccttccttttcagaattttctcacagagcttcttacagcctattccttgccatttctgcactctatgcacatcagcctcccccacaacccagttcaactccttatcttttttagctctgtagagactgaaaggccaatataagaaatggtcattgagctaatcactgatcaaaatgaattttgatttttaattatcattaaaggataggaattactatttttgattaagaggagagaaaacatagcagacctctattggagacttctgttttgggtttctgtctcagaagactatctacttgaccca

SEQ ID NO: 605825 - DNA, 536 bp, Homo sapiens
agaacagcaacatgggagtaaccgctctcatgattcaattacctcccacaggattcccccaaagacatgtgaggattatgggaactacaattacagatgagatttgggtgaggacacagccaaaccatatcacaaggatagtttgattctggctactgggccctggagtggaacattgagaaggagatcacttattctttcttgtaaaaataaaaaatgtttataaattctgcttttgtttgggggaaaagtccagttgaaagataaaagaggaaatttgttcaatgaaagcatttaaaattgactacttaaactttaggagttttattaaagttggctaaatacttaagtcaatttcttcttttggtaagaatgttagtagtrgtaaccaaagactatacagagccaaaatgaatctgtatagtctcctgcctctcccaacattatgaaggtcttagtctatccaagtgaaatacagaacaacaaacaaacaccaaagactaaagagaactataaaaaagaaatgtattcacttt

SEQ ID NO: 605826 - DNA, 598 bp, Homo sapiens
attagctgtggagtataacagtatggccctataggggaatgagccagccattacacagaagattccagagagcgattgcatgtccaagaactagtgcaagtccaagaaatcccattaataccagtatcatgaagtttgataaacctctcatataccagggcactgttttaggactgccacaaaggaggcatggaaaaaatctaacaacatcttccaaaggctgatttaaactaagagacagagccattttcaattattggctcagattacatttaatccatattaaatttaattttccctccattacttaattgattggagccttcatgaagagtatgaagtaggttataaaggagtcacattttccctgcatatttgagttgtaatgtgataaacatatgtaatcgtacagaaaatttaatcatctctatggttgttggttctctgtgggttgaaagtaggaggagctgcacttccttgagcctgaacaaagctggagagacgagtggaatggagtctctacaactaggtcattaggctrgaagccaactgaatgtgctgcccagacaaggcctcaaggtctcataaagaaacgcat

SEQ ID NO: 605827 - DNA, 534 bp, Homo sapiens
cactgtgctcttcacctcccctccatattgttctttctccaatcactttcttctgtatttgggtgtaagccttatcaatatcatttccaagtttctcccttcccactcccccaagagttaagaagtcattggaggatatggagaacagtaagaggttgaccaatagagcacggagtcagggcaacggtaatgacagctggtaacagtggacaagtgtaatgcctagaggctctgagyagccctagcttacctagtctattctagcatacctaatctacctatcttattcaagaaagccaaagaatttgctttcataaggtgtgctgacttgcttcaattgcccctcccatctccttgaaagacataaaccaagagaaggtgagatgacatagaaagatcatacaattagaattgaaagtgagccttaggttgactttacagttctcaattgcctatataataatcccttgtcatttctgagactcgggttttccatctgtgaattggagacaacattatgtgttacataactca

SEQ ID NO: 605828 - DNA, 540 bp, Homo sapiens
tgaagtcctcagaacaccaaggatactctaaaagctcctaaaaagaaacaaatataaataaagcaacaaacaccagattaatcttgatggggttcaggacacagyaccccaaaatatggtgacacactgtgccaaaatatggcaccttggcatgttgaagaatttagactgaggaattaagcaaactgcagaacaaaggtcactcttatcttcccctacccatgtcacataaagtaattcataaagccaaaaaggattttctgactttccccttaagcagatcagaagaccttcatgtgtgaggtcccctccttatatctggaggaaagaagcagccttgtctccaaagacacagagatgccaagaagagtctggacaaacaggccttgctaaatttcctcatttatttccattgcattatactctcttgccctatcaagttttgcacccactctccattcttcagtaaatctattataaaatacacccaagtttaactgattctttaggtcttcatttcttttcaaaggttcccatgta

SEQ ID NO: 605829 - DNA, 503 bp, Homo sapiens
tcactcttgttgcccaggctggagtgcaatggmgagatataggctcactgtaacctccgcctcccgggttcaagcaattctcctgcctcagcctaccgagtagctgggattacaggtgcccacaatcacgcctggctaattttttatatttttctttttttttttagtagagacagggtttcaccatgttggccagctggtctcgaacttctgatctcaggtaatccgctcacctcagcctcccaaagtgctgtgattacaggtgtgagccactgcgcctggcctatgaattgtcttaaatattctcaatattctggcatctttattatttagataacatatcaaatcaccaaaatgtcctctaggatttaaaatgggatcatactaaatttatgggttgatttagggagaactgactttataacaacattgaatcttcatgtctgagacaaagtttacctttacatttattcaagaattgtttttgtcctgtagtggagttt

SEQ ID NO: 605830 - DNA, 565 bp, Homo sapiens
aatggagtgatccaagacatgtatgtagtttgaacagacacggcttgagtatagattagctgtgggtttgaaagagagkgaagtatcaaacacttgtttgtggacactgaatagatcatggtaccattttcagagacaggaaagactaagaagtgagcattttggaggcagggaatgtatagaatttgagtttggggcacattaaatttagattgtttatgagacatccaatcggagaaggagagatattaaataaaccattgggtatgtgagtttgggatcctcagaatggtctaagctggagatggaagttttagatgttgctgacccaatgatggtactgaaagttttaatcacctaaaaaagagtgtatacaggaagatgtcccacatagtgcccagaagaacttcaacttttggaagtcaggagagtagaagaagctggctaaagatactaggaagtactggcagccacgtttcaaagaggattgagtgccagttctgttgactgctagtgagagtttaagaagaatgaggatagaagaagtcaattagatttgcaaggt

SEQ ID NO: 605831 - DNA, 565 bp, Homo sapiens
aatggagtgatccaagacatgtatgtagtttgaacagacacggcttgagtatagattagctgtgggtttgaaagagagggaagtatcaaacacttgtttgtggacactgaatagatcatggtaccattttcagagacaggaaagactaagaagtgagcattttggaggcagggaatgtatagaatttgagtttggggcacattaaatttagattgtttatgagacatccaatcggagaaggagagatattaaataaaccattgggtatgtgagtttgggatcctcagaatggtctaagctggagatggaagttttagatgttgctgacccaatgatggtactgaaagttttartcacctaaaaaagagtgtatacaggaagatgtcccacatagtgcccagaagaacttcaacttttggaagtcaggagagtagaagaagctggctaaagatactaggaagtactggcagccacgtttcaaagaggattgagtgccagttctgttgactgctagtgagagtttaagaagaatgaggatagaagaagtcaattagatttgcaaggt

SEQ ID NO: 605832 - DNA, 527 bp, Homo sapiens
gggttcaaatatagtaatcatacccacttccatttcctacactgtaggtgaaattttttaaatctatatttttacgacagtattgaacacatatctttaattgtaagcttcctcaaactattttatgatagcagacggggtatgttaaaagtaaaaattcaataagaaggagctaatttgctcctgacaggtaatttcatgggaaactacagatacttattaactaattctatataataataataataactcatttattaatttcttattgtgggcccaattctgcrctaagtgcttaaatgcattatctttatttttttacttttttttttaacaacaacaacaaaaaaagttgttgcattttatctgtgtagtttaaagagaaggaactgaggtttaagaagttaaagaaatcacatggagctgacgccatgcctcatgcctgtaaatcccagcattttgggatgccgaggtgggcggatcgcctgaggtcaggagttcaagaccaacctgaccaacattgtgaa

SEQ ID NO: 605833 - DNA, 465 bp, Homo sapiens
caatgtgatggctacaatttcactargcaataggaaatttttcggctttattataatcttatatgactactgttgtatacactgtccgtcattcactaaaatgttatgtggtgcttgactatacattgactttaaaatatcagtgatagcaataaaaatcaataataaactcattacatgttaccataaatatttttcttttaaaaaactatattttccgaaactagaaaaaaattagaagagtggcactgcttaatattttgcaaatgtctggcttaatagaaagcacctggattctcatgtcttctgtgttcagtgttttaagataccacacatcatgtagcttctggaaaatggcaccgtatgagtgtaaaagaatgagagtgaaaaggaaagtaacattttagtatatgagaatggttttgatcttgcagacctcctgaaaaaggcttacaggccccatgt

SEQ ID NO: 605834 - DNA, 613 bp, Homo sapiens
gaaaatgttctaagctacttacagatagaccttaagtgcttagcaagacacaaatagaatacataaaaagaaagatgcttttccccaatctgactttaaaagaaaaagcacttcggagtatatataaaaggaatttccctttctaattggaaaaaactcaatgaagttatgaggaattttgaagttgatagactgttcatgcaaaggtaattcatttgaattacctttattttcaacaggttgagggaacttgaaatttgttaatgataatacaggtgagaacattccaactagcaacagtttccttgtttgaaaccactctttggtgcagggttttcatgcacagcatgcaaatgcatgttgtgttcataaatccaatcacaaatgatggttttasgaccaaactgtatttcttccaaacaaagtggcagtaatatttttaaaaatctgcaagccctttgagagtcttcaaaaagaatttcatcatcttttctcattgaagtgaagatatttataactgagaggatgctgtattgccactatggggaagaattgtattcctcacctaaaatatagccaccaatagtgtacatgttttgcatttagcattcaa

SEQ ID NO: 605835 - DNA, 587 bp, Homo sapiens
gtttatactactagaaactacttctaaatgggaaaacatgggacaatttctactgttatgaatgagggaacattccattgtattattgttataaactgtaaactggagggccacttaaaattatgtaaaatatttatatgttttaakaatttgttggaggggaaagtgataaactaaaattagagttaatataaaattaggacatcctcaatgacagctcatgttgaggagatgggtaccctaattattcaaaggtatctcaactctcgtatatcaaagagttgaaagggtgagcttagcttgtataatatttttaatttaaaaagaatggaaacaagtattattaaagggaagcactggaacactgggaaaaattataaaatagtaatatggaaaggatttgcatatataaatatatatctgtgtatatcaaatatataaaacatggacacactgaaagggtaaaagagtaaagattcaaggtattagggtttttttttattttttcgaggtaaggaagaacctcctaaatacaaatgagccttattagccgtctacccggttgaaatttagagtttcattgcccc

SEQ ID NO: 605836 - DNA, 598 bp, Homo sapiens
gtgaacacacttaggcacaactttgggacaaacattaaactaaagggatatggttggggtcagatagggrccacattcttattttctaaaagtatcaggtgaaagaatgaaaatatcaatttttaaatcattatgagtcataaatctccatatcaaacagataaacacaagaaaaattctgttgcaaaatctctcttatgttgtaaagcattcatcacttcctgatagaagatgttgctgattttggcctccttcatgaaagccttccttcattgaaaatgagataaccaatccttctttgcattattaccctgtatcaacaggaagtctttctgtcagaatcctgctgtttctcacctaaaacattgttttactatttccattattgtattcaccaaacttgtagattctgtggtgagaatgtttaaatcaattctatcttggattataaactacacagcaagaaaagagcctggcaaagataattttattgaaaagtgttaatacacttttcaataaagaaatatatttatttaaaaatgtacgtgcaagaaagaaatattttttatttaaaaatgtacctgtaaatatcattgtt

SEQ ID NO: 605837 - DNA, 654 bp, Homo sapiens
gtttctcacctaaaacattgttttactatttccattattgtattcaccaaacttgtagattctgtggtgagaatgtttaaatcaattctatcttggattataaactacacagcaagaaaagagcctggcaaagataattttattgaaaagtgttaatacacttttcaataaagaaatatatttatttaaaaatgtacgtgcaagaaagaaatattttttatttaaaaatgtacctgtaaatatcattgtttaggaagcctgcrtatacttcaccacaacgttaaacatgtttatccttccatatatgcaagaaagtctttgatttacatcacaattttatttttatagtacatatagataactttgcttctctttctaatgtatatattttttgcctagaacttttagaagaaacttaaattgtaagttgtgtttttacttcaaatgtgtttttacttcaaagattatttaaaatgcattctgaccatgacgcacaagaacatagaggaagtctctcacagaggaacttctttacttctccaacgatgtgtctgctcatattttcatgggtagattagctaggcataatttgataataaattttggtaaagatgaagtctttcttccatttttctctccgtctctctgtatctg

SEQ ID NO: 605838 - DNA, 654 bp, Homo sapiens
gtttctcacctaaaacattgttttactatttccattattgtattcaccaaacttgtagattctgtggtgagaatgtttaaatcaattctatcttggattataaactacacagcaagaaaagagcctggcaaagataattttattgaaaagtgttaatacacttttcaataaagaaatatatttatttaaaaatgtacgtgcaagaaagaaatattttttatttaaaaatgtacctgtaaatatcattgtttaggaagcctgcatatacttcaccacaacgttaaacatgtttatccttccatatatgcaagaaagtctttgatttacatcacaattttatttttatagtacatatagataactttgcttctctttctaatgtatatattttttgcctagaacttttagaagaaacttaaattgtaagttgtgtttttacttcaaatgtgtttttacttcaaagattatttaaaatgcattctgaccatgacgcacaagracatagaggaagtctctcacagaggaacttctttacttctccaacgatgtgtctgctcatattttcatgggtagattagctaggcataatttgataataaattttggtaaagatgaagtctttcttccatttttctctccgtctctctgtatctg

SEQ ID NO: 605839 - DNA, 457 bp, Homo sapiens
tattctggccctttcctttcatatttctggctcccatttgttatcccacatctaaaatggtgacagacagtgattacacatttgtcacgagatcagaaattcttaaaagatttcccagaaatcctcatgatagctgcttgaaactgcattatactccctggcaccagatggagttattatgaggattcttttcttaaagagtccatctgcacgatgactttttatggattgttcaaatatactttgatttccttgattaaaattataaaatgtgggtgcttaaacttgagaaatatttttatattctatggtcttgtcattgtcatgcattctgcttagtgataaacctttgatggccatgatcaaatctaaaaatgtaaracttttaggcaggggcatttaggatacttagaaaatcgttataggattccttacatgaggtacaggtacattccaa

SEQ ID NO: 605840 - DNA, 505 bp, Homo sapiens
agtatagataggaacaaattgtttggcccgcatgaacaatctcatkgtttgtacttgataatcttggatcacaactgaaattaatgtgacaagtattcttttttctaatatgaaataattcttcagaaaaaaaatactagatagccatacttacatctcatatcaatttcatgttataccagtttacttggatgaaatattttttaaaatcccccttcctagttcccagtatggataggtttaccgcttctctctactgtgtgtcatggagtgttaatgtttctacaaaaggcaaaaatattaaaatttcatagtcgataaatggatttccaaactatataacctgtattgttaccctacatcttttttctttgagatggggagtctcgctctgttgctaggctagagtgcagaggcacgatctttgctcattgcaacctccgcctcccgggttcaagtgattctcctgcctcagcctcctgagtagctgggacaataggcatgc

SEQ ID NO: 605841 - DNA, 612 bp, Homo sapiens
caatctcattgtttgtacttgataatcttggatcacaactgaaattaatgtgacaagtattcttttttctaatatgaaataattcttcagaaaaaaaatactagatagccatacttacatctcatatcaatttcatgttataccagtttacttggatgaaatattttttaaaatcccccttcctagttcccagtatggataggtttaccgcttctctctactgtgtgtcatggagtgttaatgtttctacaaaaggcaaaaatattaaaatttcatagtcgataaatggatttccaaactatataacctgtattgttaccctacatcttttttctttgagatgrggagtctcgctctgttgctaggctagagtgcagaggcacgatctttgctcattgcaacctccgcctcccgggttcaagtgattctcctgcctcagcctcctgagtagctgggacaataggcatgcgccacccacgcccagctaatttttgtatttttagtagagactaggtttcaccgtgtgggccaggatgtctcgatctcttgacctcgggatctgcccacctcggcctcccaaagtgctgggattacaggcatgaaccaccacac

SEQ ID NO: 605842 - DNA, 452 bp, Homo sapiens
actgaaaagttctgccttacaggccaaaggtcttgtgtgtttgcatgtggaaaaagatgagcttgatgaactactaccaataatgatagttaagcttggtacaacagggcyttgatcatttcatcttaaaagaaactgtataataagttgcagcaagggaaagaaaaggaagtatgagatgttccacagagttcctctgtcttgttttctgtctggatatatgacaacaatatttctattgaataatcttttaatcataattggatgttatggttgtcttccatgcaagctgcagatgactgcccctccacaaacagtcatcaaattatgccacttgaatgccccaaaatggagagatgggcgtgggaagagaaagacacctcagcaacacagagctgagaaaacactgtgagttttatttaattcctacttaccgttattttgcatagtaa

SEQ ID NO: 605843 - DNA, 452 bp, Homo sapiens
actgaaaagttctgccttacaggccaaaggtcttgtgtgtttgcatgtggaaaaagatgagcttgatgaactactaccaataatgatagttaagcttggtacaacagggccttgatcatttcatcttaaaagaaactgtataataagttgcagcaagggaaagaaaaggaagtatgagatgttccacagagttcctctgtcttgttttctgtctggatatatgacaacaatatttctattgaataatcttttaatcataattggatgttatggttgtcttccatgcaagctgcagatgactgcccctccacaaacagtcatcaaattatgccacttgaatgccccaaaatggagagatgggcgtgggaagagaaagacacctcagcaacacagagctgagaaaacactgtgagttttatttaattcctacttacsgttattttgcatagtaa

SEQ ID NO: 605844 - DNA, 607 bp, Homo sapiens
tcaactcctacaaagtgttaggatgacaggtgtgagccaccaggcccagctctgatctactttctgtctctatggatttgcctgttctggacattttatataaatgagctcatacaatatgtgccttttgcgtctggtttctttcacttgcccaatgttttcaaagttcgtctgtgttgtagcatgtattcatacttcatttattttatgtccaaataatattccaattgtatgaatataacacatgttgcatatccattcattagttagcagatattttagttgtttccacyctttggctattgtaagtgtgctgctatgaacatttatatagaagtttttgtatctacatatgttttcatctctttggggttacctaggagtggacctgcagggtcatatggttattctatgtctgactttttgaggaactgtcaagctgttttgcacagtggctgaaccattctacattcccatcaatgacagcattcaagggatctgatttccccacaaccttaccaacattatttcccattatcattatcattactattattgtcaacctagtgaaagtcaagtggtatcttgtgcttttgatttgcatttc

SEQ ID NO: 605845 - DNA, 607 bp, Homo sapiens
tcaactcctacaaagtgttaggatgacaggtgtgagccaccaggcccagctctgatctactttctgtctctatggatttgcctgttctggacattttatataaatgagctcatacaatatgtgccttttgcgtctggtttctttcacttgcccaatgttttcaaagttcgtctgtgttgtagcatgtattcatacttcatttattttatgtccaaataatattccaattgtatgaatataacacatgttgcatatccattcattagttagcagatattttagttgtttccactctttggctattgtaagtgtgctgctatgaacatttatatagaagtttttgtatctrcatatgttttcatctctttggggttacctaggagtggacctgcagggtcatatggttattctatgtctgactttttgaggaactgtcaagctgttttgcacagtggctgaaccattctacattcccatcaatgacagcattcaagggatctgatttccccacaaccttaccaacattatttcccattatcattatcattactattattgtcaacctagtgaaagtcaagtggtatcttgtgcttttgatttgcatttc

SEQ ID NO: 605846 - DNA, 607 bp, Homo sapiens
tcaactcctacaaagtgttaggatgacaggtgtgagccaccaggcccagctctgatctactttctgtctctatggatttgcctgttctggacattttatataaatgagctcatacaatatgtgccttttgcgtctggtttctttcacttgcccaatgttttcaaagttcgtctgtgttgtagcatgtattcatacttcatttattttatgtccaaataatattccaattgtatgaatataacacatgttgcatatccattcattagttagcagatattttagttgtttccactctttggctattgtaagtgtgctgctatgaacatttatatagaagtttttgtatctacatatgttttcatctctttggggttacctaggagtggacctgcagggtcatatggttattctatgtctgactttttgaggaactgtcaagctgttttgcacagtggctgaaccattctacattcccatcaatgayagcattcaagggatctgatttccccacaaccttaccaacattatttcccattatcattatcattactattattgtcaacctagtgaaagtcaagtggtatcttgtgcttttgatttgcatttc

SEQ ID NO: 605847 - DNA, 596 bp, Homo sapiens
acttacaggctaaagtaatgtaaggctgaaatgtgacagctgactttccaaggtggtggacatactctacaagtggtttggctgtaggagagagtcctaacattttcttsagtttctaagtaatgtgctaggcactttagttgtgttctcttatcccatctaataaattaaggtatttctgtctttaatctacagatcaggaagacttaaacacatgttcctcatgtttttagccagcaaattcattggtccaaattctctacaattttcactgtggtatagtgagtagtacacagtgctttctcttctgtttgttggaaggatctgcttaattacacctacccatatactccctgtgtattattgaaattattggtaatgaaagtgtctgcaatatgtggcagacaatttagcagacatttattgagtgattatcaaggcattgcccagatgttgtaagagagacagagatgaatatgacacaatccctcccttaacattatcattctttaaggtgatagagaagaatttccctccttgaagatcatacaaaaattattctctcttttgcaaggaaagcgcatatgaaggcaaat

SEQ ID NO: 605848 - DNA, 587 bp, Homo sapiens
ctgcttttgctttttgtggtgcttccagttgcctggcctggccctcaaggatttacatgttagagacagatccttcaagcccattctctaggctctttggtatgacccaggaatgctcataaaactatcagcaagtactgtaagtttggagtttttcatgttccttccttccttccccttcactaagcattagtaattcgttactacaatgttgtttgaacctcactgaatagaatggatgggctgatgtgtcattcagcctaattccagcactcgttttttaaamatctatatatggaacactgattttaatctcgggatgtttctaatatagcttcctttcaagtgtttcactgagaaataaaagtagatgtgtaaaggtcatggaagaatctaaaattaacacagggtggcacatttgagccaactgatgggaaaacagaacgtgagatttagaaaaaattggggtgtgtgtgggaactgaaacacaagctgtaattctgtggttaggattcttgctcctgtcatggatttgtctcatacaggacacatttctcaaggtacactcagaaggatttcaatggaaa

SEQ ID NO: 605849 - DNA, 590 bp, Homo sapiens
tccctgtgccagacaatagcagatttttaagtgtattctttactaattcaacaggaaaaagccactaggtctgagatccactgagacttgcctagctgacaggcttgttagctattgccaagcttcagtgggggttaggggagtataaaatgaatagtgcgctgatgaggtcaaggaatcttgatagattgtgtgtgtttgcatatccccctcaactcaggctttgctcttgcagacagagggaaatacatgatatttcacaaaatagaaacattcagttttagctctaagtcttgcactagcttttgcttactgggatcccactttatgtacatcagtgattctcaatcccygttaggtactggaatcacctgggaagattttacgagccctaggctgcactccggagatttggatataataataattggtagagtattctaataggcagccaggactgtgaaccaccaatgtggaccagtttgatgttcaagtggacagtgccatctctaccattaggaatgagtactcattatgttggaactggtagcttgagtagtctctgtgtgtatctccatgaagacatagct

SEQ ID NO: 605850 - DNA, 542 bp, Homo sapiens
ttctgttcccatagatttgtctcatggatattttatataaatagaatacataatttgtagtcttttrtgactaatttctttcactcagcataatatttttgaggttctttcatgtatcatgcatgtatcagcacttgatttctttctatttctgagtaatattccattgtatggacatatcacattttagctatccatcaatcaactgatggacatttgagttgcttccaccttttgcctattatgaatagtgctacagtaaacatttgtgtacaagcttttgtgtggacacaagttttcattcacttgggtagatacctaggggtggaattgctgggtcatctggtaactctatgtttaacaatttgaggaactgccagactgctttccaaagtgggtgcactacttcacattcccaccagcagtggatgagagttccagttgctccacatccttgccaacacttgtaattatgtcttttttattatagccattttagtgggtatgcagtgaatctcattgtggttttgattggtatttcc

SEQ ID NO: 605851 - DNA, 621 bp, Homo sapiens
ttaaaacaaaattataaatttacagttatactaagacaggaacattgggcacagtagaagtgtgagtaggacctatattatatcagtaataagcatagtcttagacatgaaccactaaggataatagggatagtaataatgataatcttatacatgaatcattctgtaaatgcccattgttrttatttctggggtctctaaggagagccaataaatagcatacattttccctttccaaattctgaaaaaaagaaaaaagggaatctggtggaggccaaaatcactgtaataaataataaaaacaaaattagagtggagagcttaatgtgagcaaaaaaaaaaaaaaaaaaaaaagcccttcacacaaaaagaacctgctcaggttaagatttactggacagatgattaatggatactcactcctggtttaaccttatcacaaacttaccaaagataagccacccttttacactggagtagagtaagtaaaaagatgggaagaaaaacaatgttgcaccagttcagtcccttcagcaggaaacatgagaagagagacgtgtccccaccactgatacggctactagtactgtacttttgaaagtaattcatctctttatttga

SEQ ID NO: 605852 - DNA, 621 bp, Homo sapiens
ttaaaacaaaattataaatttacagttatactaagacaggaacattgggcacagtagaagtgtgagtaggacctatattatatcagtaataagcatagtcttagacatgaaccactaaggataatagggatagtaataatgataatcttatacatgaatcattctgtaaatgcccattgttgttatttctggggtctctaaggagagccaataaatagcatacattttccctttccaaattctgaaaaaaagaaaaaagggaatctggtggaggccaaaatcactgtaataaataataaaaacaaaattagagtggagagcttaatgtgagcaaaaaaaaaaaaaaaaaaaaaagcccttcacacaaaaagaacctgctcaggttaagatttactggacagatgattartggatactcactcctggtttaaccttatcacaaacttaccaaagataagccacccttttacactggagtagagtaagtaaaaagatgggaagaaaaacaatgttgcaccagttcagtcccttcagcaggaaacatgagaagagagacgtgtccccaccactgatacggctactagtactgtacttttgaaagtaattcatctctttatttga

SEQ ID NO: 605853 - DNA, 547 bp, Homo sapiens
aataaaactacagaccaatattgctcatgaacatgtatgcaaaaaacctcaacagatatagagttgaattcagcaatagagagaggttaaaatactgttgcaggaaacgagagaccagatgggtggaaaaggaggattttatttaggtggccactggctcagcagattaatatccagaggctgagcaattaacgaagagagggcttgacttttattcatgcaactgaaggggggtggcttgccactggcacgaaacttgtagggyggggaaagcaagcttacagaagcagaacaaaggcagttaatcaaactgtgaagggttcctaactcaggcttacgtatgactcttgctatgcaggccaggtggctgctatctaggtttgctcaagatgcctacacagccttatcttgtgtccttcactaggtgcccagatggctgcaatctaagcttgctcaagcatgtctcatgacctccgctgtgctactcagataaaaaacagacttacagacactagttacagaaaacaggaaaccataaactcataaa

SEQ ID NO: 605854 - DNA, 627 bp, Homo sapiens
ataaatcttttgccttttacagaagtcaaaattcatgagaaaaagtcttagcagctggggatagaaggcaacttccttaacctgataaaggaaatctaaaattaactgcaaatattatatttaatgctgtaagactaaatgttttctttctaagactggaaataaagcaaggatatctaccctcaacccttctagtcatcatcatactgraagtcctcatcagcacattaaggtaagaaaaagaaataaaatcatgtatattaaagaggaaacaataagcatcttttttacataagaaatgattgtccaggtcaaaaattcaaaagaaattttttaaacttcaaaagtgaatgagtatgtttatcaatatcataggctataagatcagtatcctaaagtatctaagctaaaaatcataaacacagaaaaaagaatcaaagatctaagtaaatgaaaatatatataattatcattgattagaaatctcaatattgttgagatgtcaaatgttcccaaactgatctgtagattcaatacaatctcaaccaatatcctagtagatttctctgtagatatatacaaggtgattataaaatatatggacaattaaagaaactaaaatacaaa

SEQ ID NO: 605855 - DNA, 588 bp, Homo sapiens
taaaaaattaaaacatcttatgctgtgaacaactctgttaagagcagagaaaaacatgccataggttagtaggaaaatacatttatgtccaatacctgacaaagcacttgtatccagaatatgtaaagagctctcaaaactcaataataagaaaacaatacatattttttaaatgggcaaaatattaaaaagccrcttcagaaaggaagatatgtgaaagtcaaaaaataaatacaaagatgatcaatgtcattagtcatgagaaaaataaaaatgaaaatcacaagatatcactatacacacattagaatgcctaaaattaacagctaaaacattatgataccaaatttttgtgcagataaagtgtggtaaactctcagacattgctggtatgaatgcaaaatgaaacatccactttgtaaagcagtttggacatttcttttgaggttagacaagaaagttcagaatttagtgtctaattaaatggtgaaagaaaaaaaggaaaagtaagaaagtaaagactcaaagacatttcagtcacaagttgctattaagatataacaataatacaggagtttttaaaacatt

SEQ ID NO: 605856 - DNA, 525 bp, Homo sapiens
agatataacaataatacaggagtttttaaaacattacttttaggcagctagaaagagtaaaagagttctgggtggaattttcctttaataaaaagcagccccaaatcatttcttctctaacagaaagcagcctggagagtcaggcataaatatgcaaactagaagcttttatatgtaaatgtcagcagctgtacctggaagctaggtatattcaaaatggtgttttccactctcttttccttgtcaccacatgtgctagtattatggcacccaccaagtaaaaccacgtgttcaggcatcatggtgactgccaggtagaggtcgaatttgcataataataacaaagactagtgtgggaaggccagtctttacacrggatatgtaaatggtacacctggtcaaaccaatcccctgggccctatgtaaattaatcaccacctcctcaagcatctgtacaaaatcgattgccttccacccaaaccagagaccttctcttgggagacccacttctcagcctgaggaagc

SEQ ID NO: 605857 - DNA, 543 bp, Homo sapiens
acacaagtactgtagcatattaattgagcatcattcgaagcaccagagattagaatgccactagacataatgctatgtggattcaaaagcagtaatggtgaaaacagtttgaactccctacgtctactagaagagayagcaaacgagtagctgttctttagaaaactagttttattattaatgttttatgggttttccagtgaagaccagagaacttgctagacaaattctaaaagagctgtaacactggataacttgttttgatggaggcatgtgggagagaacgattgattgatttggaaagaaaattcacatactggatgatcaagtcatatgaagcttatatgttttaaatgatgtttgagtctctagtgtgactaatgaggagccctagaggatattttccaccattcactggctcagtgcatgtctgtcaccacagcttaagtgaatccaaacaaaccgatgagccactatatcataatcatggaagcccatttcatggcaactcacagacttcattctaaaacgtgcagcaagatc

SEQ ID NO: 605858 - DNA, 543 bp, Homo sapiens
acacaagtactgtagcatattaattgagcatcattcgaagcaccagagattagaatgccactagacataatgctatgtggattcaaaagcagtaatggtgaaaacagtttgaactccctacgtctactagaagagatagcaaacgagtagctgttctttagaaaactagttttattattaatgttttatgggttttccagtgaagaccagagaacttgctagacaaattctaaaagagctgtaacactggataacttgttttgatggaggcatgtgggagagaacgattgattgatttggaaagaaaattcacatactggatgatcaartcatatgaagcttatatgttttaaatgatgtttgagtctctagtgtgactaatgaggagccctagaggatattttccaccattcactggctcagtgcatgtctgtcaccacagcttaagtgaatccaaacaaaccgatgagccactatatcataatcatggaagcccatttcatggcaactcacagacttcattctaaaacgtgcagcaagatc

SEQ ID NO: 605859 - DNA, 456 bp, Homo sapiens
gactttcactttcaacatctaagagtaagttcaccctccgaggataggtctggttggctttcatcaggatcagatgtattacttaggaagccacacataccaaggaattccaagtactccacaaagagaatgcaagcgggaggaattagtgcaataactaaactacctactgaactggagcacacccasaaacttcaatttctctctctagttacatatctactgttgtaataatgttttacaccaaagaaagcttaatctctaacccagatgtttttacgccacaaacattaattttcaaatgtgcagagaatattagactcaaataccctacaggctttgttaaacctaatttaaaaccctaaaattacaacttattcagaacttaccccttcaagccttccagatatacctaataccctgtccagtggaatccgcttactgaagaattaatag

SEQ ID NO: 605860 - DNA, 430 bp, Homo sapiens
aatcttgtttaggactattagcctttctgcaagaacagttgttcaaagagttgaggactttaggagaaaaatcaaataatttttttaaagaaaaatgatttagagtgcttttcattggttgttgacaaattgagggatattactaacacagttggcctgctgtatccatgggttctacatcaatgaattcaactaacggccattgaaaatatttggaaagaacgatagaaaaatagcaggctgggcrcggtggctcacacctgtaatcccagcactttaggaggccaaagtgggtgggtcacctgaggtcaagagtttgagaccagcctgcccaacatggcaaaacccagtctgtactaaaaatacaaaaaattagccaggcatggtggcagtgcctgtaatcccagctactcaggagactgaggcagga

SEQ ID NO: 605861 - DNA, 430 bp, Homo sapiens
aatcttgtttaggactattagcctttctgcaagaacagttgttcaaagagttgaggactttaggagaaaaatcaaataatttttttaaagaaaaatgatttagagtgcttttcattggttgttgacaaattgagggatattactaacacagttggcctgctgtatccatgggttctacatcaatgaattcaactaacggccattgaaaatatttggaaagaacgatagaaaaatagcaggctgggcacrgtggctcacacctgtaatcccagcactttaggaggccaaagtgggtgggtcacctgaggtcaagagtttgagaccagcctgcccaacatggcaaaacccagtctgtactaaaaatacaaaaaattagccaggcatggtggcagtgcctgtaatcccagctactcaggagactgaggcagga

SEQ ID NO: 605862 - DNA, 564 bp, Homo sapiens
agaatcacaacctctgaaagataagcaggaaccagccaagaactccagcaacatgaagaaacagaatgttgtgacacacccccaaaagaaccacactaactccctagcaatggattctaaccaaaatgaaacattttaaatgacaggcatagaattcaaaacatagattataaggaagctcaatgacatccaagggaaagttgaaaaccaacataaaccagaaaaacaattcttgggttgtttttcacacatatctttaaaaacatatcaacaacagagagaacttctggaaataaaaagttcatggacacaatttcaaaatgcaattgaaagctttaacaagagactagaccaagcagaagaaataatttaagaccttgaagaccaatcttttgaataaacccagtcagaaaagataaaggaaaaagaatttttaaaaatgacaaagcttttragaaacacaacattttataaggcaaccaaacttgtgattcatagccattcctgaaggagaaaaagaaaaagtaagaagtttagaaaataattacttaagaaaataattca

SEQ ID NO: 605863 - DNA, 553 bp, Homo sapiens
tatggaacaataacaacaaaaagcctgaatagccaaggcaatcctaagcagaaagaacaaatccagaggcatcacactgcctgatgtcaaattatcctacaaggctatagtaactaaaacagcatggtactggcagaaaagtagacacatagatcaatggaacaaagtagagaaaccataaataaaacaaaatacttgcaaacaactgatcttcaacaaaagtgacaaaaataaacaatggaggaaagacactggattccataaatggtgcttggaaaattggttggtcaagtgcagaagaatgaaactggacccctatctctcaccatatacaaaattatctcaagatggataaaagacttaaatgtaacacctgaaactataaaacttctgracaaaactctaggaaaaactcttctggacattagcctaggcaaagaatttataatgaaggacccagaagcaaaggcaacaacaacaacaaaaatacaaatgggacttaattaaactaaaaagctttcatgctgcaaaagaaataatcaacagagtgaac

SEQ ID NO: 605864 - DNA, 603 bp, Homo sapiens
cctgaaactataaaacttctggacaaaactctaggaaaaactcttctggacattagcctaggcaaagaatttataatgaaggacccagaagcaaaggcaacaacaacaacaaaaatacaaatgggacttaattaaactaaaaagctttcatgctgcaaaagaaataatcaacagagtgaaccaacaacatatagaacaggagaaaatacatgcaaattatgcctccagcaaaggactaatatccagtatctataaggaactcaaacaactcaacaagaaaaagcaaacaaccaaactaaaaactaggcaaaagacatgaacaggcatttctcaaaagaagaaatacaagtggccaagaaacacatgcaaaaaggttcaacatcactaatyatcaggaaaatgcaagttaaaaccactctgagatatcttacaccagtcaaaacgttcattaaaaaaagaagtaaaacacacacacacgtgcacaacagatgacaaggatgagaagaaaaaggaattccactgttggtgggaatgtaaattagttcagcctctagggaaaacaacatgtagatatctgaaataactacgaatggaactacattc

SEQ ID NO: 605865 - DNA, 552 bp, Homo sapiens
gagtttaaaagttacctatcaagtacaatagtcattatttgggtgatggatacactagaaacacaaacctcacccttatgctatatatctatgtaacaaacctgcaaaacaccccctgaatcccaaagtaattttttaargtaacaatacaataataaaaaataacacaaataaacaatttagtatagaatatatttagaaactttaaaataaactaaaaaataacacagataaaaattattatggaatatatttagaaactttaacacggcatttacattgtgttaggtattataagtaatctagagatgatttaaagtatatggaaggtggttcagtgaaatggcttatacctgtaatcccagcactttgggaggccaaagggaggatcatttgagatctggaatttgagaccagcctgggcaagactccatctctacaaaaaaaaaattaaaaattagccaggctggtatacatacctgtagttccatctacttgagaggctggggtgagaggattgcttttgcccatgagtttgaggttgcagtaagc

SEQ ID NO: 605866 - DNA, 632 bp, Homo sapiens
aaatccattctcatacaaagttgtagtgggtatattttacaagatcaaactacagttccagcagtgtcttgggaacctctatataaatgcaaaggaaatatctgtatttcagaatccacttgactgagcaattgcagaccttccacttaaccttcgattagaaatgataaatctgcaataaaatgacatgctaaatggtaaatatcaagagaaaaatctaatagaaatatataactgcctctcaagcattgaatatgctcagttaaaatcatatgctcatagatttatatcagtatttggcagtaactatttgtataaaaagacattttcaaagatgaaatacaccaactcttattacatattatcatgaacagatgaatatttttaatcaattttgaaatatgaaccactaattttgaayatcaaataagtgaaataatatgtgccccccaaaataaaaaaaaaattcactttttcttattcaattacattacaaaatatgtactcagttatattattttttaatttcatcaataaaaatggacatttgttttctctcttgttacattagttatttaatatccttagattatctaatattcttgatttagtctcctggcctacaaaacttt

SEQ ID NO: 605867 - DNA, 632 bp, Homo sapiens
aaatccattctcatacaaagttgtagtgggtatattttacaagatcaaactacagttccagcagtgtcttgggaacctctatataaatgcaaaggaaatatctgtatttcagaatccacttgactgagcaattgcagaccttccacttaaccttcgattagaaatgataaatctgcaataaaatgacatgctaaatggtaaatatcaagagaaaaatctaatagaaatatataactgcctctcaagcattgaatatgctcagttaaaatcatatgctcatagatttatatcagtatttggcagtaactatttgtataaaaagacattttcaaagatgaaatacaccaactcttattacatattatcatgaacagatgaatatttttaatcaattttgaaatatgaaccactaattttgaatatcaaataagtgaaataatatgtgccccccaaaataaaaaaaaaattcactttttcttattcaattacattacaaaatatgtactcagttatattattttttaatttcatcaataaaaatggacatttgttttctctcttgttacattagttatttaatatccttagattatctaatattcttgattkagtctcctggcctacaaaacttt

SEQ ID NO: 605868 - DNA, 586 bp, Homo sapiens
catgatggtgagtatgtctcatgagatctgatggttttataagggggagttttcctgcacaagctctctttctttgcctgctgccatcagtgtaagaygtggcttgctcctccttgccttccaccatgattgtaaggcctcccagtcacttggaactataaatccattaaaactctttcttttgtaaatttcccagtcttgggtatgtctttaccagcggtgtgaagatggactaatatagatgtatatgaaagggagtttattaaggagtattgactcacacaatcacagggtgaagttccacaaaatgccatctgcaagctgaggagcaaggaagccaattcaagtcccaaaacctcaaaagtaggaaagctaacagtgcagccttcagtctgtgactgaaggcccaggagcccctgcaaaccactggtgtaggtacaagattccaaaagctaaagaacttggagtctgatgttagaggacaggaagcatcaattatgggagaaagatggaggccagaagacttagccagtctagtcctttcacgtttctctgcctgcttttattctagccacactggcagctg

SEQ ID NO: 605869 - DNA, 570 bp, Homo sapiens
aaggagtattgactcacacaatcacagggtgaagttccacaaaatgccatctgcaagctgaggagcaaggaagccaattcaagtcccaaaacctcaaaagtaggaaagctaacagtgcagccttcagtctgtgactgaaggcccaggagcccctgcaaacyactggtgtaggtacaagattccaaaagctaaagaacttggagtctgatgttagaggacaggaagcatcaattatgggagaaagatggaggccagaagacttagccagtctagtcctttcacgtttctctgcctgcttttattctagccacactggcagctgattagatggtgcccacccagattaagggtgggtctgcttctcccagtcccttgattcaaatgttaatctcttctagcaacacccttagggacacacaatacattgcatccttcagtccaatcaagttgacactcaatattaaccatcgcagttccagcacgttattaacattccaaccagaaattagcacaaatgctactatgtcaagtttgtagccagtcttcttaatataagtgctgacttcctta

SEQ ID NO: 605870 - DNA, 558 bp, Homo sapiens
ttattaaggagtattgactcacacaatcacagggtgaagttccacaaaatgccatctgcaagctgaggagcaaggaagccaattcaagtcccaaaacctcaaaagtaggaaagctaacagtgcagccttcagtctgtgactgaaggcccaggagcccctgcaaaccactggtgtaggtacaagattccaaaagctaaagaacttggagtctgatgttagaggacaggaagcatcaattatgggagaaagatggaggccagaagacttagccagtctagtcctttcacgtttctctgcctgcttttattctagccacactggcagctgattagatggtgcccacccagattaagggtgggtctgcttctcccagtcccttgattcaaatgttaatctcttytagcaacacccttagggacacacaatacattgcatccttcagtccaatcaagttgacactcaatattaaccatcgcagttccagcacgttattaacattccaaccagaaattagcacaaatgctactatgtcaagtttgtagccagtcttcttaatat

SEQ ID NO: 605871 - DNA, 596 bp, Homo sapiens
taggggtggttttagcagcatgtgttctggaggcaaacatgttgtggaaaagctactatctaattcttcatagaaaaagtttgccaacttttaaactgaattataaarttatcaattcccaacatatcatgcatagaatttacttgtaacccctttttcacatgttttatcaactcatcttgctatgttctcctcaccagtgaactataacatgatatcatccatgtaattgataaacatgatcctcagaagtatggcaaaatgattacattccttagacagtacaattagcagaggtggaaagttgctataaccctaaggcaggatgaagaaagcatactgctgtactaataaagtaaaagtaaaatgtttattaactcagagaaaaaattcacatgaagtcacatagacaccatcagctatatttactttgttttccaaatataccacatgtgaaagagcatctgcaattgtagccatctcctgataaagtgtattttaatctactgtcctacaagattttcctatcttctgtacaggtcaaattgtcaatttaagtgggtatataaaaatattatttttacatgcatctttta

SEQ ID NO: 605872 - DNA, 540 bp, Homo sapiens
tgatatcatccatgtaattgataaacatgatcctcagaagtatggcaaaatgattacattccttagacagtacaattagcagaggtggaaagttgctataaccctaaggcaggatgaagaaagcatactgctgtactaataaagtaaaagtaaaatgtttattaactcagagaaaaaattcacatgaagtcacatagacaccatcagctatatttactttgttttccaaatataccacatgtgaaagagcatctgcaattgtagccatctcctgataaagtgtattttaatctactgtcctacaagattttcctatcttctgtacaggtcaaattgtcaatttaagtgggtatataaaaatattatttttacatgcatcttttaagacgttgatgktgccactaatctctctggttccctccagggaacagatattgactttgatgtactttttgagtaaaaatagaatattctaggagctggccatttttttactgtaagagcctttactagttcaagaggcaatgtggtgatgctgtt

SEQ ID NO: 605873 - DNA, 592 bp, Homo sapiens
attgcaccacaagctttccagatttgggctgatataagtttttaaagttttrcaaagtttttaatgtgtaaccctttcctctgaggtttaaatttacaattgtagggcattctgactctagttatagaagaggacagtgagaggtgacagggatcagaaatgagaatttgcatttgcctgcaagataataagctcatgaatttagtgcagagtcttttgaaaccagtgaaaccaggtcatgaaaccaatgaagagggatcgattctattgatatgaaaagttctgggaaattttggagtttgaggaactgagatatacgtgaagcctccaaaatgccgtattccatatcataatattctattttttccaaataaatcctaactttcagaagaaacacactgagactgtaaacctggtctatgttaaaattccagaaataaaaaaatcagattctaagcctgagaaatatctacataaacccagtggctataagaaattattttaggaatagtcatagaaaatctctggtgccttgagtatagaatttaaagctctgattctatcatttacactccaatagaggtttctggaa

SEQ ID NO: 605874 - DNA, 592 bp, Homo sapiens
attgcaccacaagctttccagatttgggctgatataagtttttaaagttttacaaagtttttaatgtgtaaccctttcctctgaggtttaaatttacaattgtagggcattctgactctagttatagaagaggacagtgagaggtgacagggatcagaaatgagaatttgcatytgcctgcaagataataagctcatgaatttagtgcagagtcttttgaaaccagtgaaaccaggtcatgaaaccaatgaagagggatcgattctattgatatgaaaagttctgggaaattttggagtttgaggaactgagatatacgtgaagcctccaaaatgccgtattccatatcataatattctattttttccaaataaatcctaactttcagaagaaacacactgagactgtaaacctggtctatgttaaaattccagaaataaaaaaatcagattctaagcctgagaaatatctacataaacccagtggctataagaaattattttaggaatagtcatagaaaatctctggtgccttgagtatagaatttaaagctctgattctatcatttacactccaatagaggtttctggaa

SEQ ID NO: 605875 - DNA, 592 bp, Homo sapiens
attgcaccacaagctttccagatttgggctgatataagtttttaaagttttacaaagtttttaatgtgtaaccctttcctctgaggtttaaatttacaattgtagggcattctgactctagttatagaagaggacagtgagaggtgacagggatcagaaatgagaatttgcatttgcctgcaagataataagctcatgaatttagtgcagagtcttttgaaaccagtgaaaccaggtcatgaaaccaatgaagagggatcgattctattgatatgaaaagttctgggaaattttggagtttgaggaactgagatatacgtgaagcctccaaaatgccgtattccatatcataatattctattttttccaaataaatcctaactttcagaagaaacacactgagactgtaaacctggtctatgttaaaattccagaaataaaaaaatcagattctaarcctgagaaatatctacataaacccagtggctataagaaattattttaggaatagtcatagaaaatctctggtgccttgagtatagaatttaaagctctgattctatcatttacactccaatagaggtttctggaa

SEQ ID NO: 605876 - DNA, 537 bp, Homo sapiens
gttaacctgctcctcactgccttcttatctaactagatcaaataataaatctcttatcacaaacttgaggtctgttgcttgtaatgtcttttggtatcaagtactttattgactcactgtaacagaaaacgctctggctattttaaacaacaaagagttttgtaccaggaatagggtgttttcaaaattattggtagaattaaagaacttctctatggtgtacttccagaaatacttccaggaccatactgtaaaaccagcccaccaaggggactcctatttycaccacaatcaggcatcctttgttccagcttctgaattcaagatcccacaattttgctataactgaaggtcagaaaactacccccacaatcatttattcaatgaatatttatgaaatccctactaggaagagcctctactgtgggggttgcttggtagacagaaagcagaagaagatatgagattatggtatgaaaggcacccaaaaagaatgcgagagtactaagttaggacagaaaggggttagagaaacac

SEQ ID NO: 605877 - DNA, 537 bp, Homo sapiens
gttaacctgctcctcactgccttcttatctaactagatcaaataataaatctcttatcacaaacttgaggtctgttgcttgtaatgtcttttggtatcaagtactttattgactcactgtaacagaaaacgctctggctattttaaacaacaaagagttttgtaccaggaatagggtgttttcaaaattattggtagaattaaagaacttctctatggtgtacttccagaaatacttccaggaccatactgtaaaaccagcccaccaaggggactcctatttccaccacaatcaggcatcctttgttccagcttctgaattcaagatcccacaatyttgctataactgaaggtcagaaaactacccccacaatcatttattcaatgaatatttatgaaatccctactaggaagagcctctactgtgggggttgcttggtagacagaaagcagaagaagatatgagattatggtatgaaaggcacccaaaaagaatgcgagagtactaagttaggacagaaaggggttagagaaacac

SEQ ID NO: 605878 - DNA, 534 bp, Homo sapiens
ctagatcaaataataaatctcttatcacaaacttgaggtctgttgcttgtaatgtcttttggtatcaagtactttattgactcactgtaacagaaaacgctctggctattttaaacaacaaagagttttgtaccaggaatagggtgttttcaaaattattggtagaattaaagaacttctctatggtgtacttccagaaatacttccaggaccatactgtaaaaccagcccaccaaggggactcctatttccaccacaatcaggcatcctttgttccagcttctgaattcaagatcccacaattttgctataactgaaggtcagaaaactacccccamaatcatttattcaatgaatatttatgaaatccctactaggaagagcctctactgtgggggttgcttggtagacagaaagcagaagaagatatgagattatggtatgaaaggcacccaaaaagaatgcgagagtactaagttaggacagaaaggggttagagaaacactgaatacaaactttataaaatgtttgatt

SEQ ID NO: 605879 - DNA, 582 bp, Homo sapiens
atgcatgtatacacaaacattgcaccgagaagctggaattctmaaaccaaagcaaagaattaatataactgaataagtctagaaaaacaaacacggcaatcagaaagaattaaaaacccactcaacttatccaacaaggttagcaccaagggcaagggcatttttttacactgcatatctgtctgtgtgtgttaattatctcaatggctatttcaatcaattatttccttttgacaatgaagattacccccagcaaaacgtcttagttgacaagttacttggatgaccttaattacaacatctattggaccattaatgaatttaaaagatattaagggagggagaaaccaagtggtaaattttatttaattttctgggttaattttaagttccctggaaaacgtgattttctaggttatttctttttgttcaaaactttacagtgtaaaaatgctgttttcaaatattaatctttctcttcagcttaatactttgccattcaatatcctgaaatgactaaaaaaaagtctgggtgaatttagattgcttattaagcacaatgtaaatcaaaattcaactaaa

SEQ ID NO: 605880 - DNA, 582 bp, Homo sapiens
atgcatgtatacacaaacattgcaccgagaagctggaattctcaaaccaaagcaaagaattaatataactgaataagtctagaaaaacaaacacggcaatcagaaagaattaaaaacccactcaacttatccaacaaggttagcaccaagggcaagggcatttttttacactgcatatctgtctgtgtgtgttaattatctcaatggctatttcaatcaattatttccttttgacaatgaagattacccccagcaaaacgtcttagttgacaagttacttggatgaccttaattacaacatctattggaccattaatgaatttaaaagatattaagggagggmgaaaccaagtggtaaattttatttaattttctgggttaattttaagttccctggaaaacgtgattttctaggttatttctttttgttcaaaactttacagtgtaaaaatgctgttttcaaatattaatctttctcttcagcttaatactttgccattcaatatcctgaaatgactaaaaaaaagtctgggtgaatttagattgcttattaagcacaatgtaaatcaaaattcaactaaa

SEQ ID NO: 605881 - DNA, 647 bp, Homo sapiens
tgtaagtccataaaatctagcaatggtgggcatagtttgaggaagaaaggtaaaatagtagtgatgtacttagaagtgaaaatccattttgtcagaaccactattgcctacctaatatctatactccctttcatttttacagactttatacatactctcaatatgccaactaaaatcaacatttatcagcctctcttgcatctatgtggccatgtgtattagtctgttttcacactactataaagatactacctgggactgggtaacttatttaaaaaagaggtttagctgactaactgacacagttctgcatgrctagggaagcctcaggaaacttacagtcatagcagaaggtgaaggggaaccaagtcatgtcttaaatggcagcaggcacaagagagagcagaggggaagcaccaggcacttatcaaacaaccagatctcatgaaaattcactcactatcacaagaacagcatggagggaatcaccccatgatccaatcccctcccaccaggtccctacctcaacatgtggggattacaattccagatgagatttgggtggggaaacagagccaagccaaattattccaccctgaccctccaaaatctcatgttattttcacatatcaaaaccaatcatgcct

SEQ ID NO: 605882 - DNA, 640 bp, Homo sapiens
atatcttacatggcaacaggcaagaaagagagctcaggggacacaccagacacttaccaaacaaccagatctcgtgaaaactcactgactatcatgagaacaacatgagagaaaccacccccatgacccaatcccctcccaccatgtccctcccttgacacttgggggttacaattcagattacaattccagatgagmtatgggtagggacacagtgccaaaccatatcaccatgtgacacattgttgctcaatgagatataagccatattctactcagggttcctggaaacgttttgtattactaaaacaaaattttcatgctctttcttgtttcttcagttttctttatgcctgcaatgtggtctggaattgtagcaactatcataaaatcatcagaataaaagccacataccaagaggataaagctataggaagactaaaatatggatgttctcattggactgccatcttagacctggactacttgcctcaaaaaattcttacattatgcaaaaataaattcctttttgtttaatccactgtagctagaattttgtaacatcatgccaaatgataagtgataaccatccctcatgtaactcaaaaaactataacaaacaccttgaatgtggacaact

SEQ ID NO: 605883 - DNA, 601 bp, Homo sapiens
tagtactatgctctgatttttgtggaaaatcttataaaatcctttatctaataaataatgtagcctgccccttcctctgggagctctgtgctaaacacccataatggtaagctagataaagaaaatgtgctaaacatacagcatggaatactatgcagccataaaaaagaatgatggaactggaggccacttcctcagcaaactaacacaggaacagacaactaaatactgcttgctctcatttataagtgggaacaaaatgatgagaacacatgggcacattgagggaaacaacaygcactacggcctttcaaaatgtggagggtggggccgggcgtggtggctcatgcctgtaatcccagcactttgggaggccgaggcaggcggatcatgaggtcaggagatagagaccatcctggcttacacagtgaaaccccatctctactaaaaaaatacaaaaaattagccaggcatggtggcgggtgcctgtagtcccagctactcaggagactgaggaaggagaatggcgtgaacccaggaggtggggcttacagtgagccaagatcacaccactgcactccagcctgggcaacagcgcaag

SEQ ID NO: 605884 - DNA, 601 bp, Homo sapiens
tagtactatgctctgatttttgtggaaaatcttataaaatcctttatctaataaataatgtagcctgccccttcctctgggagctctgtgctaaacacccataatggtaagctagataaagaaaatgtgctaaacatacagcatggaatactatgcagccataaaaaagaatgatggaactggaggccacttcctcagcaaactaacacaggaacagacaactaaatactgcttgctctcatttataagtgggaacaaaatgatgagaacacatgggcacattgagggaaacaacacgcactacggcctttcaaaatgtggagggtggggccgggcrtggtggctcatgcctgtaatcccagcactttgggaggccgaggcaggcggatcatgaggtcaggagatagagaccatcctggcttacacagtgaaaccccatctctactaaaaaaatacaaaaaattagccaggcatggtggcgggtgcctgtagtcccagctactcaggagactgaggaaggagaatggcgtgaacccaggaggtggggcttacagtgagccaagatcacaccactgcactccagcctgggcaacagcgcaag

SEQ ID NO: 605885 - DNA, 601 bp, Homo sapiens
tagtactatgctctgatttttgtggaaaatcttataaaatcctttatctaataaataatgtagcctgccccttcctctgggagctctgtgctaaacacccataatggtaagctagataaagaaaatgtgctaaacatacagcatggaatactatgcagccataaaaaagaatgatggaactggaggccacttcctcagcaaactaacacaggaacagacaactaaatactgcttgctctcatttataagtgggaacaaaatgatgagaacacatgggcacattgagggaaacaacacgcactacggcctttcaaaatgtggagggtggggccgggcgtggtggctcaygcctgtaatcccagcactttgggaggccgaggcaggcggatcatgaggtcaggagatagagaccatcctggcttacacagtgaaaccccatctctactaaaaaaatacaaaaaattagccaggcatggtggcgggtgcctgtagtcccagctactcaggagactgaggaaggagaatggcgtgaacccaggaggtggggcttacagtgagccaagatcacaccactgcactccagcctgggcaacagcgcaag

SEQ ID NO: 605886 - DNA, 581 bp, Homo sapiens
gaggagggagaggatcaggaaaaataactcatggctactaggcttaatacctgggtgataaaataatctgtacaacaaacccccatgacacaagtttacctgtgtaacaaacctgcatctctgaacttaaaagttaaataaataaatacaatagtatawgttaatacagagtgagaatccctcccatgagctccctaaggtgcaccatgtgcaatgaacatttccaggactttatgcctggaatgtgatctggaactgtagcaaccatcataaaacaccctcatacagaaaatttttggctccaatacagagtcaaagaaagaaaggaacatccttaaaaagcatcttaaatagtggtagctgacattcctttcactctctttcataaaatccttcttcagttaattttttaatctttcttcatacacatgtgacaattgtctggatctcagaagctctgagagtctgtcctaacactaataatgcaaatgcttgtctgaagtcctgggaatgttcatcacggatgatgacagctaaaaggtaaatagctcaactttccgagtagccagatggatatttat

SEQ ID NO: 605887 - DNA, 581 bp, Homo sapiens
gaggagggagaggatcaggaaaaataactcatggctactaggcttaatacctgggtgataaaataatctgtacaacaaacccccatgacacaagtttacctgtgtaacaaacctgcatctctgaacttaaaagttaaataaataaatacaatagtataagttaatacagagtgagaatycctcccatgagctccctaaggtgcaccatgtgcaatgaacatttccaggactttatgcctggaatgtgatctggaactgtagcaaccatcataaaacaccctcatacagaaaatttttggctccaatacagagtcaaagaaagaaaggaacatccttaaaaagcatcttaaatagtggtagctgacattcctttcactctctttcataaaatccttcttcagttaattttttaatctttcttcatacacatgtgacaattgtctggatctcagaagctctgagagtctgtcctaacactaataatgcaaatgcttgtctgaagtcctgggaatgttcatcacggatgatgacagctaaaaggtaaatagctcaactttccgagtagccagatggatatttat

SEQ ID NO: 605888 - DNA, 581 bp, Homo sapiens
gaggagggagaggatcaggaaaaataactcatggctactaggcttaatacctgggtgataaaataatctgtacaacaaacccccatgacacaagtttacctgtgtaacaaacctgcatctctgaacttaaaagttaaataaataaatacaatagtataagttaatacagagtgagaatccctcccatgagctccctaaggtgcaccatgtgcaatgaacatttccaggactttatgcctggaatgtgatctggaactgtagcaaccatcataaaacaccctcatacagaaaatttttggctccaatacagagtcaaagaaagaaaggaacatccttaaaaagcatcttaaatagtggtagctgacattcctttcactctctttcataaaatccttcttcagttaattttttaatctttcttcatacacatgtgacaattgtmtggatctcagaagctctgagagtctgtcctaacactaataatgcaaatgcttgtctgaagtcctgggaatgttcatcacggatgatgacagctaaaaggtaaatagctcaactttccgagtagccagatggatatttat

SEQ ID NO: 605889 - DNA, 581 bp, Homo sapiens
gaggagggagaggatcaggaaaaataactcatggctactaggcttaatacctgggtgataaaataatctgtacaacaaacccccatgacacaagtttacctgtgtaacaaacctgcatctctgaacttaaaagttaaataaataaatacaatagtataagttaatacagagtgagaatccctcccatgagctccctaaggtgcaccatgtgcaatgaacatttccaggactttatgcctggaatgtgatctggaactgtagcaaccatcataaaacaccctcatacagaaaatttttggctccaatacagagtcaaagaaagaaaggaacatccttaaaaagcatcttaaatagtggtagctgacattcctttcactctctttcataaaatccttcttcagttaattttttaatctttcttcatacacatgtgacaattgtctggatctcagaagctctgagagtctgtcctaacactaataatgcaaatgcttgtctgaagtcctgggaatgttcatcacggatgatgacagctaaaaggtaaatagctcaactttccragtagccagatggatatttat

SEQ ID NO: 605890 - DNA, 614 bp, Homo sapiens
gcagggagccaggatgttcatctccatcaacaagtaacaagagtcccccctcatgatgtacgtggaacactggcaaccacatggggagcctaaactcccactccctcccagtagtaataaggtgccctctggcttgtctcccactggagtgctgttggaggaggcacagtgaagaagcaagactttcacaactgctcagcactagtgaagccatccccctcagtgtgctatgaatagaggctggggaacagttaaaagacactgttgcactttctagccagggtaatagcaatggaagctaagaaggaagctgaaactcccaaactcgccaagcaatcattactagccccccacctagagtgtcaatggagrtcaagtggagaacctggacttctacttcacatggcagtaagaaggcagtgcccaccccctccatccctggagcagtctcagaggaagccagctaaaagagaaggttgaactaagattcagagttttctggtataaaattaaaaatgtccaggtttctatttttgtaactataataaaatgtggtatttatacacaatggaatagtatgcatcagtttaaaatatgcctatcattagtgacag

SEQ ID NO: 605891 - DNA, 499 bp, Homo sapiens
tccttcttttcatgctgtttatttgaagatttttttaaaattttcaaactgactttttattgctatttttctggcctcagttctctatttgatgtttttaaagagttgtgtcactagatagtagttaaatacttaccaatttttctacttaatctcagaaaayctgctgccattttataataaatacaataccatgccactcatggaaggtcaatgcatgagtgtcgggtaatgtcacttgacttctttgagacaggatcccccacttactcacaccaccctcccattaaaaactaaccgtacatctggaatgttggccagctttccttaatagagaggatgtggcctaagggcctttattcacaaaattagtttgtgcctgatgctctgaattatgctgttttaataatttgctagaaacatgatcaataagaagtattcattttctgttaccctgtaggtaaattctttgccagtattaatattttctttgacagat

SEQ ID NO: 605892 - DNA, 499 bp, Homo sapiens
tccttcttttcatgctgtttatttgaagatttttttaaaattttcaaactgactttttattgctatttttctggcctcagttctctatttgatgtttttaaagagttgtgtcactagatagtagttaaatacttaccaatttttctacttaatctcagaaaacctgctgccattttataataaatacaataccatgccactcatggaaggtcaatgcatgagtgtcrggtaatgtcacttgacttctttgagacaggatcccccacttactcacaccaccctcccattaaaaactaaccgtacatctggaatgttggccagctttccttaatagagaggatgtggcctaagggcctttattcacaaaattagtttgtgcctgatgctctgaattatgctgttttaataatttgctagaaacatgatcaataagaagtattcattttctgttaccctgtaggtaaattctttgccagtattaatattttctttgacagat

SEQ ID NO: 605893 - DNA, 658 bp, Homo sapiens
atattatcaaactaaattcctataacaacatcgtaatcattatcatctccattttacagatgaaaaaattaaagtttagagatattaagtaacttagctaatgtycttccattaagaactgataagagcttagattcagacacacatctgcctgagcccaaactgatattagtcttaagtgttgatgtgagttaaatggaagaaaggaagcaagaagtgcgagccatgcagacctaggaaatgtttaaagtttgaatgtaaagcaaatgaatagaatataaaataaaatatacattaagcaattacttaaaatatgtatataaaatacacataaatgatctagaatgttctccctcactggtacatccctcactggttcaattaagaaagttgtagaagagatttctgccctgagaggagatgctgttaggtgataccatggcctatccaacttgtttctcctccaatattttattaggatcagtctcccaatttttttaatgacggcctcaggtgattttaggaacaaacttgtttatttcctttggcatgttcttcatttggtggcaatgcatcctggggtcacataaataaaaacagcaattagaggaagtttagcagcagtgaaaggacaaatgaaaaacaagagaaaggctct

SEQ ID NO: 605894 - DNA, 658 bp, Homo sapiens
atattatcaaactaaattcctataacaacatcgtaatcattatcatctccattttacagatgaaaaaattaaagtttagagatattaagtaacttagctaatgttcttccattaagaactgataagagcttagattcagacacacatctgcctgagcccaaactgatattagtcttaagtgttgatgtgagttaaatggaagaaaggaagcaagaagtgcgagccatgcagacctaggaaatgtttaaagtttgaatgtaaagcaaatgaatagaatataaaataaaatatacattaagcaattacttaaaatatgtatataaaatacacataaatgatctagaatgttctccctcactggtacatccctcactggttcaattaagaaagttgtagaagagatttctrccctgagaggagatgctgttaggtgataccatggcctatccaacttgtttctcctccaatattttattaggatcagtctcccaatttttttaatgacggcctcaggtgattttaggaacaaacttgtttatttcctttggcatgttcttcatttggtggcaatgcatcctggggtcacataaataaaaacagcaattagaggaagtttagcagcagtgaaaggacaaatgaaaaacaagagaaaggctct

SEQ ID NO: 605895 - DNA, 484 bp, Homo sapiens
taaaagcagcattctttctaatgtctttggctaattgaagattttgctacttgtttatatctcatttcttttgtgtttaggtctgagcatttttctcattatcagaaatctttaatgtatgatatcaattcataatggagacaaaagtgtrgtattaataaaatctagagttcctcaaaccagtgaatccatatatcacgtcatactcatcctctatctttttttttctaataatgattatatcacattacaccaaccaccaccatacataccaccatggaaatgaatgaattaaacacatgataaaatgtgccacttctaatctgaacattctttttccatggatgcaccaacctctcactgctctgtttggagcccagtgctgtatataccaactgctacattcaaaagacagtccaactaaacctcacttcacagtggcacagggttagtctttgaggagtcattgagaagcctgaaagat

SEQ ID NO: 605896 - DNA, 477 bp, Homo sapiens
tcctatatccttgataccgacactattctaggttaccactattaactgcttatctgaaagtttgtatttagcggtgatgagacacttttctattttataaccaatactttaaaatktgtaaacacaagtgcatctggcctagaaagaaatgaggtttcgaaattcatgtatacatatattccctggacctatcagtgcctcaaagatcaaactaatactaccagggacacagggcattgtgccagagcattaaaatagtgaatcatggtcggtccttccactctcactcttggcaccataaaaatccctcatacaaaagaatgattggcatgaacaacacagagggttttctctgaatatttcataaattatccatcaaatctccagatcaagtctgataaacttatttgatagcaactgaacattacatctgagtataatatttcctcacctcagcctgctcacatttcatctctg

SEQ ID NO: 605897 - DNA, 550 bp, Homo sapiens
caatttgtcctcagagggtgtcttgatcaacatctctctgctgccactggcacactcctggctcagtcatgaccccattcccctattccagcttgttgactaaatcctcatctgatgtctctccacaaaaattcagaagcattttctcagataaatatttattcaatcattttaaattaatttccaagaaaaatgtgggatttaatttaaaatgtaagagtacatttctcttgcatttcccctgtaatcaaagagtgagatcatccacttgcatagcacacttggagacaggctgaatgttgagtaacattatcctgtcacaaatagagtaacgtgttcaattatcagtgatgcctcgccctcaatagagtgtaagctgaagggtaaccaggagagatcctcggttccagggctggtagttttgtgacctaaactcaaaagctaattctgcttggcacagtgtagagyttcctgctccctccctgctgctctagaaaggcagggctgtgttaaatcatggtgcttaaggtaatcaattcacaagcatgga

SEQ ID NO: 605898 - DNA, 597 bp, Homo sapiens
ttccaactgtgttctgacataaatatgatgagtgacatatgactgactaccttaactctctgtgactggttctttgcaaaatgatgaaaatgagcaagacttgggtatttttctgtgttttttatgttttgttttttacccctagatgagtcacctagaaagcttttacaaagtactatactaggtctcaagccaaatctataaaatcagaagctctggtgktgggttgtaggcatcatatgttttaaaagctcttcagcttttgctattgagaagccaatgttgagaattattaggtggcttaaataactagatgcatgatggatgaggtcattttcagtagtaacaatttataattctatgaccaacccaactataccctgaactatttcttttgtcaggataaatttattgagtgcttattttaaatctgtcagtgtgccaaatagggaagacataaagataaactttccatgctctccaggttaacttacagtcctgaagaaacttatgactttccattagcatagacggtgaatcctatgaatatacattttttattgaactctattagggaagatgctagaggtcattaca

SEQ ID NO: 605899 - DNA, 597 bp, Homo sapiens
ttccaactgtgttctgacataaatatgatgagtgacatatgactgactaccttaactctctgtgactggttctttgcaaaatgatgaaaatgagcaagacttgggtatttttctgtgttttttatgttttgttttttacccctagatgagtcacctagaaagcttttacaaagtactatactaggtctcaagccaaatctataaaatcagaagctctggtgttgggttgtaggcatcatatgttttaaaagctcttcagcttttgctattgagmagccaatgttgagaattattaggtggcttaaataactagatgcatgatggatgaggtcattttcagtagtaacaatttataattctatgaccaacccaactataccctgaactatttcttttgtcaggataaatttattgagtgcttattttaaatctgtcagtgtgccaaatagggaagacataaagataaactttccatgctctccaggttaacttacagtcctgaagaaacttatgactttccattagcatagacggtgaatcctatgaatatacattttttattgaactctattagggaagatgctagaggtcattaca

SEQ ID NO: 605900 - DNA, 533 bp, Homo sapiens
cctcctacccacaagcaatataaagcatataaaataaaacattaacttttcagtagaggcagtgttgattaatagaattgttgtttgagtctcatttaataattctgtatgattgggcaagatatattacctctctgcctcagtttycttaaacataaataatacatacaatgtttccaaaaatcttccaagagtgtagcactttgtattggttttctaggaatgagttgtgagtgatacattaaattagaggtcatgccatttacaataacatactttacatttttttgtttccacatattctatgcattttgaatcctccttataagctttggagagcttggggtagaaaggaaggaaaggtgcaacttatgaattatttcctgtaccttacatcagtcacttgtgctttttgtcacctcatttagttggagaaaacagtagaacaagtaatatcctattttccttcttcacttttcacagaccaacaagaatcaagaaacctagggagtattatactgcttccacagaga

SEQ ID NO: 605901 - DNA, 585 bp, Homo sapiens
gccatttacaataacatactttacatttttttgtttccacatattctatgcattttgaatcctccttataagctttggagagcttggggtagaaaggaaggaaaggtgcaacttatgaattatttcctgtaccttacatcagtcacttgtgctttttgtcacctcatttagttggagaaaacagtagaacaagtaatatcctattttccttcttcacttttcacagaccaacaagaatcaagaaacctagggagtattatactgcttccacagagagaatgcagaatctgtgatctcactgctaatgagaaagcttcttgttggtttccactggccctgctatcaactcactgctatcagtctatctggctctaatgatggcagtcaacatttattgaatgttagctttgcacaggcattgtrctatatactcttttcttccctttgtaagctgctcccaaagtagacatcattattattcccattttaacctcattttacagatgagaaaaatcgcttcaggagatgtcatttacctacgtaatgtcacagatcaagtaagttaatagcattgagactgtagag

SEQ ID NO: 605902 - DNA, 585 bp, Homo sapiens
gccatttacaataacatactttacatttttttgtttccacatattctatgcattttgaatcctccttataagctttggagagcttggggtagaaaggaaggaaaggtgcaacttatgaattatttcctgtaccttacatcagtcacttgtgctttttgtcacctcatttagttggagaaaacagtagaacaagtaatatcctattttccttcttcacttttcacagaccaacaagaatcaagaaacctagggagtattatactgcttccacagagagaatgcagaatctgtgatctcactgctaatgagaaagcttcttgttggtttccactggccctgctatcaactcactgctatcagtctatctggctctaatgatggcagtcaacatttattgaatgttagctttgcacaggcattgtactatatactcttttcttccctttgtaagctgctcccaaagtagacatcattattattcccattttaacctcattttacagatgagraaaatcgcttcaggagatgtcatttacctacgtaatgtcacagatcaagtaagttaatagcattgagactgtagag

SEQ ID NO: 605903 - DNA, 585 bp, Homo sapiens
gccatttacaataacatactttacatttttttgtttccacatattctatgcattttgaatcctccttataagctttggagagcttggggtagaaaggaaggaaaggtgcaacttatgaattatttcctgtaccttacatcagtcacttgtgctttttgtcacctcatttagttggagaaaacagtagaacaagtaatatcctattttccttcttcacttttcacagaccaacaagaatcaagaaacctagggagtattatactgcttccacagagagaatgcagaatctgtgatctcactgctaatgagaaagcttcttgttggtttccactggccctgctatcaactcactgctatcagtctatctggctctaatgatggcagtcaacatttattgaatgttagctttgcacaggcattgtactatatactcttttcttccctttgtaagctgctcccaaagtagacatcattattattcccattttaacctcattttacagatgagaaaaatcrcttcaggagatgtcatttacctacgtaatgtcacagatcaagtaagttaatagcattgagactgtagag

SEQ ID NO: 605904 - DNA, 533 bp, Homo sapiens
gcttcctccttttcaaatggtactttactagcaggctctttcagactttcacatacctggtggaagagaaggaaaggcaaacaatctctatttcctttactggagctcagaaaagaaaagtagaaaatcagtaataaaagaaaaatgtagtcaagtttgtatcctgatattcccacttttcatgctgtctattctgaattacattttcctaggatggcagcaatattaataacttaaacaaagtcacagataaggttacagrgaaagagagagacaggaataggatgcagtaggcccaatctttcatactctcagctgtaagaacattccagaaaaagaaaaaaagtccattatctataaaccattattcttattataatccatatttataaggctataagcttctgcaaattatttgaattggggtcattagttatcatttttaaaattaaatttgaatataaattgggatattcaaatttcctagctaacctaacgttaaacaaagggaaataaattttagatgactcaat

SEQ ID NO: 605905 - DNA, 533 bp, Homo sapiens
gcttcctccttttcaaatggtactttactagcaggctctttcagactttcacatacctggtggaagagaaggaaaggcaaacaatctctatttcctttactggagctcagaaaagaaaagtagaaaatcagtaataaaagaaaaatgtagtcaagtttgtatcctgatattcccacttttcatgctgtctattctgaattacattttcctaggatggcagcaatattaataacttaaacaaagtcacagataaggttacagagaaagagagagacaggaataggatgcagtaggcccaatctttcatactctcagctgtaagaacattccagaaaaagaaaaaaagtccattatctataaaccattattcttattataatccatatttataaggctataagcttctgcaaattatttgaattggggtcattagttatcatttttaaaattaaatttgaatataaattgggatattcaaatttcctagctaacctaamgttaaacaaagggaaataaattttagatgactcaat

SEQ ID NO: 605906 - DNA, 559 bp, Homo sapiens
tatacatatatataaaaataattttaatcaaataaatatgctaatgacatggaaacagaaagacaactcagtggaacagaatccagaaataggtctttctatatatgctaatttaataaatggtaagaatggcattttaatttggggaaaaagatagattacaggacaagtagtcatattcctatgaagaagaaaatatatgtgggaccctgaacctgttaggattgctttcaattttaagtgacaaaaactttgtaatatagtagcctaaacataggaaggtttgtattttcatgtaagtctaatggagtgtgattcagcccagccaactgctcaatgacacagtcygctttctatctttctgctccatcgtcttcagtgtgtgattttcattctcatcactgcaagattgatggaaaaactgaagccataatgtccatatttcattcataaagaagagaaaatattgtagggaaagggagtctcatgagccttttcctttgtttttaacaggattttgtttttacttagaaaaggatgtttgccctataacccaacc

SEQ ID NO: 605907 - DNA, 559 bp, Homo sapiens
tatacatatatataaaaataattttaatcaaataaatatgctaatgacatggaaacagaaagacaactcagtggaacagaatccagaaataggtctttctatatatgctaatttaataaatggtaagaatggcattttaatttggggaaaaagatagattacaggacaagtagtcatattcctatgaagaagaaaatatatgtgggaccctgaacctgttaggattgctttcaattttaagtgacaaaaactttgtaatatagtagcctaaacataggaaggtttgtattttcatgtaagtctaatggagtgtgattcagcccagccaactgctcaatgacacagtctgctttctatctttctgctccatcgtcttcagtgtgtgattttcattctcatcactgcaagattgatggaaaaactgaagccataatgtccatatttcattcataaagaagagaaaakattgtagggaaagggagtctcatgagccttttcctttgtttttaacaggattttgtttttacttagaaaaggatgtttgccctataacccaacc

SEQ ID NO: 605908 - DNA, 569 bp, Homo sapiens
aggtggccttttgttgtcagggggcccaaaattccaccctcatatcacactaacgctgccattttctatacatgtgtcctataaaatgctgcaaacccaaactacacttggtcagaawgaaccaattacttcatttctccgtactgccaatcacttttcctcacgcattagaccactccatttctctaacacataaatatccctcaacctatcttcaaggaggtggatttgaaagcattttcccacctccttgcttggtggacttgtgaataaatcttttctcttttgcaaaacccacgtcacggtgattgaattattgcacaggggtagaacagacctggacctgaccaataacatgattacattaaaatgagaaaaaaatgtaggaatatacgctgcattgttaacataagtgacagcgttggagagttggaggaagggtgggaggagatggagcataaggagccaagcaaaaaagaaaaaggaaaaagtgcaccaataacaatatcacaacaggtaaaacctgctactaattgtgcattcatataaaattacatttgttcatacaa

SEQ ID NO: 605909 - DNA, 542 bp, Homo sapiens
ttgagggtgtcaagttcccccaagccctgtgtagttgagaggtaccatccaggagccagggactagagtcaaaaaacataraattgttcctggttttttattgtacttgtagctgagctggcactcaaatcataagatacagtccttcccagtcttccctcccatttccagaggcataggagcctcccttaataggccctaccaccacaggcaacaggtagtactgcctgactaccactgatgttccattaaggctcaatagctcttaagtcagcttgtggtgaatgctgcctggcctgggactcaccattcaggtcaatgggctcctctctggcccaaagcacatacagaaacgtcatctgagagtcaagtcccagaactaagggcccccttggttctctaccccactgtgaccatgcttgtaactaaagtgcaagacaaagtccccttacttttccctctgcttttatcaatcagaagtggttattcagggtcgaaggggtcttcagttatcaggtgatgaatgctgtcaggacttcatt

SEQ ID NO: 605910 - DNA, 396 bp, Homo sapiens
tgcattgttaacataagtgacagcgttggagagttggaggaagggtgggaggagatggagcataaggagccaagcaaaaaagaaaaaggaaaaagtgcaccaataacaatatcacaacaggtaaaacctgctactaattgtgcattcatataaaattacatttgttcatacaaatatttgtagaaacatttaagtaaaaacagcaacatggccactttggtatagaataatggttgtgaccacgcttggaatattgtgtgtggttccaggcaaatgtcagagmcaatttagaaaatggaagagaagagactctgtctcaaaaaaaaaaaaaaaaaaaaaagaaaagaaaagaaaagaaaagaaaatgcaagagaattagtagagcaactcaagcca

SEQ ID NO: 605911 - DNA, 542 bp, Homo sapiens
ttgagggtgtcaagttcccccaagccctgtgtagttgagaggtaccatccaggagccagggactagagtcaaaaaacataaaattgttcctggttttttattgtacttgtagctgagctggcactcaaatcataagatacagtccttcccagtcttccctcccatttccagaggcataggagcctcccytaataggccctaccaccacaggcaacaggtagtactgcctgactaccactgatgttccattaaggctcaatagctcttaagtcagcttgtggtgaatgctgcctggcctgggactcaccattcaggtcaatgggctcctctctggcccaaagcacatacagaaacgtcatctgagagtcaagtcccagaactaagggcccccttggttctctaccccactgtgaccatgcttgtaactaaagtgcaagacaaagtccccttacttttccctctgcttttatcaatcagaagtggttattcagggtcgaaggggtcttcagttatcaggtgatgaatgctgtcaggacttcatt

SEQ ID NO: 605912 - DNA, 581 bp, Homo sapiens
atttgtttcaacttcttgttcagtactttacataagttgcaaataggaatggtactctgatgtgttccacaccactactaagaattataagcaaatcataccataataaaaaatacctttatgaaatatataaaatatgtaatcatttcacattaaatctaagaagtctatctatctttcatagttttgtgaaatatattcttatatatctcacaaagtctgaaactatgatctgggaagaaaataaaattgtatttatataaagagctacagctcctaaaatagtctaaatttgtagagctacatccttactatgtatttcaaatatatttacrttaaaaatgatactcattttactttaaggaataacttatgttccattcactctggaacttaaagcaggaaattatgaagaaattactctagtggggtggatactttcattttagagtagttacatgctctaaaatagaagtttctgtggttatttactccttggaccaagttatgtgtgcataggaagctattccctaatttgaacctgtcataggccaaggtgacagttcactaatgataatctc

SEQ ID NO: 605913 - DNA, 640 bp, Homo sapiens
atatgctagtttcatttgtaattttttgaggttcctccagactttttttttcataaagtttctactaatgtaaatttctaccaacactgtagaaggktacctatttctcctcatccacatccatgcctattaaaaagacagtcaatagcatgtattgttactttggtaatagccattctgaaaagtgtgaggggatatatcattgtgattttgatttgcttttccctgatgattagtaatgttttttgtatacaagcatactttggaggtattgtggattcagttctagacaactgcaataaaccaaatatggcaataaagggaatcaacaattttttttggttttccagtgaatataaaacttttgtttacactatattgcactctattaactgtatgatagcattatgtctttaaaactgtacatgccataatttaaaaatacttatttgctaaaacatgctaatgatcatttgaaccttcagttagtcataatctttttgctggtggaggatcttgcctctatgttgatggcttctgactgatcagggtgatgatttctgaagttgaggtggctgtggcagtttcttaagataataatgaagtttgccaaatttattgactctttctttcacaaaaa

SEQ ID NO: 605914 - DNA, 640 bp, Homo sapiens
atatgctagtttcatttgtaattttttgaggttcctccagactttttttttcataaagtttctactaatgtaaatttctaccaacactgtagaaggttacctatttctcctcatccacatccatgcctattaaaaagacagtcaatagcatgtattgttactttggtaatagccattctgaaaagtgtgaggggatatatcattgtgattttgatttgcttttccctgatgattagtaatgttttttgtatacaagcatactttggaggtattgtggattcagttctagacaactgcaataaaccaaatatggcaataaagkgaatcaacaattttttttggttttccagtgaatataaaacttttgtttacactatattgcactctattaactgtatgatagcattatgtctttaaaactgtacatgccataatttaaaaatacttatttgctaaaacatgctaatgatcatttgaaccttcagttagtcataatctttttgctggtggaggatcttgcctctatgttgatggcttctgactgatcagggtgatgatttctgaagttgaggtggctgtggcagtttcttaagataataatgaagtttgccaaatttattgactctttctttcacaaaaa

SEQ ID NO: 605915 - DNA, 646 bp, Homo sapiens
cttcctcactaagctttatcattccttgattttgatgtaaagtgaaaaccgtgtgactcttcttttcactcttgaacacttagaggacattgcagggttattaatttgcctaatttcaatattgttgtgtctcagagaatagggaggcccaaggagagatagagagacaaagaagcactcaatcagtggagtagtcaaaacacacaaaatatttattgaataattttgtcatccaatatgtatatggttagtggcaccccaatacaattacaacattaacattgaagatcactgatcactataacagataaagcaataattttttaaagttttaaatattgtgagaattatcaaaatgtgacrtagagatacaaagtgagtgcaccctcttggaaaaaatggtgtccaaagacttgcttattgcagagctaacaagaaaattcaattagtaaaaaatgcaatatctgtgaaatgcagttaaacaaggtgggcctctacctattggccatttgtatatcttctcttgagtaatgtatttagatcttttgtccactttttatcagataatgatgatgatgattattattattattttattattgagttgtttgagttccttatatattctggattttaaccctccatc

SEQ ID NO: 605916 - DNA, 646 bp, Homo sapiens
cttcctcactaagctttatcattccttgattttgatgtaaagtgaaaaccgtgtgactcttcttttcactcttgaacacttagaggacattgcagggttattaatttgcctaatttcaatattgttgtgtctcagagaatagggaggcccaaggagagatagagagacaaagaagcactcaatcagtggagtagtcaaaacacacaaaatatttattgaataattttgtcatccaatatgtatatggttagtggcaccccaatacaattacaacattaacattgaagatcactgatcactataacagataaagcaataattttttaaagttttaaatattgtgagaattatcaaaatgtgacatagagatacaaagtgagtgcaccctcttggaaaaaatggtgtccaaagacttgcttattgcagagctaacaagaaaattcaattagtaaaaaatgcaatatctgtgaaatgcagttaaacaaggtgggcctctacctattggccatttgtatatcttctcttgagtaatgtatttagatcttttgtccactttttatcagataatgatgatgatkattattattattattttattattgagttgtttgagttccttatatattctggattttaaccctccatc

SEQ ID NO: 605917 - DNA, 627 bp, Homo sapiens
gagtgcagtggtgtgatctcggctcactgcaaccttcacctccgggttcaagcaatcctcctacctcagcctccctggtctctgggattacaggcatgcaccaccacagccagtgaagttttgtatttttagtagagatgaggttttgccatgttgaccaggctggttctaaactcctgacctcaagcaatgcaccctcctcggcctcccaaagtgctgagattatggacgtgataaaataaataagattttaattcaaacagtatagataccaaagcctgtgtaatttctttaagttcttatttataatatgctaatttgagcttaagatccttcactaaaatagatttcataataaaatacaattttattygtacaaatattaactttatacatgtgaatatcaataggctactaaatatgaatttctactgtatatgcttaatgagttttttgattctttacaataaaaatccaatattaccatgaagcttattatgcaataatttatgagtgatataaatatgtaaattaaaaattaattattagaattggaatattaagtactatatttttaaaaatatttttagatttcaagttagctaaaatattaaaatcatatgggtg

SEQ ID NO: 605918 - DNA, 579 bp, Homo sapiens
gcatcaaaagatagatctacttttagttcttcaaggaatctccacactgttttccatagtggttttactagtttacattcccaccaacagtgtagaagtgttcccttttcacaacattcatgccaacatctataattttttcatttttagattatgaccattcttgcaggagtaaggcagtattgcattgtggttttgatttgcatttctctgataattagtgatgtgcaytttttcatatatttgttggtcattggtttccatctttatttctctgggtcctccttgagtagcttaataaccaaccttctgaattctttttctggctgttcagagatttcttattggtttgaatctgttgctggagagctggtgtaatcatttggtggtgttatagaaccttgctttgtcatatgaccagaattacttttctggttccttctcatttgactagactgtttcagtggaaggatctggaactcaagagctgctgttcatattattttgctctacagggttatcctttgatgtggtgctctcctccttactctagggaaagggcttcctgagagccagatt

SEQ ID NO: 605919 - DNA, 607 bp, Homo sapiens
tcccattttaaccagcattaacatatgtgctacagctgtcttatggttaaggtttgaatagtacaggttttatatcttttcacgttaacatatttgtgtctttgaattcataaatgcatctctagaaaaccaatacttatttttttatccagtcttgttatccttgccttataatttgagtttcaacagagtaaacagacaacccacagaatgggagaaaatttttgcaaactatgcatctgaaaaaagtcggcatatataaggaacctaaacaaacttataagaaacaaaacaaacaaccccattaaaaagtgggcaaaggrcatgaacagacacttctgaaaagaaaacatacatgtggccaacaatcatatgaaacaaagctcaacatcacagatcactagagaaatgcaaatcaaagccacagtgagataccatctcacaccagtcagaataactattattaaaaagtcaaaaaataacagatgctgataaggttgtggagaaaagggaatgcttatacactgttggtgagagtgtcaattagttcaaccattgtagaagacagtgtgatagtagtactcaaagacctaaaaacagaactacc

SEQ ID NO: 605920 - DNA, 607 bp, Homo sapiens
tcccattttaaccagcattaacatatgtgctacagctgtcttatggttaaggtttgaatagtacaggttttatatcttttcacgttaacatatttgtgtctttgaattcataaatgcatctctagaaaaccaatacttatttttttatccagtcttgttatccttgccttataatttgagtttcaacagagtaaacagacaacccacagaatgggagaaaatttttgcaaactatgcatctgaaaaaagtcggcatatataaggaacctaaacaaacttataagaaacaaaacaaacaaccccattaaaaagtgggcaaagggcatgaacagacacttctgaaaagaaaacatacatgtggccaacaatcatatgaaacaaagctcaacatcacagatcactagagaaatgcaaatcaaagccacagtgagataccatctcacaccagtcagaataactattattaaaaagtcaaaaaataacagatgctgataaggttgtggagaaaagggaatgcttatacactgttggtgagagtgtcaattagttcaaccattgtagaagacagtgtgatagyagtactcaaagacctaaaaacagaactacc

SEQ ID NO: 605921 - DNA, 352 bp, Homo sapiens
aaatgttctgtcataagcacatatgcacatgtatgttcattgcagtactattcacaataacaaagacatggaatcaacctaaatgtccatcaatggtagactggataaagaaaatttaatgcatatacaccatagaatactgtgtagccataaaaagaatgatatcatgtcctttgcaggaacacggattgagctgggggcygttatccttagcaaactagcaaaggaacagaaagccaaataccacgtgttctcacttataaatgggagctaaattatgagaaaacatggatacatagaggggaacaacacacactggggcctacaagagggtgggaggagggagaggatc

SEQ ID NO: 605922 - DNA, 352 bp, Homo sapiens
aaatgttctgtcataagcacatatgcacatgtatgttcattgcagtactattcacaataacaaagacatggaatcaacctaaatgtccatcaatggtagactggataaagaaaatttaatgcatatacaccatagaatactgtgtagccataaaaagaatgatatcatgtcctttgcaggaacacggattgagctgggggccgttatccttagcaaactagcaaaggaacagaaagccaaataccacgtgttctcacttataartgggagctaaattatgagaaaacatggatacatagaggggaacaacacacactggggcctacaagagggtgggaggagggagaggatc

SEQ ID NO: 605923 - DNA, 492 bp, Homo sapiens
atgccacaaaataaaatttaaaaaatattataacttgggtttcstctgaaagctggatggttctaaggccggtcctagaagaatggattccaggacatttgtttctacagtcactttttaatcaagtctcatacggctgtgtctgatggatacaacctagttcatacaaacgtgtgccccaactgctagtaaagaagggaaagtgtttctggcatccattttgggaaatcaccgacaagtggctcgagaaatcccccccaaaaagatgagttttcaaaggtaccagggaagccaaaagcctggcacacttccatgagatagtaatcagcatatgagtggaaactgaagctggggatttaggtgccactacccaggaaaagtggctagtataactattttaactatttcctttacttattaattgtaatttaatttgttcctcctgtttttttttttattttttatttttttagatgcagtctcactctgttg

SEQ ID NO: 605924 - DNA, 628 bp, Homo sapiens
ggaagccaaaagcctggcacacttccatgagatagtaatcagcatatgagtggaaactgaagctggggatttaggtgccactacccaggaaaagtggctagtataactattttaactatttcctttacttattaattgtaatttaatttgttcctcctgtttttttttttattttttatttttttagatgcagtctcactctgttgccagactggagtgcagtggtgcgatcttggctcactgyaatctccacctcctgggttcaagtgattctcctgcttcagcctcctgagtagctgggattacaggcatgcaccaccacactcagctaattttttttttgtttctgtatttttagtagagacagggtttcacaatgttggcctggatggtctcaatctcctgacctcgtgatccactcgcctcggcctccctaagtgctgggaatacaggcatgagccgctgcccccggccttcttttgttatttttaaaagagattttgtatgttatttctcagggtaaagcagaatatatagcaatgtgtggagaagacgtatatgtaaagagagattgtttatagagttgtagcccatgcaaaaactaaggcaaacatatattttacttaga

SEQ ID NO: 605925 - DNA, 628 bp, Homo sapiens
ggaagccaaaagcctggcacacttccatgagatagtaatcagcatatgagtggaaactgaagctggggatttaggtgccactacccaggaaaagtggctagtataactattttaactatttcctttacttattaattgtaatttaatttgttcctcctgtttttttttttattttttatttttttagatgcagtctcactctgttgccagactggagtgcagtggtgcgatcttggctcactgcaatctccacctcctgggttcaagtgattctcctgcttcagcctcctgagtagctgggattacaggcatgcaccaccacactcagctaattttttttttgtttctgtatttttagtagagacagggtttcacaatgttggcctggatggtctcaatctcctgacctcgtgatccactcgcctcggcctccctaagtgctgggaatacaggcatgagcygctgcccccggccttcttttgttatttttaaaagagattttgtatgttatttctcagggtaaagcagaatatatagcaatgtgtggagaagacgtatatgtaaagagagattgtttatagagttgtagcccatgcaaaaactaaggcaaacatatattttacttaga

SEQ ID NO: 605926 - DNA, 548 bp, Homo sapiens
ttctcctcttctcctctttctgccagtggagcctggagtttttatgggcacaagatgtgcagcagggtgggccatgggtggttttggaaaaggcaacatttgatcaggaaaacaggaatgcatgttctcacttttggccatagctccaggattgatggtggggcccttgatggggacccgccttcttctgcccagaatttccctgcctcctgtccctatcaatatgtttaattttccactgtccaaaatgattatttcacactttctcttctgtggacaattctacctctcaaaccctcctagctagcaaatggctttrcctcttactttattaaaaaaaaagagacactgctactagtaagcacacatctagcagctcatatgcatctctgcatctgtaacagctgtgcttctgtgctatcttgatgagtgcagggcctttgctcctctcaaaggcccacacgtcctctctaattagaatcccattttttctcacagtatctctccttcaattatctcccttatatcctgcaacactaatttctgtc

SEQ ID NO: 605927 - DNA, 548 bp, Homo sapiens
ttctcctcttctcctctttctgccagtggagcctggagtttttatgggcacaagatgtgcagcagggtgggccatgggtggttttggaaaaggcaacatttgatcaggaaaacaggaatgcatgttctcacttttggccatagctccaggattgatggtggggcccttgatggggacccgccttcttctgcccagaatttccctgcctcctgtccctatcaatatgtttaattttccactgtccaaaatgattatttcacactttctcttctgtggacaattctacctctcaaaccctcctagctagcaaatggctttacctcttactttattaaraaaaaagagacactgctactagtaagcacacatctagcagctcatatgcatctctgcatctgtaacagctgtgcttctgtgctatcttgatgagtgcagggcctttgctcctctcaaaggcccacacgtcctctctaattagaatcccattttttctcacagtatctctccttcaattatctcccttatatcctgcaacactaatttctgtc

SEQ ID NO: 605928 - DNA, 548 bp, Homo sapiens
ttctcctcttctcctctttctgccagtggagcctggagtttttatgggcacaagatgtgcagcagggtgggccatgggtggttttggaaaaggcaacatttgatcaggaaaacaggaatgcatgttctcacttttggccatagctccaggattgatggtggggcccttgatggggacccgccttcttctgcccagaatttccctgcctcctgtccctatcaatatgtttaattttccactgtccaaaatgattatttcacactttctcttctgtggacaattctacctctcaaaccctcctagctagcaaatggctttacctcttactttattaaaaaaaaagagacactgctactagtaagcacacatctagcagctcatatgcatctctgcatctgtaacagctgtgcttctgtgctatcttgatgagtgcagggcctttgctcctctcaaaggcccacacrtcctctctaattagaatcccattttttctcacagtatctctccttcaattatctcccttatatcctgcaacactaatttctgtc

SEQ ID NO: 605929 - DNA, 459 bp, Homo sapiens
gaatggcagcatatgaacttactagctcctaccttagaaaaaaaaattgtttaaatgttcttccatatcacatttagctaccattttgatttttcaaaatgattttttattatgatgaatacaggtaattgaaataccttcttctgcaagatttaagggcatctctgctggttttcattgaccaactttgcctcctttgtcacatcctcctctgctctatrtgatattgttggggtgtgtccagacttgtcctgggcttctttttcttcaaacatgttgttgcttctaagggagcctatctaattctcttattttaaatgttggccatgtgtcaatgagccccaaattattctctgcagtaatatcatatatatacccactataatgtatcattagtaattctatattattgacactttagctgatgcttcatgtggatatatgcaagccagatggctc

SEQ ID NO: 605930 - DNA, 506 bp, Homo sapiens
accccatgggacaaaagaatctgaatagccttcagccctagaccttccctytgacagagcccatccaaatgagaagaaaccagaaaaacaactctggtaatatgataaagcaaggctctttaacaccccctccctcaccccacaacaatcacactggctcaccagcaatggaatgaaaccaaaaataaatccctgatttacctaagagagaactcaggaggttagttattaagctaatctgggaggcaccagagaaaggtgaaatccagtgcaaggaaatccaaaagtgatacaagaatgaaatagatagcatgaataaaaaacaatcaaagcttcaggaaacagcggacacacatatagaaatgcaaaatgctcagcaatataattgaacaagtagaagaaataaattcagagctcaaagacaaggtctttgaattaacccaatccaacaaagacaaagaaaaaaataaggaaatatggacaaagcctccaagaagtatgggatt

SEQ ID NO: 605931 - DNA, 506 bp, Homo sapiens
accccatgggacaaaagaatctgaatagccttcagccctagaccttccctctgacagagcccatccaaatgagaagaaaccagaaaaacaactctggtaatatgataaagcaaggctctttaacaccccctccctcaccccacaacaatcacactggctcaccagcaatggaaygaaaccaaaaataaatccctgatttacctaagagagaactcaggaggttagttattaagctaatctgggaggcaccagagaaaggtgaaatccagtgcaaggaaatccaaaagtgatacaagaatgaaatagatagcatgaataaaaaacaatcaaagcttcaggaaacagcggacacacatatagaaatgcaaaatgctcagcaatataattgaacaagtagaagaaataaattcagagctcaaagacaaggtctttgaattaacccaatccaacaaagacaaagaaaaaaataaggaaatatggacaaagcctccaagaagtatgggatt

SEQ ID NO: 605932 - DNA, 632 bp, Homo sapiens
atatttgagggaatgaatgaggaaaacttccccagccttgctagagatctagacatccaaatacaaggagcacaaagaacacctgggaaattcatcacaaaaagatcatcacctaggcacagtgtcatcaggttgtctaaagttaagatgaaagaaagaatcttgagagcagtgagacaaaagcacctggtaacctaaaaggaaaacctatcagattaacagcagatttctcagcagacactctacaagctataagggattgggtccctatcttcagcctcctcaaacaaagcaattatcagccaagaattttgtgtccagygaaactaagtatcatatatgaaggaaagatacacttgttttcagaaaaacaaatgctgagagaattcatcactaccaagccaccactacaagaactgctaaaagaagctctaaatcttgaaacaaattctggaaacacatcaaaacagaaccttttttaaagcataaaccacacaggacctatacaacaaaaatacaagttaaaaagcaaaaacaaaaaaaccaaggtacacaggcaacaaatagcaggatgaatgcaatggtacctcacatttcaatactaacattgaatgtaaatggcctaaatgctc

SEQ ID NO: 605933 - DNA, 576 bp, Homo sapiens
atttgagggaatgaatgaggaaaacttccccagccttgctagagatctagacatccaaatacaaggagcacaaagaacacctgggaaattcatcacaaaaagatcatcacctaggcacagtgtcatcaggttgtctaaagttaagatgaaagaaagaatcttgagagcagtgagacaaaagcacctggtaacctaaaaggaaaacctatcagattaacagcagatttctcagcagacactctacaagctataagggattgggtccctatcttcagcctcctcaaacaaagcaattatcagccaagaattttgtgtccagtraaactaagtatcatatatgaaggaaagatacacttgttttcagaaaaacaaatgctgagagaattcatcactaccaagccaccactacaagaactgctaaaagaagctctaaatcttgaaacaaattctggaaacacatcaaaacagaaccttttttaaagcataaaccacacaggacctatacaacaaaaatacaagttaaaaagcaaaaacaaaaaaaccaaggtacacaggcaacaaatagcaggatgaatg

SEQ ID NO: 605934 - DNA, 538 bp, Homo sapiens
aaaattaaattaaaggctacaattttctatgtttactgaaaagccagcttttcagatgctataaatttattatcctcaacaaagagctttaagactgaaaactgattgttttaagatacgctttcattttttattaaagccctctgaagaacaatcaaaagaaaacatttgtaatctatgactgatgggttgtacattgtgaaaataaacccagaaagattcattacttattcaacactgtctagaatatataactctttatgtcttcttatgctttattttttggctaaaaatggaaataataaaattcactgcattgtgtatgctgcggaaaggaatatttaatattctcagagcatcgtgtggctgtacggatgcatgagatattccagttaacaaaaaaaagttgctttatgtttctggcatgtgaatgacaaagagaaaattgcttcctctgccaaaragaaaaatcttagaaaataatagaatttaaaacctcaggatgtcattaaaactctctacttatcagaagatgtct

SEQ ID NO: 605935 - DNA, 559 bp, Homo sapiens
agcagtatacttataatctgatgatttggtagagagaaagagaaagcaatgacataggcgacagagaggagatttgctggaacaatgacctgaattgaatgtggaaacttgtaggatttagataagggcaagcttattaatctctgtaacaccatagaatgcaaagtctgtaagggcagattatggtagaatrgtaatggaaatctgtggaagttttcttctgattgtttccatttttttaggtaagtagaaaagaagaccatcttctgagagaatgattgtgagagaaagtgtcagaactttagaagaatgagacggtgtgaagctgtactaggggaatacagtatgattgtcatgaactgtaagagctcacttgacacgtcatagtcatgaactcaaacagacatcagtgggctggttttatgttttccagcaacctgtctacacaagcacaagaacagagttgatggagaatcgaataaaattgtggttataatttttgccaacataatacaaaaaatacaggggcaaggatgttgatagcataggcagtggagta

SEQ ID NO: 605936 - DNA, 559 bp, Homo sapiens
agcagtatacttataatctgatgatttggtagagagaaagagaaagcaatgacataggcgacagagaggagatttgctggaacaatgacctgaattgaatgtggaaacttgtaggatttagataagggcaagcttattaatctctgtaacaccatagaatgcaaagtctgtaagggcagattatggtagaatagtaatggaaatctgtggaagttttcttctgattgtttccatttttttaggtaagtagaaaagaagaccatcttctgagagaatgattgtgagagaaagtgtcagaactttagaagaatgagacggtgtgaagctgtactaggggaatacagtatgattgtcatgaactgtaagagctcacttgacaygtcatagtcatgaactcaaacagacatcagtgggctggttttatgttttccagcaacctgtctacacaagcacaagaacagagttgatggagaatcgaataaaattgtggttataatttttgccaacataatacaaaaaatacaggggcaaggatgttgatagcataggcagtggagta

SEQ ID NO: 605937 - DNA, 427 bp, Homo sapiens
ctcacttataagtgaaagttaaacattggatacacatggacataaagatgggaacaatagacactggggactctaagaggtggaagagacagacaggggtaagggttggaaaactacctattgggtactatgttcattacctgggcaattgtaacccaaacctcagcatcatgcaatatatccatgtaacaaactgcacatgtaccactgaatctaaaaaaaaaaaaagwtactttttctaaatgtaaataactattatagcatcaagagttttaaaaaaaatgaagtttctgttttgatgaccacatgtgacatgggagaccaaatataaagcctgagaccaacaggttcaagatctaataagatctacaaataaagctggtaattttggaaaagaataaaataaactagaaataagttggcatat

SEQ ID NO: 605938 - DNA, 549 bp, Homo sapiens
gggttggaaaactacctattgggtactatgttcattacctgggcaattgtaacccaaacctcagcatcatgcaatatatccatgtaacaaactgcacatgtaccactgaatctaaaaaaaaaaaaagatactttttctaaatgtaaataactattatagcatcaagagttttaaaaaaaatgaagtttctgttttgatgaccacatgtgacatgggagaccaaatataaagcctgagaccaacaggttcaagatctaataagatctacaaataaagctggtaattttggaaaagaataaaataaactagaaataagttggcatatggaaagatactccaaataaattcagtttagatttagatagcagagtatactgaggggtggagtctcccttgagcatcagaaatcttgcatgtttgtggcctaaaattatttatattacttgtgcagtcctatccatttcaaccacagaattcatmgtaaaagagtttagaatgattgttttattttgctcctcacctaacaacaaacaaataaacaacaaccca

SEQ ID NO: 605939 - DNA, 587 bp, Homo sapiens
gtaacaagagacaaaaagggtcattatataatgataaatgatgtcagttcatcaagatgatataataactgtaaatatagatacactcaatatcaaagcccataaatatataaaacaaatattaatagatctgaagacagaaatagcaatacagttgttataatcagagacttcagtatcccacttttaacaatggacakatcatttagatagaaaatcagcatgtaaacttcgtacttgaacaagattttaagcctaatgtacctaaaagacatatacagaatatccatcaacaagcatcagaatactcatccttctcaagagcacacaaagaattctccagggcagatcatgtgttaggccacaaaacaagtcttaataacttaaaaagagtgaaatctgtcacataaagtatcttttctgaccacaatggtatgaaactagaaaatcattatagaggaaaaaccggaaaattcacaaatagggagaaattaaagtacatagtcctgaacaactgaggaaaaaaataaaagagaaacaaaaaatatcttgagacaatcagaaatggagacacaaaataccagaac

SEQ ID NO: 605940 - DNA, 554 bp, Homo sapiens
cctgtcttcaaaatatacaacaaagctatagtaatcaagacagmatagtactggcataaaaacagacaatagatcaacattgcagaatagagtgtccagaaataaatccacacatttaaagtcaattgattttcaataaagaggacaaaaacatgcaatggggaaaggacagtctcttcttggtcttgggaaaactggttatccatatgcagaaaaaagaaattatactgtcatctcacatcacatataaaaatcaactcaaagtacaaaaggacttgaacataagacttgaaactgtaaaattactagaagaaaacataagagaaatgcttcatgacattggtgtaggttatgatatttttggctataactccaaaagcacagaaaacaaaagcaaaaaatagatcaatggaattatatcaaaccaaaacactttttcacagccagtgaaacaatcaacagaatgaagagataacctatgtaatgggagactgtagtttcaagccatacatctgataagggttaacatccaaaatatacaaagaactcaaaca

SEQ ID NO: 605941 - DNA, 634 bp, Homo sapiens
aacctgcatgatcttacttacatgtagagtctaaaagtcaaattcatagaagcagagaatagaatagtggayactagagtctgggattaggagtagggatagggagatgttggctaaaggacacaaaatctattataaaggagtataagttcaagaaatctattgtacaatgtggtgactatagttaataatatttgtatcctagaaaattgctgagagagaagatttgaagtgttcttactacaaataaatatgagatagttatatgcatatatatagttaatacatatgttaattggcttgatttagccattccaaatatatatacatttcaaaacatcattttgtataccataaaaatatacaatttttagttgtcaattaaaaataaataagaaggaaaaagaactgcattgtcttcaagtactttcaataaccaaatctgatataacaaatattgcctactatgtgttaccaagggtcctgctttgataaataaatgtgacattatagtcacaaaaattgggaatttaaactttggaagtagataggctcatccaacgtatatagataaaaataacaaaggaaaaacttaaggcagagctctaattttaagcctgaatataaggacaaa

SEQ ID NO: 605942 - DNA, 634 bp, Homo sapiens
aacctgcatgatcttacttacatgtagagtctaaaagtcaaattcatagaagcagagaatagaatagtggatactagagtctgggattaggagtagggatagggagatgttggctaaaggacacaaaatctattataaaggagtataagttcaagaaatctattgtacaatgtggtgactatagttaataatatttgtatcctagaaaattgctgagagagaagatttgaagtgttcttactacaaataaatatgagatagttatatgcatatatatagttaatacatatgttaattggcttgatttagccattccaaatatatatacatttcaaaacatcatkttgtataccataaaaatatacaatttttagttgtcaattaaaaataaataagaaggaaaaagaactgcattgtcttcaagtactttcaataaccaaatctgatataacaaatattgcctactatgtgttaccaagggtcctgctttgataaataaatgtgacattatagtcacaaaaattgggaatttaaactttggaagtagataggctcatccaacgtatatagataaaaataacaaaggaaaaacttaaggcagagctctaattttaagcctgaatataaggacaaa

SEQ ID NO: 605943 - DNA, 634 bp, Homo sapiens
aacctgcatgatcttacttacatgtagagtctaaaagtcaaattcatagaagcagagaatagaatagtggatactagagtctgggattaggagtagggatagggagatgttggctaaaggacacaaaatctattataaaggagtataagttcaagaaatctattgtacaatgtggtgactatagttaataatatttgtatcctagaaaattgctgagagagaagatttgaagtgttcttactacaaataaatatgagatagttatatgcatatatatagttaatacatatgttaattggcttgatttagccattccaaatatatatacatttcaaaacatcattttgtataccataaaaatatacaatttttagttgtcaattaaaaataaataagaaggaaaaagaactgcattgtcttcaagtactttcaataaccaaatctgatataacaaatattgcctactatgtgttaccaagggtcctgctttgataaataaatgtgacattatagtcacaaaaattgggaatttaaactttggaagtagataggctcatccaacgtatatagataaaaataacaaaggaaaaacttaaggcagarctctaattttaagcctgaatataaggacaaa

SEQ ID NO: 605944 - DNA, 508 bp, Homo sapiens
tttattaaattatttctaagtaaaccgtttttaggatgccatctgtttcctgctgggtcctgactgatacatcatccataaattcaagatgtacatcttagacaaatgcaaaggtagtcatgagcatttaataaatagaagctagcagccaatcttcaaaaataaaaacatagtattattgaaaacaggaaatttttctaactggggggcatawgtaatttagaaattatccttgaataagcaagttctcagtggcaaactgtcatttatattctcttgatttttccatacaagcttcaatagaataatgttacctagtacccttatgtggtctgtttaagtaaaagataaaatagtaaaacagtctcctgatgttcacagtattctcatttcatctctaaaagatgtgcatctttgaatagcaattgtgaacaccaaggttatcttccatggagttttatttcttttaaacaactatctcaattttttattctttatgttgttcatt

SEQ ID NO: 605945 - DNA, 574 bp, Homo sapiens
ttactaacacactatattaattttattacattcacaatgttattactgcagaacaaacaatattgagaacatttttaataaaggtgttgattgaaataatatgacccacagaccttccacttcaaagtgggatgaagtagtttgtgacaaactaacactcttggaaagagtcttaattgtacctgcaaataaatccaagtacattttaagaggtccttaatttcaaggcaccattgagcaacagaagcagtgagtaatggaggatctaaaattacagaaaagaaaagctttaaagaaattatcttargaacagttaccttttccctgtgggcaggcgtttgccagttctgagaatgggctggaatctgagattcagactttgctaggaatagaactgtgtgtaggggacataaaacccaacaaagctttggtggtcatgtggagccagagtgacttaactgcagaattgacagatctgaagacatgacaggcttcttgagaaatctggtgaatgtttaaactatgcagaacaagaattaaagaattgagcttgaacacctctgaaaagcagaat

SEQ ID NO: 605946 - DNA, 543 bp, Homo sapiens
gaaaatcaaaaaaaaatagatgttggcatgcatgtggtaaaaatgcaacacttttacactgctggtgggaatgtaaattagtacaaccactatggaaaacagtatgactattccttaaagaagtaaaagtagatcaacctttcaaagtagaacgtccactgctgggtatctacccaaaggaaaagaagtcattctataaaagacacatacacacatgtttatagcagcacaacttgcaattgcaaaaatatggaaccaacctaagtcttcatcaatcaacatgtagttaaagaaaatgtggtatatacaccctatagaatactactcagccataaaaataaacaaaataatgccttttgcaggtacttagatgaaactagaggccaatattctaagtgaartaactcaggaatggaaaccaaatattgtatgttctcagttataggtgagagctaagctatgaggatgtgaagtcgtaataatgatataatggactttgggaactcagggggaaatggggggggggcgagagacaaaagacta

SEQ ID NO: 605947 - DNA, 598 bp, Homo sapiens
agattttatttcatccttcaytcattttaaccaactcacctgagttgatatgttttgcagtgcctagaccagcttgctctgcctaatgagcatgattttaggtggccctatctggttatcagagggactttcattttcagctccaacatgtaaacagtttcaaagttgtcactcccattattacaataagaaaaaggctgaacaaacttgaaatcaacaaattttctcagatgcatcagagaattgaagtaacagggcaaaccccagactctggagagattggagaatacagagattcatagccaaatacaggcaatcacagccaagatcaatttaacaggaacagaactgttaggccacaaactggtgtgaatacttaaatagtaattttgatgaattgctggagactagtgtgaaagtgacaattccgagggtttcagtcctagagcgactcccatattttcacaggttttacctaatggagtctcactctgtaaagattttttttgaaatcctcatatttatggcaaaggaaagaataaagtaaccattttgaataaaatcccagggcattttccataagaaagtcctactctca

SEQ ID NO: 605948 - DNA, 598 bp, Homo sapiens
agattttatttcatccttcactcattttaaccaactcacctgagttgatatgttttgcagtgcctagaccagcttgctctgcctaatgagcatgattttaggtggccctatctggttatcagagggactttcattttcagctccaacatgtaaacagtttcaaagttgtcactcccattattacaataagaaaaaggctgaacaaacttgaaatcaacaaattttcycagatgcatcagagaattgaagtaacagggcaaaccccagactctggagagattggagaatacagagattcatagccaaatacaggcaatcacagccaagatcaatttaacaggaacagaactgttaggccacaaactggtgtgaatacttaaatagtaattttgatgaattgctggagactagtgtgaaagtgacaattccgagggtttcagtcctagagcgactcccatattttcacaggttttacctaatggagtctcactctgtaaagattttttttgaaatcctcatatttatggcaaaggaaagaataaagtaaccattttgaataaaatcccagggcattttccataagaaagtcctactctca

SEQ ID NO: 605949 - DNA, 598 bp, Homo sapiens
agattttatttcatccttcactcattttaaccaactcacctgagttgatatgttttgcagtgcctagaccagcttgctctgcctaatgagcatgattttaggtggccctatctggttatcagagggactttcattttcagctccaacatgtaaacagtttcaaagttgtcactcccattattacaataagaaaaaggctgaacaaacttgaaatcaacaaattttctcagatgcatcagagaattgaagtaacagggcaaaccccagactctggagagattggagaatacagagattcatagccaaatacaggcaatcacagccaagatcaatttaacaggaacagaactgttaggccacaaactggtgtgaatacttaaatagtaattttgatgaattgctggagactagtgtgaaagtgacaattccgagggtttcagtcctagagcgactcccayattttcacaggttttacctaatggagtctcactctgtaaagattttttttgaaatcctcatatttatggcaaaggaaagaataaagtaaccattttgaataaaatcccagggcattttccataagaaagtcctactctca

SEQ ID NO: 605950 - DNA, 644 bp, Homo sapiens
atttactacccttgatggtaccaagcttaattttacatgcaarcatgtttggctatttcagcatcagaaattatttagtaaaaaataaccataaataaaaaccaagtgacattttcagtatttcacttcttaaccagaataatcttcatccacataaggatgttacagagggaaagatatcatataaacatcacatttaagcttcagaaatggtttcaattaaagaaatgctattatctcctaagcccagccatttaaattctatcagagagtcttggcattgttttgcttaataaacacagtttctaaaatagtgcaaattaattgagtgtatttagtttatacatatgttgctgcaatagagcttcacagtaataagtataattaacaagaaaatagcagcaaggcatagagaaccctataatttccaaccacttgttattagtacccataagaaatacctcaaagttcattatctcaaattttcatgaaactaagtgagtataattaagagctcaacagctcctccatttgtttgttaaacagggtctcatgagcctcactgaaagaggtatgatttaagaatgttttattggaaaaaatatcaggctgagcagatttttataaccaaagtgttcagaaaa

SEQ ID NO: 605951 - DNA, 570 bp, Homo sapiens
tatttagtttatacatatgttgctgcaatagagcttcacagtaataagtataattaacaagaaaatagcagcaaggcatagagaaccctataatttccaaccacttgttattagtacccataagaaatacctcaaagttcattatctcaaattttcatgaaactaagtgagtataattaagagctcaacagctcctccatttgtttgttaaacagggtctcatgagcctcactgaaagaggtatgatttaagaatgttttaytggaaaaaatatcaggctgagcagatttttataaccaaagtgttcagaaaacatacataccatgtgcaaaagataaataaaaaactaaaaagacaatggtgttttgctaattttaacttcattaactattaactgctactaatatctaagatgttcctccctttgaaaaatatgagtattttcaaaagaggtctggactcagcaaaatttgtgcattgcatattatttgagttaacacacaatgtttataaaactgtttggaaaattaacaaaataaaaattcaaggctgaaattcagctataagaca

SEQ ID NO: 605952 - DNA, 579 bp, Homo sapiens
caggtaatttttgtatttttagtagagacagggtttcaccatgttggccagaatggtctcagtctcttgacctcgtgatccgcctgcctcggcctcccaaagtgctgggattacagagatgagccactgtgctcagccctttctgtaatattttattagctgggtcacaccacatgctcattcytaaaccaggcaccgggaaagcaaatgtagttatatgattagcttagaataatcacttatgttttgaagctgaggaggggtattgggataataaatatccacatagatttgtgattctccagcaagaaacaacaaggaactgctcttggatagggagccagcagtgtttgctctagaaattcattggaaaattgtaagcaggggaggcattagattcaatttgagatttagggcattctgttcagggtataaagctgggattggcaagctttctctgtaaagggccaaataggaaatattttaggccatgtggtctctctctctctttttcaagaacgatttaagcagctgaaggccatgtggtctctgtcgtagctactcaaccctgccattgta

SEQ ID NO: 605953 - DNA, 495 bp, Homo sapiens
acacactctttctttttttctccatttaaacctttagtctcttatccagtgcctccctctatggtttcattttcagtaaattttggtcgcagtatctgctgaaatagtctactatttagtgccttatgttttactaactcattataattcatagaatcatccatagatgtttaccatccaggaaggaggagtttaagtctgagctgccagctttcctcagtggaaatcaagtgaagtcatcatctttcagttcacagatcctctttccacctggcatcttgttctsttgtgtaacactgtggctaatccttttcttggtgcagatcttgcattctcagaaaccacggtttctgtattgacctccttttactgaaacagagatgcacagctctgctttctagctcagtagaggattcttggaataaaaagtttaactcattccaagaaaaagttttaggagtgcagcacttaaaaatcaggtaatattcaggcaat

SEQ ID NO: 605954 - DNA, 495 bp, Homo sapiens
acacactctttctttttttctccatttaaacctttagtctcttatccagtgcctccctctatggtttcattttcagtaaattttggtcgcagtatctgctgaaatagtctactatttagtgccttatgttttactaactcattataattcatagaatcatccatagatgtttaccatccaggaaggaggagtttaagtctgagctgccagctttcctcagtggaaatcaagtgaagtcatcatctttcagttcacagatcctctttccacctggcatcttgttctgttgtgtaacactgtggctaatccttttcttggtgcagatcttgcattctcagaaaccacggtttctgtattgacctcctwttactgaaacagagatgcacagctctgctttctagctcagtagaggattcttggaataaaaagtttaactcattccaagaaaaagttttaggagtgcagcacttaaaaatcaggtaatattcaggcaat

SEQ ID NO: 605955 - DNA, 435 bp, Homo sapiens
gagtgatagttaaatattctctgaatattaattctattgtatagctttatttctttttgaaaatataaaggaatctaaaacttagttacttaaactgtaatttttcattgttccctcataatgaagtaacataatatttagcgtaattaaaaaacaaaacaaaacaaaacaaaaaagcagattcatctttatggtagtgtgtccttttttctcttttttttttttttaagacagagtctcgctctgtcacccagactgcagtacagtggcaygattttgggtcactgcaacctccacctcctgggctccaggggttctcccacctcagcttcctgagtagctgggattacaggtgcctaccaccacatctggctcatttttgtatttttagtagagacagggtttcactatgttggccaggctggtcttgaactc

SEQ ID NO: 605956 - DNA, 641 bp, Homo sapiens
gagctatctaatctaaagccacactcagactctaaagatcctgaatctccatttctaggaaacttttcttgatgcctgcaagctgagttgagtaacttctgttttgcactaaaaaaaaaagcatttttctatatgcacttcccacctctgttgtaattatctgtctgtatttaccactagacaatgagcttttggaaaacaagggggtgtgcttcattcttctttatatcccacgtgcttcacccagtgcctggcagagagtgagcttttaatacatgtttgtgggatgaatagaygaatgaattgggtgaatggtctaattacttaattaatctcaaccaaaacccttagcaaatctctactgggggttataacggttggagtgacattgttaagagttgtgctttaagttaacgggctctcttatagttaaggttaagtaaacttagcccttatatttccgctcatatgaaccttatttaatttcactcttcaactgccatgatgttcagtgtccttaatagaacttcaggccataatcctagctgcaaactcaatctcatctctagcttggatgaaaacataaaccataaccctctaaaccagttctgatactaaatgaatctaatgaatgggtggtt

SEQ ID NO: 605957 - DNA, 641 bp, Homo sapiens
gagctatctaatctaaagccacactcagactctaaagatcctgaatctccatttctaggaaacttttcttgatgcctgcaagctgagttgagtaacttctgttttgcactaaaaaaaaaagcatttttctatatgcacttcccacctctgttgtaattatctgtctgtatttaccactagacaatgagcttttggaaaacaagggggtgtgcttcattcttctttatatcccacgtgcttcacccagtgcctggcagagagtgagcttttaatacatgtttgtgggatgaatagacgaatgaattgggtgaatggtctaattacttaattaatctcaaccaaaacccttarcaaatctctactgggggttataacggttggagtgacattgttaagagttgtgctttaagttaacgggctctcttatagttaaggttaagtaaacttagcccttatatttccgctcatatgaaccttatttaatttcactcttcaactgccatgatgttcagtgtccttaatagaacttcaggccataatcctagctgcaaactcaatctcatctctagcttggatgaaaacataaaccataaccctctaaaccagttctgatactaaatgaatctaatgaatgggtggtt

SEQ ID NO: 605958 - DNA, 546 bp, Homo sapiens
ccccattccttcccagtcttatcactcattacttatctcagcagcgccacgggggctgatatctcacatatctcccccgctccccaagaatttgctcgtggcactcctcctgcctgcctgcccttctcttcttttgtctaactgctacttaatattcagctttcagctcaaagcccatctctgcatgaagccttcttacactacttcagctacgttcacgacctccatgaagttcttgaaaacttgcaaagtaccatgcacacatgaagcacattacacatgccattgattagccggctcccctggctagactaggtgctccttcagcaccaggactcagaccccagtgaacatggtcccatgaaagttagcccagagcctttcccacagtgagttaaatgaacatgggctgttgttgatgatggtgataatakgaggatgctcatgaagatggctgtcaggctgacttcctcagcatcacaccatggcctctcttctctgtcccacatgttccccaggccccaaagacagtggaagcaggtgatc

SEQ ID NO: 605959 - DNA, 549 bp, Homo sapiens
aagccacacctgacttgcccataaccttccaggaagaccctacagattccaaatgtgtttcccagacctctagtttaaggagattagcttgacttcttgaggtttagtccagttaaataaggtcttctacctttgtatcaataccaattgttgcccagatggtagaaagatttagcaagatggcttcctcttcccattggagtttttagatctccaatgggaagacacaggagataatttactgtcttgcccaccaggaaatccttcctaaagtctagtctcaagcagttttgctataatggtcaagaagaagcataggataytgagcaacttgtattccaggaagggaaagcctgggcttgcctgaggtgagttgggagatgagaaaagatagaaacaaggttgttcctaagcacagtgctctgttcttccctaggtctcagggaatttgaaacaggtttctaatcactgcgtagagtggtcagagccatatggtttgttaccttattcacacgtttttatgtgctcccataacaaccttgtcaagta

SEQ ID NO: 605960 - DNA, 582 bp, Homo sapiens
ccgggcagaatattccaggtcacactctcttaatcaccacaaaatactgcctcctcattcatctcttctgtgtccccagccctagaagagtgctaacatactcagcactcaataaatattcggaggatgaaatgacacgccggcagacaagaacccacgtcagctgctcttccagcatcaggcagtcctgccagaagcaccatacaggtggctgttgttccagctctgagtaaggcagccaggacccctctggctgtgaagaagggctaatttggttcttcctgattgaggctaagtcttccttcataagcccagtctttcagagcaagcccagcctgttagtaaggagtgccctctgctgacacagacacwttcctgctgtctcgatccctggtgtaaatggaaagagaccatcaatgttgcagtgtgagctgtgagaattcagccagtcccagcctgagccctctggctgggagggcttcaccttctattgctgcatccagattacttttaaggtcaaaccagatggagattcgtggtcactgagtgatgagcaccctttagccctgtgtccagttgcct

SEQ ID NO: 605961 - DNA, 534 bp, Homo sapiens
acactcagtgcatactcggtgccttcccctgtccccttgcctttgtgcctgtgcttatgctgttccctggaagatcttcctttccttcctgtggtctttcctgaagcaagggcagatacaagaaccctgactcccagatcctacttctagttctatcatctataatgacagatgatcagttattcttattagtggttcatggtcacacaatgaacacctatagacgacagaagtggcattattgaaataataacagtggctaatattttaaaatacttgctacatatatatttcatttagtcaacactaccagtaaccagcatgtagccgcatcaacatcaacastagagtaactcactatatttaacttcttgtttcctcctttttgtagagacatagtgaatggatacctgctctcttctcccttccactctcttccttcttccaatttaattcccctctcttgcttactcttttcctgggaaaaatgcaagagtaatttttctaaaatcttctcttcagtgggtccccatc

SEQ ID NO: 605962 - DNA, 620 bp, Homo sapiens
ttcttggcccacctgaagaaggtgggagcatggaaagagattaaaccaaggaaggggaggcggcctccccagagctcctagagcctgactttcgctgtcatgattaacagctgtttgcatcttgccagctccactttctttggtccctctggccccctccactcccttctggtagaaacacgggttaagtcctttacttttgcagctctcaccaagcaggggatttgagagagatcagctggcaggtgtgggggactcgaatatgggatatctttgttaagaaacaggtgaattatgtatcagtagcctcagtttccccaacctcatgggcaagagtggcggccccacttcctgtgccctggccgatgtccaagtgccatgtcaggaatgccaacatgtcatgaatttgtgtgccttgcaaatgctttattggcatctcgtggtgttgaaagtcatgtaattatgagcagaatttatatgtcrccagggctgcctaggcgccctccctgcgtctccttccgggcactgcaaatattgaaggctggcttagaaaagaatcaaacctacccaccttgatatctatgcaccctgtagataaggttttaattgaaaatcggttc

SEQ ID NO: 605963 - DNA, 565 bp, Homo sapiens
ttcatctgttccccatgcctaattacaaggtgcctgcactgccaatggagcataaggacaggagtccagcaccctccaggaaggcctggggttgtggtcccacatggggacagcagtaactttgcagctttacctcttccgcatctaccacctgaggacttctggtttyttacccatgagcaggcactggtgtttgcagggaggacactccctcagccccatccccctccctctctggctggtgcttctgcagtgaggacaggatgcagctcactgcctgcttcctcccttctgccctgccagggatacactcctcgccccccctcatcctgccctctcctttcctttcagcccaaatgggcaaaaccagtctctgtttgtcaacaccattccctttcacctctgggcttgcctggaggccactcgccctcttccagggcgctctttccccatcctgctttgtaccctcctctcccgagaagcccctgcagtggtgatgacagatcttctgcccttgtgtctgtctcccaaggacttgcctttcgcgtcaggctggagcatccac

SEQ ID NO: 605964 - DNA, 565 bp, Homo sapiens
ttcatctgttccccatgcctaattacaaggtgcctgcactgccaatggagcataaggacaggagtccagcaccctccaggaaggcctggggttgtggtcccacatggggacagcagtaactttgcagctttacctcttccgcatctaccacctgaggacttctggtttcttacccatgagcaggcactggtgtttgcagggaggacactccctcagccccatccccctccctctctggctggtgcttctgcagtgaggacaggatgcagctcactgcctgcttcctcccttctgccctgccagggatacactcctcgccccccctcatcctgcccwctcctttcctttcagcccaaatgggcaaaaccagtctctgtttgtcaacaccattccctttcacctctgggcttgcctggaggccactcgccctcttccagggcgctctttccccatcctgctttgtaccctcctctcccgagaagcccctgcagtggtgatgacagatcttctgcccttgtgtctgtctcccaaggacttgcctttcgcgtcaggctggagcatccac

SEQ ID NO: 605965 - DNA, 580 bp, Homo sapiens
tgcatggcaccctgtccctcttgctgggagtaaatcgagagggaatattgcctggtccaggaaatgaggtgctaaatttgttgtgagataggtgtcacaagcaatcaaaacgagcctttctgcatccagccctggacaactaaatgagaaatcattaggttattgcagagaccagggacaacagaggyggagggatgagagatcccctccctattccttgggggtgggcaacacagggagatcaaaaagggaaaggaagactcagagatggagtgaaagagtgtgagagaagaggcaggctgctttctcaaggtttctcctacacctggatgtggggtatcctctttgccacagctgcatccagctcctctctaggcagttttgtgtgaagctttagtggacaccttcatcagtcacatgtttctggcctctcctctggctggcatctagggtggttctgaggctgagatgtactgacacaggacagagagacaagtgagcagagttgggtgcccccagatcagcagaatttggggtgagtagaaaagctgagacaggctcatgtgggaggctgatgagg

SEQ ID NO: 605966 - DNA, 556 bp, Homo sapiens
aggtccgtaagacaaagcctcaatgtcatctttgactgatctttccctctcacccttcgtccaatccataaggaagtcctgctggttctcatttcccaataatcccagaaatggaccactwtttgtggactctaggcatgccaatggtgcccaagctatcatcttgtgcctggattactgcagtagctgcttaatgggtctctctgctcctgcccttccttcacaccatctattcttgacacagtacccaaagcaattctgttaaaacatgaattataccatgtcactcctgtgctcaaaatctaccagtgacttcccatttcattcaaagtaaaagcctaagtcctgtgattccttcaaggctctggtccaataaggaagaatttttctggccttggtccacattcctgggacagaagttttaaactcgtggaacttcccaagtgataagaatgtctttgttattcattgcacactggggtttatgctaatgaggtgactctggattggggctgaggatgctggaaagatcaaccacgtgattagaaggttaggg

SEQ ID NO: 605967 - DNA, 626 bp, Homo sapiens
gcatagaatgtgtggcttggtacctgagacactgtaagccagtggtataagttagctcttattgttaaatactaaccttttttttggtgtggtgtaataaaaagagtcctggatttgtaatcagggacctgagttcacattccatcttcctttccaattgtctgtgtgaccttgtgcaagtctgtttccctaatgctttataacatggaattcataagtcctgttttgcccctcactgggagttgtgaatataagttaatgtaaagtctataggggcaagggccttctttgtctcagcctcccattacccgcctagtgcatgggcactcarcaaatgtgagataaatgatagtgtaagttactaatctatgaacaaagaaactgagtcccagaatggggaaatgacttgcttaagctggacacagctaaccctttgttgtgggggctgtcctgtacattggaggatgtttagcttcattcctggcctctacctactggaagccagtagcaccccagtctccaggtgtgacaatttaaaatgtcttcagacatttccagatgtcacctgggaagtaaaattgccccaagtgagaaccactgagctaaccagaggaaaagctagaact

SEQ ID NO: 605968 - DNA, 609 bp, Homo sapiens
tgggctgaagcagagagaagacagtgtcagggaaatcattatgctcgagataagtctgtacacatgagaagaaagggggatttatgatcttcggtagtgatcttcaagtcagggttaatatcctccagtatcctccctcagagctacccagtgagcccccagacacatgccctatggtgtgtcaggatttgcccaccctaacctttctgagttcccaaagtgatctgcatctggaggccacatgttcctgcatgaagaggcagggattttgccctcctccacagaaatatgttcaaaattgactcctattttacgtaatggattctgtgatgcgccacccagatcccctgtcaggaatggacttattgtcccagctgctagaattgctgccagcagataatcctattataagccctcttgggaaaggctttggccactccatccagggtcatcctccctttccagagcattgtatccagtggctgtccayactagggtataaaggcagggcccctaaatctcaacccaggaccactttgaaagatcatcctagactcagggtgtctatagggttggctgagacttttgtggagatggcatcaaagccca

SEQ ID NO: 605969 - DNA, 524 bp, Homo sapiens
tgggggtgatgctgttcagctgcgaacagccaaggctgtatgtttagtgggcaggtaaatcatcaatcattgcagaaggatatttaccttcattcatctcaaccagcaaatctcaaagtatggtcaatatccccagaggcatcatgagaatgtttcaaggaggacccagaagccaaccctatggagaacaattagccactttatgtggcagagcctgggagataatttgccagctccatggtgttgctattgcttttggtggtggtgatgatgacggtactacagrgtcctagaaggatagccatgagggatttatgggaactgaggattcaggacaggtgtatggaatgttgcttaaaattcttcagaacagctctgggggtgattcttctgaacgtaagatcaggaatatggggatgttagatatgagaatgggctgtttacctgttctagcctccttgagtagatggattgatgggaagactgtggaagcagcaggggccttctctgacagtcccattttc

SEQ ID NO: 605970 - DNA, 524 bp, Homo sapiens
tgggggtgatgctgttcagctgcgaacagccaaggctgtatgtttagtgggcaggtaaatcatcaatcattgcagaaggatatttaccttcattcatctcaaccagcaaatctcaaagtatggtcaatatccccagaggcatcatgagaatgtttcaaggaggacccagaagccaaccctatggagaacaattagccactttatgtggcagagcctgggagataatttgccagctccatggtgttgctattgcttttggtggtggtgatgatgacggtactacagagtcctagaaggatagccatgagrgatttatgggaactgaggattcaggacaggtgtatggaatgttgcttaaaattcttcagaacagctctgggggtgattcttctgaacgtaagatcaggaatatggggatgttagatatgagaatgggctgtttacctgttctagcctccttgagtagatggattgatgggaagactgtggaagcagcaggggccttctctgacagtcccattttc

SEQ ID NO: 605971 - DNA, 671 bp, Homo sapiens
agtttttaaatattatcttcagtacgacataattaggtgctgctaaaaattcattatcatgctttccaaagccaaaaagaaataacttttgtattatccactccactgctcttcctcagtggtgtggataactgagacataaacrttttcatcataattgatgatgggaccaccttacagggccgctggatttattgggtgccaggaggaagaagcagtggcccatatcttctgtaattctttcttctccagttgctaagctccttggatttgcacagagcacttagagttgatggtcccaccctcagcagcaacctaaaaatggccaatgtgggctggcattgaggaagtatctcgaccaaaacctcaaaaattcacagtaaaaaatgccgtatcctagggctcttaatttttttcttggtggaatcataaaatccttttggttgttcttcagacctatttgtccctcttttgttatcagaattattttctggtgacccggagagattctttcactgcactatattgcagattctccaccaaaaaagcagaactcagctggctgcatgatgccaaaatgactccttgctttggctaattcagtcagctggtgaaagtatcgtggtattatggaaggagccctgtttgaggcattaccctcatcttagttt

SEQ ID NO: 605972 - DNA, 671 bp, Homo sapiens
agtttttaaatattatcttcagtacgacataattaggtgctgctaaaaattcattatcatgctttccaaagccaaaaagaaataacttttgtattatccactccactgctcttcctcagtggtgtggataactgagacataaacgttttcatcataattgatgatgggaccaccttacagggccrctggatttattgggtgccaggaggaagaagcagtggcccatatcttctgtaattctttcttctccagttgctaagctccttggatttgcacagagcacttagagttgatggtcccaccctcagcagcaacctaaaaatggccaatgtgggctggcattgaggaagtatctcgaccaaaacctcaaaaattcacagtaaaaaatgccgtatcctagggctcttaatttttttcttggtggaatcataaaatccttttggttgttcttcagacctatttgtccctcttttgttatcagaattattttctggtgacccggagagattctttcactgcactatattgcagattctccaccaaaaaagcagaactcagctggctgcatgatgccaaaatgactccttgctttggctaattcagtcagctggtgaaagtatcgtggtattatggaaggagccctgtttgaggcattaccctcatcttagttt

SEQ ID NO: 605973 - DNA, 603 bp, Homo sapiens
ctctgtctcttctgacacattcttctgcctgtttctgtccttccaaccctcccggaaccttccacttggcccagatgagcagcttgctgggtcacagggctggcctgccggaatgccctgacattctgctgttgaaacaggtgacccttcattactcctgggcagaggctggcctgtcagtcagctggtaattaacagagtctggatatgagttgccagagaaagggctctggccactgcctcccacacaatgcttttctggtgtgctacagctggtaaagccaatggttaaatatccaggaatttggcaagccagctgttaagctgctgaatatccaggaattttgtgagccacttgtcaaactgttggtagcttgaaatcaatcgtggtgggagtctttatgccatggaaatatcagcagacactacaaatcaccatactgtctcaccctgcagcgcrtttaccagcacatcattgagcaaactgtcttctcctaaaactcactaactgagggaaacactacaggattctgggcttgacatgtggttaacacccacattttaagaaaattaattcttttagttataaaagtaatacaagct

SEQ ID NO: 605974 - DNA, 300 bp, Homo sapiens
tgtcctcttttcataaattcaacaaggggtgttttgtacttttctttagaatgtagggggatttactacctactcttttcagctttggcattcaaactgaaatgtaaagacagtctccatatataattgtattaagcaaataagattattatatgcatattgttctaccatttgcttttctttctaagcaaactactgtatctcargcatatttttttgtcactgtatggagatctacctctacctcatttaaaaaaatgtatctcatttttcctcacttattacttctttttgttctct

SEQ ID NO: 605975 - DNA, 553 bp, Homo sapiens
agaattccacaccaagaaacaacctagttacattttagtatattttcataaaacctcaaaaattacctgtttgcataatctcacactatgtgtcttgaattttaatcatagttaacaaaggaacactcgtaaaatttagttggcagattttacrtaaatgttttagtgacatgcattttccacctggtggtttattagtcttgtttaattaaaaaatgattcaggctatactgattggctttgaagatgtagaaagtcattaataatattctttagtaatgaaaatagtcattatgctcttttgtgcacttctgctttgagaaatggaagaaagggggtgaaaacaaagatttttagtttaataactatcttggctcggcatcccaaccatacaaattgtttggccatgctaatcaaagttggaacagacccagttagtgttttatgtagtcttttatcaaattggcaagagattatctgtaaactgtttttttttttttttttcgttgggagggggaagcacaatcaaaatagaatctacaggaaagcagaa

SEQ ID NO: 605976 - DNA, 573 bp, Homo sapiens
aagtctcatccagcccagtgggaagctccagggagtttgccagtagaggagtctatgttaggagaatggccatgtggagcagaaagtacccctgctgtyccgccgtgctcagtggccgaggctgcctggggagactttagctttggttcaaacattgcagcagatcctgaaggtgatgtagctggaggctgatagctaagtacactcctgaagcagggtcttccttgaagggagatctgactggtgcaccattatggctgccacaaggccccttccacactctccaggagggaccaggagtgttacccgtcctaagcagatgatgcacaaggcaacttagctcctgtggctggatgaaaactgagcaggtccattcacaggagagcccggcaactgctctttggcaaagctgaatgggcaaccctgagcagattgtctccaggggatgtgaccttcagcttcaagtgattttgaatgtgtgcttgaatgggcccccagaacagcacagagcccagcctaagggtcaacttatttttgagcaaacatttcaaatctccatccacaattattgaa

SEQ ID NO: 605977 - DNA, 556 bp, Homo sapiens
ctgcagtgggctaactgtgccactgcactccagcctggatgaccaagcaagacggtctcaaaaaaaaagtttccctagtcatgcttccctatgtcagtcagatttcaataaaagaaacagacctactaggcaatataaataataagggatttattgtagggatttggcattacacaactgtgagawatagttaaacagtctacagaaggctgtttcttctgtgtctggtgtggcagcctgaagtccacagggcaggcatttgggaaaagcaaggataacctggaacctgcaagaatgaatggaacccatgagcatgagctggaacctgcattagtctctcagcatctccaggtgacagcctcaatgatgaggatgtcctgcttatcaatgaggacaatgaggatgtcctcatcaatgatgaggatgaaggtggcacctttcactactaagcgaaacatgaatgaggccaggagtcagagaagctgaagaagaccctgcagaagcttgagtcgctgcaggctgctaccctatgccagcacagtgagcacagtaagct

SEQ ID NO: 605978 - DNA, 343 bp, Homo sapiens
acatctgtggccccctccctgcccctgctccctgctccrctccccctcactggacggttaggcttcagcatttttcacatacctctctcacaacctttatcttataaaattgtcaatatgtgtttatacatccatctcccacaccatactgagagtgcctcaagaacagggactaaatcttacctaccttttcattcccaggcctaggcccagcacagccatttaaaaaaacaatgctcataagttgaacacatgctctcaccccccctggtgggaccctcttcaaaggactccatttgaaaaaccagagctcacttcctagcagaggttttaagaatcttta

SEQ ID NO: 605979 - DNA, 605 bp, Homo sapiens
tccctgctgttacatgtctcaacatgtcacaaaacaaaaatataaaaaacaaacacacagtccctaacagagctaaggagcagtaggattagacattccagagcttcagattatagaaatactaggtagagaaataaaagaaatattaaaaacatgagaatgaatattatactgttttttaaaaagaccaaagcaggttcgaaaaatatccaaatagaacttcaggaggtgaaataaaaaacttgactgatgaggttcaagtctcattgaattacccaccatttctatctctcttctctctcctcttttccagtggtatactctattcaatgtgttttttcccatgctctgtgtgtgtgtgtgtgtgtgtgtatgtgtgcatccataaaaactatgtagtattgtttgtattctttagttttagtgstattagtccatatgtattgttctgaaattttttttttttgtcattcaacattagcttttggcgatctagtcatattgcatatgaatctagcttgttttttttaaaacttgtatgcacagtataaatacaccagcttacttacacattttttttcctaacggaccctagttggctaata

SEQ ID NO: 605980 - DNA, 605 bp, Homo sapiens
tccctgctgttacatgtctcaacatgtcacaaaacaaaaatataaaaaacaaacacacagtccctaacagagctaaggagcagtaggattagacattccagagcttcagattatagaaatactaggtagagaaataaaagaaatattaaaaacatgagaatgaatattatactgttttttaaaaagaccaaagcaggttcgaaaaatatccaaatagaacttcaggaggtgaaataaaaaacttgactgatgaggttcaagtctcattgaattacccaccatttctatctctcttctctctcctcttttccagtggtatactctattcaatgtgttttttcccatgctctgtgtgtgtgtgtgtgtgtgtgtatgtgtgcatccataaaaactatgtagtattgtttgtattctttagttttagtggtattagtccatatgtattgttctgaaattttttttttttgtcattcaacattagyttttggcgatctagtcatattgcatatgaatctagcttgttttttttaaaacttgtatgcacagtataaatacaccagcttacttacacattttttttcctaacggaccctagttggctaata

SEQ ID NO: 605981 - DNA, 605 bp, Homo sapiens
tccctgctgttacatgtctcaacatgtcacaaaacaaaaatataaaaaacaaacacacagtccctaacagagctaaggagcagtaggattagacattccagagcttcagattatagaaatactaggtagagaaataaaagaaatattaaaaacatgagaatgaatattatactgttttttaaaaagaccaaagcaggttcgaaaaatatccaaatagaacttcaggaggtgaaataaaaaacttgactgatgaggttcaagtctcattgaattacccaccatttctatctctcttctctctcctcttttccagtggtatactctattcaatgtgttttttcccatgctctgtgtgtgtgtgtgtgtgtgtgtatgtgtgcatccataaaaactatgtagtattgtttgtattctttagttttagtggtattagtccatatgtattgttctgaaattttttttttttgtcattcaacattagcttttggmgatctagtcatattgcatatgaatctagcttgttttttttaaaacttgtatgcacagtataaatacaccagcttacttacacattttttttcctaacggaccctagttggctaata

SEQ ID NO: 605982 - DNA, 532 bp, Homo sapiens
tatcaccacaaagaaacatatcagttccatactggaaccaaccagactacacaggaaaaggaaaaatgtctgtacagtagtggtatgttgcatctgtgagagaacttagagaacacatagtttaacctcgtctctttaaagaggaagatactaggttctggaaaggttacatgacttgcctatggtcacacagctagtctggcctggttaggtggcccagcagagatcagaactcaaggcttctgacatctagctctattattactactacattaaatattaatgcattaagattttctttagaaagatatttactaaggatctattaatatcccaatatacctgccacttagagagacatatgagaattcaaaggaaattggtcatgrctatacacttaaaatactcaagtgacctgaaccatgaagtactaacctctgaggtttttaaggatgctctcaacttcataaaaagtggcattgcccatactcagtgcttcttgtgctctgcttttagcaagattggcacggga

SEQ ID NO: 605983 - DNA, 634 bp, Homo sapiens
attcaatacatctttattgagtgaatgaattaacaaaagaatacctctctcccactttttccattctgtaagagctgctgtgcttcttctttccagtttcccagattcttytgtgtacgcttgaactcatccatatgcctggttaccaggcttgagagtgaatccgctttttgtttgatcctctttgcttcttccacctatgagcccaaagaaaccagggagtctgacttctgcttaccagttaccacaccagccttgttaggacctggcaccattgtttgaaaatagcaacagccttaagaagccaagaaaatagtcactagccatccaggcccaaaacctaacaaaaatgagtcagtatgcccaatgaaagtaaggcagcaggtcccctcaatgtcaaacaggctttgtctctgttctttttcattttttaaatgtttacatgttagtttatatattcatgggaacatatatccatggggattgtgaatttttttttctataggtagtaaacaaaatcttcttaatcgaataagtttggaattgttaaaggaactgatggcagaaacaatgcaaaacttttgagaagaagtcatctcagagtggctatacatagagatatactataggttgg

SEQ ID NO: 605984 - DNA, 607 bp, Homo sapiens
gccactgcactccagcctgggcgacagaatgagattccatatcaaaaaaaaaaagagagatcaatgtagaaataggagctccatagattctggaatactctcatttagtcagaaattaaacctagtaggtgactgaatcattactgggctatgttttaatataatccccagataggtgatgtaatgtttgaatcatgtccaaagccaaaggctaagtcttttctgtctgtgggtgactgtatgtctgcatatgtaattccccaaaaagcatctgcttctttatgtcacaaccatggaaacagaagagaatggttcttcctccagcactgatctatggaagaacctgagtctttcccttctkttgtatcaggtgaggggtggagatcaattggccaaacgtatagggatcctgcacttattcagggcttatatttacagaattctaaccgcgtctttttatttattgtggggatatgtatctccgcattagagaagaatcaaattgcagccaaatcatttcccacaactaacttaaaacttggacaaatcatccaaatgctcagctgcactgatgtggggcatttcatacaaagtattttatgtttca

SEQ ID NO: 605985 - DNA, 449 bp, Homo sapiens
caagcttgatggaacctttatctactgttgacataccacctgtatttctaatgaagacatctatctcgtcttttcagaagtctccatttgtgtatatgattcaatatattggcctttcctttaaaaatatcagagaacaacaggttaaaactaagcacagctctagtttgtggggcattaacaagagaacagatttcaaattaccaagttttctcttccttttgttccactctgttgtcaggttatcatgcagcttggaattgaccaagtggctcagtttaggatcrttgatagtactgtgataagactttctcttttagcaatcattgttctttaatgactattgacattttgcatctgtatatacgtaatcacatccagagattatttctgtctccctgctacagacccttgtaagttttggagtctttcagaaagaggtctgtttc

SEQ ID NO: 605986 - DNA, 504 bp, Homo sapiens
taaaactgaacagtgggaaaccatccaggggacagcctgagaatgaaatcaatgaattaccaaatggagagagttggagtgactgggctcttctgaaaattgttagagtcctgaattcagtggtgattgaatccctgaagttttcatatatttatgtaagcctgtttaagctgggtttccaccacttactgaaataatcctgattgatacaatgatttagaactgccttcaatatctgaaactgctctttcagaattcaaagtgaaagattttaagtgtctacactgactggaggtacagaattagaatgttgtgatatttgcattctaycacctgtcagctagtgtttaatcacttaattcatctgtttgttcatttttcatctgaaattttattaattttctactatgtataaggctcaattaacagcacaatattaggccctaagtatataattatcagtaagacagagtccctgttcccaatgaattcataatttattat

SEQ ID NO: 605987 - DNA, 562 bp, Homo sapiens
acctcatgaatgggattagtgcccttataaaagaggcctgagtgagggagcacttttaccttttcaccatgtgaggactagctagaaagtaccatcttagaaacagagtgagccctcaccaagtactgaacctgctggagcctggatctagcacttcccagcctccagaacttgggtaatagtttttaaattacccagtatattttgttatagccaccagaatggactgagacactatcaaaatagatttaactcaacggttctccttcttcccactactaacctgattttagcacagggcatttaagcatctaatctgtattgccatcatataaccctttaacaatcaagttttgggcttggttggcagccgttatcttcyctgtgatgacaatagatgagaggtctctcagagctgccattaaggcttatgatttttagctcagatcttgagttagaaattcacagccttcaattttttcttaggtaatctctgtaggatcatctgaaacattcagctgatgtcataatcactataatcattattgctgtcacagtgatc

SEQ ID NO: 605988 - DNA, 369 bp, Homo sapiens
acaaaactactactattactacattacctattgacggaattttaataaagcctttggatttttttttttctgacagacatatcagaattcatggagtaaccttcagagaagcaataggtaacaccaaaggctgccctaaaaaagcaaagacacaggaaggttgccttgaatgaggctggtgactaaagaggaaacaaggaacagccccatccaagtatgttccaccagcccagcagttaaagggcagagccagagttggttatgtgaagaatmtagcagggtgtcagcttaccattcaataacacttttagaactggaccaggataccgagttcagccagcattatcatgcagatagttcgacttattt

SEQ ID NO: 605989 - DNA, 629 bp, Homo sapiens
acatgggggaaaccacgaggtttcccaccaggttcctcccttgacacgtggggattacagtttgggatgagatttgggtagggacaaagggccaaaccacatcagccactactaggtagccctttgaaaaagaaataatcataacataggaaagaatttatgtacaaggtgattcacggcatcattttttatagcaaaatattgaaaaaataaaaatgtccatcaataggggatcaatgtttacaaatacggtacacaacacaacagaaaagtattcaactataaaaagaataaaaagggttcactgcacatagtaatacagaaagatcgccaagatatatcattaggtaaaaaagacaaggcacggaacaatcatattatgttccatcttctgtgtgaargaaggaggatacaataaaaatgtatttcatggttttttgttttgttttgttttgtttttttgagatggagttacgctcttgttgcccaggctagagtgcaatggcatgatcttggctcactgcaacctccgcctcctgggttcaaacaattatcctgcctcagtctcccgagtagctgggattacaggcggccaccaccacgcccagctaatttttttgtaattttag

SEQ ID NO: 605990 - DNA, 675 bp, Homo sapiens
gttgtttttaattatagtaaaatasatgtaacagaaatgtactattttaaccctttttaaaacattatatattgtcatgtaactgtatctaacatggaaatatgtgcatgcatatgtaacttacaaagatgaaaactgttccttccttattttgtaatagaagaaccttaaatatcactattttaattttctttttaaattgtgaaatacaacttaaaattttagtttaaccatttttaaatgtataatacaaggtgatgttttttcactatataagttaggctttacataaaggaattacatacagttctattagagaagcatgcaactaaaaagaggttgatttgcagatatttcacttttttggaaatgaaataactgatttttttcctcttccatccctctttatttttctacacatatattttggtacttgaagtattgctaagtttttgaacccagttttcctccaaggtaaaggttttttttttttttcttcaaaatcttgagttaattttttcatgtaatgaatttgcaatccatgtgcaatcgatctttataataaaaataggaaattgacatttcacattgtatccataattggcataaattatgatgattaataatgtcaagtttgtgagttagggtacccaaaactcaactgtttcactagag

SEQ ID NO: 605991 - DNA, 675 bp, Homo sapiens
gttgtttttaattatagtaaaatacatgtaacagaaatgtactattttaaccctttttaaaacattatatattgtcatgtaactgtatctaacatggaaatatgtgcatgcatatgtaacttacaaagatgaaaactgttccttccttattttgtaatagaagaaccttaaatatcactattttaattttctttttaaattgtgaaatacaacttaaaattttagtttaaccatttttaaatgtataatacaaggtgatgttttttcactatataagttaggctttacataaaggaattacatacagttctattagagaagcatgcaactaaaaagaggttgatttgcagatatttcacttttttggaaatgaaataactgatttttttcctcttccatccctctttatttttctacacatatattttggtacttgaagtattgctaagtttttgaacccagttttcctccaaggtaaaggttttttttttttttcttcaaaatcttgagttaatkttttcatgtaatgaatttgcaatccatgtgcaatcgatctttataataaaaataggaaattgacatttcacattgtatccataattggcataaattatgatgattaataatgtcaagtttgtgagttagggtacccaaaactcaactgtttcactagag

SEQ ID NO: 605992 - DNA, 530 bp, Homo sapiens
tttatgacctagcatgcaattgattgtagaatattttccacttgcagataagaagaatgcatattctgtggttgttgggtggatttttctgtagatgtctattaggcccaatggtcaagtattaagtttaagtagagagttattgctaggtgtctacctcaatgatctatataacatagtcagtgaggggttgattcctcccactgttattgtgtggttgtctcagtcttttcacaggccaagaagaacattttttatgaatccaggtgctccaatgttgggtgcacatataygtaggatagctaaggcttctaaagcctttgttagattgtaccctttattattatgtaatgtgctttattttgtttcttaattttttttttttttttgagatggagtctagctctgtcacccaggctggagtgcagtggtgcaatctcggctcactgcaagctccatctcccagcttcacatcattctcttgcctcagcctcctgagtagctgggactacaggcacctgccaccacac

SEQ ID NO: 605993 - DNA, 516 bp, Homo sapiens
atgcatagtttgaaaatattttctcccaatctgcaggttatctctttagtctgttgataatttcttttgctgtgcaggagatttttagtttaattaaatctcatatatttatttttgttttgttgcatctacttttggggtcttacttataaattatttgattatggtttaccagagttgtacaaagggaaaagaaagccacatgatgacagaaaacaaggcagagattggatwtatgctgctgcaagtcaaagaaaatctggggctacccaaagccagaaaagataaggaaggattcatccttagatccttcatagctctgctgatactttgactttatatttctagcctccagaactgtgaaagaatacaattctctttttttagtctacccaatgagaggtaatttattgtggcaactctagcaaatgtaatacatccatcatctatcataatctttcttttggaaaaggggaaaaaagtcctctcagattttttctccttctcttacctcat

SEQ ID NO: 605994 - DNA, 516 bp, Homo sapiens
atgcatagtttgaaaatattttctcccaatctgcaggttatctctttagtctgttgataatttcttttgctgtgcaggagatttttagtttaattaaatctcatatatttatttttgttttgttgcatctacttttggggtcttacttataaattatttgattatggtttaccagagttgtacaaagggaaaagaaagccacatgatgacagaaaacaaggcagagattggatttatgctgctgcaagtcaaagaaaatctggggctacccaaagccagaaaagataaggaaggattcatccttagatcmttcatagctctgctgatactttgactttatatttctagcctccagaactgtgaaagaatacaattctctttttttagtctacccaatgagaggtaatttattgtggcaactctagcaaatgtaatacatccatcatctatcataatctttcttttggaaaaggggaaaaaagtcctctcagattttttctccttctcttacctcat

SEQ ID NO: 605995 - DNA, 491 bp, Homo sapiens
acttgtagctggatcagcaatttactctagtcctatagtaagtcgtacactcactctcactctcctcaggagattattttgtatcactttctctattcttaaatatttattctctcctcaccacttcgctcttagttaatggtttttcatcacatwgttaaacaaacagaaggtattccaaaaggagttgtatcttctccctccacaaatccagtaatctgtgctctcattcttttctcccatgtcagtggcagaattggtcctctttccatcaacgattagttcctatacatgtgttctggatgccatcttttattatctttgaaagcactgtgcctcttcattatgccatcactatactgcataattagcctgtgttcctattccatcattcacagtttacaaacatgctttcgtgttccttatccttcaaagcaaaatataacgcaaacatgagagttacttgggaataactgcctttttctatttcc

SEQ ID NO: 605996 - DNA, 595 bp, Homo sapiens
actatatgtaaatcatttacatgtgtgtaaatgtgttttakaaaacaaattccctgtgtggtaaataaagtataaatgaagaagtctttctgttagaaggtgttcagaacaaatgtgttatattcagcaaaattataagaatatgaaatctcttctaagtttaaattttaagttcaaatttctgagcaatagctaaaatttccattttaatgcctgaatgggtctaaagctagaaagactttctgaaaaatattagactagaatattcaaaaaatgtaatcaattatcttttgacttaagtgcaaaattcctggatttttagtcacttttatataaatagctttgacatatattttatgaattttaaaaatatcttctgagttggcatgtaatcattccattcttgacactcctaaaacattttgtttatacctttattttagcatgtgttacatcgcagaatagccagtgaactcatcatattgaatcaatttccctccattaactttggaaatatttaaggtcaagaggtacatatttttatctgttccaaaccaggtgatggcaagctcagattctgaaacatatatgttca

SEQ ID NO: 605997 - DNA, 472 bp, Homo sapiens
cctggctaataaaggtgatttgttatttaaatgaacctcacaggtagcagccctcaagagaacagatggtaaatgtgtctttcagaccttcagaggtgtcagactcagttaatccttcctgaatcagacaaggaaagaccttcagagaaattctagctacatcaaatgcaaatattctcttacaaatgcttatctcccccacaaaagacagttctgcatgactacttctgttttctgcctatctgaaaacccatctcaaaatatgtcaaagaagtatatattgtggggtaaattattttaatttccttattgtacatacctttttttcaattttcaytgtcactctattattacctttctttaatgattttgatatttgctttttaactcctttttgattgtatttgacaaattttcttaattttgttacttctctatttttaacattaaagttatcctatgtttatttctt

SEQ ID NO: 605998 - DNA, 512 bp, Homo sapiens
gcctctagatgtttacagcctaagggaacactgtatcacagtgggctttgggtgtaacagacacctacccctagtccccgccacggggccggagcccaaaagcacttgcaccagcctctgcacctgcccatctgcatgatcctactaagggtttgagctgtagggtgaccaagcaggtgagccacaccccttgcatatcctgtgaagggaatcaaggaactcccccatttcagtaacatgaatgataatagcagcacagtttttacgtttttycacagctttctccatgcttggttatttagttagtatatttttaaaggcaaattattatatacattgctctgcaattttcttattttccttaacatggatatgcctcttaaacaatggatgtagttttaactcattccttttagcagattataaaattccacagtatggttctagcacatttttttctttttcaatttgtgatggttaatttcatgtgtcaatttcactgggccaaggta

SEQ ID NO: 605999 - DNA, 616 bp, Homo sapiens
tttttttaatgtaacttttccccacaattcttaataawgttttttaactgcaattttagagtgcattttttgttttgctttgctttccagggtttccaagcgaataattttctgtaggaatttcggtaatagttacctaggtactgattttctcacatttgtgatttttttttctgttagtcaaactcttaaagccaaactgccattcagtttttcttgtatgattatattttgtaggcataactaacatatcctaaattatttcagggatgcttcaaagtagagtttcttttgtgtccactgtaaactgtaatgcatgtggacttgattgcatgggaattacttttctagacgaatatcagattatttcaggcttcatagttcatctttgaatgaagtgatgtttcttaaaaatttcaaatatattccaacagttaaaacatctcaaaatttaaacttaatgatttcttataaaattcctcatttatggaatgctagcaattatagcaatcattcattcactgagcatgtatttaaagtctattctatgccaagcactagcacagttttaagtgcttgatgaatgtatgtgagactttactctttcggtgctttc

SEQ ID NO: 606000 - DNA, 616 bp, Homo sapiens
tttttttaatgtaacttttccccacaattcttaataaagttttttaactgcaattttagagtgcattttttgttttgctttgctttccagggttyccaagcgaataattttctgtaggaatttcggtaatagttacctaggtactgattttctcacatttgtgatttttttttctgttagtcaaactcttaaagccaaactgccattcagtttttcttgtatgattatattttgtaggcataactaacatatcctaaattatttcagggatgcttcaaagtagagtttcttttgtgtccactgtaaactgtaatgcatgtggacttgattgcatgggaattacttttctagacgaatatcagattatttcaggcttcatagttcatctttgaatgaagtgatgtttcttaaaaatttcaaatatattccaacagttaaaacatctcaaaatttaaacttaatgatttcttataaaattcctcatttatggaatgctagcaattatagcaatcattcattcactgagcatgtatttaaagtctattctatgccaagcactagcacagttttaagtgcttgatgaatgtatgtgagactttactctttcggtgctttc

SEQ ID NO: 606001 - DNA, 604 bp, Homo sapiens
gcttatattatagaaagaaattattaatatttgagcaaaggatgactaaaacatgaatagctaccattatgtttattaaatacactttgtattgaatcatccacaattttcataatttttctcattttcccattagatcatagttccaattttttttttttttttgagacagtgtcttgttctgtcacccaggttggagtgcagtggcgcaatctcggctcactgcaagctccacctcctgggttcatgacgttctcctgcctcagcctcccgagtagctgggactacaggcacctgccaccatgcctggctaattttttgtatttttagtagagacgaggtttcaccatgttagccaggatggtctcgatctcctgaccttgtgatcctctcacctcrgcctcccaaagtgctgggattacagacatgagccgccacgcccagccagttccatatttaatttttcttcctgctatacatagccccaaattatttgaaaacattatgttgataaagtaatttatctcatataaaaatgaggaatattcctagggaaagtagaaagattaaaatgtaaattcatattaaaatgataaaatgtatt

SEQ ID NO: 606002 - DNA, 604 bp, Homo sapiens
gcttatattatagaaagaaattattaatatttgagcaaaggatgactaaaacatgaatagctaccattatgtttattaaatacactttgtattgaatcatccacaattttcataatttttctcattttcccattagatcatagttccaattttttttttttttttgagacagtgtcttgttctgtcacccaggttggagtgcagtggcgcaatctcggctcactgcaagctccacctcctgggttcatgacgttctcctgcctcagcctcccgagtagctgggactacaggcacctgccaccatgcctggctaattttttgtatttttagtagagacgaggtttcaccatgttagccaggatggtctcgatctcctgaccttgtgatcctctcacctcagcctcccaaagtgctgggattacagacatgagccgccacgcccagccagttccatatttaatttttcttcctrctatacatagccccaaattatttgaaaacattatgttgataaagtaatttatctcatataaaaatgaggaatattcctagggaaagtagaaagattaaaatgtaaattcatattaaaatgataaaatgtatt

SEQ ID NO: 606003 - DNA, 589 bp, Homo sapiens
gtattttctcttctcaaaataattgactatagctattcatgctaaatataccccagagttgtatatatcttgaagtctatgcttaccctttttaaaataattttctaaaattagcacctttaaaatggatctgcggcaaatactcccttcttgttccaatattgtattttcttttaatttatagcttcgcttgtgcaattctgttggaggacaatgtctaaatgaactgatttattcctacttgaaatggagtatatttttaataaacacagactatatcaaaatcaaccacacacagtgaatctctctggctgtagctcatagcaacagaagccacaaaytgctgcacatatatttgcaacacaaaacacaaaagtttttttttttttttggtaacctttttgaacacttctcactgttggcctttataaatgttagaaaatgacaacaaaatcaactattttgctttatatatttcaaagagtataattgataataataatatccaaacaaatgtgattaaaatgccagtgttggcattttgtgctctttttattttttgggcacattgtatcttgaacaagtaatt

SEQ ID NO: 606004 - DNA, 557 bp, Homo sapiens
ccttcaattttttttttacggttgattttttccctagaatgtatttaatgcctgatcactttcaaactgtggagttattactaaacactttcctacagctgacctgttttggttttggctacagtcacagtaatttctcartcctcgaaaaattataatcacactatatggtcttctgaaaattttatggaaatatggaaatgttcacaaagtcctctgtcttaaagacctacatatttcaactcgctcatccagagcagcagctgaaatctataatcagcttatttagtcttctatccacttctttccttttttgtgtgtgtgagttccttggagtttctcctaaacatatctaaatcagaagtcagccatggatttgaagtgagcttatgtgaagatttaaggcttgctctctgaggctttctcccttctgggacttacccctttggttgctagctggaagccctaaaattcatcctctgatacctcaaacctgtatgactggatttccttttgaattctaagcaccatgttctgcatagactagtaactgtttt

SEQ ID NO: 606005 - DNA, 511 bp, Homo sapiens
tttatttttaggatttataattgttaatgtaagagggtttgttcatacaagctatttcactatcaatggaactagatttatatattcacatttaagataacatttttataatgaaaattatactggcttactatttatgayagtgatataggccttcattaaaagaaatttatctaaccaaaaaatgtgttgattcaaagaaagcattaagtatataaatccatacagataaagatatgccaaaatcataaatttaaatatgaaagacccaaatgcttgaaacattttactgggttcttagctgcctatatgactgaaataaactagtaaagtaattgataaacacaatattttttaaaacctctgatgcttacataatttataactcagtcatcttacaaaaattgagcttattgcaataaaatttaatagttttattaggcttcttttaaatctatggcaatcccttaatagagcaagagttataaaactctgcagataaaaacaaata

SEQ ID NO: 606006 - DNA, 589 bp, Homo sapiens
ctaagcatttctggttcatgtctatatgtttctcttcatacttaaatcattaatttagtcagtggaagtttcacaatattttaaaatgttaggtgtcatttatttatttatttgaaaaccccttacttttagttacatctttttctttgttcttataggtattttagcagaacaataagaaatactctataaggggcgctaatgaagcacattttttcttcataagtatgtgacgacaaaatgaatcaaagagtctcaataacctatacgaaaatttctaaagctttagaaaattccataagcttagttttgaaatcaaaagcttatattcattcattcgacacttatcacttcatgatttttttcaagatattcttgttttccctttaattgtttattcatacatttttatactgttggagcatacatttttatactgttgggtagtcayggtttgtaatatgactaccttcctcaattaaattaacagcctctactgactttttttttttttttttttttgagatagaatcttattctgtttcccaggctggagtgcagcggtacaatctcagctcactgcaacctc

SEQ ID NO: 606007 - DNA, 423 bp, Homo sapiens
gctgtaccaactgcactggactgtaagtgtgataaagacaagatctatgtctcactcctgtctttttcagataaatactgctttgtacactgtcttgcttagagaacatgtggaaccwttaagagttaaccagagaaatgaaggataaatacatatttttaatctatttttgacactaaatggggcatgtgtattcctaactacatccaaatattcttaattctaagaagtgtttactccaatgctctctatttaataatggctttaaaaaaaaaagtcctacatttaagttcacatttgaggtcacaaatgtcaatgtacagcaataagtatctttggggaattattatactttactttctcattcttttgtttttatctcaagggagtatacatttttattacattaatggatgaaaatgt

SEQ ID NO: 606008 - DNA, 423 bp, Homo sapiens
gctgtaccaactgcactggactgtaagtgtgataaagacaagatctatgtctcactcctgtctttttcagataaatactgctttgtacactgtcttgcttagagaacatgtggaacctttaagagttaaccagagaaatgaaggataaatacatatttttaatctatttttgacactaaatggggcatgtgtattcctaactacatccaaatattcttaattctaagaagtgtttactycaatgctctctatttaataatggctttaaaaaaaaaagtcctacatttaagttcacatttgaggtcacaaatgtcaatgtacagcaataagtatctttggggaattattatactttactttctcattcttttgtttttatctcaagggagtatacatttttattacattaatggatgaaaatgt

SEQ ID NO: 606009 - DNA, 439 bp, Homo sapiens
tcacaaatgtcaatgtacagcaataagyatctttggggaattattatactttactttctcattcttttgtttttatctcaagggagtatacatttttattacattaatggatgaaaatgttgaagtcctctgtatgtataaattctgagaatgtagggcagagaatcttacagaatcagttcaagagaaaagccctaaccaaaaatgctataaagagtgaaacactttatacataaagttattaagagtctgattaaaggataagagtatgattgagtattgaggatcatttttggtagactttacttttctcagtccagatccaagaaacccagagaataacttgctttctgagaatacagatatcaagaaatcagattggaaaaatgaccaactataaaaagtgacacactgctcctcctcctgccagtaaatattg

SEQ ID NO: 606010 - DNA, 613 bp, Homo sapiens
cctaactacatccaaatattcttaattctaagaagtgtttactccaatgctctctatttaataatggctttaaaaaaaaaagtcctacatttaagttcacatttgaggtcacaaatgtcaatgtacagcaataagtatctttggggaattattatactttactttctcattcttttgtttttatctcaagggagtatacatttttattacattaatggatgaaaatgttgaagtcctctgtatgtataaattctgagaatgtagggcagagaatcttacagaatcagttcaagagaaaagccctaaccaaaaatgctataaagagtgaaacactttatacataaagttattaagagtctgattaaaggataagagtatgattgagtattgaggatcatttttggtagactttacttttctcagtccagatccaagaaacccagagaataacttgctttctgagaatacagatatcaakaaatcagattggaaaaatgaccaactataaaaagtgacacactgctcctcctcctgccagtaaatattggtaatcatttagaaaggcttgatactgatgcctattaacaactcaggcatacagtagatgccaata

SEQ ID NO: 606011 - DNA, 439 bp, Homo sapiens
tcacaaatgtcaatgtacagcaataagtatctttggggaattattatactttactttctcattcttttgtttttatctcaagggagtatacatttttattacattaatggatgaaaatgttgaagtcctctgtatgtataaattctgagaatgtagggcagagaatcttacagaatcagttcaagagaaaagccctaaccaaaaatgctataaagagtgaaacactttatacataaagttattaagagtctgattaaaggataagagtatgattgagtattgaggatcatttttggtagactttacttttctcagtccagatccaagaaacccagagaataacttgctttctgagaatacagatatcaagaaatcagattggaaaaatgaccaactayaaaaagtgacacactgctcctcctcctgccagtaaatattg

SEQ ID NO: 606012 - DNA, 552 bp, Homo sapiens
actccattctcctctaccacagagtagatctgttttattgatttccattgtattccccctacatatcttttgcgattgcatgcagctacataaccacatacgcatttattttcttttcttctttacaaagcagaagcgtactattgatactcttatacttgttatgtttttttcttatttcaatacatgatagaaaaccttctgtaacagctcatactgattttccttattctttcttacatgcaagtgtttcctacagcaataaaaaatygtctgtgttagttaggtaatttttttttggaatcaaaaataccatcaataggtttacttgtgtgccatattttatcaatatcacagcagtatgttttgatgggagataaagaaaattaaacaacacaaagttgctactttctttaatattatgaaaaatatttatataagaaagactatttttctacgtctttgataaataaaactgggcatgaagtgctctagtagagactctggtgttgcaaaagtctctgtttctcccatttcttccttttcacccaa

SEQ ID NO: 606013 - DNA, 576 bp, Homo sapiens
agaagtttttaacttgatgggaccccatttgttcaattttgctttgattgcctgtggttgtggagtattattcaagaaatctttgcccagtacagtgtcctggagagtttccccaatgttttctttagtagtttcatagtttcaggtcttagagttaagtatttaagccatgttgattttatttgttatgtggcaagagatagcagtctactttcattcttctgcatatggatatctagttttcccagcaccatttattgaagagactgtccttttccaaatagtcttggaaactttgttgaaaatgagttaactgtagatgtatggatttatctctgggttctctatcctgttctactggtctgtttttctsctttattacagtaccgtgctgttttggttgctataggtctgtagtataatttaaagtcaggtaatgtaattccttcagttttattctttttgctcaggagagtgttggctactgtgtgtcttttgtagctttatataaattttaggattttttctcctatttttgtcaagaatgtcattggtattttgataagaattgccttg

SEQ ID NO: 606014 - DNA, 584 bp, Homo sapiens
  misc_feature 421: n = A,T,C or G
gttttaagtccaagcttctgagtgggtggtggtaaaatgtgttgagatggattcataaaggtatcagagtttatgctactaaatatctaaattcaataactcatctctttgccttattttcatgcctatccagctatctcctagtgatcatttttcttcccttgtagcttgtctataggggaaataaattaatggttagacaracacaaatgtctgacctacctcccgtaatatcctcactgcaaattaattaattgcctttctggactacatactttgtgttttgtgagttaatcagtgaaggttatcttttaaaattctaatcaacagtgtgaactaacaagtcttatagtatagactccttagataatacagaaatttaaaaataccttggtgaactaactaccaagtggaaaaaccntacactaccattctctttccattcaattttccatatccgtctatcttcaatagactatacaagaaatatgaaattcatatttctgatcaatgagaacctttaactctttttgcagaaactaatgcagagcgcactcaactgacacaacaaatatagcatttgg

SEQ ID NO: 606015 - DNA, 584 bp, Homo sapiens
  misc_feature 421: n = A,T,C or G
gttttaagtccaagcttctgagtgggtggtggtaaaatgtgttgagatggattcataaaggtatcagagtttatgctactaaatatctaaattcaataactcatctctttgccttattttcatgcctatccagctatctcctagtgatcatttttcttcccttgtagcttgtctataggggaaataaattaatggttagacaaacacaaawgtctgacctacctcccgtaatatcctcactgcaaattaattaattgcctttctggactacatactttgtgttttgtgagttaatcagtgaaggttatcttttaaaattctaatcaacagtgtgaactaacaagtcttatagtatagactccttagataatacagaaatttaaaaataccttggtgaactaactaccaagtggaaaaaccntacactaccattctctttccattcaattttccatatccgtctatcttcaatagactatacaagaaatatgaaattcatatttctgatcaatgagaacctttaactctttttgcagaaactaatgcagagcgcactcaactgacacaacaaatatagcatttgg

SEQ ID NO: 606016 - DNA, 586 bp, Homo sapiens
gttttcttttttactacactacatataaaacaatgggatattttatagatttcctgcataatcctgtggtaaatatttctatttgaacttgaaaatgatcgtttttagttgattactgagttcttttcctcttgatttagttctggtgccttccagatgcaaaagtacacttctcttgctctaagttgacaatgactcctaccaatgtcatcagttattttatagtacaatcttagatttgcgacttcctttattagcttctataatggcagattcattttcttttcatgtagatatcatggaaaggttcatgaaaaggaaagttttaaaatatttgcctgtcgttacttggtactattttctaatttttttatatagaaaaatattaatgtaatttattttttataattttataaatctaaagcccaatatattgtttaacaccaaatagataactatccaccaggctttctgttttacacatttattgaattgaattgaattsaattcaattcaattcaattcaactcaataaagcaattattaaatgtttatgttgtatcaggtatcatcctaggaactattg

SEQ ID NO: 606017 - DNA, 586 bp, Homo sapiens
cctaactaaggcagtctcttaactattagaagtgcatattacctttgattcctgattaaattattttctatatttaattattatagatatattcattaaacttcccacaggactggaacatgattatgcaatatacagcttttaaaacaaattcttttgtagaaaacaaccacagagtaatatgatattttaaacaccaacatgcattttcaacagaaattaaatttcctgaaagaaaatactttcactttaaacatwgggaacttaaaattgaagatatcgatagtacatgtaattgtcattatactaatttacctctattttattattcagttttaaacatattttgataagatattatcttcaactttgtttcagaaagccagccttctttgacccataaaatgagctaaaaagtaggtagagtgagaaaataaaaataacagtgggaaaaagctaagacatgaataagcttaaacttattaactataatggtttcatatatactaaatttgggtttgttaattaagttaattgctcctccttctaatactggtattctggcctgtgctttcaaaaattgttt

SEQ ID NO: 606018 - DNA, 636 bp, Homo sapiens
tggttctatatgcacaccttttagttcccaaagtttagttaaataacaccagtcccccatctaccatggttcacatttcggttaccatgactgaaataactgtaaataatcacatatagtctgaaytttgctgctaactcttcaatctacaaatcactgtataaataataaatgtataccataattagtgaccaatcgtcacattccttgtctgcagtgaatggtgactgtacatatattatttatttcaaaaatagacaacaaagaatgttgttgtgttgccgccttggcccccagtgataagcccaaatgatcgtttacaaaatagataatccaaagacagagttgcccaacaaaggtacaagtgtcacaaaaacacagaacatgaaatttgaatggaatgtaaacatagttataaaagaaatagctgatcatgagaatgttgatacctccacctttccagagactccagatatgcagacacaggaacttagtgaaagtaaatctaccaatataaattaggaaaggaagtgtgtccaaaaggatgaggatgccgaagaagaagtgacaccaggtaaatccttattttaaagggactcagagatactccacaatattgcaaatgtgataaaatgc

SEQ ID NO: 606019 - DNA, 469 bp, Homo sapiens
gtctgctgccagatatattgaaacttcattgcatgttatttgtttcttttctctttctgagatccttaggatccattctttatctttggcctttgggagtttgattattaaatgccttgaggtagactcctttgggttaaattggcttggtgttctataaccttcttgtatttgaatatttatatctttctctaggtttgagaaattccctgtttttatccctttcaataaattttttatcacgctttctctctacctcctctgtaaggccaacaactcttaggttcaccctcttgaagctgttttctagatcttgtatgygtacttatttcttttttattcttttttcttttgtcttctctgtgtattttcaaatagtctatttttaagctcactaattcattcttctgcttgataaattctgctatgaagagaccctgatgcattcttccaaatgtcaattatattt

SEQ ID NO: 606020 - DNA, 622 bp, Homo sapiens
tactctagttaagtctgcagagttctgtgtgaggtggggcagcacagaaatgaacaatgcatcagagagagagaactggctgctcctgctttattcttatagctcaattatatgtacaaggctgtctataaaatgtttctatccaaacatgaatcttgaacaccactaatttcaccagtgatttgtggtatcatagatgtcatcacttatgttaattttagtgcaaaacagaatttagtcaatatactttgcaattctgagggtgaatatttctgattacagtaactataatgctaacaatatrtactaattgtggattcataatgagtatatgtcaaattctagttattctgtaggatctatggttttgtgattaagatactttaatgctctttaaacatcagaagaagtgaagattaaatttaacctacataaataaataatttatattgaaatgctttaaggagatatttcatttaactatatacatagacaaatgtatgaagtcataaatatacaacacaaagtgtacaccccaaactaatcagcacacagaataagataaagaacattttttgtgtcccagaagtccctctcatgtacactccagcccctactccct

SEQ ID NO: 606021 - DNA, 600 bp, Homo sapiens
taatcaatagtttccaaattggttataccagttcacactcctactaccagtatctgaaaaaaaattgccgccccttatcaataaaaaaattggcattgtctcaatttctaatgaactacatgatggtcgcatattttctttcaattagcatttscatgatgactaaaagctgaacacttgtcagctgttttatgactagcattattattaaaaaactaataaatctatcaaatttcaatcagctttgaccacacaagataaaattttcataaacctttccatactctttctccaactttctgtattcacttagttttatctgtcactccctttttatttttttaatttaaaaactttaaactagataaaattacttttcctttaacagaaaaattttatgcctgccttataatattttgtaccaaaaacacaacgtattttccatacacatttcaaacacagaaatgtttctcttatatttagaagttttaactgtatatattacttacagtgttaactcttagtaaccttaattttcagtgcaaaacataggaaggaagtaattttaagtgttatgtattagatgcatagcccaggaag

SEQ ID NO: 606022 - DNA, 390 bp, Homo sapiens
ctgaaactcaaggtgcaacagttgggatgggcttttcccctctctctagggctcaagtaaatgctctgtgggcaccagctgagttctacccagagttgttttacactgcaaaagggcaacactgagttccaatgcaaagttccacagtaactgtgctctctctctcacaagcacatagatttgctctctgtgccatgtctatttgtcagggtcttgtggctgtcaagggaatgatggaggggtcrtgtcagcaattaagactttttttttcctgccctcttttgtggctctttcagcaatatgaagttataaccaggtactgtgattgctcacttaatttttggttctcatgaaggagcttttttatgtagatagttgttgattttggtg

SEQ ID NO: 606023 - DNA, 559 bp, Homo sapiens
acttcgacataaagcagggacctgattgtttcatctgcttcccttattgaattgcgtgcatgtatattttggagaagttctcaaaaggaactgtttttccaccagtttatatcaaattatatgtaatcatccaaatacaaagttcaagaactctaacctctaaaaaacagcgaaacatattcatttttatttcctcattttgacttttaagtatgcatatactttaaagggcytattttttaaatgaattcatgctttgaatgttttcttgaaatcctctcttctgaatatgacttaatccatgttggttttatatgtcaacttttcattgactattaatattaataaggctgtttcatgcatgtttatactacttgaatctacataacttcattcttctaagtgttttgtactgtatatttattaaggatatagtctttttatcattttctgtttgtagtcattagcctcattttcctacattgttctatagtgaatatcacagtcaactatagtcattagctaatgatccattgtctcttagatgcaagattagaaa

SEQ ID NO: 606024 - DNA, 559 bp, Homo sapiens
acttcgacataaagcagggacctgattgtttcatctgcttcccttattgaattgcgtgcatgtatattttggagaagttctcaaaaggaactgtttttccaccagtttatatcaaattatatgtaatcatccaaatacaaagttcaagaactctaacctctaaaaaacagcgaaacatattcatttttatttcctcattttgacttttaagtatgcatatactttaaagggcctattttttaaatgaattcatgctttgaatgttttcttgaaatcctctcttctgaatatgacttaatccatgttggttttatatgtcaacttttcattgactattaatattaataaggctgtttcatgcatgtttatactacttgaatctacataacttcattcttctaagtgttttgtactgtatatttattaaggatatagtctttttatcattttctgtttgtagtcattagcytcattttcctacattgttctatagtgaatatcacagtcaactatagtcattagctaatgatccattgtctcttagatgcaagattagaaa

SEQ ID NO: 606025 - DNA, 559 bp, Homo sapiens
acttcgacataaagcagggacctgattgtttcatctgcttcccttattgaattgcgtgcatgtatattttggagaagttctcaaaaggaactgtttttccaccagtttatatcaaattatatgtaatcatccaaatacaaagttcaagaactctaacctctaaaaaacagcgaaacatattcatttttatttcctcattttgacttttaagtatgcatatactttaaagggcctattttttaaatgaattcatgctttgaatgttttcttgaaatcctctcttctgaatatgacttaatccatgttggttttatatgtcaacttttcattgactattaatattaataaggctgtttcatgcatgtttatactacttgaatctacataacttcattcttctaagtgttttgtactgtatatttattaaggatatagtctttttatcattttctgtttgtagtcattagcctcattttcytacattgttctatagtgaatatcacagtcaactatagtcattagctaatgatccattgtctcttagatgcaagattagaaa

SEQ ID NO: 606026 - DNA, 557 bp, Homo sapiens
ttcgtttttttttctgcttgttttatctactctttttccaaaccctttctcctttctctgtcttctttttgattaactattttttaataattgcattttattcccctttttggccttatagataaaactcttgtattttttttgttagtggtttcttgaggttttatagtacagaactttaacttactggcatcttctttcaagtgttattatgctacttctcacaatataagaactttaaaacattgtactttcatttgttttctaacatttgtgctattgttgtcatatagtttatttacacatgtataataaatccattctaaagkgttgttatttttgtttaaaccgtcatttaaaataaaaagtggtttaaatagtaagaaaataatcttatatattagctcatgcagttattgttttctatgttcatcatttcattgtgcagatgcacattctatctgatataattttccttctgcctgaagaacttcctttaacatttcttgtagtatgtgtctgatattgatgacttattttaatttttttaaacatat

SEQ ID NO: 606027 - DNA, 469 bp, Homo sapiens
tctaggggctttggggatgaccaactgatgtttggggctatgtctgactgttccttcagtatcttaaaatatttttcatctgggctttagactagaattaaatcaagcaattagcagttctctggttatcttctctatttggggcttttatgccttttcatcatgtttattttttctttctaagtttaaagataattctcctttcccttgaacacagtgtagtgtggtggctaagagtgcaggctctgaaatcagactagaacttgagtcctatcctgatgcttactagctgtgtgaccttaaggtctctcgtatcatattttctcatctgtaaaacgggaatcrtattaggacttaccttgagaattgcgaaaactaaatgagttaatgcatgcaagagttaatgcatgtaatatgtttaaaatagtctcaatgaattttagtttctgttattattagcctgatgaag

SEQ ID NO: 606028 - DNA, 407 bp, Homo sapiens
gtgaaacctcgtctctactaaraatacaaaaattagccgggcatggtggtgggtacctataattccagctactcaggaggctgaggcaggagaattgcttgaacttgaaaggcagaggttgtagtgagccaagatcatgccactgcactccagcctgggtgacaaaacagactttgtctcaaataaataaataaataaataaatatatatttaaaaaatcattaagaataagacaaatattcccagctttaagaaatgggtgcctaggttgggctccccaaaaagcagacttaagagaaagattcgtggtcagaaggtttattgtgtagtgcttgaaaccacctttgcaagaattataactgaggaaattatgacagtgagagagatcagatctaaccgactccatc

SEQ ID NO: 606029 - DNA, 407 bp, Homo sapiens
gtgaaacctcgtctctactaagaatacaaaaattagccgggcatggtggtgggtacctataattccagctactcaggaggctgaggcaggagaattgcttgaacttgaaaggcagaggttgtagtgagccaagatcatgccactgcactccagcctgggtgacaaaacagactttgtctcaaataaataaataaataaataaatawatatttaaaaaatcattaagaataagacaaatattcccagctttaagaaatgggtgcctaggttgggctccccaaaaagcagacttaagagaaagattcgtggtcagaaggtttattgtgtagtgcttgaaaccacctttgcaagaattataactgaggaaattatgacagtgagagagatcagatctaaccgactccatc

SEQ ID NO: 606030 - DNA, 658 bp, Homo sapiens
atacacagtgggaaaagatggctattgaagttatcctttcccctttgatataatcactaaatgattgatctttttctcacaaatagtggcaatttggggaaatctcagaacaggcaggccttccaaatcaacgatgctagataacgttttgctttataaatacgaagttgtcccaggttgactgtgggaagagcaacactggttcattgcataaaacattacacaatgtttgttgatctaacttgacttgcaagctatcctgtgagttttatgataatttatgccaattggtggtatgatgcttgagttatggtaccttatgatgttgcttataagtgaaatgaagtatactccaatgtagaaacacctacaatctgattaaattgtagggtgcatctaataaatggtttctacagacatacttaaagyggacagaaaagcaaaatatgtgtctaaacagaaatgttaaaggggaatattctgattactgagttttcagcaacccttctgcccacaatctttcctgaagtttgggtaaattcatggctgggtcttcagccatagaaagtctgtcctcatcctttcttttttctttcttgaatttcatttcattgtggtaagaggacttggtaagagatctaccctcttaaaattttaa

SEQ ID NO: 606031 - DNA, 519 bp, Homo sapiens
tgtacttgatttcctccatttgactctctccaagaactgacggcagcctgtgagccaacagrtttgcaaaacaagccccactcttcctgggtcatgctgaggggagagtcagctaccatcgcagcatccaccattccaacccctcccactgccactcctaactctgcactcttacagcaccgtattgtaactctgcttctgtttttattccctatgagaaggtaaactcccttctgaaagttgagacatctttctttgttgtacctaccatagtactgaatatatagtatcacctttggaatgtttatatactaaatcctatcataaaagcactaaggattcttgatattagaggcaaccttctagaaaatccttttgtaaataggaatattatatttgggtgatgacatcctaatttatattattggaccacaggaatagaggaagagcctaggactaaagtttgtgatcagagcctatgtttagatgatcttacttactaaaatctgagttgaatat

SEQ ID NO: 606032 - DNA, 476 bp, Homo sapiens
aatcttggctcactgcaacctcctcctctcgggttcatgcaattcttgtgcctcagcctcccaagtagctgggatcacaggtgtgtgtcaccatgcctggctgatttttgtatttttagtagacatggggtttcaccatgttgcccaggctggtctcgaactcctgacctcaagtgatccacccgtcttggcctcccaaagtgctgggattacaggcatgagccaccatgcccggcccgttcaaacattcaaaccatagcagccctgcttaggaatccttgtaaagcctcatatcagaccacctcttcctgcatgtgaagtggaagatcaagtatagtgctatagacctctagtgctcctgttaaagatgcttttcttttaagctaagcatgcacctagggatgggagattaatatagatgaaataattgcttatgtttaactacayaaatgccatgtttatcttttaatatttct

SEQ ID NO: 606033 - DNA, 395 bp, Homo sapiens
ctgagtgcttggtagttgtttccatctaaacagcacactctgggaagatgtggggaaaagcaagagagatcagattgttactgtgtctgtgtagaaagaagtagacataggagactccattttgttmtgtactaagaaaaattcttctgccttgagattctgttaatctataaccttacccccaaccccgtgctctctgaaacgtgtgctgtgtcaactcagagttaaatggattaagggcggtgcaagatgtgctttgttaaacagatgcttgaaggcagcatgctccttaagagtcatcaccactccctaatctcaagtacccagggacacaaaaactgcggaaggccgcagggacctctgcctaggaaagccaggtattgtccaaggtttct

SEQ ID NO: 606034 - DNA, 395 bp, Homo sapiens
ctgagtgcttggtagttgtttccatctaaacagcacactctgggaagatgtggggaaaagcaagagagatcagattgttactgtgtctgtgtagaaagaagtagacataggagactccattttgttatgtactaagaaaaattcttctgccttgagattctgttaatctataaccttacccccaaccccgtgctctctgaaacrtgtgctgtgtcaactcagagttaaatggattaagggcggtgcaagatgtgctttgttaaacagatgcttgaaggcagcatgctccttaagagtcatcaccactccctaatctcaagtacccagggacacaaaaactgcggaaggccgcagggacctctgcctaggaaagccaggtattgtccaaggtttct

SEQ ID NO: 606035 - DNA, 395 bp, Homo sapiens
ctgagtgcttggtagttgtttccatctaaacagcacactctgggaagatgtggggaaaagcaagagagatcagattgttactgtgtctgtgtagaaagaagtagacataggagactccattttgttatgtactaagaaaaattcttctgccttgagattctgttaatctataaccttacccccaaccccgtgctctctgaaacgtgtgctgtgtcaactcagagttaaatggattaagggcggtgcaagatgtgctttgttaaacagatgcttgaaggcagcaygctccttaagagtcatcaccactccctaatctcaagtacccagggacacaaaaactgcggaaggccgcagggacctctgcctaggaaagccaggtattgtccaaggtttct

SEQ ID NO: 606036 - DNA, 395 bp, Homo sapiens
ctgagtgcttggtagttgtttccatctaaacagcacactctgggaagatgtggggaaaagcaagagagatcagattgttactgtgtctgtgtagaaagaagtagacataggagactccattttgttatgtactaagaaaaattcttctgccttgagattctgttaatctataaccttacccccaaccccgtgctctctgaaacgtgtgctgtgtcaactcagagttaaatggattaagggcggtgcaagatgtgctttgttaaacagatgcttgaaggcagcatgctccttaagagtcatcaccactccctaatctcaagtacccagggacacaaaarctgcggaaggccgcagggacctctgcctaggaaagccaggtattgtccaaggtttct

SEQ ID NO: 606037 - DNA, 594 bp, Homo sapiens
ttatttatacccacttccatcattgccgtggttcaccaaaacaggatgaatactgaaggctgaaataaataactgcagactgcaggggaagcgtaactatagcaatgaattaaaacccatattagcaaacaacacaattactatatggtcacgtaaagtcacttgaggtaattcataaatttctttctgagcttcctggcagtcaaagcaaaaagagaaaaatgcttagctttaagggttatacttataggttcataggtattcagaagaagcataattttcctgatcctgagattttttttttttttttgagacagtgtctcgctctgtcactcaggctggagtgcaatggtgtgatctcggctcactgcaacctccacctcccaggttcaagcgattatcctgcctcagcctcccragtagctgagactaaaggcacccgccactgcgccccagctaatttttatattttttaatagagatggggtttcaccatgttggccaggatggtctcgatctcttgaccttgtgatccgcctgccttggcctcccaaagtgctgggattacaggtgtgaaccactgctcctggctga

SEQ ID NO: 606038 - DNA, 633 bp, Homo sapiens
cccagctactcaggaggctgaggtgggaggactgcttgagcccgggatgtcaaggctgcattgagccatgactaagcccctgcatgccagcctgggcaacagagtgaggaccgtatcttaaaaaagacaagaaaaactaaagctggttccaaatttcatactttacatcaaaacaaatttacataattaaagatttaatgtgaaaaataaaatcataaatactagaagaaaatataggcaaaaatttaaataatcttagataagaagttctctttaagcataacaggaaacggaaaaagtctaatagatttaattaaagctatcaacaacatacaagcaaaacaacaaaaataaaatcttttcgatgttaaaaaatcataaaagatgaaagacaaataacaaaataggggaaatacgtayatcaagaaggataaatgattaacattttcataaaaatcaatagcaaaagaaagatcaacataaacatgggaaaataataaaaataggcatttcactccccatatagttggtaaaaagaaaaaaaaataaggaaagagtgactttactagtaatacatgaattgcaagcacaactaagttagcatttgtggagcatcagattggcaaaaattaa

SEQ ID NO: 606039 - DNA, 556 bp, Homo sapiens
ttggcatccccaactgctgggattccaggtgtgagccaccgtgccccacctctttctctcattctctttgtgcctcaggtgtgggagagggaggaaatgctgtgtgagagcaamacttggcaagctgcctggggcataaagcaaggtgccttcagaagcaatactgtctcttcaaggcaacatactttcccattctaccaggatactccctttttagcagacagtgatgctttttaaaattatccatttcacttaataagatggttaaatcaaaaaagagacctctgtacaacaggcaagagaatactcttccaaaatatacaaatatatgtgtaattagaatacaatggcagccacaatgtagtttcttcctcaatactttggacagtgagactctggggcattgcttgtaatatggataaccataataaaggcataaaaaaagtgttcctatatgtacgatctcactaaattgaacaaatgggagaatagctttgtatgggcaggcaacagatgtttgtttcaggcaaagatttttcttcctgcagaggagtaa

SEQ ID NO: 606040 - DNA, 548 bp, Homo sapiens
gattggttaagcttaagttttattttagtgtttacattgaattgcttacataagaakccagggtactggagccatctcagcctaatgggttatcaaatgatatttctaaacaattcctttggcatcttccttgagggagtagctcacttgccctcccctgcctcctttttttttttttttgagttagagtctcactctgtcacccaggctggagtgcagtggcacagtcttggctcactgcagcctctgcctcctgggttcaagtgattctcctgcctcagcctcccaagtacctgggattacaggcaccctccaccatacctggctaatttttgaatttttttagtagagacaggatcttgtcatgttggccaggctggtctcaaactcctgacttcagatgatctgtctttcttggcctcccaaagtgctgggatttataggcatgatccaccatgtctggtctcacctgcccctttctgcagggcctccctctgccacttctctgtgctctccctgcctagtggaaccctagcaactggcaaaag

SEQ ID NO: 606041 - DNA, 548 bp, Homo sapiens
gattggttaagcttaagttttattttagtgtttacattgaattgcttacataagaagccagggtactggagccatctcagcctaatgggttmtcaaatgatatttctaaacaattcctttggcatcttccttgagggagtagctcacttgccctcccctgcctcctttttttttttttttgagttagagtctcactctgtcacccaggctggagtgcagtggcacagtcttggctcactgcagcctctgcctcctgggttcaagtgattctcctgcctcagcctcccaagtacctgggattacaggcaccctccaccatacctggctaatttttgaatttttttagtagagacaggatcttgtcatgttggccaggctggtctcaaactcctgacttcagatgatctgtctttcttggcctcccaaagtgctgggatttataggcatgatccaccatgtctggtctcacctgcccctttctgcagggcctccctctgccacttctctgtgctctccctgcctagtggaaccctagcaactggcaaaag

SEQ ID NO: 606042 - DNA, 548 bp, Homo sapiens
gattggttaagcttaagttttattttagtgtttacattgaattgcttacataagaagccagggtactggagccatctcagcctaatgggttatcaaatgatatttctaaacaattcctttggcatcttccttgagggagtagctcacttgccctcccctgcctcctttttttttttttttgagttrgagtctcactctgtcacccaggctggagtgcagtggcacagtcttggctcactgcagcctctgcctcctgggttcaagtgattctcctgcctcagcctcccaagtacctgggattacaggcaccctccaccatacctggctaatttttgaatttttttagtagagacaggatcttgtcatgttggccaggctggtctcaaactcctgacttcagatgatctgtctttcttggcctcccaaagtgctgggatttataggcatgatccaccatgtctggtctcacctgcccctttctgcagggcctccctctgccacttctctgtgctctccctgcctagtggaaccctagcaactggcaaaag

SEQ ID NO: 606043 - DNA, 609 bp, Homo sapiens
caacagccctgttctgattctctacaatacaccaccctgcagaatatgaagccaatctcctcgcttcatgtaattctaagcatcagaaggcaaatggtttaggaaaactggaacttgctgctgaaagatgtgaacttaaataaaagttgattagactcaaggtttatttttgtggtctgttacacagcaatgacatttggtcatgcattttcattcactatttgttgggagattattccattcaaagatttccaagcttttgartagctttaatgagttaagattccaaaatcaaagaaaagtttactttttggtaccttggctactttatgctccaggaacaaagccaaggtcaagggaggtggtatagataggtggagagatagatagatacacacatatacatatgtagatatctatcaatttctccagtgtactaaactccaagcatactcagtctgtgtacctatatattcaccactttgatgggactattgcaatacgcacacgcacacgccctagtatatgtatatatgcatatacacaaacacatactacttgatgtcaagagatgtatctatatatacatatgtacctacacagatatgt

SEQ ID NO: 606044 - DNA, 609 bp, Homo sapiens
caacagccctgttctgattctctacaatacaccaccctgcagaatatgaagccaatctcctcgcttcatgtaattctaagcatcagaaggcaaatggtttaggaaaactggaacttgctgctgaaagatgtgaacttaaataaaagttgattagactcaaggtttatttttgtggtctgttacacagcaatgacatttggtcatgcattttcattcactatttgttgggagattattccattcaaagatttccaagcttttgagtagctttaatgagttaagattccaaaatcaaagaaaagtttactttttggtaccttggctactttatgctccaggaacaaagccaaggtcaagggaggtggtatagataggtrgagagatagatagatacacacatatacatatgtagatatctatcaatttctccagtgtactaaactccaagcatactcagtctgtgtacctatatattcaccactttgatgggactattgcaatacgcacacgcacacgccctagtatatgtatatatgcatatacacaaacacatactacttgatgtcaagagatgtatctatatatacatatgtacctacacagatatgt

SEQ ID NO: 606045 - DNA, 668 bp, Homo sapiens
atatttagtatttttataaattagattacaatttaattggagaatacaatatcagaaaaattatccaaaaagcttagagaataatagcgctaatgcaaaatgtgctacttgtctggccttccacaagaaagcacatgaggaactaagacataattttttccttcttatttgtaaaagtctaattcaaagttattagctcagcacagtaaatatacgtgctaaagactgggtgaacaatggcaaataaactttgaagaccaaatcctcttttacaactaaaagtaacattactgagctttctgcaggattttctgggtaagtttttctgcatggccagccccagcaaggccccgaatgcctggtttgctactttctaatcctgtaacttctcttcccataataatgtgtagcttgtaaggccttagctcaattttccagatgatttcagagacaaagaattgctgatttgttacactaatcttgacatttcaaattacaactggaaataatcttcctkaattagtcatgttctttctgttgaaaatatcagacatttgacatatttgtttagcaaatatgtcgattttctggtctttatggtctttcagtcccatgttgatattcacatattaaatttttagcttgctccacagcaaagatgcaaatat

SEQ ID NO: 606046 - DNA, 527 bp, Homo sapiens
aaggaggaagagagtaagtttctccacacatggaagcttctggagaaactgtcttaaaaaaaaagaaagtgcatgggttccttttgttactaaattataggagcatggaaagttagggctagaagagataaaacattatctagcccatcttcctatcttcagagaggatttcatttataaattatcagccagttaaactttttcttttggttttaaaattttccagggagggagatgccacttgctcccccagcaaatcaatactccctagtgttgggaaattgttgtggacatatgtgcacttcctcttgttctgaatccagagggtatgggaaggatttgatcagcagatgtgcctagtgaatgagaagcacacamaaaaaaaatgaattacaagtcagggctctggattcctctccctcacttgcttagctgggacaaggtgggcctcagattttgcatctggaaaacaaagagattggactaacatcagtgggtttccacaaatggctggatctcaaaatcac

SEQ ID NO: 606047 - DNA, 606 bp, Homo sapiens
ccatgggctgctgctgctgctgctgtttcatatcacttggcactgctgaaaaggctggcagtgaggctggttaaatttgtaataagttgttcatttctgcataaaggaaaaatggaccagcaatttttcttttctaatgttcagttaccactgtcctttatgtgaaacgataacaatggactccctcccatcagcatctttgaaacactctcctcctgtggagacgactggcctgtggttgtgcagcagagcagacatgctcatttctgtcgtcaggtcaccatgttccctgcaggtgtgtggctcatcgtaatcctctatgcttgcacttaatgggtttttttttgcaagattaaaaatgcaggtgtagcacacatcattaatccccaatttcagttaactgaactgtgtgtktatttatgcagctgctgactcctgagacacccacttggaaagaagacaaaagttctgaatgtacctttctgtaattcagtaaacatacagagtacaaattaaaaaaaaaaaattaaggatttttaattcaacagccttgccaatgggggcactggccacaaacacacttgttcatgaaaagatctatttcaa

SEQ ID NO: 606048 - DNA, 619 bp, Homo sapiens
aaacgataacaatggactccctcccatcagcatctttgaaacactctcctcctgtggagacgactggcctgtggttgtgcagcagagcagacatgctcatttctgtcgtcaggtcaccatgttccctgcaggtgtgtggctcatcgtaatcctctatgcttgcacttaatgggtttttttttgcaagattaaaaatgcaggtgtagcacacatcattaatccccaatttcagttaactgaactgtgtgtgtatttatgcagctgctgactcctgagacacccacttggaaagaagacaaaagttctgaatgtacctttctgtaattcagtaaacatacagagtacaaattaaaaaaaaaaaattaaggatttttaattcaacagccttgccaatgggggcastggccacaaacacacttgttcatgaaaagatctatttcaagtattctcctggaagcaagaaccagtatctggaatgtaggcagcatttgttctttaaacaaaattaaagttttacaggaatgcaatgctgtgtactcattaaaaaaaaattacaagtagaaaaatctggaaagaatccattttgtgctgtgtctttccgactggaggttgtaagtgg

SEQ ID NO: 606049 - DNA, 570 bp, Homo sapiens
ctgccaaccaacaattctttccaccaaggcattagtgtgcatgatttcttctggatgcctgggaagatggttttggttgtagactcaaggctaaatgaagctataaccaagccccttgggagactaggctatttatgggcttgaacccagaaacaagtgtgccagggtagatctgccaactagatgtcagtctgtagtctcaaaacaactctcctaggtcttgggctccactgtgatttcacaaactcctacctacatcctgaggctcccatagagagacttttgactgtggatgggtatacagttcttcatattctgggggcgataaatggattaycttctttttttttttttttgaaacggggactagctctgtcacccaggttggagtgcagtggtgtgatctcagctcactgcaaccttcgcctcctgggttcaagtgattctccggcctcagcctcctgagtagctgagattacaggtatgccaccactcccagctattttttgtatttttagaagagatgggatttcaccatgttggccagactggtgtcaaactcctgatctc

SEQ ID NO: 606050 - DNA, 453 bp, Homo sapiens
ggtgtcaaactcctgatctcaagtgacccgcctgccttggcctcccaaactgctgggattacaagcatgagacactgcgcccagccatggtttactttctattttaccatcttggtgatctcactctggaaaaattaattttttaatgaaggaactccttaatcataccttggagaagagtatatatcacagcatgacaagatctacaacttagtataggacagaaaaaaaaattatgtatttatatttttctagaagctgctaatagttaartgatccattttagcactggtttgattaaataaagaaactagaagacagaaaaactctataatgttgtttctgtgtttttatattgtccttttattttcagacaatggagaccataaaagtgaacactatatctaataaatcaaggaaatgaaaatacagctgggtgcatgaatgaaaaag

SEQ ID NO: 606051 - DNA, 591 bp, Homo sapiens
gcagtttccattttatagatgaggtatctcaagttcagagaagttcagtaccttgactaaggacaaaactaaaacagagccgactgaagaattgcaatctttcattgtagtctacagttcaataacaacactgaataggggttgtgggtaaataaggaatgaagttttctgtctccaaggagaaggcatcctgagtctttgggagacagcagtagtaatggcagtgaaagcagataaaccttgttcaaaacaggttatctgcttatcaaagcaccaactactgagacatcaactgatttcctcatgctcagagcctgtacacaagaggaacaaagtttggtaccaaaaattggtgtggttcaaagaagtggggactrtacaataaagaaaagctgtattgttctaagtaaattttcttttgtatttcatgaggtcacaaatagttctagcatttttcccccttggctttcttttggagaggacattacaaatgatagtgattcgatgacagacattctttttccccaagtggttcagagcattccaaaggacacaaggctatttttattcagtggagcttgggactcttgg

SEQ ID NO: 606052 - DNA, 635 bp, Homo sapiens
tcttatctacacatctatgaaataataaatacgtcatcttaagatgctctatttgtggtaatttgtgacagcagctatagaaaactaataaaatgaatacaggcaacaacaaatattgaacattccttcaatgctacaggacaatttttttttaccattgaatatttagcaayatatatcactgcaaattgtatatttagttttctaatattcacaaattagggaaatgactagtagaaaaaaacaagtaaaaaatcagcaacataataggaaagggaactcttctgctttttgaaaattaacattaataagatgaaagggcaaactgcatactgggagacaatcggcacaatacatttatctcacaaaggactgtatctacaatatgtaaagaattctcacaattcaataaaaagaatcaacccaattaaaatgcacaaaacatttgactagacccttcacaaaggaagatatgtgaatggtcgataaacatgaaaaaatgcttagtcatcagggaaatgaaaacgtaaatcacagtgcaataccacaacacacccaatcaaatggctatacgtgtgtatacatgtatgtaaatatatatatgtatataatgccaaatgttggtaaagacaaga

SEQ ID NO: 606053 - DNA, 614 bp, Homo sapiens
gttcctgcctgtactcccagctactcgggaggctgaggcaggagaatcccttgaacccgggaggcagagtttgcagtgagccaagactgcaccactgcactccagcctggatgaaagaatgagactctgtctcaaaaaacaaaacaaaaacaaaaacaacaaaaaataatattctatatccctatttctgcatctgcagctcacgttcccatatcagacatctgtacgtcagcttccctctcccacaccctggcaaagtctaagccccatgcccaaggcagagggagcttttcagtccatttcttgtcttcgtggtgacacctaatgatgctgaactgtcccttgttgaatctgcccctctgttgagctacctgacaccatcctctcctgttcccctctgccttttctgactygccattcttcctcttcctgtcagatacctgttttgtttggcttggtttggttttagctctgtggtggttaattttatgtcaacttgccctgatatctggtcagacaccattctgagtgtatttgtgggagtgtttctggatgggatgaacattgaattggtggaatgactaaagcagatgctctccccaatgtgggtgggc

SEQ ID NO: 606054 - DNA, 582 bp, Homo sapiens
cgcagtggctcacgcctgcaatcccagcacttttgggatttggaggccaaggcaggtggatcacctgtagttctgaactctgtgctcctaaccccacccttagccatctcagattagacattttgtttcagcttcccagggggagcaattcatccttctgaaggctgagatgtttcttctttaggtctcatcaaaattactcttgtttgaaagtagcaccttcctcccctctttcatgaaatataagcaacaatttgcccacaattttttcattaagcaccacacacacacacatttttttttccaaaatytatttcagttaaggcggtgtatgtgcaggtttgttaaacaggtaaatagtatttcactggggtttggcgtatgaatgatttattcatccagttaataagcatatatccagtaggtagttttttgatcctcaccctcctccttcaggtaggcactggtgtctattgttcctgtctttttatccatgtgtactcaatgtttagctcccacttataagtgagaacatgcggtattcagtcttctgttcctacgttagttcacttagcataatga

SEQ ID NO: 606055 - DNA, 582 bp, Homo sapiens
cgcagtggctcacgcctgcaatcccagcacttttgggatttggaggccaaggcaggtggatcacctgtagttctgaactctgtgctcctaaccccacccttagccatctcagattagacattttgtttcagcttcccagggggagcaattcatccttctgaaggctgagatgtttcttctttaggtctcatcaaaattactcttgtttgaaagtagcaccttcctcccctctttcatgaaatataagcaacaatttgcccacaattttttcattaagcaccacacacacacacatttttttttccaaaatctatttcagttmaggcggtgtatgtgcaggtttgttaaacaggtaaatagtatttcactggggtttggcgtatgaatgatttattcatccagttaataagcatatatccagtaggtagttttttgatcctcaccctcctccttcaggtaggcactggtgtctattgttcctgtctttttatccatgtgtactcaatgtttagctcccacttataagtgagaacatgcggtattcagtcttctgttcctacgttagttcacttagcataatga

SEQ ID NO: 606056 - DNA, 582 bp, Homo sapiens
cgcagtggctcacgcctgcaatcccagcacttttgggatttggaggccaaggcaggtggatcacctgtagttctgaactctgtgctcctaaccccacccttagccatctcagattagacattttgtttcagcttcccagggggagcaattcatccttctgaaggctgagatgtttcttctttaggtctcatcaaaattactcttgtttgaaagtagcaccttcctcccctctttcatgaaatataagcaacaatttgcccacaattttttcattaagcaccacacacacacacatttttttttccaaaatctatttcagttaaggcggtgtatgtgcrggtttgttaaacaggtaaatagtatttcactggggtttggcgtatgaatgatttattcatccagttaataagcatatatccagtaggtagttttttgatcctcaccctcctccttcaggtaggcactggtgtctattgttcctgtctttttatccatgtgtactcaatgtttagctcccacttataagtgagaacatgcggtattcagtcttctgttcctacgttagttcacttagcataatga

SEQ ID NO: 606057 - DNA, 619 bp, Homo sapiens
tgaaaaatgagtatattggatttcatccaaattttgaacatctctttggaaaacactgttaagagaatgaaaacacaaggtacatactgagaaaaaaaatacttgcaagtcgtttgcctgaaaaaaatgacttgtacttaaatatgtacagaattctcaaaactcaataataagaaaacagctcaataaaaaataggcaaaagattttaatagacactttactaatacaaacaaacaagcggccgggcatggtggctcacrcctgtaatcccagcaatttgggaggccgaggtgggtggatcacgaggtcagaagattgagaccatcctggctaacacagtgaaaccccatctctactaaaaatacaaaaaattatctgggtgtggtggcgggtgcctgtagtggcagctactcaggaggctgaggcagaagaatggcatgaacccgggaggcagagcttgcagtgagccgagacagtgccactgcactccatactgggcaaaagagcgagactccatctcaaaaaataaaaaagcaaacaaactatatccacataataagttcgatatatccacataataagtttgatatcattagtaattagggaacttcaaattaa

SEQ ID NO: 606058 - DNA, 601 bp, Homo sapiens
ctggaaaagacttgaagtttgcaaaagactcaaaataaaactataaaaaagacattaaaaataacttcaaaaaattagtattataaaaatgtcccaattattgattgtcaattaggttgaattatcttcctaatgtatttaaccctcttttcagttctttattgataaatcaataaaaacaaaaatactgtaaagattaaaacaataatataataatataaggacatttgacaggatagttaactgtgcaacagattaataagcattaagacaggcactctctttctggaaagacagagattgcactggtctagtcaaggtgtttatcgctttgggggcaagaaaccagaccaaataactttataatgctgcttcttacaaaaccatcattttgttccccctgaatgcagagcatgattagcatagtccaaaccctaaaagggaaaaggaaagcagatttaaactaacatcacaacaaaataagataattgcaacttggaagttgtgatagtcagacayagtagtgcttttcatgtcgatatcagtgtgtcaggcacaccatgatttgtatacccctgggattacattgggaaaaacccag

SEQ ID NO: 606059 - DNA, 651 bp, Homo sapiens
tagaagaaaatacttccaaaccatatatctgataaggaattagtatccaaaatatacaaggaattcatatactcaatagcaagaaaacaaaaaaagccctattataaaatgggcaaaggaactaaatagacattttagaaaacatacaaatggccaacaggtatgcaaaaaatggtcaacatcagtagtcatcagagaaattcaaatcaagatcataatgggatatcacttcatgcctgctaggatgcctattatcaaaatgtcaaaagataacaagcgctgacaagaatgtggagaaaaggtaacccttatatattgttggtaggaatataaaatgatatagccattatgtaaaacaatttggaggttcttcaaraaattaaaaatagaaatatcatataatccagcaatcccaccccggatacatatccagagaaaataaggtcactatcttgaagagatgtgcatgctcatgtttactgcagcattatttacaatagccaagataggaaaacaacctaagcgtccacgaacaggtgaatggataaagaaaacccataaacatataaacagatagaatacatatatatgcaatagaatactattaatcctttaaaaaactaagaagggaatcctgccatttgcaacaat

SEQ ID NO: 606060 - DNA, 651 bp, Homo sapiens
tagaagaaaatacttccaaaccatatatctgataaggaattagtatccaaaatatacaaggaattcatatactcaatagcaagaaaacaaaaaaagccctattataaaatgggcaaaggaactaaatagacattttagaaaacatacaaatggccaacaggtatgcaaaaaatggtcaacatcagtagtcatcagagaaattcaaatcaagatcataatgggatatcacttcatgcctgctaggatgcctattatcaaaatgtcaaaagataacaagcgctgacaagaatgtggagaaaaggtaacccttatatattgttggtaggaatataaaatgatatagccattatgtaaaacaatttggaggttcttcaagaaattaaaaatagaaatatcatataatccagcaatcccaccccggatacatatccagagaaaataaggtcactatcttgaagagatgtgcatgctcatgtttactgcagcattatttacaatagccaagataggaaaacaacctaagygtccacgaacaggtgaatggataaagaaaacccataaacatataaacagatagaatacatatatatgcaatagaatactattaatcctttaaaaaactaagaagggaatcctgccatttgcaacaat

SEQ ID NO: 606061 - DNA, 598 bp, Homo sapiens
acattgtgatggaattttatgtctctcctagaccccagtgatagtaagataaatgtttcctggggacaaacatgtcccttacacttttacacaaagaaagagggattaggaagtctgtaaagacttggattgttaattataataaacatcggcatgtgtcagcagttcccgtagtcccactcttaaatcattacccaacttttccaatatcataactaacttactccagttgaatctcctttcctttcccttatgaatccagaatattttgcctaaagtcaaaaacaaaagaaagaggaaaaatggatggaatgatttctaacagaaacaaattctaaataattgatagctgactaaggagagaaaatatataactgacaaaaattgaatttttactcagttttattatgtttctgttaaaatgaagaattatgctgtagatactgaattataccatgtaattcaaaatgaagaagaaaattatgttttttttwtaaaaaaaaaagctctgaatatcaggcttgctggctagagtctggattcatgcttatgatgtgagaagtcctttttttcatcgaacgagtctaccagctggatt

SEQ ID NO: 606062 - DNA, 598 bp, Homo sapiens
acattgtgatggaattttatgtctctcctagaccccagtgatagtaagataaatgtttcctggggacaaacatgtcccttacacttttacacaaagaaagagggattaggaagtctgtaaagacttggattgttaattataataaacatcggcatgtgtcagcagttcccgtagtcccactcttaaatcattacccaacttttccaatatcataactaacttactccagttgaatctcctttcctttcccttatgaatccagaatattttgcctaaagtcaaaaacaaaagaaagaggaaaaatggatggaatgatttctaacagaaacaaattctaaataattgatagctgactaaggagagaaaatatataactgacaaaaattgaatttttactcagttttattatgtttctgttaaaatgaagaattatgctgtagatactgaattataccatgtaattcaaaatgaagaagaaaattatgtttttttttwaaaaaaaaaagctctgaatatcaggcttgctggctagagtctggattcatgcttatgatgtgagaagtcctttttttcatcgaacgagtctaccagctggatt

SEQ ID NO: 606063 - DNA, 636 bp, Homo sapiens
atcaaaagaaacttgttgaaagaacgctgctcagtgtggatgtaaagttagaacagtcaccaagggaaagaaaggggaggagtgggcagctggcaaatagattaggttacaaaacctactggctctcaagacaagcccttccrattaggttggatatgatctgcttacttcctccactgttgcttcaatgtaactgacgtctagaacagtcttgaattctttgcaccagcaataataatgggtaacatgtttttcttctttacattttgcaaagagcttcaaggttaactcatttacatccctttcacttccatcattgttaacatctaagaagtggaactgtcctaagaacagaagaaagagccaataaaaactgagaagcaggagattaggtgtgaatccaggaaagaaagcatagtaagagtgtaccagtgtcatagtcaacagctatgatttgaggaagttgtggatcaatatttacttaaaacacactaattacagagaagaaaatccatacacattagatttgaaagaagccgtgcaaaaataatttgaaccctattatcctgaaattaaaatattttaaaatgcaaatccttttatcgttaatttttcaatattgtttttataatgtca

SEQ ID NO: 606064 - DNA, 609 bp, Homo sapiens
gggcagctggcaaatagattaggttacaaaacctactggctctcaagacaagcccttccgattaggttggatatgatctgcttacttcctccactgttgcttcaatgtaactgacgtctagaacagtcttgaattctttgcaccagcaataataatgggtaacatgtttttcttctttacattttgcaaagagcttcaaggttaactcatttacatccctttcacttccatcattgttaacatctaagaagtggaactgtcctaagaacagaagaaagagccaataaaaactgagaagcaggagattaggtgtgaatccaggaaagaaagcatagtaagagtgtaccagtgtcatagtcaacagctatgatttgaggaagttgtggatcaatatttacttaaaacacactaattacagagaagaaaatccatacacattagatttgaaagaagcmgtgcaaaaataatttgaaccctattatcctgaaattaaaatattttaaaatgcaaatccttttatcgttaatttttcaatattgtttttataatgtcaccattgcctagaaatataatttcagggttacttaaagttttaccataaagaattaa

SEQ ID NO: 606065 - DNA, 389 bp, Homo sapiens
ttcagggttacttaaagttttaccataaagaattaaggtatgtgtcttatatcagctttccgtttacaaaaaccatgttaaatatggcttttaatctatttggcatcttccgttatacaagagaaaaatgcaaatcataattattcatggctcagtttagcaatttattccttagagaccatattagtctgttctcatgctgataataatgacataaccaaaagtgggtaactaataaagaaaaagaggtttaatggactcacagttccacatggctggtgaggcctcactgtcacggcagaaggcgaaggagggacaaaggcacatcttacatggtgggaggcaagagagcatatgcaggggaamtcccctttataaaaccatcaggt

SEQ ID NO: 606066 - DNA, 523 bp, Homo sapiens
cctcagtttccaagtaactgggactacaggtgcccaccactacacctggctaatttttgtatttttagtagagacgaggtttcaccatgttggcctggctggtctcaaactcctgacctcaagtgacccacctgcctcagccttccaaagtgctgggattacaggcgttgagccactgcaccggacttttttttttttttttttgataatacaaaaacaacataagtcagggtagtctctgtctcttgagaatttcaaaacaaccgtaatgtttctaccttggtatcaatagaagtgtagcctgacaggatattagtagctatttctgayagtgggtgattgaaatttttttcagcacccttccctggcccatcctgcctgtactaaatatcagatttgcctttcttctcttctttttttccacaaccagcttgaaggtctaatcattcacaatccctagagggattcaatattaatttcctttgttctgtaccccaacaatggagcactgaataagacattc

SEQ ID NO: 606067 - DNA, 615 bp, Homo sapiens
taacatatttggcaagaatattaccccrgtgatactacatcaaatctggagtcatagactacaagattgttccactaccaagaaacacatggataaggtacaacataaagcacattttcactttgtattagataggtagcctgtgatgagatagtatgccccaccacctttctccaaaagatttagtattcactgatgatccttgtctgatcaattattaaaatggattacaatgctgtacttttcttaacctgtcttgtcttctatatgtattagttagcattcttccatttttattttttaaaagagatttccatatatgtactctacaggcatagatcattttactgcacttcactttattgcactttacagatgttactttttttacgaattgaaggtgtgtggcaaccctgctttgaataaatctattcgcatcatttttgtaacagcacctgctcactttgtgtctctgtgtcacatgttagaaattctcaaaatatttcaaactttttaatcattattatatctattatagtgatctgtgatactatctttgctgttactattgtaattgttttggctcaccacaaccaagcccacgtgagatggtga

SEQ ID NO: 606068 - DNA, 360 bp, Homo sapiens
taatgctgagagtaaatttgtgwtgaagattaaacagaatctcacaacacttacattatcttttcttttacattttaagtcacctctatgcaatttacattgttgtaatggtaacatgtacattattatttgttacttccacctaataagcagtaacattatgtaattcttcatggggccagacataaatttgaagatatatggagtttcatatcatatatcataaaaacaaaccctatcacagattttttaattaggtattaatttgtattgtaaaagtaatatagatacatgatcataaaagtaaaagagtacaaaatggaaaataatgattgaaattaagattttttttcccactca

SEQ ID NO: 606069 - DNA, 360 bp, Homo sapiens
taatgctgagagtaaatttgtgttgaagattaaacagaatctcacaacacttacattaycttttcttttacattttaagtcacctctatgcaatttacattgttgtaatggtaacatgtacattattatttgttacttccacctaataagcagtaacattatgtaattcttcatggggccagacataaatttgaagatatatggagtttcatatcatatatcataaaaacaaaccctatcacagattttttaattaggtattaatttgtattgtaaaagtaatatagatacatgatcataaaagtaaaagagtacaaaatggaaaataatgattgaaattaagattttttttcccactca

SEQ ID NO: 606070 - DNA, 585 bp, Homo sapiens
agatggtcactaatgacctatgactcctagaagtcatgtccttgggcagtctcctctcacattaactaggactggcctgtgtaaccaacaggatattatgaaaatgattatgtgtggcattcamaactaggccatagaagacccttctgcttccactgcgccgtgtcccttggatcgcgtgctctggggaagccagctgccatgctgtaaagacacttgagtggcctctggaaaggcccacagggaaggaactgacacctactgccaatgatcatcaccatgtggatgaaccatcttggaagtgaatcttccagttcacatcaagacttcaaatgatagcaggcatgactgcaaactcaagagagattccaacccagaaccatccaacaaaactgttcgcaaattcctgacacacagaaactatgtgaaatagcaaagataaattgttgttttaagtcatcgaatttgggttaatttgttatacaacaatatataacaaatacaccttcctattggcaattttattagaaaggcattgagtttaaagactcatttacatagaatggacctcctcatattattgaa

SEQ ID NO: 606071 - DNA, 532 bp, Homo sapiens
agagagattccaacccagaaccatccaacaaaactgttcgcaaattcctgacacacagaaactatgtgaaatagcaaagataaattgttgttttaagtcatcgaatttgggttaatttgttatacaacaatatataacaaatacaccttcctattggcaattttattagaaaggcattgagtttaaagactcatttacatagaatggacctcctcatattattgaatatttctacctaagtagaacttctgtctttccattgattcaagactttttaaaattagtagrtactttaaatcttgttcacctaggtctagcataacttcccttattatttgtgttgctgttctatttccttccattttattctctaaattatattgatattatcaatttaatactgttaattttctgttaatttcatatccagccaacttgctaaattctttttgctagaagctacactgattgttttgcatttttcagatgggcaatcataccatatgcaaataataatttcaccttctatttt

SEQ ID NO: 606072 - DNA, 576 bp, Homo sapiens
aaataacatttttattttataacctcataacctctaatttttgaattataacaaattaaaccttgctttcaggttcttaataatatgactaaaaatgtaagagatggcagttgtcatagtttattatctttcatttattatccttaatgctacrtgacctttaaccaatataattaattatttctctaaaccatgggaagtggaaattagaactacagaaatagataaaaacatggttctcaatgaaaaaggttaaagttaaaagggaataatgtcttaacattgcttagggaaaaaagtcttcccaaataattttccttttaataactttcaaaagaaatgcaatttctgaaatatttaagttaagaaacaattttcaaaatgaaattggatggacaggaagcaatggggagcatttttgagacctgggaaaataagaaagctacactgtaactgataaattgatttttaataatgttggaagcttgcaaaccctgtctcttcattgtgctgcactaaggaaatacactagcaggtgttaaaacaccctccaaggattttcaatttcgttattat

SEQ ID NO: 606073 - DNA, 566 bp, Homo sapiens
ttattatatatttcaaatattaggtggtcctgcagtataaaatttaaaaattcccccaaacagcaacgttggaataagcacacaagggcgctttcacccaggtttcatttacaaaattcaattttctgaacaatgactgaggaaataatgataatttcatcaagcctgggtcttaaaagaggcagcaaaagaccagaatgaggcataaaagtggttgggatgaatggtcaaccataacgtgcttttgttggcaactccatatgtttcatgacagaatggatgctttggcaaacaaattcaggaaagcaggctgcatccattatctatttctgtgtagcayattatcataaaacttagcagcttgaaacagttccggcttattatctcatagtttctgtggatcaggaatccaggcacagcttatctgggccctttgcttcagggtctctcacaagctgcaatgaaggtggcagccaaagctccagtcttatctgtagcctcaaccaaggaaagacccgcgccctgcctatgtagttatttgcaggattcggcttctcactggctgt

SEQ ID NO: 606074 - DNA, 655 bp, Homo sapiens
ccccacttgctatatataagcttccccctggagctccagcttgctgttaccctgtcccttgatgcaactcactgtatggtcctgcctggaagctttggaagccttctttcaattggagctgtaagtaaccaagtattttgcctttcatctattcatgtgtcagtgtggagtgtcctgccatcaaaaaaatatttaaatcttataaagcacctacccccaaatccacatcttacagaatttgtttataatgctttactgcattcttctaccctgtatataactcgaacttccacccctatgtatttctcctgcatatcccagaactattgctactccaaaagcttgtcagcagctgggtaaagctacaggctttcccaaagccctccatacaaaccagcactgcagacccccaaaaagagaggagagagactcagctcccaaactctcttccttgccctggtcacctttccttggtcttgcacctgacttttaccacaagtcttaacagcastcctctctaaaaagtaatcacttcaggttaatgatcttccaggaaagaacacaagcatttggtggaaattgctctacatctacactgtgaattatagacatggaatctttccaaagagtcccccttgctttgattctgaactca

SEQ ID NO: 606075 - DNA, 484 bp, Homo sapiens
actccattcatagtcccagtcattaatgttaaatgtttaagattacagttgtccttcagtacccatgagggatggttccagaactcccaaggataccaaaatccttggatgttcaagtctttgacagaaaatggcataggatttgcatataatctacacacatccttccatatactttaaatcttctccggattacttacgatgcccaataaaatataactgccatgcaaacagttgcatggcaactatttgttattctattgtgttgttttttcatttgtattattttttattgtygtattgttatttttaattgtttattaaagaatatttttggtctgagttttggaaatagggtctttgtagataatcagattaagatgaggccattgatttcttggctccagaacctgcagatacagaaggtcaactgtgtgtaaaactatttccttaccttagaaaacgctgaaggagtatcatttat

SEQ ID NO: 606076 - DNA, 642 bp, Homo sapiens
gtcttttgaggggacacaatttaaccccataatgaaagagttaygctatcattcataaaaatcctgtatataagtttggggtacaacctcatagttatagcttaggtttcctttggactgcttcccttcctgctgcaggttttccttaagttttccagtcaacagcagcaaacaactcacttggtatctgcctgtgctgacactttgtgttctaaccagcttcattctggctgggcagggggaaagagtgctgggagtccctggtgagtacccgggtttatatgaggggattacggtacatctttgaagaaaaaaagtcaaatgtttgtgtttggaagggctcctgtgttatgcctgcttttctggagatctttatgcatcctcctcttctttattctcctcactctccccacatcctttatgtggtcctgtttctttgtcagattcatgatatacttgctgaatgtactataacatatcacttagactcggtggatgaggaatttttatttgaaaaatttattttgcttattttgctagtttggtgaatacttgggggaatatctaactttagagcaacaaatacacattttaaatattgaaacatagccgataattgatggtcatatatgtactagtatc

SEQ ID NO: 606077 - DNA, 588 bp, Homo sapiens
taaaaatcggcccactaaacatacatttgactgtcttaacttctatgccgcttatatacacctgcttaattgtgtctattccttaaaatttaatcaaccattgtcatcatccttatataggccaccagaatgtctctctctcatgtatgatcatgttttcccctcgtttaaaattactctatggtttttaaattacttatggctaaatactaaaccraatgcaccgcatgctcatctcagtctacttctggccaaactttcagtcctcatttctcactgctctcctgaacacagctttcttctgggtatttccagtgtttactacagtgcaaaccacctaataaatactcaaaataatggtgatatccgccctaagccatttatacttctaataaatcatgttctctttgcccctgtacattttttccttgtctaatacccctgcaatttctcttcctcctcatccgcttgactgtctaggctgaactccagagggcctcccctggggacccctcctacctaatgtctctctaacaaagtgtccttctgtattcccacatctcttctgtagcactttgtgttgaaatt

SEQ ID NO: 606078 - DNA, 588 bp, Homo sapiens
taaaaatcggcccactaaacatacatttgactgtcttaacttctatgccgcttatatacacctgcttaattgtgtctattccttaaaatttaatcaaccattgtcatcatccttatataggccaccagaatgtctctctctcatgtatgatcatgttttcccctcgtttaaaattactctatggtttttaaattacttatggctaaatactaaaccaaatgcaccgcatgctcatctcagtctacttctggccaaactttcagtcctcatttctcactgctctcctgaacacagctttcttctgggtatttccagtgtttactacagtgcaaaccacctaataaatactcaaaataatggtgatatcygccctaagccatttatacttctaataaatcatgttctctttgcccctgtacattttttccttgtctaatacccctgcaatttctcttcctcctcatccgcttgactgtctaggctgaactccagagggcctcccctggggacccctcctacctaatgtctctctaacaaagtgtccttctgtattcccacatctcttctgtagcactttgtgttgaaatt

SEQ ID NO: 606079 - DNA, 500 bp, Homo sapiens
caatcttgagtgttcataccaaatctataaaatgtaaaatgctttatcttagctttccaagcaagggtattaatttaattcagatgctgcacttcaggattttagcgaaatattgaagtttgaattctctgctcaagcctcattagtagtgattaggtaacacaaatgcatctctgatttatgcatgtctaaaaatgattatgaaaagccatcttgtgcagagttgattgtttttatgtacagttttgtccttctaggccatcttcttcaaacactgtaatcaaattgtccacctttgggatatagcactggcagactgcttgtackctgcaaattaacattatagatatggttctagaaattgagaagatagatatttttgtgataatgagaggttgggattaaatgtacagaaaaggaaatttatactaggaggtttttcctttttttaagatactataaatttctaaatgaattcctgacatttggaaatgttttga

SEQ ID NO: 606080 - DNA, 610 bp, Homo sapiens
ctttacaatctgctgaagttrcattgcaaatctgattataatattcacttacttagaatatttcaataactttcattttactcaaggtaaaaaccaagctcctcctgagcatggtaggtaggtcttttatgatctgacctctgcaatactcaaatgacatgtagtcacctgaatgtgccatttttcttctcaccttggctcatggtgttgcttctgcctagaggccctgtgtgcttgatttgccctatgacctgcattcatctctgaggttctttcttagtaatcactagtaaaggtgttcctaactcaccaagaagaattgaatgccttccgtctccatgtttccatagtattttgaaaacgactctggtaaaacagtacacatattgtttgtttgcatatctattttccatgctacactgtgagctctttgaggtcaagaacactgtcttttcatctttacatgtccagtttataaatttagatatttggcatgtagataagtaaatgtttattgaaagaatgcatgttttcatgccttggctcattttctccacaattcagctttttcatatctttacataatttgttttatcattcatgaaataat

SEQ ID NO: 606081 - DNA, 301 bp, Homo sapiens
atgcaaatatctactcattaattacagagaagaggaaaccatgttgattattttaatgaccactatatctaatgtttaaactcaggtgcctgattttggatattgggttgcctatattttgttttctgacatttaaagcattgttccagtaccagcaataaatattctctgtctaattataattatttgactargaagaaatgaaatgaatctgttattcttcttgaaggataatgaataccaacctcgaagatcattgcaaatgctttcagtgaagcagtatataaggaattgattgtgt

SEQ ID NO: 606082 - DNA, 508 bp, Homo sapiens
actgtcactctaaaagggacagaatctaaygcaccttcatacaggccatctgaagcaaaaataatttggataaattttaaccagccgggtgcggtgactcacgcctgtaatcccagcactttgggaggcgaaggcagatggaccacttgacgacaggagttagagaccagcctggctaacatgatgaaaccccatgtctactaaaatataaaaattagctgggcatactttgggaggccgaggtgggcagatcacaagatcaagagatcaagactatcctggccaacatggtgaaaccccgtctctactaaaaatacaaaaattagctgggcatggtggcatgcacctgtagtcccagctacttgggaggctgagggaggagaattgcttaaacccaggaggcagagcttgcagtgagttgagatcacgccactgtactacagcctggtgacagaacgagactctgtcttaaaaaaaaaaaaaaaagaaaaagaaaagctgggcatgg

SEQ ID NO: 606083 - DNA, 426 bp, Homo sapiens
agaattctctgtgaaatgaacaattacaaacccgggtgtctgatctaagtagtgttctttgccaacgagcctaaagagaaaacttactttatactatttatttcagcaggaaggcttctaagaatgtgtaactgtagattttgccttaagcccatttacttttcccatctttcaatttcaccatttccttcctcccatcacatgctatgtgttttgtgtgtgcacaygccaaaccatgcttatctgagtgcatacgcatctctgtttacttaatttgaaattatttcctttctactgaaaatcctgacatcttatcatataagcagagcacaaagaatccatgaaattactactattaaataagacagctctctgtatgtaaatctagcaagctggaccatttcagtaattatctaaatacaacat

SEQ ID NO: 606084 - DNA, 591 bp, Homo sapiens
ctaatctctcacccaaagattcaatgttaagctagaagtaatgggagctgattgctcctctagggaggagctgatacttttgatattaatactgtaaatttaaaggaatccacaagctcattggagaaatccttttacaagtgtagagtataaatagaaactctgtagtgtataggtcagtctggtatttaaaattcaggacagtgctgtccagtagaattttctgcaattgggagaatgtcccaggttttcatttcccaatgcaggagccaccagacacacgtggagcacttgaaatgtggctagtgcgaatgcaaaactgaattttaatttttgtttaatttttatttaaatgtaaatagtatatatggctagtggctcctgtactgagggcccaggactagactagacaatgggcacacacttggaaaccctatctcaaagatttgataatagcagaaaattctattcacatgtctcccaacgaagcaaagtaggccctccattaagcatttgtgtatgggaaaccaatgcccctcctatgtrtgtaaccacagtcattcttccctgacaatcagcgcatcaaacctt

SEQ ID NO: 606085 - DNA, 593 bp, Homo sapiens
aaaaaaagtatcccatgatatgggaattataacatatttcaaaacctctcttagctatttaccatctcataagtcaaggttttctaagcatatttaatcacagaaaaaaaaacttacaacataactcttagcatcttgtaatatagctttctatggaacacgagtttgacaaatgagacaaaccatatgtactcaatawgtactccatggtatgaacaagaatgtactttttgtccaaaaaacaatcattaggatcttcctgcatggtgaatcagatcattattttacattgatttcattggaatagaatcctgcctagataagctttcccaaatcaattacattttggttttaattttgctagcagcacttctttttccagttttaagtcattaacagaaagcttcatcacagcacaaaacaatatttcgataacttcatattattaaacgaaaagagttttatcttctgagaataattgttttaaataaatgcatttatcttattcacttgtcaggatcatccatgttttttattaaaatcaaaagcttattatcaagctaaatccaaatcagacattttatattcccaat

SEQ ID NO: 606086 - DNA, 566 bp, Homo sapiens
aatattttaaggcattatataakatttttctatatatttttatggttaagactccttgaagtaaatcagagttatctcatggatattaagcatttgaaagtataccttaataaaaaataattcatttagatttttaattatgaattcaacagggatgtctgagatgttatatagaggctcatccgatttacttttatgaaaaaacattgagaattagggactgtggctgctggagtcaacttctactacattgtgccttggtgacaaagatcttcttgtcttccaaggacctccagaggagaggctgtgccctggcattgctgccatgggtgctgggtgttctgtttctctcccagatgtgctttgctgctttgctcagcacagcctggacacacacacacacgcacacacactcacacgcatgcacactcaggcacacacacatgcacacatacatatacacaccacctcacctaaggcataattattaattataccttaataaggtataattaagggtaagtgtctgtaccattctgaaaacaggagcattagacaaaagtcca

SEQ ID NO: 606087 - DNA, 604 bp, Homo sapiens
tgacaaagatcttcttgtcttccaaggacctccagaggagaggctgtgccctggcattgctgccatgggtgctgggtgttctgtttctctcccagatgtgctttgctgctttgctcagcacagcctggacacacacacacacgcacacacactcacacgcatgcacactcaggcacacacacatgcacacatacatatacacaccacctcacctaaggcataattattaattataccttaataaggtataattaagggtaagtgtctgtaccattctgaaaacaggagcattagacaaaagtccacatatccagtgttaaaacccccagtcttcctctcaaatcaactcccagggtaacagagccaagcacagacaagcatatctcccatcaggagaktgaaggtgccatttctgggtaatacaaactgcccaaagtaaagacttaagtacactaagctaaatttttgaaattaatgctttcctagccacaaccactgttaactctgtggagaatatcctactgcatatcttgttgttatctgtatgtcttcatgcctatagacctacagattctattcatctgtgttttgaaggatgccatag

SEQ ID NO: 606088 - DNA, 586 bp, Homo sapiens
cctccagaggagaggctgtgccctggcattgctgccatgggtgctgggtgttctgtttctctcccagatgtgctttgctgctttgctcagcacagcctggacacacacacacacgcacacacactcacacgcatgcacactcaggcacacacacatgcacacatacatatacacaccacctcacctaaggcataattattaattataccttaataaggtataattaagggtaagtgtctgtaccattctgaaaacaggagcattagacaaaagtccacatatccagtgttaaaacccccagtcttcctctcaaatcaactcccagggtaacagagccaagcacagacaagcatatctcccatcaggagagtgaaggtgccatttctgggtaatacaaactgcccaaagtaaagacttaagtacactaagctaaatttttgaaattaatgctttcctagccacaaccactgttaactctgtggagaatatcctactgcatatcttgttgttatctgtatgtcttcatgcctatagacctasagattctattcatctgtgttttgaaggatgccatagtctacagcta

SEQ ID NO: 606089 - DNA, 577 bp, Homo sapiens
cagaactgagaaagagagaggaggaagtgagggaaagagaaaaagagaggaagagaaagagaggcaggaagaagaaagagagaaagggagggagggagggaaagagggagagaaagaggaagagaagggcaggcaggagagaaagagaaaaggagggagggagggaaggagggaragtgggggagagagagagggaaagagggagagagagaggaaaagagagaggaagggaggcagaaggaagagagatagatatcaatctgataacttgattaagcccctggatctatccatgcttgaagctagagaaccataagacttgccagttatgcgagcacagaaattcccctttttgcttaaaccaatttgagataagtttctcttccttgcaatcgaaagataccttgtcctttaagttaaacttcgcctcttatatctccaaacaggccagaaagactctccagtccacagcacgcctaccaaattcatcattagagtaacggtaaatattgtgtgaactaattcatgacttattcctcagaacaccaatttctctcactaaggcagataactatta

SEQ ID NO: 606090 - DNA, 575 bp, Homo sapiens
ttacataaatttaaaatataaagcctgatgtcatttgctagtatttcatttagaaatattatacacattaaatgggcacacgatttgtttttgacaaacatccttttacataatgaatttacaataaaccctgaagtgacatcttagtccctttgagttgctgtaacaaaataccatcaactggatagcatacaaatgatagaaatttatttctcacagtttgggaggctgggaagtccaagatgraggtgctgataggttcaatgtctgctaacagcccacttcctggttcgtagatggtgactttttctgggtccttagacggcaaaaggggtgagggagttttctccagcctcttttataagggcaccggtcccattcatgagggatctgccctcgtgacctgattatcttcaaataccattacactgcacattaggaattaatgtatgaatttggaggggacataaacattcaatccattgatcacataataaaataaacataattcatgctggtatataagattggtggccctcatttttttccattgagcaatattcaagataggtgcc

SEQ ID NO: 606091 - DNA, 620 bp, Homo sapiens
cgtatggacttttataaatgttttataattgcaactcctcttacatgaacaacagatgctaaaagaaatcactattctacagaaacagttcattttaaaataaatcaattagaagacattactaaagacaaataaaaatatggagacayttcccatttatattcaaagctaaggattaggagaacaacccaattactcatccaatctgcccatttaagcacctgtcaactaaagggattaatatgccttatgtttatggaattagggacagctctgtcacagtctttgcctaagaaccattaacaaacacattttccaagtatgtattaacatttcttagctgtcactactgtaatgaccctgatacacgctaatgaaagcattgaagtttcacagctatattgttgtacatagaagatggagccttcccccaacctgtcccccgaaaacatacagttgctctcctccacctaaggaaacaaatagttgcttcaaataaccaattcataaaagctaattattctcacggggatttttttttcttcttgaagagacaaattaaaacaagtataggaaggaaatgattaagtcacaaaagtgtaaaaatgttcagaactaca

SEQ ID NO: 606092 - DNA, 620 bp, Homo sapiens
cgtatggacttttataaatgttttataattgcaactcctcttacatgaacaacagatgctaaaagaaatcactattctacagaaacagttcattttaaaataaatcaattagaagacattactaaagacaaataaaaatatggagacacttcycatttatattcaaagctaaggattaggagaacaacccaattactcatccaatctgcccatttaagcacctgtcaactaaagggattaatatgccttatgtttatggaattagggacagctctgtcacagtctttgcctaagaaccattaacaaacacattttccaagtatgtattaacatttcttagctgtcactactgtaatgaccctgatacacgctaatgaaagcattgaagtttcacagctatattgttgtacatagaagatggagccttcccccaacctgtcccccgaaaacatacagttgctctcctccacctaaggaaacaaatagttgcttcaaataaccaattcataaaagctaattattctcacggggatttttttttcttcttgaagagacaaattaaaacaagtataggaaggaaatgattaagtcacaaaagtgtaaaaatgttcagaactaca

SEQ ID NO: 606093 - DNA, 578 bp, Homo sapiens
aattatgccacaactaaatacagacctaaaactgatcagccatattattaaccattctaaagcacttaataataatagttaaaacttatatagtattcattatataaatgactgttctaagctcacatattatccaacttaatcctcattacaattttatgaggtaagtgctattgttatctccactttatagatgagaatctgaggrgctaaataacttgacttaaggtctcatagtttatacatccatccatgtcttatatagatagttaataagttcaacatatcttacatcaaccttaaagaggcctaaatagaactgggtgcagtagtgcatgcctgtaacctcggctacttgagactgagctgtgtgtaatctcagctacttgggatgctgagatgggagaatttcttgagcacaggagttcaaaaccatcctgggcaatgtagtgagacatcatctcaaaaacaaacaacaacaaaagacagagtcctaagtagttcataatttggattgatgagctatttagttcacaagctacaaattaacattgcatgaggttaaatgataaataaca

SEQ ID NO: 606094 - DNA, 578 bp, Homo sapiens
aattatgccacaactaaatacagacctaaaactgatcagccatattattaaccattctaaagcacttaataataatagttaaaacttatatagtattcattatataaatgactgttctaagctcacatattatccaacttaatcctcattacaattttatgaggtaagtgctattgttatctccactttatagatgagaatctgaggagctaaataacttgacttaaggtctcatagtttatacatccatccatgtcttatatagatagttaataagttcaacatatcttacatcaaccttaaagaggcctaaatagaactgggtgcagtagtgcatgcctgtaacctcggctacttgagactgagctgtgtgtaatctcagctacttgggatgctgagaygggagaatttcttgagcacaggagttcaaaaccatcctgggcaatgtagtgagacatcatctcaaaaacaaacaacaacaaaagacagagtcctaagtagttcataatttggattgatgagctatttagttcacaagctacaaattaacattgcatgaggttaaatgataaataaca

SEQ ID NO: 606095 - DNA, 607 bp, Homo sapiens
caaggcaggatgctattggaaactttcttataatagttgccatgacaagaaacatagtagaaagcagcatgtgttcagcacttcctacgcagtgggctttgcacacrttattatatttaacagtcacaatgaccctataagatagggttattatccccatcttagagtacaaaacatgatgcaaagataggttaagtggcttgcacaaggccacacaactgcaaagaagcagaacttgataagaatcttaacctcattttcctgtacagcagcaaaggaaatgtctactacgtttggaagcttagaaactagattactcagcaaatcattatagtcttaagcctcagtttcctcatctgtaaaatggagaagatagtggtacctggtctagataaggttgttgtgaaaatgaaatgagaatgagatgtgtaaagctcttcacacactgtaagtgcttactaagccatatcgttgctgttctgttgtaagttctgtgtaaactctaaagaactatacatatgaaagtacaggaagggcagtgaacttaatgtctctctatgttttgtttgtttgtgtttttttctgacaagaaattttcaggattctt

SEQ ID NO: 606096 - DNA, 607 bp, Homo sapiens
caaggcaggatgctattggaaactttcttataatagttgccatgacaagaaacatagtagaaagcagcatgtgttcagcacttcctacgcagtgggctttgcacacattattatatttaacagtcacaatgaccctataagatagggttattatccccatcttagagtacaaaacatgatgcaaagataggttaagtggcttgcacaaggccacacaactgcaaagaagcagaacttgataagaaycttaacctcattttcctgtacagcagcaaaggaaatgtctactacgtttggaagcttagaaactagattactcagcaaatcattatagtcttaagcctcagtttcctcatctgtaaaatggagaagatagtggtacctggtctagataaggttgttgtgaaaatgaaatgagaatgagatgtgtaaagctcttcacacactgtaagtgcttactaagccatatcgttgctgttctgttgtaagttctgtgtaaactctaaagaactatacatatgaaagtacaggaagggcagtgaacttaatgtctctctatgttttgtttgtttgtgtttttttctgacaagaaattttcaggattctt

SEQ ID NO: 606097 - DNA, 611 bp, Homo sapiens
ctagattactcagcaaatcattatagtcttaagcctcagtttcctcatctgtaaaatggagaagatagtggtacctggtctagataaggttgttgtgaaaatgaaatgagaatgagatgtgtaaagctcttcacacactgtaagtgcttactaagccatatcgttgctgttctgttgtaagttctgtgtaaactctaaagaactatacatatgaaagtacaggaagggcagtgaacttaatgtctctctatgttttgtttgtttgtgtttttttctgacaakaaattttcaggattcttcagtaaatcagcctactaccttctctggtgaaaaggccctggaagccagaaaaaaaataaatattccattgatctttctgtaggagaagcaataaagttcttgtccataaataaattgaaatgtaagagtttttttaacaatttatattgatgagtcaaagaagtgggcatttatatgcttgaagagatgtttgagttaacctttgtgaaaatgtaaagtattaagatagacaaaaatggattacacaaagaatgagtggatcaaagggaaaaacatatcttcagaaatatttaataatatagtaataacat

SEQ ID NO: 606098 - DNA, 611 bp, Homo sapiens
ctagattactcagcaaatcattatagtcttaagcctcagtttcctcatctgtaaaatggagaagatagtggtacctggtctagataaggttgttgtgaaaatgaaatgagaatgagatgtgtaaagctcttcacacactgtaagtgcttactaagccatatcgttgctgttctgttgtaagttctgtgtaaactctaaagaactatacatatgaaagtacaggaagggcagtgaacttaatgtctctctatgttttgtttgtttgtgtttttttctgacaagaaattttcaggattcttcagtaaatcagcctactaccttctctggtgaaaaggccctggaagccagaaaaaaaataaatattccattgatctttctgtaggagaagcaataaagttcttgtccayaaataaattgaaatgtaagagtttttttaacaatttatattgatgagtcaaagaagtgggcatttatatgcttgaagagatgtttgagttaacctttgtgaaaatgtaaagtattaagatagacaaaaatggattacacaaagaatgagtggatcaaagggaaaaacatatcttcagaaatatttaataatatagtaataacat

SEQ ID NO: 606099 - DNA, 274 bp, Homo sapiens
tcttgtccataaataaattgaaatgtaagagtttttttaacaatttatattgatgagtcaaagaagtgggcatttatatgcttgaagagatgtttgagttaacctttgtgaaaatgtaaagtattaagatagacaaaaatggattacacaaagaatgagtggatcaaagggaaaaayatatcttcagaaatatttaataatatagtaataacattacaggacattataaatgctaagtcatatttaataagtctacaacacgctttaaaagtat

SEQ ID NO: 606100 - DNA, 517 bp, Homo sapiens
tatggaattccaggcaaaccagagggtagttgacagtttaaaggccatcaaagttggccaaatcgttgttttatatcagaattggtggtaaatccactgctgaggctctagggccctaagactcagaggcgaaacctacaccagatggctggcaatcaaggaacctggcacagtcacctgcaaatggcccctgaagcacaaagtagcagaaaagagagaatttacagaaccccctgtaagatcatcatgcaaatcttctggaccttggtgaatcccaaataaataaataaagggataaggaaataagcaaataatgataaatgaaagttttgattctgcatggggaagatgatatttgsagccttggggtaattggagcaatttagttggtccatgactgtaaacacattttcccccagtatagaataatgaagtacaaagcaaaatttaaaagctctttataaaacaccagcctctccactggattctgttccatctctatatttggctgtattat

SEQ ID NO: 606101 - DNA, 432 bp, Homo sapiens
tgtttttagaaaggaagaaatagagttgcaatgaaatgaaagtaaatttctcagtcamagagtatggtataagacctgaaacgaaggttcaatattatgtggttccttaacatctgataaaattgaaaaggccttgaacagcctaatgaaaagttgccctccccactctgctccattgacaaggtcctctagcaaaacaaccctccttatcacagggaccaaacgcagctcctgctcctccctgagtagcaggctcctgttccctgtcagcccacaaaattattcaaacaagccaatcacatcctcctttgggagccatgagccaccgtgccttcttgatactaccaagcctgcctcccacagctcttgtttgttcaaaatgttccttaatgcagcccctgtgtgacaaccctgcatgggccagtgtcctcc

SEQ ID NO: 606102 - DNA, 562 bp, Homo sapiens
ccactcagtcgttcaataaatgtttcggaaaatgaagaaataaatgaacataaaagtaaaaacactaggaagattcaggatagccctgggaatggatggataaagccaagcaaggtgaagtcaccaggtagaacagtttccaggaatcatgaggtagcttgttggatgagctgcctacatgcacgaagagttcttctaagattgtttccctaaaaggccctctacaagcctcagggaagccctcacacctcttccgaagctaagtcagaaactactgcagtaaggcctcattttagtgagggctttgctttagattcactgctatgaatctaaaaccacagataactctcatgacactgcaggactgaagaaggtggggatascatctcattcattgctgtgtttcctgggagagcacctggttcatagttagcatgatgccatggtgcctaaagcccagtattcaatagcattcttcaatcactttcaaaaacaagatttggggtccttcttcttgttttaaccttccccaatactgacaaataaccttccccaaaactgt

SEQ ID NO: 606103 - DNA, 503 bp, Homo sapiens
ttatcccatttaatagtcttatactatcaagaccattattatggtgaacaaaagaagacacacaaaaaagaatacatattgtatgatttcatttatgtgaagtttagtgattgtctgggcatgggggtagtgggtgccagattgaccaagaacatttctgtgatgaaggaaatgttctctgtcacataggtagcggttaaataggtatatataattgccaaaactaatacaaaataaaatttagtatctgtgattttcttatgcataaatcatatctttatttaaaaaataaaactgtagattctatgcttaattggktcttaaaccagattaaacaggagagagtatgcatatggagctaaggaagagtgactcactgagagaggacaactaaggagcctgtcacattaaaaaagattgtggatttctgagtgtagcaacctttcacactctctgcattttggaaatcagttaattaactgagatacagagaggaaagtaat

SEQ ID NO: 606104 - DNA, 601 bp, Homo sapiens
atgaatcagaataatatagacattcaagttagaaaagtactaggtaatcttaatgtacacttggaagtttaagaataactgatctggccccaacctgtcattttaagtttgtccctcaatgttgctctacatttattcattcaaccracatgtattgggtaaggtatcaaggatgtcttcacatagtcatggaactcttagtacaaagttgacagaatataatgtctgccctccagagacacactggggttaaccagtgaagttgcttactgctgcgggtgaccagccagtggctctcaccgtccatttagactaaagggatcagtattttgggcacacccataaccattcatagtacgttagttggggagctctgccttatgtcctggtatttcttaagattcctttcttggctctcttcccactgcacatgcttctttgacaatctcatttacttccatggctcagtcacatctgatatccacgtccaatcaatcatgcagcccaggtaatttacctcctcaaaagcttttaatttgtcatttgtcttcatgtttctaccttagtttaagttaccatcatttcttacaaggaatatgca

SEQ ID NO: 606105 - DNA, 402 bp, Homo sapiens
gtgtgtggtacctccccctccattctctctccagctgctgctttcgccatgtgaggcgcctgctccccctttgccttctgccataattggcttactccctatggccttgccagaagcagatgctggcactatgcttcctgtgcagcctgcggaactgtgactcaattaaacctctattcttataaattacccaatctcaggtattttgttacagcaatgtgagaactgcctaacacacccatcctccaggaatagaagagaggctggagactgataaacaatcatgcctacgtgatgaagcctttataaaaataagtaaactgcagggttcaaagagctcctaggttggtgaacacatccacgtgctgtgagggtrgctcacttcaactccacagggacaga

SEQ ID NO: 606106 - DNA, 603 bp, Homo sapiens
tggggaaagagcatcctaagcagtgggaaaaataagtgcaaagagagagagagagcctggcttggggtttgtctggtgggtacaaggaacaaagagaggctatggcagttaaagcagattgaccaaggggagagctgtagaagatgaagtcagagaggtagtgagggtgaaatggggtataattttggcttgtactcatctaagtgagatagagaaacttcagaggatttgaacaaaggatttcatcatttgactttcacttcaacacaagggtcaacaaactacaaccagcaggacaccgcttgcttttttttgagacggagttttgctctgttgcccaggctggagtgcagtggtgtggtctcagctcactgtaacctcygcctcctgggtttaagttattctcctgcctcagcctgctgaatagctgggattacaggcacgtgccaccacactcagctaatttttgtatttttagtagagaaggagtttcaccatgttggccaggctgctctcaacttctgacctcaagtaatccacctgccttggcctcccaaaatgctggaattacaggcatgagccaccacgcccagcccaccactt

SEQ ID NO: 606107 - DNA, 573 bp, Homo sapiens
tcccctggaaagggggcggaaaccagggagccaagtggtctagctccgtgggtcgctcccccatggagcccagcaagctaagattmactggcttgaaattcttgctgctaggacagcagtctgagatgcttgagcttggtatggggaggggcatgcaacattgctgagacttgagtaggtggtttaaccctcacagtgtaaacaaagccagagggaagttcaaactgggaggagcccaccacagctcagcaaggccattgctgccagactgcctctatagattcctcctctctgggcagggtatctctaaagaaaaaacaaaggcagcaaccccagccagggtctgataagataaaactcccatctccctgggacagagcaccagggggaagtggaggctgtgggtgcagcttcaacatacgtaaacatccctacttgacagctctgaagacagcagcaaatctcccagcacagtgtacaagctctgctaagggacagactgcctccacagtgggtccctgacccccgtgtatcctgactgggagatacctccagtaggggctgacagacacc

SEQ ID NO: 606108 - DNA, 573 bp, Homo sapiens
tcccctggaaagggggcggaaaccagggagccaagtggtctagctccgtgggtcgctcccccatggagcccagcaagctaagattaactggcttgaaattcttgctgctaggacagcagtctgagatgcttgagcttggtatggggaggggcatgcaacattgctgrgacttgagtaggtggtttaaccctcacagtgtaaacaaagccagagggaagttcaaactgggaggagcccaccacagctcagcaaggccattgctgccagactgcctctatagattcctcctctctgggcagggtatctctaaagaaaaaacaaaggcagcaaccccagccagggtctgataagataaaactcccatctccctgggacagagcaccagggggaagtggaggctgtgggtgcagcttcaacatacgtaaacatccctacttgacagctctgaagacagcagcaaatctcccagcacagtgtacaagctctgctaagggacagactgcctccacagtgggtccctgacccccgtgtatcctgactgggagatacctccagtaggggctgacagacacc

SEQ ID NO: 606109 - DNA, 610 bp, Homo sapiens
tccttttctctcatgagtgtcaatwgttgtaggtttgttcttacataatctcatatttctcagatgttttgtttattttagaagtttttgatttatttttatgtgagttgatttgaagaactggtctttgagctcagattctttcctcagcttggtctattctgctgttaatacttccaattgtattatgaaattcttgtggtaaatttttcagttcagaaattcagttttgttctttcttaaaatggctgtttcatctttcagctcttggatcatcttactggattccttgtattgagtttcaactttctcctgcatctcagtgagcttccttgccatccagattctgaattctatgtctatcatatcattctgattaagaacgactgctgggtggatactgggcttgtttggaggtaagggaacactttgcctttttgaatggccagagttcttatgctaattctttctcatctgagagggctgatgttcctttatctgtggtgtaagttgagtaaagtcaattggcttcatttctcagtactttcagagggccaagtctcagtacaggatctttatttgtgtctggattcttgcctttgtttcacag

SEQ ID NO: 606110 - DNA, 629 bp, Homo sapiens
ctgctaataaatgggcacaaataaagagaataaacatttatcctacttttcctacatgatgatatttcaaggtaataaaacatgatggagaaacaataaattctagagtaacagtattcaaaattcatgtttttcaacccctaatgaataataaatctaggcaaggactaccagtggctgctaatattgttaggtggaagattagagagaaaatttatgacagatgcattaggctgtactacatgtgaacccactgatctaccttaacatcattaaagtagaataagacatatattcctccaaacaagatataataggaggagcacatcaccctcttctgtgaatkgcttttgccaataaaaagtaaaacttgaatctactcaagtctctatagctacctaaataaaagaaattcagtactgtgttatatgacaccaagaggacaaaatcagtgaaatctagaaattctaaaattattcaataaataaatggtatgacaagggtaaggaaacttaagaggcatcaattacatgcagttgtggactttgttgagatcctaatttaaaccattgaatgtaaatagatatttttgagtcaatcagagaaaactgaacatggacaggacatta

SEQ ID NO: 606111 - DNA, 483 bp, Homo sapiens
ataattggaaacctgttttctttttcttggagcaggaatcacaggaaaaacattgcagaatttcaasttccatgataaaggagaaaacacaaaatggttttcatagatgggatgaaatcatgtttccatggaaaccctgaactggtttgttgcaatccaacttaagttggcaatttgggctaatttcaactataaaaataaatctggcaacttaaaatatttatccatcctatcatgaatggaatttctaaatgatagctaaatatgtgaaaagcatctcactgaattgaatacatatttttaaattcctttaatcattaccaacttcacctggcaaagatatcatttaaattggaaacaaatccaatgaactaagttgtgccagaataaatagaatctagagtatggttatcctctgattccaatgttggagaaagaacagggacaaggacttcctctattacagactagcagagtctgtgg

SEQ ID NO: 606112 - DNA, 567 bp, Homo sapiens
aataattctctaacctcacaattccttacatgttacaggcaatcaattaagtattttartggctcacctgtcactggtaagacatttagtttcattttttcacaatggtgatagatttatgctaatccacctacactttctctgatggcttctcttggagccacatatcagtggaatgactggctaggacaaagtggacagaacacatgtggaacactatattgtccactgcgatatgggacctattgctgcattagtggccgtgttccaaccaaccaagccaactcagatacatccaaccctacagagaggaccaacattattatttttggataatttatttttaggaaattcatattttagctttgaaagtatgaaccaagtagacccaaaagttgatacaaccaaatatacaaacagcaaaaatttatccctcttctgctcacacacgcctaactttccttttttgaccaaagaagtcttttaaagcccaattcatactaggataacttttaaatgtgctgaaaattctgccccatctctttttactctgttaaccaaataatt

SEQ ID NO: 606113 - DNA, 567 bp, Homo sapiens
aataattctctaacctcacaattccttacatgttacaggcaatcaattaagtattttaatggctcacctgtcactggtaagacatttagtttcattttttcacaatggtgatagatttatgctaatccacctacactttctctgatggcttctcttggagccacatatcagtggaatgactggctaggacaaagtggacagaacacatgtggaacactatattgtccactgcgatatgggacctattgctgcattagtggccgtgttccaaccaaccaagccaactcagatacatccaaccctacagagaggaccaacattattatttttggataatttatttttaggaaattcatattttagctttgaaagtatgaaccaagtagasccaaaagttgatacaaccaaatatacaaacagcaaaaatttatccctcttctgctcacacacgcctaactttccttttttgaccaaagaagtcttttaaagcccaattcatactaggataacttttaaatgtgctgaaaattctgccccatctctttttactctgttaaccaaataatt

SEQ ID NO: 606114 - DNA, 567 bp, Homo sapiens
aataattctctaacctcacaattccttacatgttacaggcaatcaattaagtattttaatggctcacctgtcactggtaagacatttagtttcattttttcacaatggtgatagatttatgctaatccacctacactttctctgatggcttctcttggagccacatatcagtggaatgactggctaggacaaagtggacagaacacatgtggaacactatattgtccactgcgatatgggacctattgctgcattagtggccgtgttccaaccaaccaagccaactcagatacatccaaccctacagagaggaccaacattattatttttggataatttatttttaggaaattcatattttagctttgaaagtatgaaccaagtagacccaaaagttgatacaaccaaatatacaaacagcaaaaatttatccctcttctgctcacacacgcctaactttccttttttgaccaaagaagtcttttaaagcccaattcatactaggataactttkaaatgtgctgaaaattctgccccatctctttttactctgttaaccaaataatt

SEQ ID NO: 606115 - DNA, 530 bp, Homo sapiens
acacagccaatgctaggtcaacattattcgcagcctctgascaagagaagattccagttcaattcttttctctaaccacctgtagaatattgaagctatactttcctgacatatctttttactcaggccaaaacttcttaacacatgggcactaagctggatttttccatacctgcttgcatttttaaacaatgaaaaatcttatgagatcatctatctcagtatcacttttatttctaaaataacaagataattacagaataatttctttctgaaaattaagaacatgagaatatatatttagaaggtaagacctgattagatgttccaaagcaacctacaagtattttctgtattaagcaaacacattcagttgtgcacatattcttcaaatgttaaaattctaataaaaatatggccaatccatatttttaagaaacttttaaggtgtagagtttgggtactaattagaaaatatattaagtttccaaataaaaagaaatagtgttgcagagtaatactctcaagtg

SEQ ID NO: 606116 - DNA, 530 bp, Homo sapiens
acacagccaatgctaggtcaacattattcgcagcctctgaccaagagaagattccagttcaattcttttctctaacyacctgtagaatattgaagctatactttcctgacatatctttttactcaggccaaaacttcttaacacatgggcactaagctggatttttccatacctgcttgcatttttaaacaatgaaaaatcttatgagatcatctatctcagtatcacttttatttctaaaataacaagataattacagaataatttctttctgaaaattaagaacatgagaatatatatttagaaggtaagacctgattagatgttccaaagcaacctacaagtattttctgtattaagcaaacacattcagttgtgcacatattcttcaaatgttaaaattctaataaaaatatggccaatccatatttttaagaaacttttaaggtgtagagtttgggtactaattagaaaatatattaagtttccaaataaaaagaaatagtgttgcagagtaatactctcaagtg

SEQ ID NO: 606117 - DNA, 530 bp, Homo sapiens
acacagccaatgctaggtcaacattattcgcagcctctgaccaagagaagattccagttcaattcttttctctaaccacctgtagaatattgaagctatactttcctgacatatctttttactcaggccaaaacttcttaacacatgggcactaagctggatttttccatacctgcttgcatttttaaacaatgaaaaatcttatgagatcatctatctcagtatcacttttatttctaaaataacaagataattacagaataatttctttctgaaaattaagaacatgagaatatatatttagaaggtaagacctgattagatgttccaaagcaacctacaagtattttctgtattaagcaaacacattcagttgtgcacatattcttcaaatgttaraattctaataaaaatatggccaatccatatttttaagaaacttttaaggtgtagagtttgggtactaattagaaaatatattaagtttccaaataaaaagaaatagtgttgcagagtaatactctcaagtg

SEQ ID NO: 606118 - DNA, 614 bp, Homo sapiens
agaaattcagaagactgcacattaaatacatttcaataagaaactccctataaatagaaaaataaagagaattttcctcaaaaacataaaccaaatgactgaaaggtaccagaaagtccttccaacccaatttcrttgtttagcagatagaatctgaagcacaataaggttaaatattctaaccaatattaagtataatgacagaccaatatcagaacttcagtgcgttgactccccaaactgtgttctctccaatctaccacactgtctctcttaaaatgggaaaaggcataatgttattgctctggaaacaacctataggagtcagtgcatggcttaaacatgaagaaggcttccacccacatgtagtatcctaggaacaacaagaaaacttcactcacttctcaacacagagcaaaaccattccaactccagttaactccagtcctaactgcaaagcaccaggtatgtgatcctcctgattgcttaagcacctctgagagctggaggttgcatatgtaaaaggggatggcaagccaattctaatctgtctcacatgagaatgacatgtcatgatgaaacctcaagagcttcacatattatgacacactatg

SEQ ID NO: 606119 - DNA, 613 bp, Homo sapiens
tttttgctctcataccagtgagtatcatgtgactcaatcagtattttttttttattaaatgctgacaaagttatattaaagtaagagatatccacattctattcagaacaaaaaaaaaaaaattggaatccctggataagcttttattgctgttactctaccagtcacttctgggataaaccgtgttcttccaacattactttctgggataatcagttcatgtatttgttgtcttttcatctgaagtcaagctgatcatgactgacagtaacatcagtagatgagaggacaggagcatgttatttttttaatattattttcctctttattgtcttgagcttatttttgtcttcccactgaaaagtaaaagtgtccctctaatatgaagggaaagactgtactttcttatttcatattttattcaggctttctttggatgccataagtaatatccttcattctataacatgacttactgaaacacytatttatttgcttttccaagtaactgaatcattaaatttaaaaactatattaaattcctctaaaaatttaggtactaggtttatgcaattttctttacatgcttagcacatttgtttaatgtgccaaa

SEQ ID NO: 606120 - DNA, 653 bp, Homo sapiens
cttgactttttcttttcaaatctaattttaggaatgttaccaattgttaattcatttaacatcagggagaaaaataagtgtagggcatagccgaattacctacagggtagcttttacagtcaggtgtataccaaaaaaagtcactttgctttcttcacctggaaatataggaatgttatatcattcctttctagaaagaagagcaaagtaactttttacaaaatgttcctcrttatttaatgtatatgaacacatctactaatgattctactgtaactttcaagagatagatatttgtccctcttcctcataatcccagagggaaaaggtaactatcatgaaacatttttaaaagctttatatattatatcaatataaaataaaccagttcctccattatattaatggtatctggcttttcaagacagaattcactaaggatgttgaaaatataaaccacacaccaaaatgttagacttccatttggaggccaaagctaactggcaagcctaatttgagtcacactgtgaaaccccattttcctaacttaatttatcttgaattgtttgtgtgatggtgttgtttggtttgcttttatggtgcaatgcactggtatcttcagcactgcagtttatatgaaaatccaatgttcc

SEQ ID NO: 606121 - DNA, 632 bp, Homo sapiens
taccaagaaaccacaattcttggcagctgcacattcaatgtacaaatgtttaccagatgtgaagttcatatgatctatgctgtataatagaaacaaaaatgaatgtgctgtgtaatatgacatgctagttcatgctgtgagccagcaagcaagaaaactggtctcatatctagacaaagcctatggactatttggagtaaagagaaaacctctaagtcccacctccaatccccaattaaaacaaatcccataygcttgttaagcctgtgggaaattctactaagtaaggttcctttctttagattaagcattccatccttgttcaataaaaacccccttgggagacataaatttttatcagttattacacttcagagtaaatgaacttcagatcctgtcttgacagttggttctgatatgaaaaatacatgaagcttggttgtttagattgtaaaagaaagaatcatcaagagataaaatttaatacatattttcccactactatttgtctgtttatccattcattccacaatatgcacagtcatctactattattcaggcaatgtacaaagcactgaggatacacagatgagaaagcctagtgatagcctcagcaagtatagggtttttgt

SEQ ID NO: 606122 - DNA, 601 bp, Homo sapiens
gtctggcttactgtttgcttttgagtgtcaagggtgagatttttagtccattaaaactccttgtatggaataaaacaaatgactaaagtacaagaataactaagtaattgctggttcatccatatgatggagtactacagaggcataaaattcaaatgttccaagaatacttaatgacaattttaaaaatatcaataaaagaacaaatgcaaaaaaatgcaaaactatatagtaagctaattatgtgatattatatctctttcatagaaatgtcaaaaattgttacttccagataatagcattatggatatgtaatttttattttttgatgctttccaacttttctataaaggatatgcattattttggctgggtatgatggctcacacctggaatctcagcactttagaaggctgaggcaggagaattgcttgagatcaggagttcaagcccagcctgggcaatacagagaaaccctgtctctacaaaaaaaaattttttttaattagctgagcatggtggctcatgcctgtagtcctggatactcaggagcctgagrggacagaaccattgagcccaggagtttgaattgcactgctgc

SEQ ID NO: 606123 - DNA, 508 bp, Homo sapiens
cacactgaaaataaatgttccagtgcagaaatatatgttaatttccactcagctcrttggccatgagtatcatggggccagaaaacgtaatctgactgtgtacctgaaatttatttgacaaacagaactaataagaatctcctataagtacaaattcatcccctccaccaccaccaccagcagcaacaaaaaactggagggatttttatggtagtgttttttaaaatgcaaatcacgatccattggttgatcttgaaatcaactcagtggtctatgaccaacagtgtttaatagaatggaagggaacagaaaatgtcagagcacattgcatgtacaaaaggtaaatattatgatatatttggtatacatatttcgaataaatacagatgtgtcacaatgtaaaatttatttcttcctgtgggtcctgtaaaaaaaattgaaagtcatttttctataggagtcccaactaagccagatatatggaaacataacaatttccatactaggt

SEQ ID NO: 606124 - DNA, 508 bp, Homo sapiens
cacactgaaaataaatgttccagtgcagaaatatatgttaatttccactcagctcgttggccatgagtatcatggggccagaaaacgtaatctgactgtgtacctgaaatttatttgacaaacagaactaataagaatctcctataagtacaaattcatcccctccaccaccaccaccagcagcaacaaaaaactggagggatttttatggtagtgttttttaaaatgcaaatcacgatccattggttgatcttgaaatcaactcagtggtctatgaccaayagtgtttaatagaatggaagggaacagaaaatgtcagagcacattgcatgtacaaaaggtaaatattatgatatatttggtatacatatttcgaataaatacagatgtgtcacaatgtaaaatttatttcttcctgtgggtcctgtaaaaaaaattgaaagtcatttttctataggagtcccaactaagccagatatatggaaacataacaatttccatactaggt

SEQ ID NO: 606125 - DNA, 591 bp, Homo sapiens
gcctcattttatttttttaaggaaaagatatacttcttatattaattcaaatggcatccttgatgaggatgaattgtaatataattttttttagtttgtattgttattaacataaagtattgtcatgttttataaggtgatgatttttatcagccttattattttttgatgtttaagggaagaaatcacacttcaaaaccataatcaattgcaaaataccttttgtatgagtatctaactccttaccacatgcttaatattgcacaattttaaatgttttatttcttattttcaactgagaaaatacaaatttgaaatacgctagctgtacatgtttatgggaaacatgtcatttatcaatttagtttcaaatttttcatttccaaaataaattcatcttaactcttagtttctrtcacccatgtgaaaggtttataattgcttacttaaatatacgagctccaatcagtgttttctacccttccctcaaataaactgccatgctttttcctacctacccttcatagcaccaccagttcaaaagccagccttttgtttctacaggaaaaatgcttgctgaccagccaagaa

SEQ ID NO: 606126 - DNA, 595 bp, Homo sapiens
cttaaataagccatttccattcatagctctaaggcttatctgaaaacacaccttaatttgtggcttatagattaatgttcagggtctaggtaataaacaccataaacttacagaaacttggtataagtaatctgtatatgcaataaagaaatgggaggcaaaagggaacagaaatagctatgaatagcaatgcatatatatgcctctggtaaacccacaagcctgaagkttaaaaacaattgtgaaccaggcctatattcagctggtacaaagcaaggttgctgtacagattgtgtatgcacatttgttttgactggatctgaacccactccaattggctgatgttctggcttttctgattgtttaatattctaagcctcacttctgtttgtgagcacttacaaaacttataaaaggaatgagtcactgaacactctgcagtgcttgctaagtgtcaaaaatagatcatataaaactaacctgtacttctttgatagctgtactaggctgacatcaggggaatactgttcgtgatagttcaaaaatgaaaatgaattaatgtcagttggatataagactatttaaatggccccct

SEQ ID NO: 606127 - DNA, 566 bp, Homo sapiens
gtaggaggtttctggtggtatgttttagagttctatgcttttccctgtctaattggttattcataatttgaatgagggagatgatggcttgcaaattaaatttctagacaaagcataccttgaaagatgactaactgatggaatagaagactttggacaaaaaaaaaatcttaactgaataaataagagaccactgcaacaaggcaaaattcaaaagaaatacaaaacttctgggatycaaaatttggattgtagaatgctcattaggaataaagtggcttaacagcaacaggtctgagttgactaaatggtcttagctgataccaaattgaattcattcatgtgaactggctgtcaagaattaatttgctcttgaactacattgaggaaagaatacggctacatcctttctattaagcaaccaatggccatagatatcaaaactgaatgtgtttagggaaggctgacaagagtggagatataaacacaaaccatctcaaagaagtggtttcagaatatgatgttccacttggggcatatattagctgtcttcaaatgctgggaac

SEQ ID NO: 606128 - DNA, 566 bp, Homo sapiens
gtaggaggtttctggtggtatgttttagagttctatgcttttccctgtctaattggttattcataatttgaatgagggagatgatggcttgcaaattaaatttctagacaaagcataccttgaaagatgactaactgatggaatagaagactttggacaaaaaaaaaatcttaactgaataaataagagaccactgcaacaaggcaaaattcaaaagaaatacaaaacttctgggatccaaaatttggattgtagaatgctcattaggaataaagtggcttaacagcaacaggtctgagttgactaaatggtcttagctgatacyaaattgaattcattcatgtgaactggctgtcaagaattaatttgctcttgaactacattgaggaaagaatacggctacatcctttctattaagcaaccaatggccatagatatcaaaactgaatgtgtttagggaaggctgacaagagtggagatataaacacaaaccatctcaaagaagtggtttcagaatatgatgttccacttggggcatatattagctgtcttcaaatgctgggaac

SEQ ID NO: 606129 - DNA, 598 bp, Homo sapiens
aaattagtcaaccttagcatttaataatgtcataagtctggccaaaaatgtcgaatgtgaaattacactctctacctgaaaattaaaaatatttagaggcacagttaaggaaacacacatacataaatggctctaactattctacagaggcaactggacattcatttaattaatttagaatgaatcagaggtcaaaaatattcacattttttccagtattctgagatgtatagtctaaaagtaattgattctgattctcccagtgcctccacagctktattctataaagcctcagttcattcaattcaattatggtgtttttgttttatttttagcttaatagactacgtggttagtctaaataccatgtaaaaatttatgtacattacatacacagacttcaccacagttttgaggagaacatagatctgaccacatattccaattattagccttcacattactgggtatgaaacaatcaacaacctgctcaaagtactctactataagcagcaattgattagggctgggagccttgtgatatgacaaccaatcatggcatccagagaatctaaggggaaactgactaacaaactga

SEQ ID NO: 606130 - DNA, 598 bp, Homo sapiens
aaattagtcaaccttagcatttaataatgtcataagtctggccaaaaatgtcgaatgtgaaattacactctctacctgaaaattaaaaatatttagaggcacagttaaggaaacacacatacataaatggctctaactattctacagaggcaactggacattcatttaattaatttagaatgaatcagaggtcaaaaatattcacattttttccagtattctgagatgtatagtctaaaagtaattgattctgattctcccagtgcctccacagctgtattctataaagcctcagttcattcaattcaattatggtgtttttgttttatttttagcttaatagactaygtggttagtctaaataccatgtaaaaatttatgtacattacatacacagacttcaccacagttttgaggagaacatagatctgaccacatattccaattattagccttcacattactgggtatgaaacaatcaacaacctgctcaaagtactctactataagcagcaattgattagggctgggagccttgtgatatgacaaccaatcatggcatccagagaatctaaggggaaactgactaacaaactga

SEQ ID NO: 606131 - DNA, 632 bp, Homo sapiens
actgttaacattttgggaaacatgtaatttagagctcaaaaatataatttgattactcatataaacatgatttccaacaaaaagccataattcaaatttaaaattttttttcaagtgttggaaagaccagtgaaaaaaattttttatataatttccacatagatgtcaaagataaatttgtttagtcatcatgaaaaagagtttacaatttgtttggaagaaaaagctgttattactcaccattcacagtaacaaccatcytcagtgaacattcaagtatgttgctatggtttcaatgtgtcccctccaaaatttacatgatgccaatgtgattgtattaagcggtgaggcctttaggaggtgattaggccataagggctcctccaatatgaatgggattaaagcctggtatggtttgcctgtgtcccacccaaatctcatcttgaatcatagctcccataattccaatgtgttgtgagagggacctggtgggagataattgaatcatggggatgatttcccccatactgttctcatggggttgaataagtctcaggaatctgatggtattgtaaggggaaaccccttccgcttggctctcattttctctgtctgccaccaggcaagatgtg

SEQ ID NO: 606132 - DNA, 632 bp, Homo sapiens
actgttaacattttgggaaacatgtaatttagagctcaaaaatataatttgattactcatataaacatgatttccaacaaaaagccataattcaaatttaaaattttttttcaagtgttggaaagaccagtgaaaaaaattttttatataatttccacatagatgtcaaagataaatttgtttagtcatcatgaaaaagagtttacaatttgtttggaagaaaaagctgttattactcaccattcacagtaacaaccatcctcagtgaacattcaagtatgttgctatggtttcaatgtgtcccctccaaaatttacatgatgccaatgtgattgtattaagcggtgaggcctttaggaggtgattaggccataagggctcctccaatatgaatgggattaaagcctggtatggtttgcctgtgtcccacccaaatctcatcttgaatyatagctcccataattccaatgtgttgtgagagggacctggtgggagataattgaatcatggggatgatttcccccatactgttctcatggggttgaataagtctcaggaatctgatggtattgtaaggggaaaccccttccgcttggctctcattttctctgtctgccaccaggcaagatgtg

SEQ ID NO: 606133 - DNA, 577 bp, Homo sapiens
ttttcttctcgacaccaatgagtacataaacawacagttaaggggtagcataacactgcaatcatggctaaattgacctagatgaaaacaagacaagtccaaacaaaaactaagcactgaatcaaacacaagcatctggcaggattcccagaaggtcactaagcttggacttcagaaaattgtcaatgtttcctgaaattttcaaagatttatctgagtatttcattggtaaaaaccaaaatgtccaagaaacaacaaggagaaaaaattatattgaattctttgaagtgacaaaggtgaaaaaattatctttttcacaactgataacttcagatttattttcttggcattgtaaacatattgctttcagtgctctttaattaaagaaatattttaagtaaatgtccctgaaattaaactgtgataagtggaacaggtataactgtagtattccagttgtattctgtaagttggattgtgcgtctctttgtcaacattatctgattttttggaatgcaagacagttgaatgaaaagtgtactaagtaggattaaagtactaaaaaaatatgaattgt

SEQ ID NO: 606134 - DNA, 514 bp, Homo sapiens
tggggaatttagactcatggttcattttcctcctatgagactggaccacgtaccagaaataaacatttcaactttgtttctcacaagaataataatgaagcaaactaaagaattactattgcatgctgagaaatataatccaaagataataaatacaaaataaaaacacgtatccatttcctgtgataggccttactcacaacagtttcaagaytgaccttaatagtaaaaccatccactatggaacaaagagggccctgaaaatgaacctaaatgaatgccaggtaactctcatcagaacatttctaagtgagccaggttatgtaaaccaagcacaacttctttatgattatatctgctctggaccctatacctatgacaggagagtcatgaagtcactgtggggcattgcaatattgatcattcctagttggccattcactgcaagcagtgctgccccatctgtcactctgaattgcaacatcatagactctcttagcttttcagttaagtt

SEQ ID NO: 606135 - DNA, 590 bp, Homo sapiens
aattaagatggtatgatctgtcaccagtgggaaccatgggatatggagtcttctttaggtaaagggattttgaatgatgacacctacagcatttgcttatgcactgtgtttttgaaatagactttagactcactttgcagtggggatgrggagtatcattgtctgcccttgaatcaggcccttctggtaagtggaataggaggaaggacgggaaagggacagttgtctccttagttggctctgttgtagcccctgggctattgtttcccatggtttttggactaacactgaccagaccctagtgattcaagtgtaaaaggcatgcaaattctggctcctcatgataaacatgtatgtattccattgcctgttccactccccacttggcatctgttctggacaatccaccccagagcttcttgtgcctaggatcctcatcaagatttctgggacagccacttgacccatggcaaactcacacagtcttaattttccaagtagcttgaagacttccgcttccagcccctgtcttagccttgccatctcctttcaactgtcctctcctcctgctcaaataagcacagtgagaa

SEQ ID NO: 606136 - DNA, 547 bp, Homo sapiens
ttgtatgattctgtcaatataaaatgttcagaataagcaaatccataactacttgaagtacgtagtaaatccatacctataatacatgaagtgctggtagaaggaagaaatgggagtgagtgttaatgggaatggggtttgctttggggtgataaaaatgctctggagttcgtgctgatagtgacgattttgaatatactaaaaactactgaattgttgactttagaatggtcarttttacagtatgtgaattatatatcagttttaaaacactgatttgtacccttttagtgggtaaattttatgatgcatgaattgtaggtcaataaagatgttattaaaaataagaaataaaatgcactggttttaactgaactgtaaaatattcctctaaattttgtcatggctctctagagaactattcttgtcctaagtgaattcacaattttttaaaacatgtctgcacaatcgttgcttgatttcatcatccccatttccaaaatatgccatgtggcacatacatacttagggaaatattcatagggtt

SEQ ID NO: 606137 - DNA, 549 bp, Homo sapiens
atgtgaaaaaatgggaaatatttgagaatattaaagttatttggcatactttttctaaaacctataaacaggactagcccctgtcctccctcatgaaatgtctagtctagtgaatgaaatttaacccaggacataaatagctaactctaaaacagtggccattcacaaagacaagcagttctcaaatgctctctctaggtttgcagsaagggttatcccaagaaaatatgacaatgtcctcactttttcctctagcagtcctatgtaaatgcaaaacttaaatcaaggatatttgtgaagggagtgagaagtaacagaggactctgccatcttatttccttccgtagtttccactgtgctacttttgatcacactaacttcctcaggagacagagaatttggcttttctaactgtccaagactccatagtatcaggctttaagccatcttgttttgcaggttgcagaatatctctagaaaggccttctttcttctttctcttctttcagaatgagcttcagcttaaatgtatcaatttctcctaggatc

SEQ ID NO: 606138 - DNA, 532 bp, Homo sapiens
cttcaataccttcacattttccttttgcatctctgaaagattcaagtggtctgagttcccaattactacaagctacagcttaacaagcttttcccttattgcataacaataatggccaactttccaggcctggatggaggagtcttttctgccttctatcttcctttgactaggtaattttgcatgttaagctccgtaacttaacttgcagtaccctgcttctagccctaacttctacatcggttagtgccctctggttgcaagcacaaaagctgtttatgtgtratttattttttaaaaaaatgaatcctttggaaatatatgagtagctcccagaagggctggaaaattaagttttgaaaaagaggcatcagacaaagctgcagagaccaggtatcaggaactacttagcatctttaaaggataccaacaaaggtataaatatgctacattttccttttcatatattaatctactagatgtataaagacagtgagttccattggtttagcttgggtcacctattgaccct

SEQ ID NO: 606139 - DNA, 635 bp, Homo sapiens
aattaaatttctattaattttgaagttaacttatcaatacataacaaaataattgtttataaagctcccttggttggatgtgtatgagcgtatgtgaaaaaatgggaaatatttgagaatattgaagttatttggtgtgtttttctaaaagctataaaaatcccagctccttaacttttcttaaaggtcatatttttattactccagctattctcttagcagtcctcgatttcttcaagtgctgcaaaggtctctgggtaatttttcatgaagaaaatcagtgaagactacttgaagaagacatcccacagtatgctgcttgctttaaaaaagaaaaagaatcctgtactacttagtttcacaaattctcattaattatccctagatttttttttctgtcatgataagccatttatgatccaactcacwttattttcctcaggtaaatgactcagcactcattcccttaaatttcaattctgtttaatttcaaatactctactatacaggtcacttcaattaaatttaagagatatttcattatatgtcatatgaaaaattaggatgatggatgaaatgatgtctatggctctttccagctctaattgctgtggggtcggtcaagtcataatcat

SEQ ID NO: 606140 - DNA, 488 bp, Homo sapiens
ataaaatctttttttcctaaccttctagagtgatcactgttgttaagagggtgtgtgtgtgtgtgtgtgtgtgtgtgtgtgtgtgtgtgtttagtgtttgtatggattttgccccagtctaattgcatagagcgctgtgaagggagtcttttcttaatgatatgcatgccttttttatcagatgctatctctagaacttgtcttcagaaatyaggccagctgcctgcattacatactgttgtaaggaacagggagggaaataactccttcctgctctgccaacatttttctgtggctacaagcatacttaggaagccttatgtagcagcaatgggtgggcatgaatgccttggctctctgtgtgtcatacttacaaggatgccaagttattaaaacagagcagtccctctgctgtggcagagtcatcttctggaacctgtgtatctgaaagatgtggcttcaccctcaatgcttctaaaagctcatgt

SEQ ID NO: 606141 - DNA, 370 bp, Homo sapiens
tctcataaacaacaatatattttcctttcaaatcctaacagaatgtatcttaattccagcattttcattctaagtgaaaatttgttttgtgacagtttcttaatttttaaaaaagttccccatggacagaaaaaaaaattaattcgcatcaaattagatcgttgaaaacttgataagcaaatactcaaaatcagcataacttatgtgcagtatcgaaagtaaagcttccaataagtaagagattcaaagctgtactctatacaatatagttcacattaaagagggtaaaatatagactkaagattttcaagcctaattatctgttctctcccttctctggccaaataatattttttaaaaattttaaaaa

SEQ ID NO: 606142 - DNA, 570 bp, Homo sapiens
agacttaagattttcaagcctaattatctgttctctcccttctctggccaaataatattttttaaaaattttaaaaaccccttttttaaaaaggggttatgaggcccctttcatggtcactgctatactcttcgcagtcccacatgtgagtgaaactaacatgttcaatgttagttgaacaatgcttcattgttcaagaggccaataaatttatcagttaaaggagaaatgagcatgggcaggttcagttagaatttatccataatcaatcayacaaaatacaagtaaattcatgtcattgcacagaggagctctaaatttaaatttatacaaaatcagatacagactctgatgaatcttatatttcccataatataaagaaagatttctccattaaacactgatttacaatgtctggggagtaagcaagttctgtgaggtctcacaacaggatgtgtcaaaagcagaagctgaataaatgtagtgctgtgttgaaaaaagagataaaaatcaaaaagcatgtgaatcttattcccccagaaaattcccattactagcaagtttggacat

SEQ ID NO: 606143 - DNA, 565 bp, Homo sapiens
aactttaagtgctcaccagtcaaagcccacacacatgcactctatttgcacatctctagacctgttttggctcacaggtaacaagctacctgtcacttgttgagtcagtgctggcaagtttttaactgataatggctcacattgtaggacctccagaaatatttttatatttattttaaagaagctttggaatcttcatatctyaactcagttgaataattagctgataggcaattttcaggcatccaagccagcgtttctcaaatgtgtttcacaaacacatgtcctatgagatatttcaagaaaaagaaaaaccagatctgtatttggaatattttgagagctgctgcatacaatatcccatctcctaaggttcacaattcattattaacatattaagggctctgcaaaatccaaaactaaaaatacccatttaacttttattccttgtatcccaaacttatttgcactccccctttattttaataggaacacatagacattcagcagaagcagtgttctcaaggaacactcttggacataccctgacttggccagtagaaga

SEQ ID NO: 606144 - DNA, 565 bp, Homo sapiens
aactttaagtgctcaccagtcaaagcccacacacatgcactctatttgcacatctctagacctgttttggctcacaggtaacaagctacctgtcacttgttgagtcagtgctggcaagtttttaactgataatggctcacattgtaggacctccagaaatatttttatatttattttaaagaagctttggaatcttcatatcttaactcagttgaataattagctgataggcaattttcaggcatccaagccagcgtttctcaaatgtgtttcacaaacacatgtcctatgagatatttcaagaaaaagaaaaaccagatctgtattyggaatattttgagagctgctgcatacaatatcccatctcctaaggttcacaattcattattaacatattaagggctctgcaaaatccaaaactaaaaatacccatttaacttttattccttgtatcccaaacttatttgcactccccctttattttaataggaacacatagacattcagcagaagcagtgttctcaaggaacactcttggacataccctgacttggccagtagaaga

SEQ ID NO: 606145 - DNA, 533 bp, Homo sapiens
tgctgcatacaatatcccatctcctaaggttcacaattcattaytaacatattaagggctctgcaaaatccaaaactaaaaatacccatttaacttttattccttgtatcccaaacttatttgcactccccctttattttaataggaacacatagacattcagcagaagcagtgttctcaaggaacactcttggacataccctgacttggccagtagaagagctgatttgggaaggggagaatagaataatgagttctagcatccctcaaagcattctgcattggattgtgatggtctcagacactgagacagaaccatcctggcctggagtttactgcattcccccactgcttcttcaatgcttccatttgcatttctacttagactactgagtgccttccactccctccatctccatttgttgcttttccttccatccatctctctgactccgcaccactggtgctatcattctagtacattcccatcattgctgagcgctcactcactaattatgtatttaaatttgaat

SEQ ID NO: 606146 - DNA, 565 bp, Homo sapiens
aactttaagtgctcaccagtcaaagcccacacacatgcactctatttgcacatctctagacctgttttggctcacaggtaacaagctacctgtcacttgttgagtcagtgctggcaagtttttaactgataatggctcacattgtaggacctccagaaatatttttatatttattttaaagaagctttggaatcttcatatcttaactcagttgaataattagctgataggcaattttcaggcatccaagccagcgtttctcaaatgtgtttcacaaacacatgtcctatgagatatttcaagaaaaagaaaaaccagatctgtatttggaatattttgagagctgctgcatacaatatcccatctcctaaggttcacaattcattattaacatattaagggctctgcaaaatccaaaactaaaaatacccatttaacttttattccttgtatcccaaacttayttgcactccccctttattttaataggaacacatagacattcagcagaagcagtgttctcaaggaacactcttggacataccctgacttggccagtagaaga

SEQ ID NO: 606147 - DNA, 533 bp, Homo sapiens
tgctgcatacaatatcccatctcctaaggttcacaattcattattaacatattaagggctctgcaaaatccaaaactaaaaatacccatttaacttttattccttgtatcccaaacttatttgcactccccctttattttaataggaacacatagacattcagcagaagcagtgttctcaaggaacactcttggacataccctgacttggccagtagaagagctgatttgggaaggggagaatagaataatgagktctagcatccctcaaagcattctgcattggattgtgatggtctcagacactgagacagaaccatcctggcctggagtttactgcattcccccactgcttcttcaatgcttccatttgcatttctacttagactactgagtgccttccactccctccatctccatttgttgcttttccttccatccatctctctgactccgcaccactggtgctatcattctagtacattcccatcattgctgagcgctcactcactaattatgtatttaaatttgaat

SEQ ID NO: 606148 - DNA, 470 bp, Homo sapiens
cacaatagcaaagacatggaatcaatctagtgcccattaacagtgaattggatgaatcaaatgtggtatatacacaccacagaatcctatgcagccataaaaaagagtgaaatgtcctttccagcaacatggaggcagctagagaccaaaatcagaggcaaattaacacaggaacagaatgctaaataccacatgttctcacgtataagtgggagccaaacattgtgtacacatggtaaagatggggacaatagacactgtggattaccagaggggagaaggaggaacakgagtacgggttgaaaaactgtctattgggtactatactcagtacttgggtgataggttcaatcataccccaaacctcagcatcatgcaatagagcttcaatatacccctgcaacaaacctggacatgtacccctgcatctcaaataaaagttgaaataatttttaaaaaggtttcctgtt

SEQ ID NO: 606149 - DNA, 627 bp, Homo sapiens
cccaccacacccttatttccattctccattcactactccatagagtatttcaatactccccatagtaaaaccacagtctccaaatatggcctttgtgtcattgggtcagacctttctctaagtctttggaagatctagcttatatgttacttctgatgtagaccattccagagtatcctaataaaatggaacctctccttcatattaatttctttggccctttatgaaataccactgatttaaaacttattcattgatgcacttattaattcattcattcaacaagtatctattaagcatactatgcgttagactctgtatttgtgataggtgctaggaataaagcagttattgcttttgtggagtctgcattcttgcaggagcggagtggttgggattgtatggtttagggctagtatttttgggtttgcatcccatgtcaccttctagctgtgtaactttgttcaagattatatattttaatgcattagtttcttcatctgaaaacgggaaataaattacragaacctgaaccaaattattctgaatttggttgctgtagcacaccaggtctgtgtcctcaccttgctttctagctggagtagtccttataacatcttcccttgg

SEQ ID NO: 606150 - DNA, 433 bp, Homo sapiens
tgctgtagcacaccaggtctgtgtcctcaccttgctttctagctggagtagtccttataacatcttcccttgggaatagaaccaggctgctgaygctgctacagacctgggagctgcatagtggctgcttctggtatagttagagggaggttggatttttagactaatagtagtgctttttgacctccctgaatctcttgatttcctgtaagtttgtagcttgtcacaaagctgcagccagctctgtatcccagtccctattctagtataaaatatactagtatattttatattctagtataactttgatgaataaaatacaattttagatctacagaggaaaaacagacccaaatctaattaaaatacattctccttctttcctgacacattgctgtcttcttgccctcctgattcctggggattgtccact

SEQ ID NO: 606151 - DNA, 484 bp, Homo sapiens
acaccaggtctgtgtcctcaccttgctttctagctggagtagtccttataacatcttcccttgggaatagaaccaggctgctgatgctgctacagacctgggagctgcatagtggctgcttctggtatagttagagggaggttggatttttagactaatagtagtgctttttgacctccctgaatctcttgatttcctgtaagtttgtagcttgtcacaaagctgcagccagctctgtatcccagtccctattctagtataaaatatactagtatattttatattctagtataactttgatgaataaaatacaattttagatctacagaggaaaaacagacccaaatctaattaaaatacattctccttctttcctgacacattgctgtcttcttgccctcctgattcctggggattgtccactttctacagggctagyattatgcttttggcttaggctctgttttctagggagctcatacta

SEQ ID NO: 606152 - DNA, 577 bp, Homo sapiens
caagaaatttgaactgaatttctgagcaactttgggattcaaagaactgaccgttagaaaacaagataacatccctatgtccaatgattgaccaaatggcctcttcagctctgatggcttatacaaatcttctccttaggtatccaaatcagctaactcctaactttaagaatatgatggtgctaatggaccaccccaagggcatgtgcccttgagttttttcatagacaatgaattattgacactttgcagttccccacttactctaatgctctcatgcccataccacacaactgataaagaagccggrgttaagaagacagtttcccagcccactgaaacctcaatctttgggagacacagaaaagaacctctgtttctaacctgccaaataaaccaatctgaagggtttattgaagaagttcaaccttgtaatatcctatgattcacttctgacacctaagagtccacaataaagtcaaaagaaattcagtagcatttttaaattacacgtaaaaaaccttttagctcatgaattttatcccaatgccacatgttaaaaaattttaatattggt

SEQ ID NO: 606153 - DNA, 577 bp, Homo sapiens
gacacacaattgtgctggaaggtctttaggaagacaaaggcaggaaaggggacggcaaaccctggaaatgggattggggtagattgttcagggactgtcagaatctaagatccagaatgtgttttttgtttgcttgtttttggttaagctcaatggtgtgatggaatgtgttcttcaggttctgaagactcctcactcaacactgaggaacacagctgaagcagggtgtagcaggggttctgcctccctgaaagcattcatgacagggttttttcaagtcttcctctccctgtcttgtatcagtttcttccaagactttctgtttgttgatctttaacgttcctgtgatatttggtgattctttattgtcagctcatatggaaggtgataggagaatctctccgtgggyagagttcaatgactctgaacttcactgtaatgtggtctggctgtgccatttcattggatgctgttctagatgtcagtagacttcccatacaaggatcttctatgtctctagtttataggactggctgaccgcattctggaggccacgtagagaaagaggagaaggagg

SEQ ID NO: 606154 - DNA, 584 bp, Homo sapiens
ccctattaaggctgaacaaagtccaagctatgacttccattctctggctataggttataaaagacataatatccaaactttcttttattggagatggcaaacagatctcagatgaagtaggaagactaggaacatccactcatgttggracagaaaaaaatacgaggtctggacaaagctactcttatgtgccgaaggaagatttttaagtataataaaaaggtgtagtattcacgttaacataaatcagtgtgagagagagagaaagaaggagagagcgagcagcaacaagttgtcagcaaaactgttggggaatattgaaacagtatgtacaaaatatggaacacaaaaaagtatggctcaaacacattatactcaatcaagttatttataaggtttaacagcaatggatagcaaagaagagataaagttgggccaaagcctatccaggatgggcatgtaacataaaagataaatggctcctgtgttggcctctgagccactgggtcatttgttactataatgcagcttagcctaagttaattagtacagttggaatattagaaataggaggctgccaaaac

SEQ ID NO: 606155 - DNA, 584 bp, Homo sapiens
ccctattaaggctgaacaaagtccaagctatgacttccattctctggctataggttataaaagacataatatccaaactttcttttattggagatggcaaacagatctcagatgaagtaggaagactaggaacatccactcatgttggaacagaaaaaaatacgaggtctggacaaagctactcttatgtgccgaaggaagatttttaagtataataaaaaggtgtagtattcaygttaacataaatcagtgtgagagagagagaaagaaggagagagcgagcagcaacaagttgtcagcaaaactgttggggaatattgaaacagtatgtacaaaatatggaacacaaaaaagtatggctcaaacacattatactcaatcaagttatttataaggtttaacagcaatggatagcaaagaagagataaagttgggccaaagcctatccaggatgggcatgtaacataaaagataaatggctcctgtgttggcctctgagccactgggtcatttgttactataatgcagcttagcctaagttaattagtacagttggaatattagaaataggaggctgccaaaac

SEQ ID NO: 606156 - DNA, 584 bp, Homo sapiens
ccctattaaggctgaacaaagtccaagctatgacttccattctctggctataggttataaaagacataatatccaaactttcttttattggagatggcaaacagatctcagatgaagtaggaagactaggaacatccactcatgttggaacagaaaaaaatacgaggtctggacaaagctactcttatgtgccgaaggaagatttttaagtataataaaaaggtgtagtattcacgttaacataaatcagtgtgagagagagagaaagaaggagagagcgagcagcaacaagttgtcagcaaaactgttggggaatattgaaacagtatgtacaaaatatggaacacaaaaaagtatggctcaaacacattatactcaatcaagttatttataaggtttaacagcaatggatagcaaagaagagataaagttgggccaaagcctatccaggatggscatgtaacataaaagataaatggctcctgtgttggcctctgagccactgggtcatttgttactataatgcagcttagcctaagttaattagtacagttggaatattagaaataggaggctgccaaaac

SEQ ID NO: 606157 - DNA, 642 bp, Homo sapiens
atgtatcaaatgaacttatagctagaggtaaagaactgagaaaacagaatgtaaatatatattatgaattgactgttattggaagtatttgacaaggtactattttaaaaaatatatgcgctcacaaaataattggccaggttgcaagtagtaattaaaagaaatagaccaagtgtaaaaacactgggattgggagatacaattgtttttctcatctctaatgtaatggtgaatgcttttaaaaaataaaagtccagtaaaactcagccwctgggagggatgaaatcaaagatgtggctataaacaccatccttaaaaatctctgagtccattaaggggaggttcaataaatcctgtcaagctggacagtgtgacgcatgaaaagtaaacaaagagtgtagtggatgcctgattaatttaggtcacccattattaagtgtagagaaggagatgtgattgaaacaagattgtggatgctgctattggctggaatcaaaagtcaaaaacataaaattgcaaatacacacacacacgtatacatatactatatgctgttgagagagttattatataataccacaggaaccaccaacctgaactaaaagagactctgcctgttggagacttaacatgaaaacaaag

SEQ ID NO: 606158 - DNA, 642 bp, Homo sapiens
atgtatcaaatgaacttatagctagaggtaaagaactgagaaaacagaatgtaaatatatattatgaattgactgttattggaagtatttgacaaggtactattttaaaaaatatatgcgctcacaaaataattggccaggttgcaagtagtaattaaaagaaatagaccaagtgtaaaaacactgggattgggagatacaattgtttttctcatctctaatgtaatggtgaatgcttttaaaaaataaaagtccagtaaaactcagcctctgggagggatgaaatcaaagatgtggctataaacaccatccttaaaaatctctgagtccattaaggggaggttcaataaatcctgtcaagctggacagtgtgacgcatgaaaagtaaacaaagagtgtagtggatgcctgattaatttaggtcacccattattaagtgtagagaaggagatgtgattgaaacaagattgtggatgctgctattggctggaatcaaaagtcaaaaacataaaattgcaaatacacacacacacrtatacatatactatatgctgttgagagagttattatataataccacaggaaccaccaacctgaactaaaagagactctgcctgttggagacttaacatgaaaacaaag

SEQ ID NO: 606159 - DNA, 451 bp, Homo sapiens
atgaaaacaaagttaccctgtatttgcactatttttaatactttttctggactaccaacaaatttagacaaatatagaaataaggctaaaaataaaaggaagaaaaattatttttaagattatacctctaatatgtcaatagatctaataacctaaatgagtaagagaaatgaattcacttggtgctttaaaaatataaaaaataaatagctttttatatatataatataaccaatataaaatatatttttaaagggctccatttatwataaaaacaaaagagataaaaaatttttaggttaaaataaaattggataatgtttgggactaatatcaaaaaattcaagattgaagtaaaaagaaaaataagccataatcttgaatagcaattggagagatgtcaatgcttctaaaactaatccatatgtgcaaagggatcctaactgaaatg

SEQ ID NO: 606160 - DNA, 552 bp, Homo sapiens
ccctcccatgattgtgaggcctccccagtcacatggaactttaagtccattaaacytctttcttttgtaaattgcccagtctcaggtatgtctttattgtattagtggaaacacactaatacaaatgcttacctaactttactccaaaaaccaaaaattaaaggtaaaaaataaaataataaaattacaaaaataaaatcatcagtaattataatcaacatgctagaatgtgaaacctttctatttatatacaaagataggagaaaaaaagaagaaaaaactattttacatgaaaatgaaaattttctctatggctaaaattccaaaaaccaagtaaaaacacataatacaacccagaaaaaatattttcacacatacaaacaacaacttatgaaatgcatataaaaatcaatctttaaaaggatcacagcccagtaggaaaataaaagatatgagaaaaccggcaaattacagagaagtaacacaatgcccccaaatcgcatgtcaagataccttacccaactcactaataaagcaatgaaaatcaaacca

SEQ ID NO: 606161 - DNA, 552 bp, Homo sapiens
ccctcccatgattgtgaggcctccccagtcacatggaactttaagtccattaaacctctttcttttgtaaattgcccagtctcaggtatrtctttattgtattagtggaaacacactaatacaaatgcttacctaactttactccaaaaaccaaaaattaaaggtaaaaaataaaataataaaattacaaaaataaaatcatcagtaattataatcaacatgctagaatgtgaaacctttctatttatatacaaagataggagaaaaaaagaagaaaaaactattttacatgaaaatgaaaattttctctatggctaaaattccaaaaaccaagtaaaaacacataatacaacccagaaaaaatattttcacacatacaaacaacaacttatgaaatgcatataaaaatcaatctttaaaaggatcacagcccagtaggaaaataaaagatatgagaaaaccggcaaattacagagaagtaacacaatgcccccaaatcgcatgtcaagataccttacccaactcactaataaagcaatgaaaatcaaacca

SEQ ID NO: 606162 - DNA, 552 bp, Homo sapiens
ccctcccatgattgtgaggcctccccagtcacatggaactttaagtccattaaacctctttcttttgtaaattgcccagtctcaggtatgtctttattgtattagtggaaacacactaatacaaatgcttacctaactttactccaaaaaccaaaaattaaaggtaaaaaataaaataataaaattacaaaaataaaatcatcagtaattataatcaacatgctagaatgtgaaacctttctatttatatacaaagataggagaaaaaaagaagaaaaaactaytttacatgaaaatgaaaattttctctatggctaaaattccaaaaaccaagtaaaaacacataatacaacccagaaaaaatattttcacacatacaaacaacaacttatgaaatgcatataaaaatcaatctttaaaaggatcacagcccagtaggaaaataaaagatatgagaaaaccggcaaattacagagaagtaacacaatgcccccaaatcgcatgtcaagataccttacccaactcactaataaagcaatgaaaatcaaacca

SEQ ID NO: 606163 - DNA, 598 bp, Homo sapiens
gaccgtgggtactcattcatcttctccctcccctgcctatcttcttggctcttgacaggcattcagggattcttctcacagtgcaggcagtagactaaaagaagcacaagtcacacagtgaaaaactactctggccaaagcagaaaaatgcaggaaaaagaaagccagattgggatcaaggtattttatttcaaccccctagatccttgagtaacttgacacaaatgacttaagctcttcatttttcagttctccaaaatgtaaaatgaggataatttacttcacaattaatctaaaatgagcacagtatgacttactgtactaatcccacaggactttttgtgaggatttaatgtaaaggggaatgcatatggacaaaattgatgcaaaacatatcaggaataaaatagaaaagggtacacaccacagtaaaaaccrtgaaagcacccaatacataaagttttgtacagatccgtggcttcttttcctctcagaaaaaataaaagcaaaaacaacaacaaaaacacaaatcctaagtcttacacaagctcaggcaataatgacctatgggaaactattttaatccactaaaataatt

SEQ ID NO: 606164 - DNA, 609 bp, Homo sapiens
atgttataaaggaataatcaaggaaaaaccttcaattaacttactaaattattttagctctgggcaaagaactctcagaagccacatggaatgtgaagcggaaacttggaaggtagtacatggtgattttagacccacaatgactaggtcaaatcagagtttaaccccaacaatgaacttcagaaaacaatcaactctgaataaaatccacaactggtctgaaaacagagaccttgcataaatatacatcttatttatcttatccagtaaaatgtatgacaytgtaaaattcacagacctatatttaaaagacaacataatgacccaaaacaataaagcagtcagcataagatgccactagtagaattatagttattcttttattttaaagtaaggaacatttattcccacaaaaatttagttcaattattttaagatgtacaaatgaaatccccctttttatgtttagtgtgtaaaactcaactaaagaatgaaatcagtatgttggggagatatttgcactcccattttattgcagcactattcacagtagccaggacatggcctaaacctaagttctgtcaatggatgaatggataaagaaattgt

SEQ ID NO: 606165 - DNA, 578 bp, Homo sapiens
cccaaaacaataaagcagtcagcataagatgccactagtagaattatagttrttcttttattttaaagtaaggaacatttattcccacaaaaatttagttcaattattttaagatgtacaaatgaaatccccctttttatgtttagtgtgtaaaactcaactaaagaatgaaatcagtatgttggggagatatttgcactcccattttattgcagcactattcacagtagccaggacatggcctaaacctaagttctgtcaatggatgaatggataaagaaattgtggtatatatacataatggaatactattcagctataaaaaagaaggaaatcctgtcattttcaacaacatgaatgaacctggaagacatttttgttaagcgaaataagtcagggacaaaaagacaaataccatatcatctcacttatatgtggaatctaaaaaatgtggctgagccaataggccacgtgccagatagataccaattgtggagatggtcccttgggtattggactatctgaggttaacatggtaacactttcctttcacataacccactcccctctaagaaggt

SEQ ID NO: 606166 - DNA, 613 bp, Homo sapiens
aaataccatatcatctcacttatatgtggaatctaaaaaatgtggctgagccaataggccacgtgccagatagataccaattgtggagatggtcccttgggtattggactatctgaggttaacatggtaacactttcctttcacataacccactcccctctaagaaggtaactccctgtggagcttaaccacagggagagaacatggcatagggcaatgccaaagtctgtttcatttgatagtggtcaatgataacttcttttatgtagtgataaagccttctataagctttattgtctaatagccactgacaaatttctgagcccacaaatcttagaattcaccaagacgcagactattgaatggaaaccatcacagctaacatcctttatctttgagggactaacaccattgattgcatttttgtgtgtgtttaccttgtcaccatctcgccctggttctcctttgtaacctggtagtcctcgagctccctaaattaaccagaaaataaaattttgttaattatcggttttagttcactaaaaataaaatttataaaatgtatrtaagtggatcacatacttgtattcctggagatcctggaacacctggt

SEQ ID NO: 606167 - DNA, 621 bp, Homo sapiens
catcaactctatacatgaacgtgtaaaaaaaaatctccttctccaatgaatcatgttatgtttgtgcacctttctgtagaaaatggaaacgtttagtaatctcatgtttcctgttctcaggattactcaaaagtaagaagaaattcaatctacatggaatttgctcagccctgtatgtctactactctagttatcactgaatctccttccctcaaccactttggaatcagataggcctagaattcactctcagctctgtcactgctagcaatgtacaaatatagaattcactttcctccttacaactactctttaatgtaggttctaaattatctttttttcagatgaggaaaytaaggcacagaagttgagtaacttgcccaaagttacatagctagtaagttgatagagccagtgggaacattctctatcagaaagtgctttatggcgggtcagatctgatcattgtagattgactcaactgattcaaagaaatccattttgcaagactatttttaaattatttagaattctgagtgcccagaggaaaggaatgttcataaaattcctcaaaagaaagttaccatggaaattggctattgatcaaaatggttgatcatc

SEQ ID NO: 606168 - DNA, 571 bp, Homo sapiens
aatctctagtaattgtgcttttcatactcaaagagaggcgatcaatagctaacctcatttcctctcttgctgtcctgctacattttttccatagtacttaacaccatctgatgttgtgtgtgtgcatttattacctatttctccccartagaatgtgagcttcaaaatgacaaggttggggggttgttttttgctttttttttttctgttttgttcattgctatatatccttagcctagaagagtgccaggaatacagtaaacacccagcaaatataggtatatgactgagtgaggaacagaataaataagcaaacaaatcaataattactgagttcaaccagttatcaccaaccgagaactctaatagtagaaacaggcctacattcacatgcacaaacttatctttaaaatcatagatgttagatgcgtcagtgaccaattctttgaagaatttaatataccaataacattggtgtgtatatatatacatacatgtctacacacattattatatatactacctataatatatatctaagtaatctatttaagtgacatgtgagataaac

SEQ ID NO: 606169 - DNA, 571 bp, Homo sapiens
aatctctagtaattgtgcttttcatactcaaagagaggcgatcaatagctaacctcatttcctctcttgctgtcctgctacattttttccatagtacttaacaccatctgatgttgtgtgtgtgcatttattacctatttctccccagtagaatgtgagcttcaaaatgacaaggttggggggttgttttttgctttttttttttctgttttgttcattgctatatatccttagcctagaagagtgccaggaatacagtaaacacccagcaaatataggtatatgactgagtgaggaacagaataaataagcaaacaaatcaataattactgagttcaaccagttatcaccaaccgagaactctaatagtagaaacagscctacattcacatgcacaaacttatctttaaaatcatagatgttagatgcgtcagtgaccaattctttgaagaatttaatataccaataacattggtgtgtatatatatacatacatgtctacacacattattatatatactacctataatatatatctaagtaatctatttaagtgacatgtgagataaac

SEQ ID NO: 606170 - DNA, 642 bp, Homo sapiens
gctatatatccttagcctagaagagtgccaggaatacagtaaacacccagcaaatataggtatatgactgagtgaggaacagaataaataagcaaacaaatcaataattactgagttcaaccagttatcaccaaccgagaactctaatagtagaaacaggcctacattcacatgcacaaacttatctttaaaatcatagatgttagatgcgtcagtgaccaattctttgaagaatttaatataccaataacattggtgtgtatatatatrcatacatgtctacacacattattatatatactacctataatatatatctaagtaatctatttaagtgacatgtgagataaacatggaataatctacatacgactttcacagaaggagaatgttgaagaaaaatgaattagctggtcaggctcatctcatgggtcctacttgttttactaaccattcaacccctgccaagatactccgcaagcctgagagctagttttcctccctgtcctctttttctctagcatcattcttgaatatctgaaaatagtatctcttgtttggattatacgcaaattcagtaaaccctccctcataggctgtcttctgagttttaaatgctcccagttatgctcttctgaatga

SEQ ID NO: 606171 - DNA, 608 bp, Homo sapiens
tgaaatcaagacttaataggcattaaagatcataataagataaattaacatacacgagtagctaatgctaaagaaaaataacactggaactaataaaaagaaaacattacattctggggaaattttacatttctaaaaattaaaaacaaaattataaaccagattagtagtcagaagaaacatttacaccatatatagcaaagaattaattctcttaatgcataagatcttattggcccatatgaaatataccctcactcctatagaaaataggcaaaggacaagaaaagatacttcacaagaagagaactcatcctaaatgtcagacttctatatccatctgcctacctaaaatttctacttgaatgactaacatataaatttaaacattgccaaaaccacactcctgattttcctcaccyagttctatctcctccattctcccatgaatccatagtctcctttgacttctctctttctctcaaacccatatccaatagatcagcaagtcctgttagctctaacttcaaaatatcccccaaatgcaagcagttctctttacctcaccactatcactctgaccctagctgccatcctctcacccctgg

SEQ ID NO: 606172 - DNA, 608 bp, Homo sapiens
tgaaatcaagacttaataggcattaaagatcataataagataaattaacatacacgagtagctaatgctaaagaaaaataacactggaactaataaaaagaaaacattacattctggggaaattttacatttctaaaaattaaaaacaaaattataaaccagattagtagtcagaagaaacatttacaccatatatagcaaagaattaattctcttaatgcataagatcttattggcccatatgaaatataccctcactcctatagaaaataggcaaaggacaagaaaagatacttcacaagaagagaactcatcctaaatgtcagacttctatatccatctgcctacctaaaatttctacttgaatgactaacatataaatttaaacattgccaaaaccacactcctgattttcctcacccagttctatctcctccattctcccatgaatccatagtctcctttgacttctctctttctctcaaacccatatccaatagatcagcaagtcctgttagctctaacttcaaaatatcccccaaatgyaagcagttctctttacctcaccactatcactctgaccctagctgccatcctctcacccctgg

SEQ ID NO: 606173 - DNA, 376 bp, Homo sapiens
gtctcaaacaaaacaaaacaaacaaacaaaaaaagagtaactaatgataacagaaaccagaaatgagcactgtaaaaatataaacttctataaactcrtaagctagtgctatttccacatatggccttctttaacaaatcaatgtataaatctctgtaatgccttcagtagctgtactcctctgaattacctggcaggatatataaatatttcccctacctcttttgtaatgttaaaattgtaaagcaataatatattcagacactgtgataatagaggttatttaactgacaaagaactgagaaagaaatggaaggatctgaaatagctctttaattttggttgaaggcacttttcaattatgaaaattagtatt

SEQ ID NO: 606174 - DNA, 589 bp, Homo sapiens
acctgcctatggattttcctcctgaaaatatcccctatcttccaaactttcatttttttcttttgcctcattttcatcattataaaaacatgctacaatatctcccattttttaaaaaccctgactttaaaacattgccccaattctactgctctgggtctctgcttccttttatatctctcagaaaaaaaaaaaatctacattcactttcaccatttttcttatctccctctctgtgcttaattcatttcaatctgttgtttgtactaccctccctgaaatcctactcatcaaggtcctcaaatactcctgtgtagcaaatccatggtctagtctaggcttcattcttctggatctcttgacaacaataacacacctaataggatgacacttccctggttttcctcccatctcacygataagtccttcccaaattcctgggctggacccactttctctttttcacctgtaagagagccctgtggtcagtcccctgccaccttctcttctctatttatttgtattcacttcctaagtgatctcatccactctcatggttttgcatacatctgcatgaaaataagtccca

SEQ ID NO: 606175 - DNA, 537 bp, Homo sapiens
ttcaacttgactaaacttaggcagctttcttcctgactgtggatccctgacctcccttttccttagagcatttgctttagaggacttaaaattgtaaattccttctctgctcctytgaaatgtaaatactctaaaaagctacttgtcaattttataacccagaaatgtctttctcaaggacctgagagccacccctttgaaatgtaatcatcaaggaagatagtgtccccactatcttccagtctgtgagggagggtgtgtacctaactttgatgagcaccaattagtaaagggagatggcctgatcacagaggaaaacatttgcaaactgtggaataactcaatgtgcttaagcctatactgatcaacctcccatctaaagtcctctactacttttccattaacttgtcctagtgctcacacaccctagctcctttcgttccaacagagttgagttcagtctctccttcctatggcagcagtcatgaataaagctttccttgtctgtttagatttgctcagcaaaacttttacttt

SEQ ID NO: 606176 - DNA, 475 bp, Homo sapiens
caaaacttttactttgacactgtaatcccagatataccggagatgactaagctttcagtactcacaggcttaccatcttgaccaggttgtccagggtagccagggttcccaggcagtccagggtcaccctaagcaggaagcaaacaaacttttgagtacaaaacaaccagccacattggtgcagtcaggatcaataaaagttcaaaaccaattccattatttgaggttttttgtatgttaaaaacaaaagtaaaaaaaaaaagccatattttaaatgcttacttaataaataatgcattttattatactgaactttcaatgatttatttatgtgaccacaccaagtataactatagcaagtaaagyattttccactgatgcaaaatatgcacatttatggtaggatacatttttagaattctgaacgaactgtaaagtgacatagcaaatatggtctccatgatagcaatatttg

SEQ ID NO: 606177 - DNA, 475 bp, Homo sapiens
caaaacttttactttgacactgtaatcccagatataccggagatgactaagctttcagtactcacaggcttaccatcttgaccaggttgtccagggtagccagggttcccaggcagtccagggtcaccctaagcaggaagcaaacaaacttttgagtacaaaacaaccagccacattggtgcagtcaggatcaataaaagttcaaaaccaattccattatttgaggttttttgtatgttaaaaacaaaagtaaaaaaaaaaagccatattttaaatgcttacttaataaataatgcattttattatactgaactttcaatgatttatttatgtgaccacaccaagtataactatagcaagtaaagtattttycactgatgcaaaatatgcacatttatggtaggatacatttttagaattctgaacgaactgtaaagtgacatagcaaatatggtctccatgatagcaatatttg

SEQ ID NO: 606178 - DNA, 369 bp, Homo sapiens
caagtagagattcaataactactttttgtctgatatgcttcaaatacaatctgtcatttacccactcatttgtagaatatcaattatcagcaaaacctaagatatcaaaaggatttgacrgggtttaatctctatcatcatcaggctgaaataaaaatttggcacggaaaagggacttgtgctttttatgctgcatacaattataaaaaagatatttaataataatgttttcagttaatcaaaattaagttcccaaatgaaaaaattacccacaagataaatccaatgtgacttcataaagactggtcaacagtctttatgacactggtcaacagccccaagaagaaaataatttcttgtaggttctgc

SEQ ID NO: 606179 - DNA, 369 bp, Homo sapiens
caagtagagattcaataactactttttgtctgatatgcttcaaatacaatctgtcatttacccactcatttgtagaatatcaattatcagcaaaacctaagatatcaaaaggatttgacagggtttaatctctatcatcatmaggctgaaataaaaatttggcacggaaaagggacttgtgctttttatgctgcatacaattataaaaaagatatttaataataatgttttcagttaatcaaaattaagttcccaaatgaaaaaattacccacaagataaatccaatgtgacttcataaagactggtcaacagtctttatgacactggtcaacagccccaagaagaaaataatttcttgtaggttctgc

SEQ ID NO: 606180 - DNA, 594 bp, Homo sapiens
ttttccaatttgggtttgcccattgatcaagatccctaaaactggatgtaagggcttgttttcaatttgttggtcatcaatatacaaagtcacatcttgttctgttactaagagacgaatttggtgccagccttcatcaaacaacgtctacaaaaagraagtgtggaagattcataaataaagcccctaacaatattttattttctttgttcttactcccttgttcctaaccattgctgagaaacttcatcccacacagactgactgtattatacattaattcaccctgatccaaggtggacctcatatgctatccaccaattctttcattaatctttatctgagttcctattacatatttcaaagaaactgtcaaacaacttactaaagcaactacctcaaaatcataaatgagtttaataatctctgaatccaaatggcttccctccttgcctcatctcatttatttcattgcaactttgggccccataactaatcaatcttccttgataatctcactcaacttctggaattcaaacaatcttgatcattttcatttcttcctccctagttgctcattctctctctctgtct

SEQ ID NO: 606181 - DNA, 619 bp, Homo sapiens
ccctccttgcctcatctcatttatttcattgcaactttgggccccataactaatcaatcttccttgataatctcactcaacttctggaattcaaacaatcttgatcattttcatttcttcctccctagttgctcattctctctctctgtctctgagtgttcttctccctcaacctaccctttaatgagggcattactcataggtctattctggacatttttcaccccctctttgactcatccattcctccaggccaattatcactggtatataataactaccatgtctacactaacagcctgtacctctcctatgtgtgggtcctataattctaatactaggtagaataatttttcaggatgtttcacaattagcccaacaacktatgcaacaaaataaacttgaactaccccccagagttttcttcttgaccccatttccctacgtaatagcatcctctaaacataagtttctttctttgagttgcagtaactaaccagatgcagagttctacccaatatatttcttcaacttgactcaaattcatttcttcatttgcattgtcactaccataatttaggctcatggaactcttgttttacttcaataattttcaaat

SEQ ID NO: 606182 - DNA, 636 bp, Homo sapiens
tcgtgttggacagacagattctataaagcaaaagcaataaaagttggttaatcatggactattcaaacaataaaagaaaaatcaagggagaaatactagacaatatagtattctatcattagaattataaaatctacatatgtatacaaatgtatagtatataaatgtatatgaatacattttctgagaaaatgtagaagtattttacacatttaagagtgagatcttaatatgcttttttctctaaaaaataagggataaaagtaaaacaaaaatataaatatttgttaatgtattgtctttagcaaaaaattgagacaatagcaatatgagacaatataacacctatggaaaagaaaaacaatggaacaggatttatsattctcatccaggatttcctattaactagtcatacaactttggataatgcttttaatttatttaattcaaaaatgaacactaaaattcttttcttgcattcttagcatttaaggggtaaaaagtattttctgttcttgattttctttccagttcaagcagcttatatttctatagctcaaatatcattagtctgtctctctggaaaaaacttaacctgggtcccatctattcatgaaagttcttcagacggacata

SEQ ID NO: 606183 - DNA, 576 bp, Homo sapiens
agctacaggaaagacagaaaataattaccaaaatggcaacaataatttttccctatcagtaattaccttaaatgtaagtgagtatactccttaatcaaagtacatagagagactgaatggtttagagctacagatccagctatatactatctatgaaagactctagcctgggcaacatggcaaaaccccatctctacaaaaacaaaaacaaaagcaaacaaacaaaaaacaacaaaattagccatgcatggtggcatgtgcctgtagtctcagctactcaggaggctgaggtgggaggattgactgagtctgggaggttgaagctgcagtgagctatgatcatgccactgcactccagcctgsgcaacagaatgagacaaaggaaagggaaaggagaaggggaaggggaaggaagggaaagaaagggaagggaaggggggaaaagggaaaagggaaaggaaaagaaaagagaaatgaaaaggactcactttaaatttaaggacacacataggctgtaagtgaaaaaatgaaaaaagatattccatgcaaatggtagccaaaagacatcagagatgt

SEQ ID NO: 606184 - DNA, 537 bp, Homo sapiens
ccatttaagaatgcaagccaatgtttgcattaaatatttctgacaaatgactcatatcagaaaacatatagataataaaaagaaaaacaacacaatttttttaaatgagtaaaaggtcttgaacagacatattacaaaagaagatacagaaatggccaataagcacataatatagtactcatcatcactagccatcagggaaatgcacagtaaaaccacagtaaggtatgatttcacacctacaaaaatagctaaaattaaaagacataatatccaatgtttacatgtatatgtgaagaaattggaattcattcattgttggtgagattgaaaacagatgtaatcactttagagaactgttaggtaaagtttcttataaggttaaactatggccaatgatttttctgctagatatgtaacctagagaaatgaaattgtgtgtccacagcaaaagactttagcaatgtttayagtagttttattcataataattccaaactaaaaataacccaaatgctatcaacaggacaatcaata

SEQ ID NO: 606185 - DNA, 587 bp, Homo sapiens
agaattcctttgttagttttctgcctcagtggtctgtctaatactgtcagtgggatgtagaagtctcccattattattgtatggctgtctaagccttttcatcagtcaagaggaacttgttttgtgaatctgggtgctccgatgtcagrtgcatgtatatttacaacagttaagtcttcttgttgaattggatcttttgtgtcatgtaatgctcttctttatccttattaattgggggcagtttaaagtctattttagctgacataagaatagcatctctgctccgtttttgttttccatttgcggggtagatctttctctatttacattgagcctgtgggtatcactacatgtgagatgagtatcttgaagccagaggatgtttgggtcttgtctttttatttagcttgccactctatgtcttttaagtggggcagggacattaaggggtagtattgatatgtgaaattttattttgtcattgtattgctagctagttgttttgtagacttgattgtgtagttgctttatagtgtttctgggctatgcatttaagtgtgcttttgtggtagcaggtgtcgttcttt

SEQ ID NO: 606186 - DNA, 503 bp, Homo sapiens
cttctttatccttattaattgggggcagtttaaagtctattttagctgacataagaatagcatctctgctccgtttttgttttccatttgcggggtagatctttctctatttacattgagcctgtgggtatcactacatgtgagatgagtatcttgaagccagaggatgtttgggtcttgtctttttatttagcttgccactctatgtcttttaagtggggcagggacattaaggggtagtattgatatgtgaaattttattttgtcmttgtattgctagctagttgttttgtagacttgattgtgtagttgctttatagtgtttctgggctatgcatttaagtgtgcttttgtggtagcaggtgtcgttcttttgttaccatgtttagcactctcttaagaacctcttgtaagtctgatttggttgtgatgaattccatcagtgtttgcttgtctgagaaggattttatttctcctttgcttatgaaacttggtttgaaagg

SEQ ID NO: 606187 - DNA, 542 bp, Homo sapiens
ggtaattgatatgctagttagcttgattgtggtaatcatttcataatgtatacttatatcacatcatgtggtcaacctaaaatatatacaatttttatttgtcagtcttacctcaaaaagctggggtaaaattgttaaacctcacataaataatgattaaaatgagaaaaaaagaatacaggccaacaaggcctgcagcacaatccatagaccaatgaatggcatactaagcaaacaaaaagtattttatattaagaaacaaaaagtgaaagggagagtaaggaggccatgctttcagatctatttcacatgtcatttggaaatactatatcatagctcatcttccttctcagtaagaaattaaatgggtcattagacactttgcctatattctagttttccaaaagctttagaatatgtatgcttaaaatttgtcttgatatgawtttggaataactatggtggcaggagtgaactaagatggaaaataatggtttccctcaagaatgacattactaattaaaacatgagttttctttttt

SEQ ID NO: 606188 - DNA, 591 bp, Homo sapiens
aaggaaatcccctaaaacactgattttgattaaccctaatcaaggatagtacagatgaaagattaaactatctttcaatctagatgatcaagactgaagtttttactctttccaaagaaagatatattttttaaaaatgtagtgtgaaaaggtaactaaagagtataccaccaaaaatgcaggggtaaaggcatcatagatgtgtcaattaattaataaaactgtgtattgtttttctggaggaaaaagggaaaatcacagcatttcccrttgctacagtaatggcttggcttctagccatttttgaagctaaaaacccaagagcacacatccatcttccttatctcccctaaatttaatggataactcataaggaggaccactttgccattctctttcatcactgcatgattagtgcctcaaatcgtacttggcaaatcactgaccctcaataaatgttggtttaattcgatctttttctacttccagcatctcttctatcatcctcttatttgaccccactgataatgccttcctcatctcacacttagtctacagtggtatccacctaagtgatctcttaaccactat

SEQ ID NO: 606189 - DNA, 437 bp, Homo sapiens
gagcccagatcccgccactgcactccaggctgggaaacaaagcaagcctctggctcaaaaaaaaaaaaaaaaaaagtacaggaagcagagagggggtgagaggaagggagaaacagggtggaagggggagggggagggagagggggagacaggaagagragcaaagatagcaattcttaaggcctgttatctattagttacccttgccttggcggcagacacagctgagtcctaacgcagacttttccatatcccctctcccgcctcaacagtgatctctcctcccacttcgagagttaattcagtgctgctttagctttacgcccccatgaaaacaggaaaacggtttgcagctttatcataaccttgcttatgtctgttgttgtatgtctcaaataccctgtcctcaggaaggcccaccaacgctggccggcctc

SEQ ID NO: 606190 - DNA, 545 bp, Homo sapiens
atgaattaaaaacgaagtttataatcaagagggaagcagagcttaaagttttggaaaattctcagcctggccatgtaaagaatgaaaaggcatgtttgggagggaacaccaagagtgctgccaggttcacatttgataatgagatgagtatgtgtagaaggaagccagatgctatttatcaagacaatggaagaatgaacccaaaggcatttctgaggttactggttctggattctcatccctgtcccagagtgccaggaccctgagggcagaatagttttaagggaggactcaggacaccatggaaccttggggcttgctgcctagggctgcctcaagtctctgcccccccaccccccacattctggtgcagcactctttggccaccatcccasgtgtggcttatgcaggcccttgtcaggccacccttcctgtaagccttggcagagtccacgtgatgctaactctgcaggtgcacagagtgcatgaactgtggagacacagccacctccacctagattttgaaggatgtgttggggaccctg

SEQ ID NO: 606191 - DNA, 524 bp, Homo sapiens
agtgggtggcggatgggacgctgcacggccagaccctggactgtggtgggtttccaaactggcacatcctacaccggctctgagactgtgggcactggacctcataccttttgaacctcaaaaataaggaagaattatattattataataattacagtgatacctttgctggagttttaatgcatagtaggtagctgagtctctgatagaaggctcttagttcaggtgaaggtaggcaatggattcattgcccaatgaatcagagacttgaatcaaaggctcagaagcacgtgcgctcccacacataggttgggaagacccagggctgggtgggccctcccaccccactaaagctggggtagctggggcctgccttacccccgccccacccccagactcacctgtctgcaaggtcagagccctttagggcaccctgggtgccctaaaatcccctrtaactgctgagtccttggccagaatggtcccacatttgtgggcctgggaaagtgttcttgccctgctgg

SEQ ID NO: 606192 - DNA, 574 bp, Homo sapiens
ctctcccttcagcatttcatctgctatggccatggtttttctggggaccagaggtaacacggcagcacagctgtccaaggtcagcagaaacaaaaaaaagggtctgctttcctcccatctccctacgaatggacagtctgcatggaaaggttgtgcctttgagctcttaccttgtgttttcagaactgtatttttatgagatcagactttcagaaaagtcacacttgtatgcaggcttccattcatcatcaggtttttcctaagtacctaccacgtaccaggaactgtttttcgtattgctgaggagacagcagtgagcaaagctgacaaaaatccctgcagggcgaggcttctgttccagtggatgaatctgacagctttcctgaaaggcatactacatcctcctgagctagcakcttccagtttttgctttgcatatgatgatatgcaactcataaatattgcctgttatataacactactttcaagcataatgagaggaataagacatagggaatgcattatagtggagatagtggcattgcttttttgcaaggaaaagagaaaaagtgac

SEQ ID NO: 606193 - DNA, 588 bp, Homo sapiens
ccttttttctcatcagctccccaaaacttytaaagttgcatttcaaagttaaaaccaacattggcaggcgcggtggctcatgcctgtaatcccagcactttgggagcccaaggcgggcggatcatttgaggtcaggagttcaagaccagcttggccaacatgatgaaaccctgtctctactaaaaatacaaaaaatttagccaggtgtggtagcacacacctgtaatcccagctactctggaggctgaggcaggagaatctctcgaacacaggaggtaaaggttacagtgagccgagatcatgccactgtactccagcctaggcaacagagcgagactccgtcgtaaaaaaaataataaaaataataaaaaataaaaaataaagttaaaaccaacactgaatacagcaaaaaaggaattaaaattttgaggagaattcagcctgccaaaaattacctaatactcatatggaaagaaatgtcctggaatttcatggaaatacctgaaatcaatattcacaaactactgtggttgtaaattttttgccaacatcttgtccagtaaaaaagttgtggtaggtggggactga

SEQ ID NO: 606194 - DNA, 588 bp, Homo sapiens
ccttttttctcatcagctccccaaaacttttaaagttgcatttcaaagttaaaaccaacattggcaggcgcggtggctcatgcctgtaatcccagcactttgggagcccaaggcgggcggatcatttgaggtcaggagttcaagaccagcttggccaacatgatgaaaccctgtctctactaaaaatacaaaaaatttagccaggtgtggtagcacacacctgtaatcccagctactctggaggctgaggcaggagaatctctygaacacaggaggtaaaggttacagtgagccgagatcatgccactgtactccagcctaggcaacagagcgagactccgtcgtaaaaaaaataataaaaataataaaaaataaaaaataaagttaaaaccaacactgaatacagcaaaaaaggaattaaaattttgaggagaattcagcctgccaaaaattacctaatactcatatggaaagaaatgtcctggaatttcatggaaatacctgaaatcaatattcacaaactactgtggttgtaaattttttgccaacatcttgtccagtaaaaaagttgtggtaggtggggactga

SEQ ID NO: 606195 - DNA, 593 bp, Homo sapiens
agagtttttttattcttcttcctcaaattttgaactctaatttcaatgtctgttctcccaacacagcagtgcattctctaggggacagcaataatttcatcagattcaaagtcggggctgctacctgctcatttgggctatacatacaatcaaacctacagacagaaagcaagtggtttatgctgctgaagggagtgatttaccctgacaccagggaaactgggttgctgctatacactggggagtggagtgctaggkacagaagtgaaggtcatctctggggtaccccttagtacttctatatcaaggacttagtacttgaaaaatagtacttctatttttcctatgtctaatgaaaaatttcaacaaatccccacaacagtccccacaacaactcccagtgaaaaaaaaaaaggcatactccctgacgattcagactcttcagaaatgaagtctgggtcactcaactagataaagaatcccaatatcccaattagctggggtctttgggtaaggacaaaggaaagtagcaaaagaagatgataaacatattctaggaccgcacaatcagacacggaaaggaggttgcagca

SEQ ID NO: 606196 - DNA, 603 bp, Homo sapiens
caatatatgaccgctgattaactgctgttctccagattttgcacaaaaatgtcttgctaaccactattaactggmaacatagcggaaagagaagtctgagaaatgtagctcagactagctaagttgagacattccaaagccaccacaggtgacttcttgtcagcttagaacccacacacatacctctaaacttcacttaatttcaaaacacagtcacgtttctccctggcattatacaattatcttgcatacaataaaaataaaattatgctgaccaccagtttgggaagacaaagagggcagatcactcgagcccagaaggtcaagacctgcctgagcaacatggtgaaactctgtctctacaaaaaaaatatgaaaagttagccaggcatgatgaagaatacctgtagtcccagctacttgggaggctgaggtgggaggatcactttagcccaggaggtcaaggctacagtgagccatgattgtgctactgcacttcaacatgggaaaaagagtgagactctgcctcaacaaaaaaataaataaataatgctaacacttttcccaaaagaaaagatgaggtccctttttgtctttgaatga

SEQ ID NO: 606197 - DNA, 487 bp, Homo sapiens
aaataaataaataatgctaacacttttcccaaaagaaaagatgaggtccctttttgtctttgaatgaacatcagttaattcttctggttcgtctagctttgagatcctgtaactaaaatcatgagatttaaaaaaaagcgttagatggtacgaatatgggagagaagaagataataaaagtatttggtaaatatatgtaatcaagtttttmtatttgtaacaactagagccgtcatttctgcacatgaccatgtaggtcaaagatttttccaatactcatgccatattccctttgccctcaggaagcactctagctagtggtgttcccttgcctggtgcagtgatgcaaatattcattcatggatggtctgcatctttagcagtcctcattgaattgggtcactgtgcttttccattgacattaatcacgggatgtgggagtactaagcatcccatggaatattttagacatactcctctttacccc

SEQ ID NO: 606198 - DNA, 487 bp, Homo sapiens
aaataaataaataatgctaacacttttcccaaaagaaaagatgaggtccctttttgtctttgaatgaacatcagttaattcttctggttcgtctagctttgagatcctgtaactaaaatcatgagatttaaaaaaaagcgttagatggtacgaatatgggagagaagaagataataaaagtatttggtaaatatatgtaatcaagtttttctatttgtaacaactagagccgtcatttctgcacatgaccatgtaggtcaaagatttttccaatactcatgccatattccctttgccctcaggaagcactctagctagtggtgttcccttgcctggtgcagtgatgcaaatattcattcatggatggtctgcatctttagcagtcctsattgaattgggtcactgtgcttttccattgacattaatcacgggatgtgggagtactaagcatcccatggaatattttagacatactcctctttacccc

SEQ ID NO: 606199 - DNA, 399 bp, Homo sapiens
tggtgttcccttgcctggtgcagtgatgcaaatattcattcatggatggtctgcatctttagcagtcctcattgaattgggtcactgtgcttttccattgacattaatmacgggatgtgggagtactaagcatcccatggaatattttagacatactcctctttaccccctgtgctgaatagtgtcttccaaaagttcatgtccaccaggaatctgtgaatgtgactttatttataaataggttatttgcagaaagaatccagttaagatgaggtcatactagattaagatgggccttatatccaatataattgttgcccttataagaaggaaatacagacacagagacacaatggagaaggccatttgataatggaggcagaggttaaaatgatgtgg

SEQ ID NO: 606200 - DNA, 399 bp, Homo sapiens
tggtgttcccttgcctggtgcagtgatgcaaatattcattcatggatggtctgcatctttagcagtcctcattgaattgggtcactgtgcttttccattgacattaatcacgggatgtgggagtactaagcatcccatggaatattttagacatactcctctttaccccctgtgctgaatagtgtcttccaaaagttcatgyccaccaggaatctgtgaatgtgactttatttataaataggttatttgcagaaagaatccagttaagatgaggtcatactagattaagatgggccttatatccaatataattgttgcccttataagaaggaaatacagacacagagacacaatggagaaggccatttgataatggaggcagaggttaaaatgatgtgg

SEQ ID NO: 606201 - DNA, 495 bp, Homo sapiens
cctgtgctgaatagtgtcttccaaaagttcatgtccaccaggaatctgtgaatgtgactttatttataaataggttatttgcagaaagaatccagttaagatgaggtcatactagattaagatgggccttatatccaatataattgttgcccttataagaaggaaatacagacacagagacacaatggagaaggccatttgataatggaggcagaggttaaaatgatgtggctacaaaccaaggaatgacaagcattgccagcagccacaaaaagctaggaaaagacaaagatggatcctcttatagagaccycaaagactgagtacactgcttgaagttcttcccactgggaggttatcccttcaccagtgtccctccaggttgttctaatgtggaaatatagtattgtagctgcccactttcaagtaatgcctgcttatcacgcagaaccatctgaaaacgatgctggagccttcttattctcagtcagttgc

SEQ ID NO: 606202 - DNA, 495 bp, Homo sapiens
cctgtgctgaatagtgtcttccaaaagttcatgtccaccaggaatctgtgaatgtgactttatttataaataggttatttgcagaaagaatccagttaagatgaggtcatactagattaagatgggccttatatccaatataattgttgcccttataagaaggaaatacagacacagagacacaatggagaaggccatttgataatggaggcagaggttaaaatgatgtggctacaaaccaaggaatgacaagcattgccagcagccacaaaaagctaggaaaagacaaagatggatcctcttatagagaccccaaagactgagtacactgcttgaagttcttcccactgggaggttatcccttcaccagtgtccctccaggttgttctaaygtggaaatatagtattgtagctgcccactttcaagtaatgcctgcttatcacgcagaaccatctgaaaacgatgctggagccttcttattctcagtcagttgc

SEQ ID NO: 606203 - DNA, 656 bp, Homo sapiens
tcaaataatttgtggaaatattttaaacataacataaacataccacgattccattcttgtgtatttattcaaaagaaagcaagcacacgttcacaaaaaaaggatatatgtgagaatgagcatagaagttttgttttaaaacagtaaagagcttaggcatccatcaacagagaatgggtaaacacactggtatattcatacaatatcacgcagaagcaaaaagaaactactgattgtgcaaatatacaagaatgctaaaaatgattctcaataaaacaagcctaacacattttatttcctatgtctgaacccatatatatgaagttmtaaaacagctaatttgtactatataaacaaaatcagaaaagtggttgcctctagacttgagagatgagaacatactgtgaagtaccatgggggaattttctgtgggcattacggacactctgtaacttgacaggaatatgttacactaacactagtatctacatttattaaaacccatagaatagtatgcttaatatttatgcttgtcactgtatataaattgtacccaaaatgtaaatattaaacacttgataagcattctcacaagttacatgtgaaatatgctgctatctgaaacttactatgacatatagaaaaataagacaaac

SEQ ID NO: 606204 - DNA, 656 bp, Homo sapiens
tcaaataatttgtggaaatattttaaacataacataaacataccacgattccattcttgtgtatttattcaaaagaaagcaagcacacgttcacaaaaaaaggatatatgtgagaatgagcatagaagttttgttttaaaacagtaaagagcttaggcatccatcaacagagaatgggtaaacacactggtatattcatacaatatcacgcagaagcaaaaagaaactactgattgtgcaaatatacaagaatgctaaaaatgattctcaataaaacaagcctaacacattttatttcctatgtctgaacccatatatatgaagttctaaaacagctaawttgtactatataaacaaaatcagaaaagtggttgcctctagacttgagagatgagaacatactgtgaagtaccatgggggaattttctgtgggcattacggacactctgtaacttgacaggaatatgttacactaacactagtatctacatttattaaaacccatagaatagtatgcttaatatttatgcttgtcactgtatataaattgtacccaaaatgtaaatattaaacacttgataagcattctcacaagttacatgtgaaatatgctgctatctgaaacttactatgacatatagaaaaataagacaaac

SEQ ID NO: 606205 - DNA, 656 bp, Homo sapiens
tcaaataatttgtggaaatattttaaacataacataaacataccacgattccattcttgtgtatttattcaaaagaaagcaagcacacgttcacaaaaaaaggatatatgtgagaatgagcatagaagttttgttttaaaacagtaaagagcttaggcatccatcaacagagaatgggtaaacacactggtatattcatacaatatcacgcagaagcaaaaagaaactactgattgtgcaaatatacaagaatgctaaaaatgattctcaataaaacaagcctaacacattttatttcctatgtctgaacccatatatatgaagttctaaaacagctaatttgtactatataaacaaaatcagaaaagtggttgcctctagacttgagagatgagaacatactgtgaagtaccatgggggaattttctgtgggcattacggacactctgtaacttgacaggaatatgttacactaacactagtatctacatttattaaaacccatagaatagtatgcttaatatttatgcttgtcactgtatataaattgtacccaaaatgtaaatattaaacacttgataagcattctcacaagttacatgtgaaatatrctgctatctgaaacttactatgacatatagaaaaataagacaaac

SEQ ID NO: 606206 - DNA, 482 bp, Homo sapiens
gtgaaatatccaacagagagtgtagtatttatgtatctcagtaactatttaacaacctgaatataaactgtcatctatctaataattaagagcaaataatgtcacgttccaggtactctgggagtacaatgtctctccaagttttctatgagttctcaagcaggcatatatacccatgatcaccttatctatagttctgagtcctctcttttctaaaataattcagttcatkactcgtgcatcacagaaatacgacttatttttaaatttacacaccatatgcatatgtgtaacgcttgcaaaaaaataagaacacatagcagacttcaaaatttaatgagatggtgagttttttattcaagaaatgtaggcaagttcaattaaattttcgatttgatgaaagtccttgagcctgtgatactctgctgttttggtcctctcatcacccacattcaaattctcacctatttctaattattgca

SEQ ID NO: 606207 - DNA, 482 bp, Homo sapiens
gtgaaatatccaacagagagtgtagtatttatgtatctcagtaactatttaacaacctgaatataaactgtcatctatctaataattaagagcaaataatgtcacgttccaggtactctgggagtacaatgtctctccaagttttctatgagttctcaagcaggcatatatacccatgatcaccttatctatagttctgagtcctctcttttctaaaataattcagttcattactcgtgcatcacagaaatacracttatttttaaatttacacaccatatgcatatgtgtaacgcttgcaaaaaaataagaacacatagcagacttcaaaatttaatgagatggtgagttttttattcaagaaatgtaggcaagttcaattaaattttcgatttgatgaaagtccttgagcctgtgatactctgctgttttggtcctctcatcacccacattcaaattctcacctatttctaattattgca

SEQ ID NO: 606208 - DNA, 482 bp, Homo sapiens
gtgaaatatccaacagagagtgtagtatttatgtatctcagtaactatttaacaacctgaatataaactgtcatctatctaataattaagagcaaataatgtcacgttccaggtactctgggagtacaatgtctctccaagttttctatgagttctcaagcaggcatatatacccatgatcaccttatctatagttctgagtcctctcttttctaaaataattcagttcattactcgtgcatcacagaaatacgacttatttttaaatttacacaccatatgcatatgtgtaacgcttgcaaaaaaataagaacacatagcagacttcaaaatttaatgagatggtgakttttttattcaagaaatgtaggcaagttcaattaaattttcgatttgatgaaagtccttgagcctgtgatactctgctgttttggtcctctcatcacccacattcaaattctcacctatttctaattattgca

SEQ ID NO: 606209 - DNA, 606 bp, Homo sapiens
tctcaacatcatttattaaaaagactatccttgccccagtatgtgttctttacacctttgtcaaaaatcagttgactgtaaatgtgctaatttattcctgggttttctattctgttccattggtctatatgtctgcttttatgccagtgccatattatttaattacagtcgtgttgtaatatattttgaaatcaggaagtgtgatacctccagctttgytcttgctcagtgttgctttggctatttagaatcttttgaggtttcataaaaattttaggattgttttttctccgtttgagaaaagtttcattggaattttgttaaagattacattgaatctgtaaatcacttagggtaccatggccactttaataatattgattattccaatccatggacgaaaaaaatatttccatttgtttcttcttgaatgttttcatcaatgttttaaagttttcatgtacagatctttcacctctttggttaaatgcattcctaagtatttttattttttgatgctattgtaaatgggttttcttaaatttttttaataattcattgttagcatgtgaaaatgcaactgatttttgtacgttgattttgtat

SEQ ID NO: 606210 - DNA, 579 bp, Homo sapiens
attgttttttctccgtttgagaaaagtttcattggaattttgttaaagattacattgaatctgtaaatcacttagggtaccatggccactttaataatattgattattccaatccatggacgaaaaaaatatttccatttgtttcttcttgaatgttttcatcaatgttttaaagttttcatgtacagatctktcacctctttggttaaatgcattcctaagtatttttattttttgatgctattgtaaatgggttttcttaaatttttttaataattcattgttagcatgtgaaaatgcaactgatttttgtacgttgattttgtatcttgcaactttactgaattcattagttttaacaatttttttggtggcatctttagagctttctatatataagatcatgccatctgcaacagagatgattttactacctcctttccaatttggatgccttttgtttttcttgcctaatttctctagctaggaccttccatagcatgttgatcttaggggaaaagccttcagttattcactatcgactatgaggtcagctctgggcttgtcaaaacactttca

SEQ ID NO: 606211 - DNA, 579 bp, Homo sapiens
attgttttttctccgtttgagaaaagtttcattggaattttgttaaagattacattgaatctgtaaatcacttagggtaccatggccactttaataatattgattattccaatccatggacgaaaaaaatatttccatttgtttcttcttgaatgttttcatcaatgttttaaagttttcatgtacagatctttcacctctttggttaaatgcattcctaagtatttttattttttgatgctattgtaaatgggttttcttaaatttttttaataattcattgttagcatgtgaaaatgcaactgatttttgtacgttgattttgtatcttgcaactttactgaattcattakttttaacaatttttttggtggcatctttagagctttctatatataagatcatgccatctgcaacagagatgattttactacctcctttccaatttggatgccttttgtttttcttgcctaatttctctagctaggaccttccatagcatgttgatcttaggggaaaagccttcagttattcactatcgactatgaggtcagctctgggcttgtcaaaacactttca

SEQ ID NO: 606212 - DNA, 579 bp, Homo sapiens
attgttttttctccgtttgagaaaagtttcattggaattttgttaaagattacattgaatctgtaaatcacttagggtaccatggccactttaataatattgattattccaatccatggacgaaaaaaatatttccatttgtttcttcttgaatgttttcatcaatgttttaaagttttcatgtacagatctttcacctctttggttaaatgcattcctaagtatttttattttttgatgctattgtaaatgggttttcttaaatttttttaataattcattgttagcatgtgaaaatgcaactgatttttgtacgttgattttgtatcttgcaactttactgaattcattagttttaacaatttttttggtggcatctttagagctttctatatataagatcatgccatctgcaayagagatgattttactacctcctttccaatttggatgccttttgtttttcttgcctaatttctctagctaggaccttccatagcatgttgatcttaggggaaaagccttcagttattcactatcgactatgaggtcagctctgggcttgtcaaaacactttca

SEQ ID NO: 606213 - DNA, 578 bp, Homo sapiens
ataaatgatttctaatcttgactacagttcaccaactggaatcacccttgtaaaagcagctaggaagcttgtgaggttccccatgttccaaagatctcaaggaaccttttctcttccagcttccaacattctctagtacaacatggcctcccaaggacatactcccgttagcaatgagctcagccaaaggacacacatagactcccatggccctctgtcttgaaaggccaatgctgcaaggatctaaggaaggttatgtggagacatccaacaagcttccatttaaaagacccagcaaagtttcagttaggaaatgttctagggaagtgtctgaacayagcctacacaggggaccaaaagatgtcttcatcaatccagccaatgaagggtctgtggtctgtgtgagaaagagacaaagagtgaagacttgctgagcagctcgaggaatttcttaccaaagggctcaaggaaataccaagaccagaagcaactagaaaaaaaatggaaattattcttagaaagtacattggggcagatcaatcaggataggatttgtctgtgtatatgttgttcatgga

SEQ ID NO: 606214 - DNA, 548 bp, Homo sapiens
acccttggcctatatgcctaggaatagacattaaaagacaagaragtcaagcacattgacgaatggtgacagattctgccacaaaaattataggaacccaaagttgagatgaaagcatagcacccatcttaaataaactcccaacttcccaaaagtaaaatataagcaaatattatgatagagtaaatgaataatagaaatagagagaaaatacattaattttaactattaccttgtgatattgtagaacatatatgcttatttaccccaaaacaacttcaagatcgaaagtaactaaaatgtcaaatgaacttgatgaaactcagtcatatacacataaaatttcaactgtcttgttaaagtcaatattcaatattgagattaaaaaaaaatcaaggcatttttccctttttgctttcctgagataatcaatatcattggaaagtcaggtttcctattctgcttttagccttcaaaatttgccaaatcccaggaaagacatgcctctaagatataaaaataactgtacaaacttagttaataaggac

SEQ ID NO: 606215 - DNA, 597 bp, Homo sapiens
tattattttattgccctccaaagagtgagcctttttttcaaagatggtgggaatattgatctctgtgtgttgattgtcttttggatttgtttgttataatttttgccatgaaaaaatgttggatttttaagcaggtacattactgtttatgctttgcaggtacattcatgtaggccttttggttttgtttcttgcttaagtcaggtcttgcccagtgaaggttttttttagttgcctacactttcttatagtccccttgagtttcgatttttgtatttttttttttttgagacaaagtctcactgtgtcacccaggttggaatgcagtggtacsatctccatagcactcccatagaaaactcacaaaaatcagctcacacgtctgcctctcgggttcaagttattcttatgtctcagcctcctgagtagctgggattacaggcatgcgccatcacacctgggtaatttttgtatttttagtagacacggagtttcactgtgttgcccaggctggtctcgaactcctgacctcagatgatccacctgcgtcagcctcccaaagtgctaggattacaggcgtgagccaccgtgcccagc

SEQ ID NO: 606216 - DNA, 454 bp, Homo sapiens
cataatctgacactgaccatatgtccatcctcctctcctctatcccccttaagatggtgttttctgcagagcttcccctaggaatcccttgggctaatgtgagctccagtccctstgctccaaatttagctgagaagtcatacttctacctgttttgcacattgagattccctaggattttgtttgagcaaagtgcttgtgttaggctattcttccattgctataaatatctgagactggataatttataaagaaaagaggttgaactggatcacggttctgcaggctatacaggaagcatgacactggcatctgcttggcttctggggaggcctcaggaagcctacaatcatggcggaaggtgaagggcaccagcaggtcacatggcaagagagggagcaagggtggggggaggtgccacacacttttaaacacccagatcttgcaagaattc

SEQ ID NO: 606217 - DNA, 453 bp, Homo sapiens
gaattcactccctattgggaggacagcaccaaaggaagagcactaaaccagttatgagaaatccacccccataatccaatcacctctcaccaagctccacctccaacattagggattacaattcaacaggagatttagcagggacaacagccaaactatatcagcactccacagaaaaacagtatcaccattatgaccaccatcaccatcaccaccatcaacgtgtatataaaagccagtaccttagagaaatctcctccaaatcacttcccttaatcacttcccttacttgtgcttctccatatatacctatwtaacaaacctgcatgttgtgcacatgtaccctagaacttaaagtataattaaaaaaaaaaaaagaaagaaaagcaactcctcacttgttcaagtgttatcatgaaattgccacaacccagtcacagcatagcttcaagc

SEQ ID NO: 606218 - DNA, 460 bp, Homo sapiens
ttgttaactatttcatgtctccttccctgttccagaaaatacttatgctctgttctcaatgactggtgcctattctcccaacttcaattcactttgatcacattaacaaacctctaaaagttgggattttaaatttttgtataaggataagctctaggccaggtgtggtggctcatgcccataatcccagtgccttcagagtccgaggcatgaggatcatcacttgagcccagaagttttagactagcctgggcaacatagcaagaccctgtctctacaaaaaaaaattacaaaaattagccgggcttgttggggcatgacggtagtcctagctactcaggaggctgaggcaagaggatcacttgagcccaggagttcgaggctgcagtgagctatgctcrtgccactgcactccagcctggggaacagagcaagtctctgtctctaaaaataaataagt

SEQ ID NO: 606219 - DNA, 552 bp, Homo sapiens
ctttaatttttgaaaatcaagaggtgtgtgataagttcctgatgtcacactgtgaactccataaggattaactaatatacaacacacgaaacaaacctcagctgttcccaccctcattctgggaggtctttaagacaaaaagaacccaaaacaaaaaaccccacaggcgtttaaggatcstttccctcctattaagagtactgttctcagagtctcagttaactgaaacgttgcaggataattcaccagatttttcatatccagccttcctatcgaagaaagtcaaagtactaaaccaataaatgtgaaaaaggatgttgggcttaaaaaggaaaaccttcaagacttaaatctgacatttcaaaagggaagactgagaagatatgcttactaaataggattatactcaatgtacggtctttgcaataggcgatttgagttcctttcaatgtacattttatttatataccacctcccaaaatgaaaaaatctatactattcgacatactgttctatagagcactgatgagcgatataaaaggtaaagagttc

SEQ ID NO: 606220 - DNA, 448 bp, Homo sapiens
gtgtattgcaactgtgaatgacaatggagaagggcccttttgctgagcttttgacacaytgcaacattagtttacctaatttatacctatttctcatattaatagcacagccaacttcattaaaaacatgctacattcttagacattctcttcactgaatcagtgacattaaaaacacaattaaaaaacaaaaaacaaaaaaaacagcaccctcaggccaggtgcagggctcaggcttgtaatcccagcattttgggaggccgaggtgggcggaccatctgaggtcaggagttcgagaccagcctggccaacatagtcaaacctcgtttctactaaaaattagccgggtgttgtggtgtgtgcctgtaatcccagctactcgggaggctgaggccgaagaattgcttgaacccaggaggcagaggttgcagtgagctaagatcatgcc

SEQ ID NO: 606221 - DNA, 601 bp, Homo sapiens
tattaatttcatataactgctaattagcaatgagacacttgaaattatttgaaatttttgacccaatttaagaatgtcacaagtattttaggagagcagttacattgccaaaaaaaaatccaactgaatatttaaaatccatgccttttatgacatgctaattatatttcaaktttaaaagaggtattacagatattcaaaatggctacacaccaaaagttcttatggcttgatattgttatgtgggatgaatactacatataattaatatgtgagatatgaacactttttattaggccttaatggaggtacctaaccatttttttaatctttagggattcaaagaatgtgagattcagtacgaaggtcagtgacatgctgaaatatttgaattctcccatttcatgaagcatcagttcttttcccctcttcaattcttttatgtgactgacagttccatccattttttcctgaggctactattgaaattcctttgtacctgtagaagcaagtttgctggttgaagaattttgttttacctctgcctctaagacttgtcaacggcaaattaggacaaggaattctaatttatgtttcaaag

SEQ ID NO: 606222 - DNA, 585 bp, Homo sapiens
ctcatttgcagcaagccagtacaaattttgttacagcccagcctctgttgagagactgataagaacctctgctacagaatccttcaactcagggattcaataaaatctttctgatttttccccaaagttctatctcattaattcagtggctcttgcaaaggtttctgcccaaaactgtaatagtaaagaggcctacattgacaaatacttctcaaataagccacagcagttagagttctgaatgtggaagcttgtccaattaagcctaggttttacagattctaatacagggtaagagaaaaatacattataagaaatcacagtaatgtttttattcataatgratagttgcctctatttagttctccctcccttcatctccagtccaaattcccaggaatcagcaccataacaattaccagcaggactagactcactaacacagggtacaagattgacaatcaagagtcagttaaagaatgaacaagagtgaaggtagatgacattatatctgaatttgtgactgctgaccaaatgatttgagtgaaaacttaccatgtttatattcataagccatgaaaacaa

SEQ ID NO: 606223 - DNA, 582 bp, Homo sapiens
atgttaaccatcacaagtccacctcttgtcaacttgaacccatacacatctcctgagatcataagtaatcttcaaacaragacaataataaggtcataattacactaacataatacaactatcttttttttacaaccggaacacaccaatcctcaacccaaatactattacataaagttaactatcgcaaggacaaaaaaccaaacaccacatgttctcactcataggtgggaattgaacaaggagaacacatggacacaggaaggggaacatcacactctggggactgttgtgtggtggggggagggggaagggatagctttaggagatacacctaatgctaaatgacgagttaatgggtgcagcacaccagcatggcacatgtatacatatataactaacctgcacattgtgcacatgtaccctaaaacttaaagtataaaaaaaaaaaaatcgtatgtgctaggaaaaaaaaaaaagagtcctaatagtattttgtatttgttcatttcttttagcaatttttttctatatttaatatatattttgaagcaatattaggtacttgaaagtcattagtat

SEQ ID NO: 606224 - DNA, 636 bp, Homo sapiens
tgttagacccccataaatatgccaaatagcaatgaacaatctcagacaatagaagataaagaacttgaattttaaaagctgcagcaacaagtgactcaaaaaactgagggactaaacaagcaatcttttgttcttttcatcaaaaacactctttttgcttttaactgcaattggtgactactgactaatagaaaatgtgtaggaatacagtttaagggttgtatgttactgtagataacactcataggatcttgctacttagaggtcttacaaaggtgttgtcaaatagataaggtctgatacagttcaagcatgaaaaccatatgatttatctgtatagccacagcacaagctaagaatagaagctgsgattcttccttctgcaaagcagaaacaaggcaagattgctaatgtcatcctgactcaccaagtgcagccaagactgttcctttcagcaaaattgctgaactgtgtggttgaggctggatgattttcacacaaagggactcttccacacacagggctctccaacagcagaagaatctgtgaggctacaacagatgtgccctattgaagaatcccctccacatgggcaggtgccagaggaacaagtggaagaacagatcagcccagcag

SEQ ID NO: 606225 - DNA, 560 bp, Homo sapiens
gagcaggtaaacatatatagctaaatgttttgtgaggcttcaggtaaagaactctaagacattgtctatgtccaagataagaagcaccatttcggcaactacatgaggctatgattcccatcatgccctggaatctacagaattttacagttgaaagggctttgtaggacttatctgcttgaacttcttaattctatgggttaaaaaactgagacccagagaaataatatatttaatatgacacagagatgaytcaaatatctaagatgatgtttacctagttttatttactctggacaacaaaaatcttggcactgctaattactaagcttataaagtcaagtggaggatttgtgggaaatggctggccccatattctttaataaggagaatataaacttcctaaagaaatttaatataatggtgtaacaataaattctaatgtcagtctccagacccttcacaccaggaagaagtgatacctggatctagttcttcgggtctccctcatgttcctcataaccacaccccatgcgatggggcatgaactgggatgtcca

SEQ ID NO: 606226 - DNA, 530 bp, Homo sapiens
agcaacataggtatggggctttgaagagatggagatttgataacttcagtgttctggcaggatttatctgcacagagacaattaattttgttgcattcacagttttctayacaacatctaaaacacgatcagcttctcaataatattctcttcctgtcatataataatctatacacctagtgtagtgttcaattttggtcctcatttcctgattctgaaagcctactatgaactttggcagcaaaaagagtttgctaattccagggggaaacaaaacctagcttccaattttgcttacatgtaaagcagccagttcagtttggcagaaagtagacattcaacaaacagcattctctctgcatcccttccctttttctatttgccacaaaagatttttattctctattgctaaaacttacagaggcaggaaaaaaaaagactgggatatttacacacataatgggatagcccacaacaaatatatttttattcagatatcaacctactgaaaatgttaggtggttgaagtt

SEQ ID NO: 606227 - DNA, 581 bp, Homo sapiens
gatccttttttttttttttttttttttggtgctctgggaataaaggagcagttttccttgcaggtgaaaatatctcttagtttttctgccctatttttcatttctgctctattttcattaatcatataatccaaaaaacaatgttaatcggcctgctgttattagaaacaattacaggtatgtccacacttgtcttccatacctgcatcacagcaataaacctgcattagtcactgaacattgacagtctcattatgttttgttcattttgatgcctgagcttgacgaagtggcttttgattcctcaggggtgggggaagtgagtgggtatcggcagccttgtagatgaaagccctttcaagaaaaagaatgctgactggtgaggaaraaataaagcagccagcttgaaatttttttgaacatattttgtagaggagccagtgtgatgcaaatggcatgccagagcataaacgtgtacactttttccagagaagtttacttcaaatactccccacagatgttctctaataaagaacagccggccaacctctactggtgaatacactgcttcattttggagc

SEQ ID NO: 606228 - DNA, 544 bp, Homo sapiens
cccagggtgcttcatatccttgcagacaagcaactaatagtttcattttggaaataaggcaagttagtttatattgcaactaagtgatgagtccaaagctcagacaattcctaaaagtggcattagagaggtcaccactgttaataaaaccccacagcataggctctgttatttatgaattcaaaactcaaatgatttgaatttggtttggaaaccacacataaaataaaatttcattataatacaagtgtcaagaggcaagtatgacattcacattataaaaaactctaaaataaaagcagtgtattatagaaacagaaatcctgtttttgaaacaaaagtcagaatgcatattttgtcaagaaggcacaaatgaagtttagataccgaaactggaattcctaggacacttaaataatttatggaaacaagagaaagtttgaaatgaaaattaactcagaacatttaagatacatttcaaagtaagacactayaactgtattatatacatacttgactcaaatatggggttagtgaggtaagg

SEQ ID NO: 606229 - DNA, 544 bp, Homo sapiens
cccagggtgcttcatatccttgcagacaagcaactaatagtttcattttggaaataaggcaagttagtttatattgcaactaagtgatgagtccaaagctcagacaattcctaaaagtggcattagagaggtcaccactgttaataaaaccccacagcataggctctgttatttatgaattcaaaactcaaatgatttgaatttggtttggaaaccacacataaaataaaatttcattataatacaagtgtcaagaggcaagtatgacattcacattataaaaaactctaaaataaaagcagtgtattatagaaacagaaatcctgtttttgaaacaaaagtcagaatgcatattttgtcaagaaggcacaaatgaagtttagataccgaaactggaattcctaggacacttaaataatttatggaaacaagagaaagtttgaaatgaaaattaactcagaacatttaagatacatttcaaagtaagacactacaactgtattatatacatacttgactcaaatrtggggttagtgaggtaagg

SEQ ID NO: 606230 - DNA, 589 bp, Homo sapiens
tactgtagtatgacatgtggaccccaaagattcatgttcctcccacttgcaaaatatattcaccccatctcaacatccataaaaatgttaacccattacaaagtcaaacgcccacttctcttcacttatacaggggctgctagaggtatcacatttgtacagaatgggtccactagagaatcagagtttttcaagtggatctcaggctgtctaagaaatctcatgcatttctctggtcagttcaatttccagtttttcacaactgtttcatacattctctgttttcttccattgttcccctgcctcacttccctcatcctccatccccaaagtcattaccctagttaaggcagacttcatcatgagcctaaattgctgcaaaaggttttcattgatttccttgcttccaatagtgtaataaccatatcagtcaggaggttgttgaagtggtccagccaacagtgaagaaagcctgaactgaagtaataagactgaacagataataagacaaaaacaagtatatatatttatacttactaagcaagyagatgttaagcattctcatcacatacacacaaaaggttaggtc

SEQ ID NO: 606231 - DNA, 198 bp, Homo sapiens
atatagcacagctgaatactttaaattagactattacaacttcactgagatgatgttacgtattayataccaaggttaatggaaatcaacaaaactcctatctttatatgaaaaaataattgaactgaaagatctcccaaaacaaagattcttagaactgaaaattatatgcaggatgttgttgaattatttgtatat

SEQ ID NO: 606232 - DNA, 438 bp, Homo sapiens
tagagagaagaaagaaaagggagaaaggaagtatgggacatataacatgtggatcctgatatagttttctccagtcttctttccgaaaaacacaggtatattgggtaaactccaaatgaggagatctggccccttctctatctttgggactttagaaagagactacctctcaaaactggagagagaagcataccaagtaaatttgatagcaactccgagttctatctgagagcttgtcagaagtagctgctgtaattaggatgagagttcttgragctggggtttgaagggcagaacactctaactggagttaaggagttcagacagtactaaaggggtgccaaggtggaaccaaatcaatggaaagagaacacaaagtcctcactgagttgaggacaaagagaacacaagctcatggccataattgtcagcaataaa

SEQ ID NO: 606233 - DNA, 620 bp, Homo sapiens
tgctctcataggataaatcaaagctgtgaaatgtttttattttattaaaaaaataaaatatcctagtttttaagtgctccaaaataagggcctgagacaagtcttggcagcagagagtttatctggcagaaagtaggggtgcaatcgtgtgcaaaacaagacaagaaaagaggaagagatgatagaaataaggctgataaggtgattgctgttgctgttgtgacygatggggctgagatccaccatggcctcctaaaaggcatgcagaaagcattcctccctctcctggaattctccacataaaaataatagttttatttaaaagtcaaatggaaaaatagtcagtagcacacaatataaatttaaaaattcaatgatgaggaaattgctttactagacattaaaacttgtgataaaatccagtgtaaccaaattggaaatagacacaaggatatacagaaaatataattattttatattaattatgtgaaagattatttaataaattatgttaacatgatgggttattcatctgggaaaaaaatgcccagcccagaacaacaggacctctatcttaccccatacataaaactacatccaagattgatcaaaggtctaaa

SEQ ID NO: 606234 - DNA, 620 bp, Homo sapiens
tgctctcataggataaatcaaagctgtgaaatgtttttattttattaaaaaaataaaatatcctagtttttaagtgctccaaaataagggcctgagacaagtcttggcagcagagagtttatctggcagaaagtaggggtgcaatcgtgtgcaaaacaagacaagaaaagaggaagagatgatagaaataaggctgataaggtgattgctgttgctgttgtgaccgatggggctgagatccaccatggcctcctaaaaggcatgcagaaagcattcctccctctcctggaattctccacataaaaataatagttwtatttaaaagtcaaatggaaaaatagtcagtagcacacaatataaatttaaaaattcaatgatgaggaaattgctttactagacattaaaacttgtgataaaatccagtgtaaccaaattggaaatagacacaaggatatacagaaaatataattattttatattaattatgtgaaagattatttaataaattatgttaacatgatgggttattcatctgggaaaaaaatgcccagcccagaacaacaggacctctatcttaccccatacataaaactacatccaagattgatcaaaggtctaaa

SEQ ID NO: 606235 - DNA, 620 bp, Homo sapiens
tgctctcataggataaatcaaagctgtgaaatgtttttattttattaaaaaaataaaatatcctagtttttaagtgctccaaaataagggcctgagacaagtcttggcagcagagagtttatctggcagaaagtaggggtgcaatcgtgtgcaaaacaagacaagaaaagaggaagagatgatagaaataaggctgataaggtgattgctgttgctgttgtgaccgatggggctgagatccaccatggcctcctaaaaggcatgcagaaagcattcctccctctcctggaattctccacataaaaataatagttttatttaaaagtcaaatggaaaaatagycagtagcacacaatataaatttaaaaattcaatgatgaggaaattgctttactagacattaaaacttgtgataaaatccagtgtaaccaaattggaaatagacacaaggatatacagaaaatataattattttatattaattatgtgaaagattatttaataaattatgttaacatgatgggttattcatctgggaaaaaaatgcccagcccagaacaacaggacctctatcttaccccatacataaaactacatccaagattgatcaaaggtctaaa

SEQ ID NO: 606236 - DNA, 549 bp, Homo sapiens
ttagtcatttcagtgaaagtttaattagggaacggtgtctaccagaatatatttggcatccttcttttttctggtatttgcctgagtgagaaaagtgttaggaataggaaggccagatgagtttgctttccctccagagaatactggccaagaaatttcctgtccaacctcaggagcatcactgaagcctgtttatgaggaattgtcctaccacaacactgtgttatggcatttgggaagccctcagaggagctgcctgctctaagattgaggccacatgactcaggccattataaaccctaatgcagasccctgaagagggagagcatttggaaggggatagggaagcacataaagatgatatgctcagctttactgtcgttgggcagaaaactctctagtgggcttgagagggggaactgattttaaggagggctgaatagtttgggaacctacttaatgcaaccatagtctgtatttttaaaatcctcacatttcactacagatttgggttttagtgtcttggcataaatagggccttaatataaa

SEQ ID NO: 606237 - DNA, 473 bp, Homo sapiens
gtgaaagtttaattagggaacggtgtctaccagaatatatttggcatccttcttttttctggtatttgcctgagtgagaaaagtgttaggaataggaaggccagatgagtttgctttccctccagagaatactggccaagaaatttcctgtccaacctcaggagcatcactgaagcctgtttatgaggaattgtcctaccacaacactgtgttatggcatttgggaagccctcagaggagctgcctgctctaagattgaggccacatgactcaggccattataaaccctaatgcagagccctgaagagggagagcatttggaaggggatagggaagcacataaagatgatatgytcagctttactgtcgttgggcagaaaactctctagtgggcttgagagggggaactgattttaaggagggctgaatagtttgggaacctacttaatgcaaccatagtctgtatttttaaa

SEQ ID NO: 606238 - DNA, 545 bp, Homo sapiens
tagtagcaatactacttctgtgctactgtagaactatgaaatttatgaataaatagcaatagccaaattcagggataggagatttaggtctggaagcctctgtgatcctcacaaatccccatcaaatcccatagagctgcttattgggtactgaaatatrgccaccatctccactgaaattgcttcccaacacataggaagctggagataagtgtatggaaggatgctacagaaaatgtcacatttccatgactgtgtttgccagcatatacagaaccaagaaaaggcataaaacttctgccttctcaattgtgtaagtgtgcttaatttgcagaaccaaattcacatggaacactagctgcacagaagtctgaaaatgtcattgatagtgccacagcctttataggacaagaaagcacagtagacggagggtggatttgaagatgagatggccaatctaccattcctatggtagatagcaacatatattctagaaaataaattgattgtctatggacacagctaagtcaaaactcaattaaaat

SEQ ID NO: 606239 - DNA, 545 bp, Homo sapiens
tagtagcaatactacttctgtgctactgtagaactatgaaatttatgaataaatagcaatagccaaattcagggataggagatttaggtctggaagcctctgtgatcctcacaaatccccatcaaatcccatagagctgcttattgggtactgaaatatagccaccatctccactgaaattgcttcccaacacataggaagctggagataagtgtatggaaggatgctacagaaaatgtcacatttccatgactgtgtttgccagcatatacagaaccaagaaaaggcataaaacttctgccttctcaattgtgtaagtgtgcttaatttgcagaaccaaattcacayggaacactagctgcacagaagtctgaaaatgtcattgatagtgccacagcctttataggacaagaaagcacagtagacggagggtggatttgaagatgagatggccaatctaccattcctatggtagatagcaacatatattctagaaaataaattgattgtctatggacacagctaagtcaaaactcaattaaaat

SEQ ID NO: 606240 - DNA, 302 bp, Homo sapiens
gatagacttacatgttgtaacaggccaagatttcctaggtagagaatgtaaaaaatgtagcgataaaggatctgatgaaaaggcacccagtatttgatggatagaggaagggaagccctggaggtaccatcaacttttttttggctcctattgtattcaatatgttgacatttatacaatatctcagaaataacagggtttagaaaacatactgtattagtcygctttcaggctgctgataaaggcatatccaaaagtgggcaatttacaaaagaaagaagtgtaatggacttacagctctg

SEQ ID NO: 606241 - DNA, 617 bp, Homo sapiens
tctctctctttttttttttgacatggagtctctctctgtcacccaggctggagcacagttgcgctatctgagctcactgcaacctctgcctcccaggctcaagcaattctcctgcctcagcctccccagtagctggggttacaggtgcccrccaccacacccagctaatttttgtatttttttgtagagacaggttttcaccatgttagccaggctgttctcaaactcctaacctcaagtgatctgcctgcctgggcctcccaaagtgctgggattacaggcgtgagccatggcacctggccagcatacttaacctttacagaggcatttttagctggacatttacagcatttaaaggatggaattcaattaataaaaaagactttttataacattgaaacagtgagtttaagagagtaaatctgttgccattttagttagttttgacaaagcaaatattataaatggccaaatacataagcctgttattacacattaaaatgtatcctatatttaatgagcattaaaattgaagtttactagtaattccatgggatattattatgaagttataagaataggagagaacttatagtttatttctgtctcattttagg

SEQ ID NO: 606242 - DNA, 617 bp, Homo sapiens
tctctctctttttttttttgacatggagtctctctctgtcacccaggctggagcacagttgcgctatctgagctcactgcaacctctgcctcccaggctcaagcaattctcctgcctcagcctccccagtagctggggttacaggtgcccaccaccacacccagctaatttttgtatttttttgtagagacaggttttcaccatgttagccaggctgttctcaaactcctaacctcaagtgatctgcctgcctgggcctcccaaagtgctgggattacaggcgtgagccatggcacctrgccagcatacttaacctttacagaggcatttttagctggacatttacagcatttaaaggatggaattcaattaataaaaaagactttttataacattgaaacagtgagtttaagagagtaaatctgttgccattttagttagttttgacaaagcaaatattataaatggccaaatacataagcctgttattacacattaaaatgtatcctatatttaatgagcattaaaattgaagtttactagtaattccatgggatattattatgaagttataagaataggagagaacttatagtttatttctgtctcattttagg

SEQ ID NO: 606243 - DNA, 571 bp, Homo sapiens
ctggcctataatccattcacttactttctgaggaaacagaaatgggggtgttgctggaatgatgtggagcagggaatttggtgtaatttccttgtgaaaagataatgactaaacctcctcgtaaatgaactaatagtattagaagaaaaagataccttatctatgaaatactcttagcaggatgttcctggtttaaggttgcttataaaacatcaatccagaatctgtggatttatggaaaatgagaaatataaaagctggctgacaatttaaggtgtattaggccattcttgccttgctataaacaccagaggctgggtaattcttaagaaaataggtttaattggctcacggttctgtatgttttacaggaagtatggtgccaacatctgctcagcttctggggaggcctcaggaagcttacaatcatggcagaaggcaaagggggaacaagcgcatcacatggcaaaagcaggaacaagggagagagtatggggggcacactttacaacaatcagatctcatgtgaactcagagtgaaagctcrgttattaccaagggaatagctcaa

SEQ ID NO: 606244 - DNA, 609 bp, Homo sapiens
actacccaaggcaatctacagatgcaatgcaatccctattaaaattccagtgacattttttcccagaaataaaaaaaaaaatactgacgtttccacggaagcaaaaagaccctgactagctatygcaatcttgagcaaaaataagaaagctgaagtcaccatactatgtgaagtcaaaataaactacaaagctatactaatcaaaacagcatggtattggcagaaaaacagatacataggccaatggaaggaaatagagagcccagaaataaatccacacatttacagtcaattggttttcaataaaggtgtcaagaacacacaatgagaaaaggacagtttcttcaaccaatagtgttggtaaaactggatacccacatgcagaagaataaaatttgacccttttctcacaatatataaaaaagctattcaaaatagattaaagatttaaacgtaagacatgaaactgtagaactactaaaagaaaacatagaggaaaagttccacgacattgctaaacacaaaaatagacacatgggattacatcaaactaaaaagcttccacacagcaaaagaaaccatcaacagagtgaagacacaatgtatgga

SEQ ID NO: 606245 - DNA, 609 bp, Homo sapiens
actacccaaggcaatctacagatgcaatgcaatccctattaaaattccagtgacattttttcccagaaataaaaaaaaaaatactgacgtttccacggaagcaaaaagaccctgactagctatcgcaatcttgagcaaaaataagaaagctgaagkcaccatactatgtgaagtcaaaataaactacaaagctatactaatcaaaacagcatggtattggcagaaaaacagatacataggccaatggaaggaaatagagagcccagaaataaatccacacatttacagtcaattggttttcaataaaggtgtcaagaacacacaatgagaaaaggacagtttcttcaaccaatagtgttggtaaaactggatacccacatgcagaagaataaaatttgacccttttctcacaatatataaaaaagctattcaaaatagattaaagatttaaacgtaagacatgaaactgtagaactactaaaagaaaacatagaggaaaagttccacgacattgctaaacacaaaaatagacacatgggattacatcaaactaaaaagcttccacacagcaaaagaaaccatcaacagagtgaagacacaatgtatgga

SEQ ID NO: 606246 - DNA, 337 bp, Homo sapiens
gcagaaataaatcttgttatatatcatcaaattatttgtgacaaaggtgccaggaccatttaatggtgataggacagtcctttcagcaaatggtgataggacagtcctttcagcaaatggtgctaggaaaacgggatttccacatgcaaatgaatgaaattggattcttatctcatatcatatacaaaaattaattcaaaatggatcaaagacccaaatggaagagctaaaaaactgtttccatgggaccaagtgatcctatatacrgaagactctaaagactccaccaaagaactctaagaactaataaattacttcagtaaagttgcaggttaca

SEQ ID NO: 606247 - DNA, 605 bp, Homo sapiens
gtgtcgggggcactttccctttagcatgcagaactgcatctgggccttcaggaagaggagcctcatacttttccctgtcatatcctccatccagttgacattttaaaataatagactcagtctggctttttacaaaggaacagggcccccagtaggctcacaggattttgagctggttcctattaagttctttgcaattggaaggcactccatttctcaggcaaaccctcaaccttttgctgacaggtggaattgtgtttgggggctgctttctcatgcttttyagggttggtcatttcatcccttctgtgtctgtcactgtactcctgggaggggacgtgccttccctaaagagatccatttgcccacaggaaagaaggctcacgctcctgcgggtgaaggtattgggtgagtctctgggaagtccattcccttccacagtcttacaaagaagaacaggctggggctgagagagaggaccctggaatctgagagtgcaaaaaagggaggaaatcctgcttccagactgctgggtccatggtcagtcacacataattgcagtcataacgaacacatttgaagctcacaggcctgtgcaaaacaat

SEQ ID NO: 606248 - DNA, 567 bp, Homo sapiens
cttgctctgtctcccaggctggagtgcrgtggcacgatctcggctcactgcaacctccacctcctgggtacaagcgattctctgcctcagcctcccaaatagctgggattacaggcacccgctaccatgcccagctgatttttgtatttttagtagagaaggggtttcaccatgttggccaggctggtcttgaactcctgacctcgtgatccacctgcctcggcctcccaaagtgctgggattacaggtgtgagccaccgcgcccggcccaagtttttttaaaatcaatttagctggtagcaactgtccctcgcagccaccagaggccctgtcaaaagaacatcagcaggggaccaacttgcatgggtcccttttggcaggcagcctcagggtcaggggtcagactgtgggcactgcttcaatgacacaactacaatgtgaaagtctaagagttcttattagcacttacccaccctggggtgtacacggcatgccctggaggccgcatgcacacaggcacacacacaaggtcagggagcacgtgagagagaagagagcatgtcaact

SEQ ID NO: 606249 - DNA, 567 bp, Homo sapiens
cttgctctgtctcccaggctggagtgcagtggcacgatctcggctcactgcaacctccacctcctgggtacaagcgattctctgcctcagcctcccaaatagctgggattacaggcacccgctaccatgcccagctgatttttgtatttttagtagagaaggggtttcaccatgttggccaggctggtcttgaactcctgacctcgtgatccacctgcctcggcctcccaaagtgctgggattacaggtgtgagccaccgcgcccggcccaagtttttttaaaatcaatttagctggtagcaactgtccctcgcagccaccagaggccctgtcaaaagaacatcagcaggggaccaacttgcatgggtcccttttggcaggcagcctcagggtcaggggtcagactgygggcactgcttcaatgacacaactacaatgtgaaagtctaagagttcttattagcacttacccaccctggggtgtacacggcatgccctggaggccgcatgcacacaggcacacacacaaggtcagggagcacgtgagagagaagagagcatgtcaact

SEQ ID NO: 606250 - DNA, 532 bp, Homo sapiens
gaattcaaagctccaaataacgtggagttatagagtctcaagaaacaacctgtggtattcaggtgaactagggtgtgctgcaggaacatatgacctccaaatcttagtgacttaaaccaacacagttgcttgcgtttgctctgggctctgctccaacgttatcctccctctaaaacccagcctgctcaaatcgccatcatctagaatgttactgaatgctgtggcacagagaaacactgagtgtaaaggctctcaaaacttccattggtgcccataaatgaagtgtttcacttttgttcacattgcacaggccaaagcaagtcacaactaacttcaaatggttagagaagtacaatcaacctatgcccagaacaagttataatattgtgaagaaacctaaagcataccacacagcctgttgaaaggccatctagtttatacctgaaccaaattttatctttgctacggctaaattgtacattcacacacacaccaaagtcatatacttatraagtgacaacatgtctgtatt

SEQ ID NO: 606251 - DNA, 623 bp, Homo sapiens
atgtggttctggaggctgggaagtctatgattgaggggttggcatctctcgagggccttcttgctatatcatttcatggctgaagggcaaagagggtgagagaaatgaagagaaaaggggactgaatttgcccttttaaaacaaacccacttctgtgataacagcattaatctattcatgaggggtaaagccctcatggcctaatagccttgtactaggcctcacctcccaatactgatacaatggggattaagtttccaacatatgtttttagaggacacattcaaaccatagtacatctctattttkcaatatgatgcctaatacttaatcaattattttattttatgcataagctaatccaagagaaaaagtgtggctctattttaaaagtgagaaatcagaatcagaaagatttaatgacttgtgtaaggagagccaatattcgaaccaaggtctctcctcttttaaaacctgtggttttctactataacataatctaatcaataatcttcatacatgtattgtagcaaaaataccattcattgaaaagctagaaaaagtgaggctgagagatgatactgttattgtcattttagcaaaataattatactgttatgtag

SEQ ID NO: 606252 - DNA, 648 bp, Homo sapiens
tgcactccaccctgggcaacagagtgaggctccatctcaaacaaaacaaaacaaaacaaaacaaaacaaactcctccataaactgaaatgtaaagagaatacactattacctggcatagtcctagagtagaatgcaatgatttagcactgactctaattaaaatatttaatattggcctggcaacggtgactcatgcctgtaatcccagaaccctgggaggctggggtgggtggagtgcttgagctctatcaggagttcaagaccagcctgggcaacatggcaaaaccctatctctagcaaaatacaaaaagccaggtgtggtggtgcatcccagctacttagtgggttgagacaggaagactgcttgagcctgggaggtcgtagctgtggctagccaagatcatgccactgcattccagcatggctgacaaagtgagacaccgtctgaggaaaaaaaaaattaacatctatactctattatagattacaaatattcaaagaaccaagtgcttaayaaaatacacttattgttctctaccttcctattttctttaatttctgatcagaatgtaaagacgggacagaaggtgtctcctgtctctcctgagacagtagagtatggagtactatcttttgataatggcaag

SEQ ID NO: 606253 - DNA, 618 bp, Homo sapiens
tttgtaacttcactatgattcagtttcctcatttataaaatggggcagatatcgccagttactttagtggattgttataaagactgagtcaattaatgtatatgaaacacttaaagcagtgcctggcaccgatcatccctttgcaattctgtccttccaaatttcttagagttatatttccttttattttctgaaattatgtaaatagaatatggcattttttgttttttattgtataattctttttaaaaatttaattcaattttattttaagttctgagataacatgtgcaggatgtgcaggtttgttacataagtaaacatgtgccatggtggtttgctgcacctttcaacccatcacctaggtattaagccacacaagcattagctatttatgctgatgctctccctccagcagtggtttttkaaatgggcttgtttggcgaaagataaattgaggaatcctgtattcggaggaggggtgattttactaccatagacttggaaacatttagtatccaaaatgcttaaccttgtaccccaagccctccatcatattgcccttgcataattcttcctcatattccactgttcttgtttttaattgttgtgcaacaa

SEQ ID NO: 606254 - DNA, 556 bp, Homo sapiens
gggatgattattagcctagttcttgactagttctctctttgtcattctctctagccctggaaaagcatttttctacagaatcagggaaaatcacaacatccatgattgtccttattagttcgaagaattgtttcagtgcatgacaaaacaattttttttcaggagtgctatatgaaaattagccttctgtttaattttgtacagtatttattagtttgtgtaagaaagtatgaatcctggccaggcacggtggctcacgcctgtaatcccagcactttgggaggcagaggcgggcggatcgtgatgtcaggagatcaagaccatcctgagtaacacggtgaaacgacgtctctactaaaaacacaaaaaattagccaggcgtggtggcggacacctgtagtcccagctactcgggaggctgaggcagaagaatggagtgaacccaggaggcggagcttgcagtgagycgagagtgcgccactgcactccagcctgggtgacagaccgagactccatttcaaaaaaaaaaaaaaagtatgaatcctgtaagaaaaca

SEQ ID NO: 606255 - DNA, 574 bp, Homo sapiens
gactattctcttcacaaacttaaatttttsttgcatcatttgttgcttattctgttctcttttccctttccttccatgtctcgtattatttaaagtcacttaaagtgacttaggagatgaaaggacatgaatatgcatatcaaaaataatttagtggaaaaggcagacatggaatggaaatgagcataagatatcaacagttcccatgccatttattaaaaactgagaccaagaaatcatttatttttatgccttaatttatcaattttatgcttctttattttcttgtctttcttctttccttctttcctttctttttctgtttatttttcattttacttttttactcttctaagtattaatccaataaatatttattgattttacattgtataccagatactgttccacataatgttataggcaggaaaatattctggtaaagaggtaaaaaaaatccttgtgcatataacttttactcagtgggtttcgttaatttctaggcaattgtttacatactgagagatatgaataaataaataaacaaaacagttatatgatatgatgacagaat

SEQ ID NO: 606256 - DNA, 560 bp, Homo sapiens
taatgtcaattatcaaggttcatttaattacagggatttttcaycctcctcaaaggtaaatggtagttaataattctgtcttgatgtgtataccaagttcattctagcatctaatgttctggagcaaatgtgtgtgtaggtgtgtgcatgcacaccggtgtgtttctgagagtttgtgtacatttatacattcaatgttttacaaggttcattacaggatttataaagtctacaatggtaacgttgattactttgaattaccatacaggagaggcccttgcattctctaagctgagctttattgggcaaatttttgctctatattcttatatgcaataaaatgttacttatttttatttttgttggagctattcctaatcaggacaccaagtttgagaaaaggaacatctacatagtccatgttcagaagtttattttattttattttattttattttattttattttattttatttaagacagagtctcactctgtcttaaaacatggaaaggcctgatctcggctcactgcaacctccgcttcctgagttcaagcaat

SEQ ID NO: 606257 - DNA, 658 bp, Homo sapiens
aagtcttatacttttaaaattaagtttattcttaggaacttattatttgggagcttttgtaagcaatatttaatttggcaatttaagtttttagtatagagaaatgtaatggattttgtgtaatgctcttggttcttgtgccttttaaaaatttccttactaattttattatttgttttggaragttcttaggatattctacaaagaccgtcatatcttctgcgaatagagacaatactgatttctattatttctattcttttcctaggcttatcgcattaattggagaatccaggacattatcaaataaaggtaaggagagtgaacagctttgacttgttcctcagtctcagaaggaaagcggtaagtctgatattagctgtggatattttgtagacgtcctttatcaggttgaaaaagttccctctattactggtttgttgaaatttttatcgtgaatgagtgtttaattttatcaaatgctttttctatatatagagagatgatttatgttttttctttcatagttttttaatacagtgaattatattgattagttttaaaatggattttttattattttaaagttctaaactacatttattgatatatcttaaatttattttattataaaatttaacatttcatttaaatgtaa

SEQ ID NO: 606258 - DNA, 658 bp, Homo sapiens
aagtcttatacttttaaaattaagtttattcttaggaacttattatttgggagcttttgtaagcaatatttaatttggcaatttaagtttttagtatagagaaatgtaatggattttgtgtaatgctcttggttcttgtgccttttaaaaatttccttactaattttattatttgttttggagagttcttaggatattctacaaagaccgtcatatcttctgcgaatagagacaatactgatttctattatttctattcttttcctaggcttatcgcattaattggagaatccaggacattatcaaataaaggtaaggagagtgaacagctttgacttgttcctcagyctcagaaggaaagcggtaagtctgatattagctgtggatattttgtagacgtcctttatcaggttgaaaaagttccctctattactggtttgttgaaatttttatcgtgaatgagtgtttaattttatcaaatgctttttctatatatagagagatgatttatgttttttctttcatagttttttaatacagtgaattatattgattagttttaaaatggattttttattattttaaagttctaaactacatttattgatatatcttaaatttattttattataaaatttaacatttcatttaaatgtaa

SEQ ID NO: 606259 - DNA, 480 bp, Homo sapiens
aaccacacatatttaaaatatctaattcaggaagtgttgccatatgtatacatacgttaaaaccagcacaacaagtaaaataatgaatttatttattacccacaagaggagtttcttcacgttttttgtaatcccttcccaacctccattgtatagcttcaccccaggcagctactgatctgctttctgtcattataatttacatcttctagrgtattttttaataaatggaatcataccatatgaactttctcctgttcattcagaataaatattttgagatttacccacatcatgctatgtatcaattatccattactttaattgctgaacagtagtccactgtgtgggtacaatggatatatcacagtttgtttatttacctgttgatggacatttggattctttccatctctcctgtataagtttttatacgcatatatgtttttctttatcttgagtaaatatctagcagtagaa

SEQ ID NO: 606260 - DNA, 573 bp, Homo sapiens
agacatttctgagtttttgtttttaaatcaaattagaattggcattgtcagctctaggctctcatctacatttagtaaataatagattaggatcactttttttcacttcacaattatatgattatattccattatgatttgactgtagttatccatggtttaaatcaatcatgaaaaacattattttatctaaatatcataatgtataggaatatgcatttgttctatgtacacacaggaaagtacatcagggkatactctaagaaatttaagcctcaggccaaacctgggaaattcaagcctcaacctcaacctaagaccaattaagtaaattatttatatcattggctaaagtataagggagctaacctagtttaaggccatccagtgaaagatcaaatgctaaatgagattatttactgattaccaaaaaactatcatgttaattcagtaaagatctcataatcaaatacattatcaatggtacttctggaaaactgcctttggtgatcacagatattaacctgaacccaaatataccctaagtaacgtactaacaacctacttcatacc

SEQ ID NO: 606261 - DNA, 490 bp, Homo sapiens
tctcactcatagatgggaactgaacaatgaaaacacttggacacagggagaggaacatcacacaccagggcctgtcatggggtggggggtggggggaaggatagcattgggataaataactaatgtaaatratgggttgatgggtgaggcaagtgaatcacttgaacccaggaggtgtaggttgcagtgagccaagatcgccccactgcaccgtagtctgggcgacagagtgagactctgtctcaaaaaaaaaaaaaaaagtgctatttgtgagatagggatctacatgagcaatttaatgtacttccagcaagggaaagtagggaatcgaaactgttagggtagacttttgtttacttgacaaaaaaaagagaagttattaggcaaaaggaattttaaatattacagttcaagttttacctgtgtagtccttgatgctctttcaggaaaaaaacactcactctcaacaaaaagggcaaagactagaatc

SEQ ID NO: 606262 - DNA, 490 bp, Homo sapiens
tctcactcatagatgggaactgaacaatgaaaacacttggacacagggagaggaacatcacacaccagggcctgtcatggggtggggggtggggggaaggatagcattgggataaataactaatgtaaatgatgggttgatgggtgaggcaagtgaatcacttgaacccaggaggtgtaggttgcagtgagccaagatcrccccactgcaccgtagtctgggcgacagagtgagactctgtctcaaaaaaaaaaaaaaaagtgctatttgtgagatagggatctacatgagcaatttaatgtacttccagcaagggaaagtagggaatcgaaactgttagggtagacttttgtttacttgacaaaaaaaagagaagttattaggcaaaaggaattttaaatattacagttcaagttttacctgtgtagtccttgatgctctttcaggaaaaaaacactcactctcaacaaaaagggcaaagactagaatc

SEQ ID NO: 606263 - DNA, 567 bp, Homo sapiens
gtcctttgcacactttctaatggggctgtttgtttgttgcttgctgatttgtgtaagttgcttctagattctgaatattaggccttcactggatctgtaggttaatgaggtcccactcatcagttgttatttttgtttaattgcgttcaaggacttagctgtaaacactttgtcaatgcctataacaacaggatgtttcctgtgattttttttttctttgagacagagtctggccctggcaccggagacacttagagtggggagagagggaggagggcaagggctgaaaaagtgcctgttgggcrctatgctcactacctgggtcaacggattcattcgttctccaaacctcagcatcacgcaatatacctttctagcaaacttgcgttatgtgcccccgcattctaaaataaaagttgaaaacaataataataatatggaactaaaaattaataggcatgcatcttagcaatataaactcaagtacaaaatggaagaggcccacgttttagagattttgaaatttaaaacacctataaatgtgattgtatatataggcatgtaggg

SEQ ID NO: 606264 - DNA, 551 bp, Homo sapiens
gatggagggagaggggctcagccagtgggggactcagccctcagaggggaggaggacaacaggggccctcccaggcatgcccatgctcttctccctcacctagggtccagaaggtgccaggtggacagagaaatggtccttgggaagctgcagggcagatatagggagaggttcaatttgatgtggagacccaagggcaaccccagactctcaccctcctcttgtccttctacccaggatccttggagggtcccaggccctcacccacaaggtccgtctcaacagctggtgagtctcagaggcctctgtccagagagtttccaaagcccgaggcctgtctcaagacatgctcagtggatctaagtcctcgttccaattctcagctgggcttgcttccacgggtgtgggagtcgggcagcgacttgggaggcaccacaggctcccaaggccctgaggctgggctggtgaggggtgagggggtcaaggctgaaggagatgttgcggggagaagccgagctgatgyggggagcagggcagccccagccctcaca

SEQ ID NO: 606265 - DNA, 544 bp, Homo sapiens
gagctcaggagttcaagaccagcctaggcaacacagtgagatgycatccctactaaaaataaaaaaaaatagccaggcatgcatgcctgtagtcccagctactcgggaggctgaagtagggaggatcttttgaacacagaagtttgatactgtagcgagccaagatcctgccactgcactctagcatgggtgacagagtaagactctgtctctctccctctctctccctctctctctctctatatatatgtgtgtatatacatatatgtgcatatatacatatatatttaatatatatttatattatttataaatatattaaatatatatgtatatatgcacatatatatatttaataaatcctacaaatcaataaagaagcacaagcaacccaacagaaaatgggcattttacacacacaaaaactacacggccaattaaaacacaaaaatatggtaaacatcatcagtgatcaggaaaatgcaaaattaaacaaagaaatattttttaatccatttgattggcaaaataacaagttgaaaca

SEQ ID NO: 606266 - DNA, 467 bp, Homo sapiens
acaggacccaatgaaatgggggtgtttaacctcatagacagtcgccatgagaatgaaaggaaagaaaagataaaagacaagacatctgggaagcccagtgtaagacacagaaagcatccagccagtacttaccatcttacttctacagacatttccaggcttagccaaatcctctgcccttctactacacagcgtcagggagtgagtcacaagattcattccaaatcaaacctcaaggaggcattgctgrgggaggtagaatactcaacctgaaactcagggtcaggatttaaatcaggaagccacagactggcacaattttagacttaagaggaagtgttaatttataatttgttaaattactatatgcaaattatagacacagtgcctgacatacagcaggcaatgaatacatgtctgccctccctctttttttaatactgaaaaatacctaaaattctcggccc

SEQ ID NO: 606267 - DNA, 519 bp, Homo sapiens
tggtaacaaataccatatggtctacaaagccgaaaatatttgccatctggctctttacagaaaagtctgccagtccatgtactagataaataatgaattaatgaaatgcatggttagagcaagaaaactatgtgggaggcttgatagccatctttatttatttgaagaattgagatgaggaaatgggctcatctcmtattctttcaaaagggaggatcaggactaagacatgaattataagagaggtaagctttggatccgtctgataaagatttccctaacttttagagcttttcaacaaagggtgggctatcttggatgatggccttctttcagttactgatagatttaaacagaggcacattattcagcatcagggatgctcaatatatgctgaacaaataaacagagagaatttagaatgacagagtaaaaatggatgactgtataccaagggtaattataaaaacaatgacctaatactgagcatgtattatctatcaggcatgttctaagcac

SEQ ID NO: 606268 - DNA, 601 bp, Homo sapiens
gtgggctatcttggatgatggccttctttcagttactgatagatttaaacagaggcacattattcagcatcagggatgctcaatatatgctgaacaaataaacagagagaatttagaatgacagagtaaaaatggatgactgtmtaccaagggtaattataaaaacaatgacctaatactgagcatgtattatctatcaggcatgttctaagcacagaatacatactatctcatttaatctttacaacattatcagtagggtggcagagactcctaatttccccccaaaatctgttctcatttcctcagtagtagaacctctgaatttgacctaagcatatggatattcctttattagcctcccttacagctagatgtggccatgggactaagttacagccaaagagatataagcaaagtggtttgcaatttctggaaagagagcttgaaggaatagagtctgcccttttcctgcccctctttcttctgctgctgattggaagaaaggcatgatagccagagctggagcagccatcttagattgtgaggtgaacatgagaatgaatgtcatgtataggaaaaaaaaaacaagatagaaacc

SEQ ID NO: 606269 - DNA, 569 bp, Homo sapiens
tttccatttattaaggaagtttagctttattgtatttaattttattttttggccatattttctcctttgagacagagtctcgctctgtcacccaggctggagtacagtggcacaatcttggctcactgcaacctctgcctcccaggttcaagcgattctcctgcctcagcctcccaagtagctggaactataggaacgtgccaccatgyatggcgaatttttgtatttttagtaaagatgaagtttcactatgttggccaggctggtctcgaactcctaacctcaagtgggtcacattttctttttatctcaggtatttatttagattttggggaatgcaataaatttgataaacatcttaacagctatttattgagataagtccagaacattttgaaacaaaaataggtcaaaaataatatttttttcattaacatctagatagtattcttatgttttagcagctgactacagtataactgcaaagcagaagttaaactcttaccttcatcctgctcccagattcacagggaaacctacaagtctgtataaatcaaagcaaaggccaa

SEQ ID NO: 606270 - DNA, 396 bp, Homo sapiens
gactcacagcccaagggaaagaccaggcaagagtaggrgtgaagtaagtagctcggtgacagcacagaacctgtgagccagggctcaggctgaggctcctggcctccctgactcttccttcaaaggcacacagtaggcaaggcactggggcactggctgcaggggagctcccaccttgcttgtgatagggtggaatggggttgggaggccttaccaatggactgggatgttctttcagaaacaagagcagttcttgctgctgtacttgccttctctcaactcaccaagtcctcaccttactgaggtcagggctgagctcaagggctgtcagactctagcttgtgctatggaattgagagaagcaatggtggagccttggtccatgagtaaaatttc

SEQ ID NO: 606271 - DNA, 556 bp, Homo sapiens
atgtgaccttttgtgtctggcttctttcacttagcataatgatttcaaggtttatcaatgttgtaatatgtataaatatttcatttctttttaataactgaataatattccattgtatgtatayaccacattttgtttattcatcagttgatggacatttggtttgtttacattttttggctgttatgactaatgttgttacgagcatttggataaaatttttgtgtgaatgtatgttttcacttctcttgggtatataactagcagtggattgttggatcatatggtaactcctatgtttagcatctggaggacattccaattgtttcctacaggggttgtaccaatttaagttcccaacagcaatgcttagggcttcaatttccccacatccttgtcaacactagttttctttcttactttttttcccccaattatctatcctagtgggtgaagtggtaccttatagttttaaataaatatatatatatatatgtatatatatatatttaaaatagagacaggggtcttgccacgttgactaggctgggcttga

SEQ ID NO: 606272 - DNA, 595 bp, Homo sapiens
acatgtgcccagtattgccattcctgacttaaaaccctaaagtggaagggaagaggaaatgaactaaattgatcgattggcttctatttattgaatcataaaatgctgtcttctccatactggttttaactgtcttctctcaattctgcttccgtatcttcacccttccacctggaatatttccctgtctgacctccttctacagacccctctaggtctaactcaagccccactttccatgaagccattcctgacaatttccagtcctcactgagcaccatataactttagrcataacatttagaagtttataaagtaagttggttacttggaattcaaaacatgtttgctcatggaaaaggtaatataaatgctgattagtatactatgctagtctataaaaatctaagtaatgacatggggaaaaacaatgtatgtgccagaatgttcatttaaaaagaaacgatcatgaactgcctggggttggtgggtggggtggtggggggagcagttacactcctagaaaatgctggaagtttggggtgggaaactggatatggaaggatgaagacaggagccaggataactggtgtgc

SEQ ID NO: 606273 - DNA, 558 bp, Homo sapiens
  misc_feature 519, 520, 521, 522, 523, 524, 525, 526, 527, 528, 529, 530,531, 532, 533, 534, 535, 536, 537, 538, 539, 540, 541, 542,543, 544, 545, 546, 547, 548, 549, 550, 551, 552, 553, 554,555, 556, 557, 558: n = A,T,C or G
ttccctttgggacttagagcccaggatttctttttaaattgatatataactgatatatattataattatacatattttggaagtgcatgtgatattttgatacaagcatacaatgtgcaatgatcaaatcagggtaattgagatattcaccacctcaaaaatttatattttctttgtgttgaaaacattacaattcttctagatactttgaaatatacaataaaatattgtttataatttccctactgtgytatcaaatactagaacttatttcttctttctactgttttttggcacctattaaccaagttttctttattaaccgccccttatcccctgctttcctttccagcttctggtaaccagcaatctactctctacctttactagatccacttttttagttcccacatagaagtacaaatatgcaatatttgtctttcccatgcctggcttatttcacttaatatagtgacctccagttttatccagaatgctgcaaattgcagaatttcactnnnnnnnnnnnnnnnnnnnnnnnnnnnnnnnnnnnnnnnn

SEQ ID NO: 606274 - DNA, 581 bp, Homo sapiens
gatgaatgagacaggggatgcttaggccactcctccaggctgccctgccttttctgaatgacctccaacactgcagttctccctagttcagtgactccccaagcacagaccacggacaaaatctcaggaagccacaagtctcatacacacttaaaaaatatacaaataagtcttcaaccagacatctggacacacctctgctgcaacgataatttactttgttgtagaataagwctcattttctgtgtctcaaattgggatccaagatgaattaattctctagaatctgtgaattattttccttgaaatggcatgcatgttggaatctgagcaacacagccctcacataaaattatacacccaactccccaagatcagaaatagcgagttagaaagggagatcctggctacccaactccaggccacaggctgtggggcgatgggaaggaaggaaaattccccagctcacatggctctttttgccagctctccacgaagcctggcttcaaacacaatgaaacccagctgaaacagcaggtctgccaagcagggggatgcagcagggtcctcagagacccagc

SEQ ID NO: 606275 - DNA, 599 bp, Homo sapiens
ttaaataatgaggttattggagtggcagcatttccttgagccagtgagagagatgttctcagatgtggaacaaaacccaccagactggggagttgagtgggggccatggtaaacagggtttttayttcatggaaataataccatgtactttatattggctgataacgcagactttaacattgccttcatgcataatttctgagcatggaatttttggtatcagttattttgtcaatagtgggaaacaaatgattaagcagacacttcaagatttggtagagagagtggccgttattattccccaaagaggggcccttgtgacccccagaacagatccagacacaattgcttctaggataattaaaattatccagagccaatatggattcgcttctaggaagcactttccctggtttcaggttctctatcccacactcagctctgcactcatgtgtccctcctacctggtggattcaggagccccattctgaaaatggaagcctttaaatttgccttacaaagcacctgcagccctggctaatcctcagatgtgaatatactatgcacctgctcatattcccttggtatttgtgttaacg

SEQ ID NO: 606276 - DNA, 599 bp, Homo sapiens
ttaaataatgaggttattggagtggcagcatttccttgagccagtgagagagatgttctcagatgtggaacaaaacccaccagactggggagttgagtgggggccatggtaaacagggtttttatttcatggaaataataccatgtactttatattggctgataacgcagactttaacattgccttcatgcataatttctgagcatggaatttttggtatcagttattttgtcaatagtgggaaacaaatgattaagcagacacttcaagatttggtagagagagtggccgttattattccccaaagaggggcccytgtgacccccagaacagatccagacacaattgcttctaggataattaaaattatccagagccaatatggattcgcttctaggaagcactttccctggtttcaggttctctatcccacactcagctctgcactcatgtgtccctcctacctggtggattcaggagccccattctgaaaatggaagcctttaaatttgccttacaaagcacctgcagccctggctaatcctcagatgtgaatatactatgcacctgctcatattcccttggtatttgtgttaacg

SEQ ID NO: 606277 - DNA, 606 bp, Homo sapiens
attttatctcttttagggatattttcttaattgcagaagaatctaaaaatacaattggcatacttggtatgtcctgtgccttgtttagaaagaccgggagaaagaatgcaattaaactgtcaaaatgtaattgttgctcatatttaattgaaagtggcttattcccatttactgttcatggttttagagttacaagcaaagaaagttgccaggataactggtagttacaaaatgaagactggaggctctgagtgcatggtagcagctgagaagctgctactctcaaattagtttgcttgaataacacgatatgctcctcaatttcctagatacctgaagcacagaattagccagtttggggcacaatgggccattttgatttaaaaaatacacactgaactggatagtaactccatatccccccagaacaagtgtgtgygtgtgtgcgtgtgtgtgtatgtgtatgggtttctgctgtttgtgtggctctctgcctctttataatttaaggatctatctaaacagaatgaacactctcaggcagttctttctaagtgaaaagtcacccatccacactgaatggttatctaagtgccatttattctg

SEQ ID NO: 606278 - DNA, 573 bp, Homo sapiens
gggctagattcattgatcaagccatttcttttttcatagttttttcctttttatttaagaaaatattgcatcctagaaggacacaatattacctatgtggtattattgccccaaatgcataatctgtgtctaagcatgaggaaacatcaaacaaacccaaaatgagggaygttctgcaaaataactggcatataattttcaaaaatgtcaagatcaagaaatgcaaaaagtgtcaagttactatttcacataaaagggaactatgaatgttgaatttcttgatttggataagtatataattcacatatttaggggtaaagaggtgcaatgtctccaattactctaaatgagaggaggaaggagaaaattacagagcacatggggtctaacgtactgaattgatgaatctcggcacagggttagggtttatgggtgtttcttgtactatcttagcaccttctctgcaagtttaaaattacattaaaatacaaagttaaaaaatacagactcatttcagtaattttggaaaattactgctttagaaaagcacatggcagctgatatggtttggct

SEQ ID NO: 606279 - DNA, 573 bp, Homo sapiens
gggctagattcattgatcaagccatttcttttttcatagttttttcctttttatttaagaaaatattgcatcctagaaggacacaatattacctatgtggtattattgccccaaatgcataatctgtgtctaagcatgaggaaacatcaaacaaacccaaaatgagggacgttctgcaaaataactggcatataattttcaaaaatgtcaagatcaagaaatgcaaaaagtgtcaagttactatttcacataaaagggaactatgaatgttgaatttcttgatttggataagtatataattcacatatttaggggtaaagaggtgcaatgtctccaattactctaaatgagaggaggaaggagaaaattacagagcacatggggtctaacgtactgaattgatgaatctcggcacagggttagggtttatgggtgtttcttgtactatcttagcaccttctctgcaagtttaaaattacattaaaawacaaagttaaaaaatacagactcatttcagtaattttggaaaattactgctttagaaaagcacatggcagctgatatggtttggct

SEQ ID NO: 606280 - DNA, 586 bp, Homo sapiens
gtgtgggcatttgacacagagttttggcagtggctgccaatggcttttaccataacagccaggtgctgatcatgtcctgacactcacagactctggaagcagtccccacaccrtcctctgactacagacgtctcttttggtctttgcttttctttgaaaatcaataggaatgtgaaactattttaagttcctgatcctctctcagagccattcttaaagccaggtttctcagtactatcaatgttttgggctggatcattctttttggggtgccttgtcattgtaggatatttagcagcacctctggcctctccccacaagatgcgaggatcatccccacctatttttcccccagatattgccaagtgtcccagtttgagaaccattgctctaaaagtaggtacaagagaggggatgggaccccttccatggcctcctttcctcattggaatgggtggggttggctcaaagggcaaaaagagtcctgagtctagggcttaatttctgactctgcttcctcaatggttcaatgggtttagtattaatatctgtcctgtctacctcttaggaatttaaatgatgaatt

SEQ ID NO: 606281 - DNA, 586 bp, Homo sapiens
gtgtgggcatttgacacagagttttggcagtggctgccaatggcttttaccataacagccaggtgctgatcatgtcctgacactcacagactctggaagcagtccccacaccatcctctgactacagacgtctcttttggtctttgcttttctttgaaaatcaataggaatgtgaaactattttaagttcctgatcctctctcagagccattcttaaagccaggtttctcagtactatcaatgttttgggctggatcattctttttggggtgccttgtcattgtaggatrtttagcagcacctctggcctctccccacaagatgcgaggatcatccccacctatttttcccccagatattgccaagtgtcccagtttgagaaccattgctctaaaagtaggtacaagagaggggatgggaccccttccatggcctcctttcctcattggaatgggtggggttggctcaaagggcaaaaagagtcctgagtctagggcttaatttctgactctgcttcctcaatggttcaatgggtttagtattaatatctgtcctgtctacctcttaggaatttaaatgatgaatt

SEQ ID NO: 606282 - DNA, 586 bp, Homo sapiens
gtgtgggcatttgacacagagttttggcagtggctgccaatggcttttaccataacagccaggtgctgatcatgtcctgacactcacagactctggaagcagtccccacaccatcctctgactacagacgtctcttttggtctttgcttttctttgaaaatcaataggaatgtgaaactattttaagttcctgatcctctctcagagccattcttaaagccaggtttctcagtactatcaatgttttgggctggatcattctttttggggtgccttgtcattgtaggatatttagcagcacctctggcctctccccacaagatgcgaggatcatccccacctatttttcccccagatattgccaagtgtcccagtttgagaaccattgctctaaaagtaggtacaagagaggggatgggaccccttccatggcctcctttcctcattggaatgggtggggttggctcaaagggcaaaaagagtcctgagwctagggcttaatttctgactctgcttcctcaatggttcaatgggtttagtattaatatctgtcctgtctacctcttaggaatttaaatgatgaatt

SEQ ID NO: 606283 - DNA, 603 bp, Homo sapiens
gcagctgctttgtatgaaaaaagtatgaatatgtggttttggttaaattatggaattttaaaacattgtagtacctttagaaaaagacaactatgcctaaaaatcttattttaaaaatgtgagcatataatgaacttcaatgcttcgatacatggtycggccagactaattcaaatgaatttacattggtcacaatatttacatttaaaaggtgtaattttctgaatgcaataatgatgtcaaaaggagttttgaggtccttgggggtattttttccaacactatctttgtgaagttttgctcaagtgtctttcttgatagttgtaaaagaaatggtataaccctcacagggtcacagctctgacatccctgtttcactggagggagaacatgtggcctctgcctttagggtgtttagagggcaggagaggcaagccagaggaaacagacactccaggctccactctgctccattatgggaccacattctcaaaaacactcgtgtgtgtgtttgtgtgtgtgtgttgtgttgttgttgttctttttaacctatgttttttggaatttcgtgatgagattgcttagtttaaccgaaacttagaa

SEQ ID NO: 606284 - DNA, 521 bp, Homo sapiens
ggaccacattctcaaaaacactcgtgtgtgtgtttgtgtgtgtgtgttgtgttgttgttgttctttttaacctatgttttttggaatttcrtgatgagattgcttagtttaaccgaaacttagaatgatttcctcaatggccaagaacgataaaactagattcagttgtgagttctggctttcaaatggaagctggcttgcctagagatagataggtttgcttatctgtcaatgggccagtgaacctggcccaaatgcaaatgaggcaaagcaaaacaaaacaaaaacaatgatagagaaaggacagagatatagatcaattggacagaatatagggtgcagaaacagacccgcgcatacatggttgattgatttttttgacaaaggtgcaaaggcaattccatggtgagaggatggtctccttaatgaatggtgctagagcaattcaatatccatgtactaaaaatgaagcttaatccaggcctcacattccatacaaaactgactcaaaacaaattaca

SEQ ID NO: 606285 - DNA, 521 bp, Homo sapiens
ggaccacattctcaaaaacactcgtgtgtgtgtttgtgtgtgtgtgttgtgttgttgttgttctttttaacctatgttttttggaatttcgtgrtgagattgcttagtttaaccgaaacttagaatgatttcctcaatggccaagaacgataaaactagattcagttgtgagttctggctttcaaatggaagctggcttgcctagagatagataggtttgcttatctgtcaatgggccagtgaacctggcccaaatgcaaatgaggcaaagcaaaacaaaacaaaaacaatgatagagaaaggacagagatatagatcaattggacagaatatagggtgcagaaacagacccgcgcatacatggttgattgatttttttgacaaaggtgcaaaggcaattccatggtgagaggatggtctccttaatgaatggtgctagagcaattcaatatccatgtactaaaaatgaagcttaatccaggcctcacattccatacaaaactgactcaaaacaaattaca

SEQ ID NO: 606286 - DNA, 557 bp, Homo sapiens
ggttgtcagggaggcgacatcgtgcagccacggcactttgtcttggagttatttctctattagatgcttgcttgtcttcatcacgaagacttctggctatttaagaaaacccagaccagggaagatatgtctgttctatcccagcatttaagacattaaaagcagatgcatcacttaggaaaatgagtcttttattcatagaggcatcacaaaagcactttttgccacagaaaaataaaaacagatcaaaaaatgaacttttttcgagggtgagagttgactttgctttagctaaaagagatacttcatatatccagtggttcccagattttgtgaagcaataaaattatttttaaaaattggkgtatggagctctatgtaggattggcaattctttattttgccaaatcaaatcattcaaatcttttcagaaatttatatattgtcttcaacattctataaagaaaggacatgttaatacacacatgagattttaaaagcacataaaattttaaaaagaacataatctcagggaaaaaagcattacttcctagtag

SEQ ID NO: 606287 - DNA, 586 bp, Homo sapiens
accttgttttgttaggcctcaaaggaaacttaaaagagtttgagcattgcagttcttctccgtagaagattggaagtacaaactcttccttatttgaaaaagcagagttgattactgtatttagaaagaactccctgactttctctgtggatattctttatagatacagtcttaaactcaagcttagaaatttgttttcatttatgtgtacagtcccatggaaggtggaattgcgagtcagactatattactagcatcagggcatcatgttattttcccagaactttgctggaaattttccaagacggtaacgagaaaactatttacaacaaggcccttttgactctgatttctctactctaaattacaagaggtccagggacaatccttcccaaggcacagtccaggaacagatcgagaaggygatgtccttgctatatttcatttcagttactgatactcccctggtttgtctgccttcttggacagatgtttctctgggcaaagcagccctggctgatgaaatgatttctaagtctcttccatcagcaggatcaggggacaggagactggttactcttcagcc

SEQ ID NO: 606288 - DNA, 453 bp, Homo sapiens
cttaggctttggatttttcaaaaattcagggctgggtgcagtggctgaggtggtaggattgctgggactacaggtgcacagagcatggtggtgcgtgcctatagtcccagctacttgggatgctaaggtcggaggatcccttgggcccaggaggtcaaggttacagtgagcctggattgcaccactgcactccagcctgggcaacagggcaagattctatctctggaaaaaaaatagggtattaaatagggtttgttgctctttattttgtaatgaataacattcaacacctcccccccccccccacatttcataaaagaaggaacatttttaaacatgcaaaagaaaacagtaaggatataatttcaatagaaaagycaatcctttaagtggaatcagtttatgtttataaaaaacatactgtccttcatttacccttttcgttgaagattc

SEQ ID NO: 606289 - DNA, 655 bp, Homo sapiens
ataggctccaagtagacctagttaggtgggactttcacaaagagtgggataacagcctttgaaaaaaattataaaggaaaataaatagccatgtgttaaagtcatggggctgcagaacaataataataataactataataagcactagaaagcagatgctaatgggaataaatgcagtcatgacccactctggtttarctgtttctgtcaggaccggtgcctgtgtattaatgatgagaggagaagcacttcatgcccagaatgttgagggaggatgttttctggtaatagccagttgattttacttgctagctgaacagaggagaacagaaacaatattaatgacaataataaaactaataatgggtagcacttaccgggtgcttactatgtgccaagaactgttttgagtgtgttacctttgtcttctctttgagtttccacagtctttcatgggtgaggaaattgaggtctggagatgtcaagtcactttccaaggcacacaaagcttaatcttggcaagctgggatcaaaacatgcattgtcccagggcagggacaaactcattttggaaaagtgctttagggcacaggacctgttcacttcatcatctcagtcattggccagggaaactttcaagttcaagcttttaagt

SEQ ID NO: 606290 - DNA, 655 bp, Homo sapiens
ataggctccaagtagacctagttaggtgggactttcacaaagagtgggataacagcctttgaaaaaaattataaaggaaaataaatagccatgtgttaaagtcatggggctgcagaacaataataataataactataataagcactagaaagcagatgctaatgggaataaatgcagtcatgacccactctggtttaactgtttctgtcaggaccggtgcctgtgtattaatgatkagaggagaagcacttcatgcccagaatgttgagggaggatgttttctggtaatagccagttgattttacttgctagctgaacagaggagaacagaaacaatattaatgacaataataaaactaataatgggtagcacttaccgggtgcttactatgtgccaagaactgttttgagtgtgttacctttgtcttctctttgagtttccacagtctttcatgggtgaggaaattgaggtctggagatgtcaagtcactttccaaggcacacaaagcttaatcttggcaagctgggatcaaaacatgcattgtcccagggcagggacaaactcattttggaaaagtgctttagggcacaggacctgttcacttcatcatctcagtcattggccagggaaactttcaagttcaagcttttaagt

SEQ ID NO: 606291 - DNA, 597 bp, Homo sapiens
aatattaatgacaataataaaactaataatgggtagcacttaccgggtgcttactatgtgccaagaactgttttgagtgtgttacctttgtcttctctttgagtttccacagtctttcatgggtgaggaaattgaggtctggagatgtcaagtcactttccaaggcacacaaagcttaatcttggcaagctgggatcaaaacatgcattgtcccagggcagggacaaactcattttggaaaagtgctttagggcacaggacctgttcacttcatcatcycagtcattggccagggaaactttcaagttcaagcttttaagttcaaagcttgaagcaatgaggctctcgttactccctgcctgaggacagagcccagcacacctacttctcgtgtgggtagcactgaacattctccaaactcatagttttcgagcatttcatctggaatttatttttgcttatgatgtgagttttgagatatagctttccatccagccctgatagccagccagttattcctgaatcatttcatatatgaatggtcctcttcacatggaattaaaatgccacctttgtatgtattttgctcccatatag

SEQ ID NO: 606292 - DNA, 589 bp, Homo sapiens
atgtaaaggaaagagtggaaataaaggacaaaaccaataaagacccaaaccaaaagcacatgtcttgaaggggagcacactaggccagcaatggctgttaaacagatgaatccactgaaatgtaaaatattctgcaaagttttggcagctttgaaatgctacactttctagctctcatctgttaatcatctgaggggactttcacagctcaccagaagggactgtcttctttctctacattcccacaactgcaagtgcatatgattcagcaactgaagtgataggatgcaaatacagccatcaaagcactaaatgaagaaaaaaataactgcaggaagacagagagagagagaaagagagctatttttacccaccttcacttctaactgaatctcactgtatatatttttcagcatataagctcttgagttagtttcaaggtaagtcagaaacctctggtcatayagatgatataatgccaggaaaccaaaatgacataatgcgaagaattaaggttctacacaaaaatatttgaagattgttttaggaaatttatctcctttatgtagtattttttaaaagcaaaaga

SEQ ID NO: 606293 - DNA, 547 bp, Homo sapiens
aatggtaaatgagcattggtttcgactgagagtcaccagctgcattagcccctaacaaggcattagtcagcctatcctctggagctttgaagccagacattgacttctcttccctagctatgaaagtcctagatggcatcttcttccaataaaaggctgttgagtatagccacctccatcaatgatctcagcaagatcttctggataacttgctgctgcttctacctcataacttgtggcttcaccttgcacttttatattatggagatggcttatttccttaaaccttacaatccaatgtctgctagcttcaaacttttcttgrgcaatttcctaccctctctcagcattcataaaattgaagagagttagggtcttgatctggattaggctttggcttaaaggaatgttctggctggtttgatcttctatccagaccactaaaactttctccatatcagcaagaaggctgttttgctttcttatcattcttgtgttcactggagtagcacttttaactcccttcaaggacttttattttgcattc

SEQ ID NO: 606294 - DNA, 592 bp, Homo sapiens
tatcgcagcaaggggcttgcctttggagttgaaaatgaccccaaagttgcacacatggcttgcaataacatcccattgacctaaatgtagtcactcaaggtgcctgagaaatgcagtctagtggggcagctacaactcccttcctatgaaagaagggaagattgctctttggtggataactagttgtctcatcaaaaatagctacatcagatggctgtagtgagaactaagtcatgtaatatgtataacrtgcaaagcataggacctgccactccatctgcatttgagaaatgggagctattatttaatcatttcaaaagaattcttttagggtgaatgttataataatgtaatcagagtgcacattttcttggtactttagtggggcagggtggtatggaaaaaataaaacaactcagctataaatgaaatgtttggacaagattcaggaagtatataacctagaagccaaaagcctttcgtaggatgtgacacctgctccaggtacctcccaaggtggagttgtggatgaagcatcgactcagatgaggtgtccctcagatgaggcctaggatataaggattttgcaatg

SEQ ID NO: 606295 - DNA, 522 bp, Homo sapiens
ccacttatcaggagaagggtgatcaagaagtgagaagttggaagaacctccttttttaaaaagaatttttggtttgtttttccaaatttctttatatattgatttatttaacagttattttctgaatcttaagctaaaggatacgcatatgttatctcgttccctccttgcttgctactccagctacgaagttgccatttttcataggaataacctgggactcagggaagtcaaataacttgcttacggtcactcagctcctaagtggcagagcttctgtgatcttttcactgtagtagctattttgctacagtaggaagtagcgaagttcagctccattgttcactatctctatgagattaaaaatgtttcttaatatctctaagcctcacttwtctcatctgcagatagggttgtaaatacctagctgagggactttttatggaaattgaattaatttacagacatgaaagtatttagctcagcacctaatccactgtaggtatactgcaagttttctgg

SEQ ID NO: 606296 - DNA, 556 bp, Homo sapiens
ggcagctaggtgtggtcatgtgactaagttctggtctttaagamgtaagagggttttctggaaaatatccttaggaggaagaacatgccctttccatccccttccctccactccttcttctttttctctggatagcgctaaagatgtgatggctggagctgtggcagccagttaggaccatgtggaagaaggcactgctggcaatgacagagcaacaaagtatgtgaagcccgggattctgatgatcatggaggtgaggcgctagttctggactgttgacctgtggacttcatgtatgtaaaagacaaatacatttctttctcatcaaagtcactattattttcagtttcttgttgctaacagttgaacctaatcctaattggtgtacagacagaaactctaccatgctagggggtaaaagaccacatgaccagaagcctggaggtaggattttatccaccacccatcactcatcttgagaatcacagcactcacctgctttcccatctataaaaggggcagaaaaaatggttcttaatttattttgagttacaga

SEQ ID NO: 606297 - DNA, 556 bp, Homo sapiens
ggcagctaggtgtggtcatgtgactaagttctggtctttaagaagtaagagggttttctggaaaatatccttaggaggaagaacatgccctttccatccccttccctccactccttcttctttttctctggatagygctaaagatgtgatggctggagctgtggcagccagttaggaccatgtggaagaaggcactgctggcaatgacagagcaacaaagtatgtgaagcccgggattctgatgatcatggaggtgaggcgctagttctggactgttgacctgtggacttcatgtatgtaaaagacaaatacatttctttctcatcaaagtcactattattttcagtttcttgttgctaacagttgaacctaatcctaattggtgtacagacagaaactctaccatgctagggggtaaaagaccacatgaccagaagcctggaggtaggattttatccaccacccatcactcatcttgagaatcacagcactcacctgctttcccatctataaaaggggcagaaaaaatggttcttaatttattttgagttacaga

SEQ ID NO: 606298 - DNA, 580 bp, Homo sapiens
actattattttcagtttcttgttgctaacagttgaacctaatcctaattggtgtacagacagaaactctaccatgctagggggtaaaagaccacatgaccagaagcctggaggtaggattttatccaccacccatcactcatcttgagaatcacagcactcacctgctttcccatctataaaaggggcagaaaaaatggttcttaatttattttgagttacagaactctgaaaaatgttgcttaaatctgtgggtcatctcctaaaaaaatacagatagatacaaatatgcaaagttttgcagaggatatcaggagattccttggagacctctgtagcgagttgatgaattccttattggtctaagcaccagattagaaccagaactcaagaaaatctttcagctttaggaamaaatcaacactctcattttttggttgtacattattgttttaaaatacttttcaattcctttcaactaggaacaaaatcaaaacacatctgaaaaaagacacaatcccaaatctcctaacagagtacatttctgggtcttatatctatataatatatacccatatata

SEQ ID NO: 606299 - DNA, 574 bp, Homo sapiens
ctttgcccctttttgtatcctgctgaaagctgtggcaggggttgagtgtgaggaggcatggggacatgaatgagtttcccctctgcagcatttgccttgagtggaggatggggtaaacttcccagtgtagcccagaaaaaaatctagctcacagtggctgaagactgttgacttaacagctatacaggcacctgcagacacaggttgtatgacgggagcgcatctgttgaatgctgttgcagttatgtcacaggcaaaataggacttactgggctagtctgtgccctggtcactgtgagtgcatcattttagaacatcattattttggaaaaaaggaaggaccacattctaaattccaaacagctgactcatgagcggacttttggaagccaccaaccctttgtcattgagagctgyctgatcgcagggtcacacagaggtgtataaaggccggacttcaggcagtcatgtgagcatgctcacagaggccgagtcgtgtggcaagcctcgtggagaagtctgcaggcttcttgctcctaagaaggtaaggagcagctcaaggcggtatacaata

SEQ ID NO: 606300 - DNA, 550 bp, Homo sapiens
cacagaggccgagtcgtgtggcaagcctcgtggagaagtctgcaggcttcttgctcctaagaaggtaaggagcagctcaaggcggtatacaataaagccccaggtgaagggactcacaatacagttggaagatttcagaaggagaggtcactgccagctggtagggccagggaaggctcctgagaggaaccagaatggggccttgaagkttgggtcaaatttcaccgggggaggggggcattccaggcgggcacagaagtgggctggtcaaaggcaggtttcaggacggcgactggccaggccggctggaaaggagggtaatatgaccagcttgtctcctgcctgtggtcttaattgaaccagtcaagctttcaaaatgaacagttgatcatttgattaagaagggcctttgactctttcaagacccgcggagactgatttttatcaaagtggatcagaaaggtttgcgtggaggaatgctgaccagatttgggagggaggttccttgccgctcttacgggccagcctgaacgtctctttctcaatgaag

SEQ ID NO: 606301 - DNA, 550 bp, Homo sapiens
cacagaggccgagtcgtgtggcaagcctcgtggagaagtctgcaggcttcttgctcctaagaaggtaaggagcagctcaaggcggtatacaataaagccccaggtgaagggactcacaatacagttggaagatttcagaaggagaggtcactgccagctggtagggccagggaaggctcctgagaggaaccagaatggggccttgaagtttgggtcaaatttcaccgggggaggggggcattccaggcgggcacagaagtgggctggtcaaaggcaggtttcaggacggcractggccaggccggctggaaaggagggtaatatgaccagcttgtctcctgcctgtggtcttaattgaaccagtcaagctttcaaaatgaacagttgatcatttgattaagaagggcctttgactctttcaagacccgcggagactgatttttatcaaagtggatcagaaaggtttgcgtggaggaatgctgaccagatttgggagggaggttccttgccgctcttacgggccagcctgaacgtctctttctcaatgaag

SEQ ID NO: 606302 - DNA, 550 bp, Homo sapiens
cacagaggccgagtcgtgtggcaagcctcgtggagaagtctgcaggcttcttgctcctaagaaggtaaggagcagctcaaggcggtatacaataaagccccaggtgaagggactcacaatacagttggaagatttcagaaggagaggtcactgccagctggtagggccagggaaggctcctgagaggaaccagaatggggccttgaagtttgggtcaaatttcaccgggggaggggggcattccaggcgggcacagaagtgggctggtcaaaggcaggtttcaggacggcgactggccaggccggctggaaaggagggtaatatgaccagcytgtctcctgcctgtggtcttaattgaaccagtcaagctttcaaaatgaacagttgatcatttgattaagaagggcctttgactctttcaagacccgcggagactgatttttatcaaagtggatcagaaaggtttgcgtggaggaatgctgaccagatttgggagggaggttccttgccgctcttacgggccagcctgaacgtctctttctcaatgaag

SEQ ID NO: 606303 - DNA, 596 bp, Homo sapiens
tacctctcagataatgagaaaaagcacctggctcaggagagtgttttagttagtgcttgctatgaaacaaaccacctgcaaacamaggggcttcagcaactaccatttgtttatgattcaaggggtcagcaaattaggctgggctcagcaggtcagttcttctttcctaggtaagcttcctcatgcatctatagtcagctgcaggtcaggtagggtggctttgcttctggaggttagctggctattagctggacagtgaggacaattgggccatttatgtcacatcatccagcaggctaggctgcacttgtttaggtggtggcagcaagattcagagagagagagagagaaagagagagagacagagactataaaggcatgaaaaatgcctcttgagacctaggctcagaattggtgcaatattgcttctgctacatttcacttgctaaagcaagtcacaaggccaacctagattcagaaatacattctgcaaaaaatatactccacctctttagggagggagctgcatagtcacattgcaaagaggcatggatattggggagagttggaaaattggggctattttgcaaactact

SEQ ID NO: 606304 - DNA, 562 bp, Homo sapiens
gagtgacccattttcctgtgcttcgtggaggtcattgcaatgggtttcatcaaccagcaggcttggaaatgagccatagggttagaaggagctttttctaccactctagactgctttcacggcsgtgcagcttatgtcaggattggggagagggtgaaaggatgctgccatgatgacaccacgttcagaatgatggccatggagacgggtggagcagtggaacacatgttcttcacccgactcccgcgggggacattggctgcatcacaggaagtagaagtgtttttgtttgtttgcttagtttttgtcgtggtaaatgcaaccttgagtttctaggtgtccacaggacctttggaagattcatgacagcaacaaggtgttgtgaagctcctgctctggtgaggccccagctcccatcagaggatcagaaggttcccaagtaccccaggacaagaagtgagctgtgtggttagggacccttgtctgcaagaacttcttaaagagtctgatcttgtattttgagaagacatcgtcataggatttctgtaccacccatctagtt

SEQ ID NO: 606305 - DNA, 528 bp, Homo sapiens
tgtacagacaacgaactaattaactagctgtcccagtgtaaattgtattgtcagtgttggtagcttttgaatcaatcaagggtcaatcaagtaaggtcaatgctaaaagcacaggtttgggaccagatgttccttgattataatcttgcttcattgttctcggckgtgtgttcttgatcaagtcacttaaccactctgagcccttgtgtgcatgtctgtgcagtaaaggataatgccaacctggcagggctgtcagagagggtagataggaggcagcctaggcttcctgaactgcccagtggagacccagtctctgctggtcccacctggccctcagatccctggttcttcgttctcatccttctggtttcagctgaattgtcagctcttctgatagaccctccctgaccacccacataatgtgccgtggcttctcttcccacctccaattactttcccatctctttctgtagtttggttccttcccaaaatgtgacaccatctgtgattctctcgctagtttttgtt

SEQ ID NO: 606306 - DNA, 551 bp, Homo sapiens
tatatttttgagaatcttgaggccagacacactgtctttcttgggtagaattgtaggattttctcttacctaaaattaaaatataactaccagaatattactacatattggctattttaattaatactgcctgatcttcatgagaccctttggatctaaagacattttttagttttaggaagttttcttctattacttgttagattgttgtattttccatctttttcctatctccattgacattcctaatagataataattgagtctattaaatcattaaaaattattttaaaatatttatctcctygctctgggaaaatttcttgaccttattttgtatttcattgatttaaaattttacaagtattcaagctgctattgtttgctttcaattcagtaattgtacttctcatcattttataaaatttccagatctcagatgttctttttaaattattgcctgctcttgatatggtgttgatacaaattagacaattcctaaaagcttctcctgctttttgtagtatcagtttttcaagaaagcatattct

SEQ ID NO: 606307 - DNA, 583 bp, Homo sapiens
caggaagaactgagccttacttagggtgatttttacttcaaggacgctgcaattcaccatatcatcatattactctgtccacatcagttgttggaagatgaagatccaaatctgtcacccactcttasaagtaactacagggggctccgtagcattcatcttatgttttgcttcattcctggctcaatcttacttcctctttaagtggaggggcacaaaaggttgtctaaaaatcactctgggtattcatctcagatagtctggcagagactgggcgtcccccaaatttcccacctccagtgggaggggttttaccgacttaactgatcacagcctctcctccattagaagaggctacaatcccccaccggcccccacagcttccaagtgctgggtggtggcattttccagcaattgctacaaacagttaaagtctgagctcagccatatacatagtctgtgtcttcccaagctctgtaggaccgtgcccatgcttccatgggaagaaggcagaccagaagggtcccttccctggaacacagacccactgtgtgctcagcagccttgcccaggccctgacact

SEQ ID NO: 606308 - DNA, 586 bp, Homo sapiens
tttgtaaatccccccacccccagtacctttctttactccatatggcatgacgttgaggtatttgcttttcttcctgttttatagctcacctaattttcttatttaatcagattattttccattgtagtgtgtccaattttgcaagcttcattaaaactctttaggaaggaaagcaacaaggtaccatttggattaatcaaaataagtaaagcatgggagaatgggctccccttctcctgcccactaaggcctcacttcccggaggatagccggagaggaacaagggggctctctctgttcattgaagctcaggtgacaagacttcatggtctaccartcagcccaaatgcccgccaaccttcagactctctgtggttggacaatcttgcttcaatcagaagtaaggaactaatagcataatattcaggatgctgagtttgtttttgtctgcccatggaaagagggcaagagggaaggcctctcctctagccttctaactacccccaaccatattcccatcagaagcctggcatgtaggagaggttccattaatgctgtctgttatgattagtacttgttatgcttt

SEQ ID NO: 606309 - DNA, 586 bp, Homo sapiens
tttgtaaatccccccacccccagtacctttctttactccatatggcatgacgttgaggtatttgcttttcttcctgttttatagctcacctaattttcttatttaatcagattattttccattgtagtgtgtccaattttgcaagcttcattaaaactctttaggaaggaaagcaacaaggtaccatttggattaatcaaaataagtaaagcatgggagaatgggctccccttctcctgcccactaaggcctcacttcccggaggatagccggagaggaacaagggggctctctctgttcattgaagctcaggtgacaagacttcatggtctaccaatcagcccaaatgcccgccaaccttcagactctctgtggttggacaatcttgcttcaatcagaagtaaggaactaatagcataatattcrggatgctgagtttgtttttgtctgcccatggaaagagggcaagagggaaggcctctcctctagccttctaactacccccaaccatattcccatcagaagcctggcatgtaggagaggttccattaatgctgtctgttatgattagtacttgttatgcttt

SEQ ID NO: 606310 - DNA, 521 bp, Homo sapiens
ccatcttgctttgtgtacctgatggctctataagtcagcgaatctgaatctacttcartcattttctgtgatatttacacatacccacatatatatcatttgcacatttcagatcttattccacatgatatttttgtgcatagctttgcttcaaacttgcttcctctcactagtttccctaccacccacctccatgaattcaggttcacagcctgtttcatgtccttctctcctctatgctgggctcatatagtcatatacagacacacaaataaaaacacacattcaacatatagacatattttatttttgagacaggatctcacgctgttgcccaagctggagcctagtggtgcaatcagggctcactgcagcctccacctccctcagctcaggtgatcctcccacctcagcctcccaagtagctgggaccatagccatgcaccaccacacctagctaagacatattttatatgcatcactgcacctcgcttttctcacccaccaatatgtcacagaaa

SEQ ID NO: 606311 - DNA, 521 bp, Homo sapiens
ccatcttgctttgtgtacctgatggctctataagtcagcgaatctgaatctacttcaatcattttctgtgatatttacacatacccacatatatatcatttgcacatttcagatcttattccacatgatatttttgtgcatagctttgcttcaaacttgcttcctctcactagtttccctaccacccacctccatgaattcaggttcacagcctgtttcatgtccttctctcctctatgctgggctcatatagtcatatacagacacacaaataaaaacacacattcaacatatagacatattttatttttgagacaggatctcacgctgttgcccaagctggagcctagtggtgcaatcagggctcactgcagcctccacctccctcagctcaggtgatcctcccacctcagcctcccaagtagctgggaccatagccatgcaccaccacacctagctaagacatattttatatgcatcactgcacctygcttttctcacccaccaatatgtcacagaaa

SEQ ID NO: 606312 - DNA, 604 bp, Homo sapiens
aacaatcagtatgtgagatgttgcagattgccaaggtagagaataaaatagaccgtggacttgtgttttgcctcttgaatcttccatctaaaagcgctatatgatactttctgctcacatttcgttggccaaataaaaaaagaaaaatcacatgaccactcaacttgaatcaaggcaatgagaatatttgttacaaatattttctgatgacaactagagttacaatgtacctgttagtatacttttcaggatttttttttctgaggattagtgactttgactagtaatttatattcttcattttgtgaaaggattcctaggagcttctccaaagtgtatgaatgtatgctgtaatacatcttgttaaagcagagtatacaatttgtactgattactagtaatattcattttagggacaaaaatcttaattatagtcattttttgagctatagttttgacatggatttttaaaatgtttgaaaggagcctttaatttaatattttaayagtaggaaagtattgttaatttttgaacacaaaacctataaaatgaacccttactagtttactgaaccagtgagttttattttttcttttgagacag

SEQ ID NO: 606313 - DNA, 568 bp, Homo sapiens
taatcagcagtttgcttctgtttcaatttcggtgaaattttagtgaaaacttcagtgatraatgactgatagccctcaatctctttatcattctaattttacatgagattactgtttcctttatgtatgcttcatctttgcatattgtgttgcttacatgatatcatgactttcagcattaattctaaatatttccttatctttattagacataactataaaggcttaagcaacactctttctatgactttcatacctctgctcacgggaacttctacttttttttttttttttgttcaatgtactctgagacatccttgctgctgccttctctctacttaatttgcttttctggacatttctcttgactacctcaactttgttcaccatgtcttcacatttcttgatcttttttactggaagaaggcagttgacatcttgtgaacatgacctcaaaaatattctactttgtttgcttaaagatcccagactctgggacaattgctaggctgccatatgaaaaacttgcctgaatataaacattttaggtcacttttataaaatgctt

SEQ ID NO: 606314 - DNA, 568 bp, Homo sapiens
taatcagcagtttgcttctgtttcaatttcggtgaaattttagtgaaaacttcagtgatgaatgactgatagccctcaatctctttatcattctaattttacatgagattactgtttcctttatgtatgcttcatctttgcayattgtgttgcttacatgatatcatgactttcagcattaattctaaatatttccttatctttattagacataactataaaggcttaagcaacactctttctatgactttcatacctctgctcacgggaacttctacttttttttttttttttgttcaatgtactctgagacatccttgctgctgccttctctctacttaatttgcttttctggacatttctcttgactacctcaactttgttcaccatgtcttcacatttcttgatcttttttactggaagaaggcagttgacatcttgtgaacatgacctcaaaaatattctactttgtttgcttaaagatcccagactctgggacaattgctaggctgccatatgaaaaacttgcctgaatataaacattttaggtcacttttataaaatgctt

SEQ ID NO: 606315 - DNA, 568 bp, Homo sapiens
taatcagcagtttgcttctgtttcaatttcggtgaaattttagtgaaaacttcagtgatgaatgactgatagccctcaatctctttatcattctaattttacatgagattactgtttcctttatgtatgcttcatctttgcatattgtgttgcttacatgatatcatgactttcagcattaattctaaatatttccttatctttattagacataactataaaggcttaarcaacactctttctatgactttcatacctctgctcacgggaacttctacttttttttttttttttgttcaatgtactctgagacatccttgctgctgccttctctctacttaatttgcttttctggacatttctcttgactacctcaactttgttcaccatgtcttcacatttcttgatcttttttactggaagaaggcagttgacatcttgtgaacatgacctcaaaaatattctactttgtttgcttaaagatcccagactctgggacaattgctaggctgccatatgaaaaacttgcctgaatataaacattttaggtcacttttataaaatgctt

SEQ ID NO: 606316 - DNA, 568 bp, Homo sapiens
taatcagcagtttgcttctgtttcaatttcggtgaaattttagtgaaaacttcagtgatgaatgactgatagccctcaatctctttatcattctaattttacatgagattactgtttcctttatgtatgcttcatctttgcatattgtgttgcttacatgatatcatgactttcagcattaattctaaatatttccttatctttattagacataactataaaggcttaagcaacactctttctatgactttcatacctctgctcacgggaacttctacttttttttttttttttgktcaatgtactctgagacatccttgctgctgccttctctctacttaatttgcttttctggacatttctcttgactacctcaactttgttcaccatgtcttcacatttcttgatcttttttactggaagaaggcagttgacatcttgtgaacatgacctcaaaaatattctactttgtttgcttaaagatcccagactctgggacaattgctaggctgccatatgaaaaacttgcctgaatataaacattttaggtcacttttataaaatgctt

SEQ ID NO: 606317 - DNA, 463 bp, Homo sapiens
tcctccccacactaatgccagtaaccagcaattcttcattctcaggtacgcaacgaaggtccgaactgtgatgttcagataagctgagtcacagagttcaaacaaggccacagagtacgccatgtgaatgtgtgcagaaacattttataaaaaataatacataggatgagagaatagctattgctcacagacttaggattgaattctggccctgccacttactagctgttttgttcagagcacctacctcttgggayatgtacatatatattgcatataaaggggtgagcatagagcattgcctgtaacaaatagtcaatgactgtaaagtaatatgctattcttactgccacacctgtaattttaaatcttatgcaaattatgagcaataatttccatttttataaaaactcacatataatattataaataaaacccaaaaccatatgaaatgttaatttca

SEQ ID NO: 606318 - DNA, 642 bp, Homo sapiens
gtcctccccacactaatgccagtaaccagcaattcttcattctcaggtacgcaacgaaggtccgaactgtgatgttcagataagctgagtcacagagttcaaacaaggccacagagtacgccatgtgaatgtgtgcagaaacattttataaaaaataatacataggatgagagaatagctattgctcacagacttaggattgaattctggccctgccacttactagctgttttgttcagagcacctacctcttgggatatgtacatatatattgcatataaaggggtgagcatagagcattgcctgtaacaaatagtcaatgactgtaaagtaatatgctattcttactgccacacctgtaattttaaatcttatgcaaattatgagcaataatttccatttttataaaaactcacatataatattataaataaarcccaaaaccatatgaaatgttaatttcaattaggcagactagcaaactctaaagaaaataaagtcttcattgtgtccaaatggacctgggtaatcttctttccccatttatcatcactctcttagactcactgactttctaacaaattcaagcccctcgaaatgtctgttactcccataactgcactccaagaggaaataattctt

SEQ ID NO: 606319 - DNA, 642 bp, Homo sapiens
gtcctccccacactaatgccagtaaccagcaattcttcattctcaggtacgcaacgaaggtccgaactgtgatgttcagataagctgagtcacagagttcaaacaaggccacagagtacgccatgtgaatgtgtgcagaaacattttataaaaaataatacataggatgagagaatagctattgctcacagacttaggattgaattctggccctgccacttactagctgttttgttcagagcacctacctcttgggatatgtacatatatattgcatataaaggggtgagcatagagcattgcctgtaacaaatagtcaatgactgtaaagtaatatgctattcttactgccacacctgtaattttaaatcttatgcaaattatgagcaataatttccatttttataaaaactcacatataatattataaataaaacccaaaaccatatgaaatgttaatttcaattaggcagactagcaaactctaaagaaaataaagtcttcattgtgtccaaatggacctgggtaatcttctttccccatttatcatcactctcttagactcactractttctaacaaattcaagcccctcgaaatgtctgttactcccataactgcactccaagaggaaataattctt

SEQ ID NO: 606320 - DNA, 608 bp, Homo sapiens
tgtcatgacaaatcaagggcttaagaactgacaaagtagctcagatctagagaaaaatgaaactttcaaagacaactagtataagcagtcattatattgcagtaggtagtcaggcagacatgagcagtgcaggagagagcccctctctgcccctcaaccgaccaggaatgtcaggcaaccgtaggtttgtgtgatatcagtttccattgatgatcattgcctagtttcactatgtgattaggttagasagctgttaaaactgtctctctaaaataataattggtctcagccagcgccaggggaaggcagtctcccagtagattgaaacacctaaagttggtgatcagcagctttttgagaagatctcaggagttgggtgagtgggctcaagcatgcacactaagaggtaaaatggtagagtttaactagtatatgaccttctctagaaacactcaagtggtaagggaagaacgcctgaagtgagcatgtgcactatttcgataaacacactgttcatgcggcccctttcaagtgctggcagaccactgctcttctggacagcccaccacaagggaagagtcaggggacaagtaacacaaccaggaagc

SEQ ID NO: 606321 - DNA, 548 bp, Homo sapiens
gtagcacacgcctgtattcccagctactcgggaggctgaggcaggagaatctcatgaactcaggaggcggaggttgcagcgagttgagattgtgccactgcaccccagcttgggtgacacagcgagattccatctctaaaattaaattaaattaaattaaaattaaaattaaaataaaggacatttcttgattgcycttgggagcttgttgtttgacttgctgtcatttaaataattgtcaagtttgagctgggtcccagagcagcctctgcaaagcaagatggtacacctaagatgctcttagacctgatacctaattccggcaaagatacatatcttttccttattggctcttccatcaggttgctagattaaacatgtttattttctaatggcttgttttttcctaagactgtccaagtggttcaactactttgtttgacctagaaaaaaatgagcttattaaataaatgtctctattcgggtcttacattaattggaaaagttatctttaacccactgtatgtttttcaacttatgggagttca

SEQ ID NO: 606322 - DNA, 563 bp, Homo sapiens
tcctccctctttcacttttaagaacgccggtgattacatcgggcacacctggataacccaggttacttttcttgttttaaggtcagttgattagtgaccttaattacagttgcaatctcatttccccctttctagggaatgcaatatattcaaaggttctggggattagaatgtggacatctttgcagggggtgtgcattgttttgcctgtcacaccaactatagacagttggggataggagtaggaaaaagactctttaagtacaggatactgatcrtggatcatttaccagcaagtagataatgaggactccatcactggtaataggtagagcattgataatctctgacccatagaacaggtagaagatggttcattaccttgtgcatagtctctgccatttgagggatataaggcagatattaatttaaaatgctgtggaactgagtggctattgataagaggcttttgttgagtaccattgatgcatctatgcagagataaaacaacaaaccatggataatttattaatcatcaatttcaagcaaatagtgaaaggcac

SEQ ID NO: 606323 - DNA, 632 bp, Homo sapiens
aaaacaaacacttgatctctcaagtagtctgcttggccytcttccaagtgtactttatatttcctttcactcctgacctaaattttttaataaactttaactcctgctcaaaaaattgccttgctctcttgttctgctttacggccctcagtcaaattctttcttctgaggagacaagaattgaagttgctgcagacccgtacagattcactgccattaacaattataatgtcagtgtaactagtaattataatgattagttaatataatataaaaatgacacagttaggtcaaaacaaagacagaaattgaacagatataaaagtggcaagaagcagttagggctaacgcaattaatctgatgggctcacaatctgaaaccagtctgtgacagctggaaatttggcttctactgacaacaggggctaaaagtactccttaggacagacttgcgcactagctaaacccaggaaacaaggtgaagtacttctattcctggaagtttcctgaaatccgatctctgctttaaactataaccaaagacccatggaaaataaacactcagctttgttaacagaattaaatcaagctaccaactagaattgtgactggaactgtagtattgccaatat

SEQ ID NO: 606324 - DNA, 592 bp, Homo sapiens
acataatctcaatctgtttgtgggaaaatattagacagactccaaatagaacatattcttcaagtatatcagcataatagaggcagggatggctgtgaactttcccagattaaaataaacacagaagacataayaattgaatgcaagagctcgtgtactagagggaagcaaacaccatgaagaacattattaagtcagagagcaaaactgaaatatgaatgccatattaaataaaaattttgtattacttttaaatttagtaaaattgggatcattaagttatcattgttttaagccattaagttttgagtggtttgttaagcaatcatatttaacttatcttcttggttctccttatatcagttattagttcacccatcacttcacctcttacataaaattgactttgccactaaacttacagtagtcacatatttactaataatgacaaacttcatgtatttttcaatttatgttcaattccagtgagttattcagcaaagatttatcaagaacctcctatatgccaggcatttttcaaagttcttgggttgctgtagagaaaaaaagacaatgccttggctgtcttggg

SEQ ID NO: 606325 - DNA, 592 bp, Homo sapiens
acataatctcaatctgtttgtgggaaaatattagacagactccaaatagaacatattcttcaagtatatcagcataatagaggcagggatggctgtgaactttcccagattaaaataaacacagaagacataataattgaatgcaagagctcgtgtactagagggaagcaaacaccatgaagaacattattaagtcagagagcaaaactgaaatatgaatgccatattaaataaaaattttgtatyacttttaaatttagtaaaattgggatcattaagttatcattgttttaagccattaagttttgagtggtttgttaagcaatcatatttaacttatcttcttggttctccttatatcagttattagttcacccatcacttcacctcttacataaaattgactttgccactaaacttacagtagtcacatatttactaataatgacaaacttcatgtatttttcaatttatgttcaattccagtgagttattcagcaaagatttatcaagaacctcctatatgccaggcatttttcaaagttcttgggttgctgtagagaaaaaaagacaatgccttggctgtcttggg

SEQ ID NO: 606326 - DNA, 592 bp, Homo sapiens
acataatctcaatctgtttgtgggaaaatattagacagactccaaatagaacatattcttcaagtatatcagcataatagaggcagggatggctgtgaactttcccagattaaaataaacacagaagacataataattgaatgcaagagctcgtgtactagagggaagcaaacaccatgaagaacattattaagtcagagagcaaaactgaaatatgaatgccatattaaataaaaattttgtattacttttaaatttagtaaaattgggatcattaagttatcattgttttaagccattaagttttgagtggtttgttaagcaatcatatttaacttatcttcttggttcyccttatatcagttattagttcacccatcacttcacctcttacataaaattgactttgccactaaacttacagtagtcacatatttactaataatgacaaacttcatgtatttttcaatttatgttcaattccagtgagttattcagcaaagatttatcaagaacctcctatatgccaggcatttttcaaagttcttgggttgctgtagagaaaaaaagacaatgccttggctgtcttggg

SEQ ID NO: 606327 - DNA, 594 bp, Homo sapiens
atcccaaaacactgttttcattatttttacttttgactactccacttttgygttgactagacttctttcactttttggtagccattactttgatcgggctttgtcttcagtatggtactttaagccatgtttcatctcctgttacaattcttcaagaaatacttcaagatcttgatcccacttaaaaaaaaattaattgaaagctctgctcttgcctgaagctgatctgggtgcaataattttggtacccattgagaggagtttgctcaactttaatttttcagtcagaattgtacgagctgaatcagttaagctgtctgtggtgtttcctattatttgtgctgtgcatcgttggtcctcttgaatcagaacacaaataagatgatttttttttttcctcacaaatggatgcggatggtctcctgcaatggatactatggacttaatcttcaacattgtcttgcttcttaaaacaagttacccatttgtaaactgctgattttcaggggttggaggcattgtttccattaactttacatgaagcatcaatgatttcaccattattcttcgacccaagctttaccataaatttga

SEQ ID NO: 606328 - DNA, 472 bp, Homo sapiens
gttatttattttaataagaaagagtcttgcccatttctaaatcattatgcacgaagcccagaagttaaacgtatatttacaattgtttcatatatagctaggctcttagtaaggtttatccccctgaagagaacattgaaaatcataattttaatattatgtttttccccaaatgaaaaaacttaaacataaacaaaactagagtaaatatgacaacaaatatagttattatacagctatcaaaaaggaaacacaaattcaaagtraatttttttttttttcagaggaaggaacaggaagcaatctttgctgttctgcaggctccactggtcataccccggcaaacagggtctggagtgggcctccagcaaactccagcagacctgcagcagaggggcctgttagaaggaaaactaacaaacagaaaggaatagcatcaacatctacaaaaaggacatccacaccaaagccc

SEQ ID NO: 606329 - DNA, 551 bp, Homo sapiens
aggagagagagaaagaagtacaagtttgttggccctactcagttcagcattttaacactgttcaagatggatggagttctggctaatctcaggtaaacaatcagattgcaaaagttagattaccttacctgagagatacttacatcagctaatttatttcttgttctctattcaaacttcttaagaacttttctttcaatgtgtttttccatagagagagaacatgctgaagaacctcaaacattctgagtctcttgacagtttttgctgtataaatgaamaataatatcttctttatccatgttattggtttataactatcagtctctgtgaaattgattaatgtgggcctgtccacagagagagcttccatcttaaagtgcaaacaaattgaacttggaagactgtaatctagtctatgccttatgacaaatcttctaaggcaaatgcaactgagttttggagcaaccagcccctgctgcgcatgtaacataacttagttctagtgtcctgctttcctagaaaatcttggttgcaaaattttgtttcat

SEQ ID NO: 606330 - DNA, 530 bp, Homo sapiens
atttttcaaaagttgagcatgaaagctatagcccaagaaaactcaccacagcaaaaattgtacaggctacattgctaatcacaactaaataaatctggagacytacagtaaaaatttaagaaaaaagtccgttcaaagtgttaatgtatccccaataattgttttttctaggaaatttttgcaaagctacagtcacatagtatttacaaaattacaaactgcaaataacttctgtcaaaatgtaagggaacttactaaaactgtaattaaaggcatagccttaaatgccattttcattaaaagcaaatattttaacaaaaaacaggcatttgacttaagatgataaaaaagtgataaaacctcagaaaagcatgggaaaataattatacaagtaaaaatagaaaataattaaaaataaaataattatataacttttacttttgtacatttttttgattatgtgtacataagagttatatatatttctgcggtttatatgatattttgatacaggtatacaatgtgtaatg

SEQ ID NO: 606331 - DNA, 634 bp, Homo sapiens
tgtaactcccacaattcctacatgttgtgggaggaacctggcrggagatgattgaattaggggggtgggtctttcctgtgctgttttcatgatagtgaatgagtcttacgagatctgatagttttaaaagcaagagtttctctgcacaagctctttttttgcctgcagccatccatgcaagatgtgacttgcccctcattgccttctaccatgattgtgaagccttcccagccacatggaactgtgaatggtggtttttgcatatgaaattaaaatgtctcagaagaaatcatacagaaatgggagaggcagtttcccaaaacactgtcttggtgttttttagtttagaggagttttgtgacatatctctgggatagagtatgatttccatatttaacataattaaaattaggatacatggtcaattaattgggcaaggatcatgacattgggaaaaaataaactacatcaatcaagggatcaaaataaaaataatttcagatttttgtttttctaatagatcagctccgggatcgttttggtacatttctgctcaaaaaggggaagacatatttccaagtactcaattcttttctagagtctaaacctgcacgtttcagttttctgtcttagt

SEQ ID NO: 606332 - DNA, 600 bp, Homo sapiens
tgttataaggcttataaaggccattttgttctgcagtccttctcctgcagaagtccacttctgaaatcatggggggaggaggggaaggaagtcaaaactatttgctgattacttattctatgccagatattgaattatgctatgggctgataatacaataattagccagagaatacaatttcctgttcccatgaccactatggccaagtgggaaaagacactaaataagtaattacaatgcattgtgagcaaagtaatgatgagggaagaacagaatgcttcaggagcacatagcaggggcacctatattagtgctctccactgtcagaatgccgtggtcagctatgccagggcacttgtatctccatagcattttcaaatccttggctcacttatgatttctctgagactatcttaatgattcycattcctgagtcccccagatctctctttttcttcattctgaatataaaactgcattgttaggcaaagaagtattatgttactgctttctgtgctacttagaaattcttttatttcatgtctactcttcattgtattacctgtctgccgcaaagctgttttatttagtcaaactca

SEQ ID NO: 606333 - DNA, 602 bp, Homo sapiens
ttaatagggttgttgtattaaataatatattgtatgttaagcagtgagcaaagtatatggtagatactcaaatgtgctaggtgctgttctcatcatcgccatcatcctcagcattcctattctgtaatcctctgaaatctggctccttgtaccatttcactttatatatatatatatatatacacacacacatacacacatatatatgtatatgtatgtgtgtgtrtatatatatatatatatatatatatatatatatatatgtatatattttgtaaaggaccaaccacaaaccagattaagtggcccatttgtcatcataattagtaacctacatcaagaaaatcatttatgcagggtctcaacttccactttatttttccttctgttctgactcatatttctcctttcgtttcttatataataatttcctacaattactgaacatttttttcaccttaatatcacgcatttctaaagctttaatattttgtatacattattcatatctttagtcttggtccttatcctaaagactgcaaatgtttccaaatacaaagtggaattttccttatgcacatctgatagcactttacactaaa

SEQ ID NO: 606334 - DNA, 534 bp, Homo sapiens
gtcgttgatggtctgtgtatgtcatatatagtgtttttaccattgttctgtgtgtccatcttcatgcacataccgaataaatagaaagttgaagaacttttagataataaaatattctgtaaaacctgataggaaattggagaaatttgactaattaaccttgctcatatttaaagcttttagtcttgatgaaggcaaattaacaaatattataatgaaatacattggcaattcttatatagttaagtatgaagcaagatttaacatacagtcaaatttcacwtgaatgtttgcattcctttgtttcacactgtctttgctcttctgcatagacagtactagcactaaagtacttaatggtcttgtacttaagtgaacttcttaattgcacaaaatgtaaagtggtattggacttagacattaatttgtgtaccaggaacaaaatatgtatcatatgttttctttttttaggctctctgtaacactttaggcttcaaggtaaactgagcaggagaaaaatttggggttggtctc

SEQ ID NO: 606335 - DNA, 651 bp, Homo sapiens
tgagggataagattagttcagtgtttctataagttaaaccttaatattaaaaacaccctgatgcaagcccaatgtctgggcccatgtgttgaaataaaaacgtttccttgaagcactcatctactctaatagaaatggaaaattgttataaaatgtttatggaaatcttaccttatggtcaaactaattaaaattacatagatttgtttataaggttttattaaattagctttatcattaaaaataaaccatacaaaaataattttttctcttttgaaaaaatgcttgtgtaatattaaaagataaaagattttatcttctgagaacactggaggtacagaatagagcagggagagacagatttaggtggcctcatgctgtcttcattaggtcttatattctgggaaactaagtctcctctctatcaaaaggtaaatacttttatcactyttgctaaatgaatgactaaaatgactcgtgattcaatttgtgatattaagggtcttaatactttgatatttggccaactttccaacagcaaaatttcaagttctaaattcgggctttttgacctcaaactatttttttggacattaggtttcttgaagaccaagagacacatattagtcctatattacagtttttgttttg

SEQ ID NO: 606336 - DNA, 651 bp, Homo sapiens
tgagggataagattagttcagtgtttctataagttaaaccttaatattaaaaacaccctgatgcaagcccaatgtctgggcccatgtgttgaaataaaaacgtttccttgaagcactcatctactctaatagaaatggaaaattgttataaaatgtttatggaaatcttaccttatggtcaaactaattaaaattacatagatttgtttataaggttttattaaattagctttatcattaaaaataaaccatacaaaaataattttttctcttttgaaaaaatgcttgtgtaatattaaaagataaaagattttatcttctgagaacactggaggtacagaatagagcagggagagacagatttaggtggcctcatgctgtcttcattaggtcttatattctgggaaactaagtctcctctctatcaaaaggtaaatacttttatcactcttgctaaatgaatgactawaatgactcgtgattcaatttgtgatattaagggtcttaatactttgatatttggccaactttccaacagcaaaatttcaagttctaaattcgggctttttgacctcaaactatttttttggacattaggtttcttgaagaccaagagacacatattagtcctatattacagtttttgttttg

SEQ ID NO: 606337 - DNA, 621 bp, Homo sapiens
actttctgtgtggcaagcagcaggacctagatcaaatccctggtgtgttggtaacaattatgcattcttctctgttcgaattcagaaaaagcctaccagcatttaatattaacacaaaccttaagtctgataaaaatcatttatagtctaatctctctgaagcctgctacctggaggcttcatcttcatgctaaaacttctgtctccacaacctcttatcattcttttctactgataataastctttcaaccaattgctaatcagaaaaattttaaatctgtttataacctggaagcccccactttgagttgtactgcctttctggactaaaccaatgtatatcttcaatgtattgatcatgtcttgctaaaatgtataaaaccaggctttaccctgaccacattaggcacatgctcacagggtcttctaagagctgtgtcacaggtcatggtcactcatatttgactcagaataaatctcttcaaatattttaaagagtttgactctttttgttgacaatggcttttgaaaatatggttattatgtgtcttctgcagatctatttgggttaaccatactggattttgttgaaccccttgtatgtataaattaattattgt

SEQ ID NO: 606338 - DNA, 626 bp, Homo sapiens
ctactctaatgaaagtgaacagttgaggctgtccaatcttttccattagcttatttatccagttaaatattcaaagcataagcacttgtttttgtcagtaattgctgatttaattgctgaataagttccatcctgccttaaaacacccttgatacagataaataagaaaacataattccatgagataaatgagaagagaggtaaaaataatatactatggaaacagagaggaaaacatctaatctcaattgtagtctaaggacggcttcctagagaaaacaacttctatgtaattaaagatgaataagaactgaccagaaaaatgacattctaaatattggcaacaaatattttgtacacaagttttaaagtttctaatgctggagacrccaaagctgtattttacaatttgttccagtgattgtgtgagtttcagttaagaaaatgtttctaatattcaactgaattttttcctgatatgaagtagtagctctaacatattaaaataatagcccttttggttaatgttaaggaatcaaagttgaccaagttacagcttacaacttttaggtaaaaggctgatgaaaatgatttgaatatattctcctaaattgtaagccatggat

SEQ ID NO: 606339 - DNA, 534 bp, Homo sapiens
caatacaatgttgttcactttaagaaattaacataaaaatttatatttgaatttcagctctgtgtctgatttgaagcaggcactttttgtcttcctttcgtaacttttgtaatatgaagaaattcatgctgcttgcatcaatacatgaatctatattgtaccaacatccaatgtccttatatatatgccatgtaattttcaaaagttaatattttttctaggaaaaaaaaacccactatctgttatgtggatcgggtactttgagtggttattaaaaaacaaagaaagttatatatcctatttcaactgacagatcaaggtataattttcagtcaaatggctcaacatataaaataaaggttttcatggaatgttaggactacatagattctcaactctcacttataccaaacttcaatttttggtacttagaaacttaggccaggaaaagagaaataagcagcccacagtgaaacagraaagtaatggcagaactgagactcaaaatcaagtttctgccttccaaacccggtg

SEQ ID NO: 606340 - DNA, 571 bp, Homo sapiens
ctcacatattcgtataaaccttgaatgttgatgccctaaattcctcacaaaaaatatatagtcaaattggattaaaaaaaacatgacccggaaaaacatgatcaggaaattcatacacctaaaagcccaaagccccctaaaagcacaaagaaaagccaaaggaccctactcaacacacacaatagtcacatcctcaagggggaaaaattctacccaaatgaaaagtaaattcagaaataagaagtagcagcatctctaaataagaagaaaccagcacaaaaaaaaaccatcatcagaaagacacagaatrttatgacacccccaaagtaccacactagcactgtggcaatggatcctaactaaaatgaaaactttgaaatgacagataaagacttcaaaatatcaattgcaaggaagttcaatgaactccaagaataagttggaaaaccaacacaaggaaaccaaaaagaaaaaacagtttagaagatgaaagactatatatatatatatatatatatatatatttaacaagaaaaacagagctttgagaaattagaaatacactgaagga

SEQ ID NO: 606341 - DNA, 591 bp, Homo sapiens
tcattatgggtacaccagttctacaagaaatcctcaaggaagttctaaacatggagatgaaaagatgatacactctgttataaaagtacatgtaattagagaactcacaaattttataaagcaattagacaattgagaatccaaggcaagtaactaacaatactatggcagtaaagaaaactcacatattagtataaaccttgaatgttgatgccctaaattcttcacataaaatatatagattgtcaaattggattaaaaaaaacatgacccaaccatctgttatctaaaaaagacccactccacttaaaacatctgtaggcgcaaattaaagtgatagtaaagatatatcacatacatggaaaacaaaagcaagcaggaaaagccattcttaaatcagacaaaacagactttaagccaacaacagtttaaaaaaaaaagaaaaagaagggcattacataatgataaagaaatcagtacaacaagattcaactrtcttaaatatatatatgcacacaacactgcagtatttagatttctaaaactaatactacaagacctaagaaaagagattggcagcaacacaataac

SEQ ID NO: 606342 - DNA, 547 bp, Homo sapiens
aacaagcctacaatgtacccccttaatctaaattttttaaaaagagataaataataaaaataaattattactaaaagtgctaacagtcatctgagtcttaagcaagtcataatctttttgctaatgatagatcttgaatcactgttgatgactgctggctgatcagcagggtggtggctgaaggttgggattgctatgataacttttttaaaaaagaaaacaatgcagtttgctgcattgattgactcttcatttcaccaaagatttatttctagcatgtaatgctgtttgacagcattttatcggcagttaaacttctttcaaaattggagtcaattatctcaaattttgttgccgctttatcaactaaatttatataatattctaaatcctttgttktcatgtcaatgatttttacagcatcttcactaggagtagattccaactcaagaaattccttttgttcatttataggaagcagctcctcatctgttcaacttgtatcatgagattgcagcaactcagtcacatctttaggctccacacc

SEQ ID NO: 606343 - DNA, 573 bp, Homo sapiens
agggctagtcaaaaagaccaggataaaaatatcttatttatcagttcaaactaaaaaccaagctactttatatatctgttgtttagttttakattaacaataaactatgattgcccatgatcaagagaaaaaaactacaagatattcaatcaaaacaatctttagcttgacctaagataaaatgcctgagtctggaattcaatcctgtcatatttgttgtaagatttgggcaataacttgaactcctaataaattgttttattatggcatttctttctctctgcacctatgaaaaatgtgagaatacgatgagaaaatacttttggaagtggaaatgtatcacataataaggtggtaataagttagtagccctgcctacctcggtgattacccgcctcttgtaagttataatacccactctaccccagcctctggtttcagccacatggacttttataacaaccatgtggtctttcaactaagtcatactgccccttgagcaggctttttgcccaacagtttgttccttcaccaggatattcttgacctttgtgtgctatgcatgcctcctac

SEQ ID NO: 606344 - DNA, 573 bp, Homo sapiens
agggctagtcaaaaagaccaggataaaaatatcttatttatcagttcaaactaaaaaccaagctactttatatatctgttgtttagttttagattaacaataaactatgattgcccatgatcaagagaaaaaaactacaagatattcaatcaaaacaatctttagcttgacctaagataaaatgcctgagtctggaattcaatcctgtcatatttgttgtaagatttgggcaataacttgaactcctaataaattgttttattatggcatttctttctctctgcacctawgaaaaatgtgagaatacgatgagaaaatacttttggaagtggaaatgtatcacataataaggtggtaataagttagtagccctgcctacctcggtgattacccgcctcttgtaagttataatacccactctaccccagcctctggtttcagccacatggacttttataacaaccatgtggtctttcaactaagtcatactgccccttgagcaggctttttgcccaacagtttgttccttcaccaggatattcttgacctttgtgtgctatgcatgcctcctac

SEQ ID NO: 606345 - DNA, 264 bp, Homo sapiens
gaaaatacttttggaagtggaaatgtatcacataataaggtggtaataagttagtagccctgcctacctcggtgattacccgcctcttgtaagttataatacccactctaccccagcctctggtttcagccacatggacttttataacaaccatgtggtctttcaactaagtcatactgccccttgagcaggctttttgcccaacagtttgttccttcaccaggatattcttgacctttgtgtgmtatgcatgcctcctacact

SEQ ID NO: 606346 - DNA, 581 bp, Homo sapiens
tcaggtgtgtgccaccatgtccaactaattttttttgtatttttagtagagatgaggtttcgatatgttggccaggctggtcttgaactcctggcctcgctcaagtgatcctcccacttcagcttcccaaagtgctgggattacaggtgtgagtcactgggcccagctgagatatgcacttttctatattgtatcttgtaatttaatttttttaggttttaagaaaacattaaaaataaaaaagataaatagtctctcatacaggagaatttcaaatagtttatggagataatccctcctcaaggagaaggagcataaacccccactccttcagtgtgggctgtgcatagtgactttcttccaaagggtacagtatggaaaggggggaaaggagtaactttacagtgaagagacctgacatgcactacctcagctaggtgatcaaggtcaacatacacacytgtaagtcatattgataggatgtaaccttgacatgatgtgacaagaatggcacctaacctccaaggtcttcctaccaacaaaccataaccccagacttaccataagaaaaacatcaggca

SEQ ID NO: 606347 - DNA, 514 bp, Homo sapiens
tgttatagaaaataaaatatacacactgatttgagattaattggcacacattgaacatatagatgcacccatggcccagaataggaagaagtgtttattctaagaaaagaattatgtttaaactatttatataaatgtaaggggaaaatccaaaactcccttttttgataaggcatattgcagattttaacaaagaagaytggaagcatttgagggaaccaagatttattgctagaagtttctttctttctctcctaaactcagctatgcctaacaattgaaatgcatggactcatagggaaagcaagaaagagagtcagaaaggacgattattaagtttgcactaaaaaggagatcttttcagtggtgaagggttgcttgaaaaataattcattgatttccttggaataagatttttataactttctttattccatagaagtcaaggaaagatatagttataaaaaatcttctgcaggattgcattagtgcctctgaacgattcacatgcaaa

SEQ ID NO: 606348 - DNA, 530 bp, Homo sapiens
attttgcctctgtaatacttacaaaatattgatagataatgccttcagttacattctaatattggcaaaggaatgtacttgattttttttctcacaaacacctctgccttggttgaaagaagcagtaacactttgaagaagagaccttcccttcagtgatttggttgtatggtcaaagtaagagaaactcycaattgtccatcaaaatacactctcctttctttggggatatatgctttttgcattttctttctttttttttaaagttggggaggttgttgcttttgaggggagctacactttttttttttttttcctttgtgtggagaatagggtcatgctatattgcccaggcaagtctcaaactcctggactcaagctattctcccgcctctgcctccctaagagctgggattacagacgtgagccaccacacctggtggtttttgcattttctatcctcacttgcagttaagtgtggttatgtgattcagttcttgacaataaaatttgaaggcaaaggacttgta

SEQ ID NO: 606349 - DNA, 624 bp, Homo sapiens
aacatgtcaggtcccctaggttcaattcgataattttttatagtagctactgtaagtcagggactgtctagaagctcagaatacatcaacacacaaaacagatgcagatccttcccttacttttattccaatgggaaaatacagagagtaaataggataatcaatgagtaaattacaacatcygttataaaaataaaagtgctatgagaagaattaagtaagtgttttgggaaggagaagcattagtgggactggggtgcctccataggaaagacgccatttcagcaaagtctttttgaaccaatcagaatagacaccagacactaaacaacaaatgtgcgctcctggctggagatcagccctacacgtttttgtgaactccccgtgctttttcttgccaatgtccatgcctttctctttgtctaggattacatccttctgactctacatatctaaacccgacaggtgatttcttccttgactttctttttttttgtatgtgaccaaacccaacactctctttgcaaaaccaaaaatatatttctacttgaaactgggcattaatttggcttttctttcctcaatgaaagaagaggacaggcagcattagtatctaggtgtggt

SEQ ID NO: 606350 - DNA, 624 bp, Homo sapiens
aacatgtcaggtcccctaggttcaattcgataattttttatagtagctactgtaagtcagggactgtctagaagctcagaatacatcaacacacaaaacagatgcagatccttcccttacttttattccaatgggaaaatacagagagtaaataggataatcaatgagtaaattacaacatccgttataaaaataaaagtgctatgagaagaattaagtaagtgttttgggaaggagaagcattagtgggactggggtgcctccataggraagacgccatttcagcaaagtctttttgaaccaatcagaatagacaccagacactaaacaacaaatgtgcgctcctggctggagatcagccctacacgtttttgtgaactccccgtgctttttcttgccaatgtccatgcctttctctttgtctaggattacatccttctgactctacatatctaaacccgacaggtgatttcttccttgactttctttttttttgtatgtgaccaaacccaacactctctttgcaaaaccaaaaatatatttctacttgaaactgggcattaatttggcttttctttcctcaatgaaagaagaggacaggcagcattagtatctaggtgtggt

SEQ ID NO: 606351 - DNA, 520 bp, Homo sapiens
gcgtggtggcacacgctacttgggaggctgagacacgaggatcgcttgagcccaggaggtggaggttgcagtgaaccgagatcgcgccactgcactccagcctgggcaacagaacaagactccgtctgaaaaaaaaaaaaaaaaaaaaatttggttgtacacgtaaaacagatggatattgtggtatgcaaagctgttyaaaaaaaaaaaaaaaaacaactaatgaaaagtgccaaagttaatcagtgttgaatttttttcatgaacctcaagtgcttagggtttcgtatgagagaggccaaaccgaaagatctgtgtattctgtaggtcaaagaacaacacacatgaaactccgagcttctggagtcttccttggtatttgggagagttggtgtgattcaggttagtcagactactgccatgtttgcataaatttcaaccttcattttggctgtggataatttcatccgttggattctgtttacagataggattagttcaaatgtataaatttgtgttg

SEQ ID NO: 606352 - DNA, 534 bp, Homo sapiens
agaaagttttgcttttagaaaattatatttgggatcctagaatttaagtttataccattttctattatccaagccagtgttgttatttgggaaacaactgtttagccaaggacatttgataaataagttgtcttcggtatcagttaaaaacctaagtagttcagaaggtaattccatcagatagctgttctaaatgctaattagaaatttgtgtatattttacatttctgactttggtttacatacattttattattatattaaacaatgcagttaastatataatcttttagggtttcctggtactagtaattttcttcatctttttccttctccctcattctcctcctttgatcttgctcaggttagcataaagaaatctgggttttctttgtggcttttctactaaattgtgatgcaaatgtgatcaaatttgattttaaatctctggactttggtctcttcacctattgattgtaagacctttctaagccttagtatacatacttacatatatacatacatacatacata

SEQ ID NO: 606353 - DNA, 559 bp, Homo sapiens
gagggccaaggacatgttccccctccaaagcactacattcgagggcgtatctcagaagggtccaagaatcctaaacttaaatgtggccttccagattatgatgaaggtatacatgtcaagataaaaggataggaattttacatcaccgtttaatttgtagttttaaaatatgtagacatgatatgtgggcctccatttgtactactgactcagttcttgcaaatattaagggtagacctgtccctgatcttcgtgtgtaaaatagcacctcctctgccactctattcttaccccagtctacatttcttcataacatcggtcaccatctgatctacatttacttatgtatcatctctttacccccactggaatgtaagttccacgtccctagagtctatattttgtttactgccttatccttatacctaaacaagtgcctggcaygacaccactcagtaaaacttgaataaatgaataacaaatctaggctcaaagctcttacaggtgaaaggggctaacctggcagtcacaaaggaaaaatatcactgtgacaaccgtc

SEQ ID NO: 606354 - DNA, 552 bp, Homo sapiens
tggtgtgatctcagctcattccaacctccgcctcccaggttcaagcgattctcctgcctcagcctcccgagtagctgggactatagtcacgcgccaccatgccgggctaatttttgtatttttagtagagacggggattcagcacgtaagccggatggtctcgatctcttgacctcgtgatctgcctgctttggcctcccaaagtgctgagattacaggcgtgagccactgcaccyggccaattctggccttttctataaaccagtttattctgttgagttagcctttcttttgggatttccaggtcaggatacacttaaaagtgtatgctgtttctttgtatttgtgcttgataccttgcctagtttcattttatacatgcccttttaaaattctgaactcaacagactggttctgagacggaggcatttatttctttggatgcctcccctgacttcatgctgctcatgaccacagctggggacagagagatttgcctccagtcctggctttcccacttattggctgttactagagcaaattactctacct

SEQ ID NO: 606355 - DNA, 536 bp, Homo sapiens
ccaaaaaaaaggataatctctttagtagataaaatatattttagtaatcaccaaagccaaatcaaattgaaagactatagagtgtaggtataatattcaagctttattgttataaaaagacttcaataaactcaccaattagtagttatagttgatacttgttcatagccacgttacatatatcatttctagttttcaaaacaaccctccaggtgacagttggacatgttcattttacagctgagaaagtcgaaaccaagaaaacgtactgaagactactgttatggactrgatgtttgcctccccctaaaattcacatgttgaagccctaatctctaatgtgatgatatttggagatggtggctttcggaggtaatttggtttcaatgaggtcatgagggtggacttctcatgatgggattagtgcccttacaggaagagaccagagagtttgtcctctctctgtgtctttctctctctcttcactatgcaggatacagaaaaataaataaataaaaatttaaagaagaccctct

SEQ ID NO: 606356 - DNA, 596 bp, Homo sapiens
atgcctctcttgagaagtgtctgttcatgtcctttgcccattttgtaatagggttattttttgcttgctgattgatttaagttccttgtagattctggatactaaacctttgttggatgcattgtttgcaaacattttttcccattctgtaggctatctgtttactctgctgacagtgccttttgctacactagctctttagtttaattaagtcccacttgttaatttttgtttttgttacaattgcttttggagacttagccaaaaattctttgccaaggctaatattgagaagggtatttcctaggttttctctaggatttttatattttgagttcttatatttaaatctttaatccatcttgagttaatttttgtatatggtgaaaggtaaggagggactagtttcattttctgcatatggctagccagctatcccatcatcattcattgaatagggagtctttttcctattgcttgtttttgttggcctggtcaaagatgagatggttgtaggtgtgcagcttyatttctgaattttctattctgttccattgtgtatgtgcctatttttgtatagtaccttgctgttttgg

SEQ ID NO: 606357 - DNA, 551 bp, Homo sapiens
aaagaaaagggaagagcaaaaggttggaagggcacagccaagtgataaaaatgagtatcagtaaaactcctacaggtacggtcaggggttctgttcctctgctttgttgagttgtaactcttttgagttctttttaagaaaaattgagatcatacattctattgaacatttgtatcagaatactgtkattaagagtaaagtttcagttatcatggtataactggattggatttagagaaaccaagaaaatgaagtgagaaatagccaagtaatgtttcccacttgccaagaaattgaatgataaagagagaggcactggatttcctcacatgctcaggatgaagttttgagccaattttatgggactattaaatacatggtaaatgatgggttatatttagcattaataactaacaacctccatcattaccatatgttttcttctgtggtcaattgagatcgttgtaaaaaatacagtacccatttctggcattttttccaaatgaccttaaatatgtacttacaaatattttagtttttgtgtttaaaca

SEQ ID NO: 606358 - DNA, 551 bp, Homo sapiens
aaagaaaagggaagagcaaaaggttggaagggcacagccaagtgataaaaatgagtatcagtaaaactcctacaggtacggtcaggggttctgttcctctgctttgttgagttgtaactcttttgagttctttttaagaaaaattgagatcatacattctattgaacatttgtatcagaatactgtgattaagagtaaagtttcagttatcatggtataactggattggatttagagaaaccaagaaaatgaagtgagaaatagccaagtaatgtttcccrcttgccaagaaattgaatgataaagagagaggcactggatttcctcacatgctcaggatgaagttttgagccaattttatgggactattaaatacatggtaaatgatgggttatatttagcattaataactaacaacctccatcattaccatatgttttcttctgtggtcaattgagatcgttgtaaaaaatacagtacccatttctggcattttttccaaatgaccttaaatatgtacttacaaatattttagtttttgtgtttaaaca

SEQ ID NO: 606359 - DNA, 552 bp, Homo sapiens
gaccaagtgggatttatccctgagatgcaaatatgattcaacatatacaagtcaatyaatgtgatacatcatgtcaacagaatgaaagataaaagccatgtaatcatttcaactgatgctgaaagcatttgataaagtgcaatatcccttcatgataaaaactctcaaaaaagtacatataaaatgaacatacttaaacataataaaaggtatatatgatagacccacagctagtatcatgctaaatggctaaaatctcacaacctttcctcttagacatggaacatgacaagaatgcccactttcactattgctattcatcatagtactggaagtcctagcaagagccatgagacaagagaaagatataaagatcatccaaattggaatggaagaagtcaaattatcttttttgcaaatggtataattttgtatttggaaaaatctaaaaactccaccaaaagactattagaactgataaacaaattaagtaaagttgcaagatataatatcactatacaaaaatcagtagtatttcaatatgccaacagc

SEQ ID NO: 606360 - DNA, 552 bp, Homo sapiens
gaccaagtgggatttatccctgagatgcaaatatgattcaacatatacaagtcaattaatgtgatacatcatgtcaacagaatgaaagataaaagccatgtaatcatttcaactgatgctgaaagcatttgataaagtgcaatatcccttcatgataaaaactctcaaaaaagtacatataaaatgaacatacttaaacataataaaaggtatatatgatagacccacagctagtatcatgctaaatggctaaaatctcacaacctttcctcttagacatggaacatgacaagaatgcccactttcactaytgctattcatcatagtactggaagtcctagcaagagccatgagacaagagaaagatataaagatcatccaaattggaatggaagaagtcaaattatcttttttgcaaatggtataattttgtatttggaaaaatctaaaaactccaccaaaagactattagaactgataaacaaattaagtaaagttgcaagatataatatcactatacaaaaatcagtagtatttcaatatgccaacagc

SEQ ID NO: 606361 - DNA, 580 bp, Homo sapiens
ataagaagatacctagatggtgtcccctgcagaactgattgattgctgatggagaaaatccgcacagatattttggtgatcagagtacagtgtgattgttgagtgtgaaagtagaaaaaacttttggattttcaatatccttaaagtaaggtacaagtgtgttgccttctattaaattgtagttaatcacctgtagaccacaagtgattaatgaagaacttctaaagtaaaatttttgtcacatttaaaaaaaataactggtagattttgaggggaagtttcagggttatagaaaaagtgagcaaaaagtacagagttcccttatactaccctccagtttctcctttattaatattttgcatttgtatggtacatttcttataattaatgatccaatattgctacattattattaactaaagtccaaagttgacattagtatttatttttgtgttgtacactctatggggtttgacaaatgtataatgacacctagcagccatgacagtgtcattgtgcgaaawtgtcctaaacctacacattctgagccaaatttaaaaatttggagccaaggggaaaa

SEQ ID NO: 606362 - DNA, 564 bp, Homo sapiens
gcactgacattccctttacctcaacaatgtcagccttgggatagaaacaaaagaaaaaaacattagactattgataccaaaaaagagaatgaacttgaagtaatattaaaatatatatgtgtgtatatatatwtttttttctttttttttcttgagatggagttttgctcttgttgctaaagtgcaatggcacggtcctggctcactgcatcctctacctcccaggttccagtgattctcctgcctcagcctcccgtgtaactggaattaccaccatgcccagctaattttgtatttttagtagagactgggttttaccatgtgtgccaggctggtctcgaactcctgacctcaagtgatccacctgcctcggcctcccaaagttctgggattagaggcgtgagccaccgcacccagccaaaaatatattttttaatgagagtacttttgattgatattgaagaaattattgtctgcattatcttgaactaccaatgcatatattgactacattgaaagaaaaaaaaaaacaatcctttgtattattattattactttttgaga

SEQ ID NO: 606363 - DNA, 596 bp, Homo sapiens
actcaataatgtctccttctattaattcagaaaagcactgtctatgtcactcaactgatgcttagtttattagtgacaaagtgctattatgtattgctattaaatttttcatgtgtaaattgtagctttgttaattagagtgtaaggactttgaagtcagagaaaatgccttagtctttctatctcacatctttaggtgagtgctaccactgtacatgttcaataattatttttcaagaaataaaattagtcccatagaactttttctattaagtgtttgaccaatcayagtttggcttttgggaagttgaaggtatttagaactagacagtgtgggatatttcactgtttctgttgagttgctcttttattcttccacgtcttcacttattttttccaaatattttttagctcacataatacagaattcatgctgctatttctttattttatactgcttttaaacatcatatttttatattgcacacaacacatgaaatgcatttgtttatttataaaattaggtatagactatttaagcacttataagaaaaataagaggctattatggcctaaatataagtacaaaaataaat

SEQ ID NO: 606364 - DNA, 463 bp, Homo sapiens
catgcaaacatttataacccttgagagaatgcagcacaatagggagactaattttatgactctgtggaggataataccaagagggtagagtatgctwcttacccagggtccccataaaccaaaccacctacaatcaaatagatcaaagaatgagctagataaagagtctattcacttaactaagcagtctcttatctatattaggctctcatcttttacctatcaaagtataagtttatccatggtcatccacggatatacatttggtcatctgatgggttgtttaaacattttgtaaagggagttcactcaaatgttatttccaaagcatgttttctggttgtataaaagctctcccatggaggaggcctgatattataacactaagttattatgccacagtgtattttcaccactaaagaaagctttttatggttcacagagatatgattcacagaggata

SEQ ID NO: 606365 - DNA, 512 bp, Homo sapiens
aaattgtcagcaaacagagatcatttgacatccttttctaatttgggtggcttttttttcctgcctaattgctctggttaggatttctagtactatgttgaatataaatgaggagactgggcatcctgtcttcttcctgatcatatggaagcttttcacagttaaatatataatggtaggtgggagcctgtgatatatggtcttcactgtgttgaggtatattccttmtgtacctaagttgttgagagtctctgacagttattttactggtctttgtataattaatgctatgatagatttagacaagttattctctattcaataaatagtgcttgaagttcacatctccatttcttcttttttctttgcttttaaatttgatgagaaaaatgggtataaaagttcaaatcaatacagaggtctcagttatgtttaaaatgtgttaccaatggtgactatcatttaggcattactcttttgtcagtatccatattaataagctatagcattct

SEQ ID NO: 606366 - DNA, 512 bp, Homo sapiens
aaattgtcagcaaacagagatcatttgacatccttttctaatttgggtggcttttttttcctgcctaattgctctggttaggatttctagtactatgttgaatataaatgaggagactgggcatcctgtcttcttcctgatcatatggaagcttttcacagttaaatatataatggtaggtgggagcctgtgatatatggtcttcactgtgttgaggtatattccttctgtacctaagttgttgagagtytctgacagttattttactggtctttgtataattaatgctatgatagatttagacaagttattctctattcaataaatagtgcttgaagttcacatctccatttcttcttttttctttgcttttaaatttgatgagaaaaatgggtataaaagttcaaatcaatacagaggtctcagttatgtttaaaatgtgttaccaatggtgactatcatttaggcattactcttttgtcagtatccatattaataagctatagcattct

SEQ ID NO: 606367 - DNA, 579 bp, Homo sapiens
aggaggagaattgcttgaacccaggaggcggtggttgtagtgagccaagatcgcrccactgcactccagcttgggtgacagtgtgagactccgtctcaaaaaaaaaaaattctctggacttttgtgggcatttttgttgactctatggaatttaaagtgtatgataatttatatgacccaaatttgaattaattttactttttatatcaaaagacaaatatacaaatggaaatttttaatgatttattatctgaagatattggctgactaatgtttattatatgggtgcagtttttgggaattagttggatgaatgtaatgaaagtgcattaagataaaaaaaattaattgaccataggaagagtattagtttctctatgggaatgcaataatgaataggaaactattcttttgactttatacgtgtccaaagttttttttaactcctcccttcaagagatgaagcttaattaccttctccttgcatgtgggctggaattgatgactcatttctatcaaatagaaaaatgcagaagtaatgctatgtgactttacaactaagacattaaaggcatataa

SEQ ID NO: 606368 - DNA, 579 bp, Homo sapiens
aggaggagaattgcttgaacccaggaggcggtggttgtagtgagccaagatcgcaccactgcactccagcttgggtgacagtgtgagactccgtctcaaaaaaaaaaaattcyctggacttttgtgggcatttttgttgactctatggaatttaaagtgtatgataatttatatgacccaaatttgaattaattttactttttatatcaaaagacaaatatacaaatggaaatttttaatgatttattatctgaagatattggctgactaatgtttattatatgggtgcagtttttgggaattagttggatgaatgtaatgaaagtgcattaagataaaaaaaattaattgaccataggaagagtattagtttctctatgggaatgcaataatgaataggaaactattcttttgactttatacgtgtccaaagttttttttaactcctcccttcaagagatgaagcttaattaccttctccttgcatgtgggctggaattgatgactcatttctatcaaatagaaaaatgcagaagtaatgctatgtgactttacaactaagacattaaaggcatataa

SEQ ID NO: 606369 - DNA, 579 bp, Homo sapiens
aggaggagaattgcttgaacccaggaggcggtggttgtagtgagccaagatcgcaccactgcactccagcttgggtgacagtgtgagactccgtctcaaaaaaaaaaaattctctggacttttgtgggcatttttgttgactctatggaatttaaagtgtatgataatttatatgacccaaatttgaattaattttactttttatatcaaaagacaaatatacaaatggaaatttttaatgatttattatctgaagatattggctgactaatgtttattatatgggtgcagtttttgggaattagttggatgaatgtaatgaaagtgcattaagataaaaaaaattaattgaccataggaagagtattagtttctctatgggaatgcaataatgaataggaaactattcttttgactttatacrtgtccaaagttttttttaactcctcccttcaagagatgaagcttaattaccttctccttgcatgtgggctggaattgatgactcatttctatcaaatagaaaaatgcagaagtaatgctatgtgactttacaactaagacattaaaggcatataa

SEQ ID NO: 606370 - DNA, 691 bp, Homo sapiens
aagcctgtaagtttgcaggtgacttgctacatmgtaataggtaatacattgctcttacctgaaagatacctaaagccttgttgtggaagaggaccagagtgagatgttttgaaatactgcttcacgcactgtgtcacagaaaaatggagaaactgtataacagaaataaagggtccataataattcacgcaaggtttgccacatttcagattggttataaattcacaggaaaagaccacacatgcatccacacaaacatacacacatacaaatacacactataagactacagtaaattcccagtaaactgaacattcagagcaggagcagctacatgatagccaggtaattaatttttctgctctatctaagctcaagaagaaaaaaaatcaccaaggtcttatggccgtgaatattttatttcttttacttcctttttgtgcatgtgcaaacattattatttagtataaatagctctccattgacatgtatatgagacttggaatttagtgtaatttaaaactgaaagacaaaattgcttagaacatgagaagagcgagtttgtgttgtatgctaataggcttagactacaattttttttaaacaaatttgcctttgggagaagaatcacttgtgatatttgtactaaactcagtattagaaatccccacatataagaagattaaatcat

SEQ ID NO: 606371 - DNA, 516 bp, Homo sapiens
tgctacatcgtaataggtaatacattgctcttacctgaaagatacctaaagccttgttgtggaagaggaccagagtgagatgttttgaaatactgcttcrcgcactgtgtcacagaaaaatggagaaactgtataacagaaataaagggtccataataattcacgcaaggtttgccacatttcagattggttataaattcacaggaaaagaccacacatgcatccacacaaacatacacacatacaaatacacactataagactacagtaaattcccagtaaactgaacattcagagcaggagcagctacatgatagccaggtaattaatttttctgctctatctaagctcaagaagaaaaaaaatcaccaaggtcttatggccgtgaatattttatttcttttacttcctttttgtgcatgtgcaaacattattatttagtataaatagctctccattgacatgtatatgagacttggaatttagtgtaatttaaaactgaaagacaaaattgct

SEQ ID NO: 606372 - DNA, 516 bp, Homo sapiens
tgctacatcgtaataggtaatacattgctcttacctgaaagatacctaaagccttgttgtggaagaggaccagagtgagatgttttgaaatactgcttcacgcactgtgtcacagaaaaatggagaaactgtataacagaaataaagggtccataataattcacgcaaggtttgccacatttcagattggttataaattcacaggaaaagaccacacatgcatccacacaaacatacacacayacaaatacacactataagactacagtaaattcccagtaaactgaacattcagagcaggagcagctacatgatagccaggtaattaatttttctgctctatctaagctcaagaagaaaaaaaatcaccaaggtcttatggccgtgaatattttatttcttttacttcctttttgtgcatgtgcaaacattattatttagtataaatagctctccattgacatgtatatgagacttggaatttagtgtaatttaaaactgaaagacaaaattgct

SEQ ID NO: 606373 - DNA, 516 bp, Homo sapiens
tgctacatcgtaataggtaatacattgctcttacctgaaagatacctaaagccttgttgtggaagaggaccagagtgagatgttttgaaatactgcttcacgcactgtgtcacagaaaaatggagaaactgtataacagaaataaagggtccataataattcacgcaaggtttgccacatttcagattggttataaattcacaggaaaagaccacacatgcatccacacaaacatacacacatacaaatacacactataagactacagtaaattccmagtaaactgaacattcagagcaggagcagctacatgatagccaggtaattaatttttctgctctatctaagctcaagaagaaaaaaaatcaccaaggtcttatggccgtgaatattttatttcttttacttcctttttgtgcatgtgcaaacattattatttagtataaatagctctccattgacatgtatatgagacttggaatttagtgtaatttaaaactgaaagacaaaattgct

SEQ ID NO: 606374 - DNA, 581 bp, Homo sapiens
ctgaggatttttgcatcaatgttcatcagagatattggcctgtagttttgtttgtttgtttctttgtcgatgtatctttatttgktttttgtatcaaggtaatactggcctcttagaaagactttggaagtattccttcctcttctattttttggaataggttgagtaggattgttattagtccttctttcaatgtttggtcaaaatcgggagtgtagccataagggtctgaggcttttctttgctgggacatttcttattatggctttcatgtcattatttgttattggtctgtttaggttttggatttcttcatgtttcaatcttggtaggttttgtgtgtctaggagtttatcaatttcttccagcttcctattcattgtcatatagttgttcatagtagtgtagcctctaaaagatcctttgtatttctgcagtatcagttgtaatgttttgttttcatctcttattttatttatatgggtgtttcctctttttttcttattctggataaaagtttgtcaattttgtttatcttatcaaaaaacaactttttcttttgttgatcttttgtatttttt

SEQ ID NO: 606375 - DNA, 581 bp, Homo sapiens
ctgaggatttttgcatcaatgttcatcagagatattggcctgtagttttgtttgtttgtttctttgtcgatgtatctttatttggtttttgtatcaaggtaatactggcctcttagaaagactttggaagtattccttcctcttctattttttggaataggttgagtaggattgttattagtccttctttcaatgtttggtcaaaatcgggagtgtagccataagggtctgaggcttttctttgctgggacatttcttattatggctttcatgtcattatttgttattggtctgtttaggttttggatttcttcatgtttcaatcttggtaggtttkgtgtgtctaggagtttatcaatttcttccagcttcctattcattgtcatatagttgttcatagtagtgtagcctctaaaagatcctttgtatttctgcagtatcagttgtaatgttttgttttcatctcttattttatttatatgggtgtttcctctttttttcttattctggataaaagtttgtcaattttgtttatcttatcaaaaaacaactttttcttttgttgatcttttgtatttttt

SEQ ID NO: 606376 - DNA, 477 bp, Homo sapiens
tataagcaaagaaatctctccctgtggccaccaccactccaggccaatgttgggtactacctggctaccgtcaatgttcattcaaggcccacatgctcttcagtcagattttggtgaatgttgccaggcaggaaactctctcctcaggacagtaggcacccctttggcccagggaaggtccasaaatgctgaccaagagcccaggcctagtactggggacagtaaaagcccacttggtgctctgtaccactgtgaccaagctggtacctggggctgcaagacaaagtcccctttactcttccctctctttttctctagcataaggaatctcttgctataaccaccacagctgggaatgttctgggtcatacctgatgccagcacatctctgagtctcacttaaggcccacagcaagtactgcctgggtatcacagctgattattcagggcccaagggctctttagttggcaggtaat

SEQ ID NO: 606377 - DNA, 549 bp, Homo sapiens
ggaaaatgaaatcttcactagattatgctattaccaactatgtagaagaagtaagtacagtatgactgagtttagcttccctgataaggtatttcttgtactaacaaaacaaaaacaaaaacaaaacaaaacaaaaccctctttctcatatagcacctatttcttttacttattttctcccattggcattcaaacatactgtggtatctcccagcttaaaattctctgtctccttctctaagtctctttctctgtcttyctttctctctctctctcctatttctgtcttccacatcatttctatctctcttcctcgccccttttactaatttattccatttctatgttctcttgctaccaatatctctcacatgggtttctgtttcacaatgaccacctaatagtcctgagtttaaacttgtcccacacaaagttaatttcccacaaagcaatcaaagtgatatatttaatgtaaaatggtttcataccaccagccttcccctcgatccttacaagctttcaatgttttctcattgcactttgaataaa

SEQ ID NO: 606378 - DNA, 577 bp, Homo sapiens
ctaattattaattccataattttattgtttgtttcacagaccctttttgcaatattaaacattccagacaagcctatgaggttttaagtacaacattgttttcctaaaattgttaatattctactgtgaatggcttgcattttatgtaaaatgactctattttgaacgacctgttctattacattaaattctttcaagcatgaagttctatggccttaattacagtgtacaatcctcctgctatttytgtaaatcatagcatgtaaaactcttcctatgttttgatcttctgtaatttgtgaaatgaagacacttagagcagaagacaagagtcctaatttcctctctggtggttaaaattttgaatttacactttaagtttttatcttcttgaatcaaattatacaaataccttaagttaaattatttgatatttggtgagccaaaatgaatctccattacagtagggactatctctaaagcaggcatcagttcaataaaattacacattactcctcaatttgtagaagtaggtacaataaatttcccccccacaaatctaataccagtgtttaga

SEQ ID NO: 606379 - DNA, 570 bp, Homo sapiens
atagtttttctttctattttatctaggcttttctgatttagagactttagcgtctgaggggtgaaactagagaagaaatggatatcatccagtgatcccgaatttagagttggatgagtgaattagaaaagtgtgttctctttgggcatataaattaattattggtgtatcaattaccttttgctatataataaatcagttcaaaacttcacagctcacaacaacaaatgtttattttttttctgattatgtaggacagttggtggttattctggtctcagctgtcttagataatttctgtggtcacttggaagattggttgatatccagtggtctataatggcctcaataacttgtttggtaagaagtttggtctcttttttatgtgatctcgaattctcaagatcagccagccctggtctcacagagagcaaaaagtcttaartcacaataaataagccttttcacaacctctactttcatcttgtttgctactgtcccattggccaaaacagttaacagaaaggggagactcaatacagagggaaccaccaaatgatgtgaatacaa

SEQ ID NO: 606380 - DNA, 587 bp, Homo sapiens
aaggtgtgccaattacaacacagacatgtctagagaggtggtcaatattttcacacacatccgtgtgaagagaccaccaaacaggctttgtgtgagtgataaagctttttaatcatctgggkgcagacgggctgagtccgaaaagagagtcagcgaagggagatagtgatggaccgttttataggatttgggtaggtagtggaaaattacagtcaaagagggttgttccctggcgggcaggggcgggggacacaaggtgctcagtgggggagcttctgagccaggagaaggaatttcacaaggtaatgccatcagttaaggcaggaaccggccattttcacttcttttgtcattgttcagttacttcaggccatctagatgtatacgtgcaggtttgggtccagaggcctgacaaatattgtatacacaaaataaattactcacccgtgatcatcatctgtatcctgtagtttattctatgatattggaagagttacagagaaacaattgattttagactctgatgaaaattggcttctatctatgatacgaaaagatgttaaattacttcaccaagttgcttcgag

SEQ ID NO: 606381 - DNA, 590 bp, Homo sapiens
tttgatttattcgttaaaaaatacgaaaacttatgagctgaaaacagaagatgatggtcttattattactactaccaccatcaccactactattactactgctgttaaatctatcatagtttgagtaacaataacaattctttcttgttaagtttgcttatttcttttgcataagaaagacaatgactaagaactaagtcaccatgttagctataaaagagttcttggttactctattcattattttaggcaaattataatttccttgacaaaaaaataagaatttctcttgggtataataaaggacaagcctagacactgttagttatcttgttttatttaaaaggatttctttttattcttcccttggcttttcatcttttactaacagtatgaaatttataacaatacacgtccaaatcagctagtacctattatcagcagtcacatcaggaagatttacttgccaatatatactactaraaataccattttatgggctaatcataaaatccatcaatagataacaaagagcaatgttcgtgagcgtgagagtcagtctaaacagattattgaggaataatgttagt

SEQ ID NO: 606382 - DNA, 608 bp, Homo sapiens
tgcatgatactaaccctatctgagttcctggtttaccatgttacatatttatatacgtaaaataaaacaccttgtttatcatttggttttcctttgactggactaaatatctttttaaagtaaaattcatacactgataaatgatatattttaaatgtataattgcattatttaagctttgcattatttatttaagctgtgtctatagtgtctatatggcaattatggatcatatataggaactgaacaattattgagacagattggcactatatgagataaagcagtatttgagcttcaaaattaaagtttttgaagattttgtttctaaaccacatamactaaacaaattttataagaacattttggtttacctgtggccaatacaatcagttacttgtcaatgcctcaaattcattttatctcaggcactagaataagatgataattagaaggctacctgacttaggttctttacttctaacatgaaaacacagggtctggctcagagtttttgtgaaaattaaaattaagataattcatgtaatgggtttagcacagtacctagcagactcagcaaacgctgaaaatttttagcattttatctt

SEQ ID NO: 606383 - DNA, 598 bp, Homo sapiens
ggtaatagtcaccactgcttctccttttaatagtcaaatttggcctgttcttaaacctgaaaaaaataaatggaggctggtagtagatcatccaaagcttaatgctgtggttccacatattaaggccaccattacttggtgacactactgactcctttcaatcagcaatttgtaaatactttgtagtcataaagtcataaggatttgacaaatatgttctattaagtgyctcttttgatagcctcttacactcctaaaaggagatagctcatttggccacccacaaaaatgctcctgctgctgttgctgcctatgcctctgtaacaacacagatcccgatccccacagttacagggaaaggcttatagcttttctttatcttcaaaagaactcaaaattctctacctgactacacatagaatacttaaacagtcctgctgtcacaaacaatccctctgcaggcagatctttactgcatccaagtttctgtgggaaaataggtatgacattacattgatgccatgctcttccaaggagattcctttgacacactcattcaggatgaataaacattcaaaaaggagctcacaagaaagaa

SEQ ID NO: 606384 - DNA, 599 bp, Homo sapiens
ctacacactacaaggtaggccagaggggctatcactcaatcaccttcagtgtattatagtccagaagtttagaggtaagctcccaatttcaagttttatatctcagtattttcagttgtggactagtaagcagaagagaaattaggaattaagaatatgggactatatacaaaaattagctatcatggaggccaaggaagaagtmtttttcttggaatgaaatgaggtgttggatattatcaactagctcttactacagcctttttttcccctgtaatctacctgccataaaaaatacctattgttataaagacactgaagaagaggagaattgagaaaatgttattagtttatttagcaatgcttatggcggaagtttcaaatacaggtcatgcatcttgcattcatacaagtatgctacacaggttaccaatgaccctgagaaataaattttccaaataacaattttcaatatttaaggtttacaatccttttgtaacgtactcataacttttgagttgtggtgttcagaaatttattttaaatacttaataaaatagccttaattttctcatgtttctccatcatatgactccatt

SEQ ID NO: 606385 - DNA, 572 bp, Homo sapiens
acctctctgcagctgactcaacagcctcccaagctctgagaccctgggtgaagcagagattaggactcattagttcagttgcccactccacaaccccctgcctccatctgtgctggtaatttgtctgatctcaacaaaagaatgaggttggatttcttctggaaatcccagcctgcacaggggacccctggctctgccactgtatcaggttgaccttggagaagccactgcccattctgcacttccatattctcattgtactatgggctgacaacccctaccttcctggcaacagggccattaaatgagataatgggtaggaaaytgataagtgcagtatcttacatgggtaggtgcttggggttgggattgtgaattgaatccccccctccccgcccccacacccatgcttaaaccctcttcttcaataagaatgtggccctcagataatgactacactctaagccttgttccttatcctggaatggaaggagatgtctcattgaaagaatggcttgggttccaactggagaaatgggtttctgtgaggggaaacccacataaagacagca

SEQ ID NO: 606386 - DNA, 582 bp, Homo sapiens
tattcttctagttctttatcattattcctcttacatatacatctaagatcttaccttcccagttaatttttgagtaggcttcaggctcacctttttgttttgttttgcattttgatgtccaattgttacagctctatacgttgaaaaggctaktcttccctccactgaattttatgttggcatttttgtcaaaaatcagctgaccatttgtgattggatctatttctaggttatctatcatgttcctttgatctatatacctattcttataccaatacaacattggcttgatttctgtactttatagtaagtcctgaaaccagtgtggggcctccaactttattctttttcaaagttgttttgattattctaggtcctttgcttttccatataaattttagaatcaacttataagtttttacaaagatcctgctgggattctgattgggaccccgctgaatctatgaatcaatttggaaagaatggacagctgaacaatactgagtcttttgatccatgaacaatggtatctctttccatttaaattttccttaatttcgataatatttaggaattatacac

SEQ ID NO: 606387 - DNA, 549 bp, Homo sapiens
agggtccaggatgtcctcactygcaggtttggcagctgatgctagttgtcttccagggtgctttgtttctcccctctatggcctattctgtatagttggctggactgggcttcttcacagcatggtctctgggttccaacagggtgagaggggaagccacaaagcctcttaagttccaggctctggagcctgaacaatgtcacttttacccccattttattagtcaaagcaaatcacaaaaccagtccagagtcaatgagtagaaaagtagattacacctcttaatggggaaacagcgatgccaattgcaaagtgggcatggacacagagaggcatgacacactgcagtcattgttataatgacctaccacatttacttttttaaaccaacaatcccatggaaggacttgctgcatgctatttttgaatagctttcctaagagtaccttctactctggcattcttcctgtgtttatgacccctttccttttcagtctcctctatgaactctttttaaccctttaatgttggtgcacctcaggacaatta

SEQ ID NO: 606388 - DNA, 625 bp, Homo sapiens
atgacaatatgatttttttgttgttgttgagacagagtctcgttctgtctcccaggctggagtgcggtggtgtgatctcggctcactgcaacctctgcctcacgagtttaagcgattctcctgcctcagcctcccgagtagcaggactacaggcacacaccaccacgcctggctaattttttttttttttgtatttttagtagagacggggtttcaccgtgttgcccaggctggttgtgaactcctgagcttaggcaatccaccagcctcggcctcctaaagtgctgggattacaggcgtgagccacctcacctggccgaaattatttttaaaataagatactgggagatgcagttattttaccccaccaaaggaaaaattaaataacttgaataatcttaaaatgacccccacgtctcaaatggttttaggatagagtggcataaccaaggtctgccacacagtggcagtgtttccccagggacgaaggtaatttagcggcccaggactttggaaaagcaggtagttttaaactttactccagaggaatagcagtactaaaaaygtaacatggtaatcttcctcaatttgcagaaaaagaaataaaagacataattcagtcaat

SEQ ID NO: 606389 - DNA, 584 bp, Homo sapiens
ccaaccaaaagtataatatataggtcttgtgtttgtctccatttcttccagggtcctcaaggaccaagaggtcaaccagggcctccagtgagttggttttcatttatatctgtttaccattgatgcttatatgtttgcctggtttaagatgtctactaaataaatgtgtattttttttaatttgctgtgttctagggtccacctggagcaccaggcccaagagtaagtttgcttggtttgattttgttttgttttatcttagtatgtcatattaactttttaaatatccttctgttaactctctattaaaaggtatcccttttggatacctctgttcttttttgctaacctgatacagggctggcccagctacayaaacatgaaatccaagcctcagacttcttatttataaaatggagatggtatctcctgctttcttgggtggtttcaagtgttgagtaagaagtaaagcatgcagcacattgtataatacataataagcacttgaaaaactaattatctccatttcttcctaattctacatcttcactctccttttttaaatgttctctttttgccagcca

SEQ ID NO: 606390 - DNA, 591 bp, Homo sapiens
ttacagctggatcaaagtatatgcgaatgcaggtgataagattagtgttgtttattcttttgtcaaaaatataaaaccaaatatatgatttgtttagttccattaaataatttcaaaatattgaatttcaatgataccaagaacaacatcaaaatacaccaaccagtgaattatataaagagaatctcataatgattctactaggaaaaatattgaaaactgaagcccaattaaaaatatgaatattttcaccaagtgtggtggctcacacctgtagtcccagcactttgggaggctgaggcaggaggatcccttgagcccaggagttcgakaccagcctgggcaataacgtgagaccctgtctctacaaataatgtaaaaattagccaggcatggtggtatgtgactatagtcccagctacttgggagctgaagcagggggaacacttgagcccaggaggtcgaggttgcagtgagtcatgtttgcaccactgctctccagcctgggcaacagagtgagaccctgtttcaaacaacaacagcagcaacagcaacaacaaaacaacaaaatgtttcaattagtacagtatg

SEQ ID NO: 606391 - DNA, 579 bp, Homo sapiens
gaattctcttgcctgtctcagactttaattctgagccaaatctgatctgccttttagaggaactacttttaagttagttttctccatcttggacaattatggttgatttctctttaaacacaaacagaaactttgtacataccccctgaaggaactgaggtacagtgggaaaagtgccagccctgacctcagcctcttgctagcagtactgcttaggtaaggtacttraacctcagtgagagtctcagtttctttctgtctgaaatgggacaaacaaacagctaccttacagggtggttgttgccatggtcatctctttctgctagtgcagtgtaaagaccactctccctaaaggaggagatagagacagatgcaacacgaacagttctgtggtttgcttgcctttacaccacactctttacatttagggtagaagcaaacctccattatatcatacaagaaaaggctttgttcttaaagagtaaaataatttttgaaggaggctaaataaaataatcagtgcaggaattaattataaggaaatatgacttcacacacacacatgcacacacacaaaaa

SEQ ID NO: 606392 - DNA, 579 bp, Homo sapiens
gaattctcttgcctgtctcagactttaattctgagccaaatctgatctgccttttagaggaactacttttaagttagttttctccatcttggacaattatggttgatttctctttaaacacaaacagaaactttgtacataccccctgaaggaactgaggtacagtgggaaaagtgccagccctgacctcagcctcttgctagcagtactgcttaggtaaggtacttaaacctcagtgagagtctcagtttctttctgtctgaaatgggacaaacaaacagctaccttacagggtggttgttgccatggtcatctctttctgctagtgcagtgtaaagaccactctccctaaaggaggagatagagacagatgmaacacgaacagttctgtggtttgcttgcctttacaccacactctttacatttagggtagaagcaaacctccattatatcatacaagaaaaggctttgttcttaaagagtaaaataatttttgaaggaggctaaataaaataatcagtgcaggaattaattataaggaaatatgacttcacacacacacatgcacacacacaaaaa

SEQ ID NO: 606393 - DNA, 510 bp, Homo sapiens
gaattcagtttgctagtattttgttgaagatttttgcatctatatttattgtttttgtttgtttgtttgttttgagacagagtctcactctgtcacccaggctggagtgcagtggcatgatctcagctcactgcaatctccacttcccgagttcaagcgattctcctgcctcagcctcccaagtagctgggattacatgtgcctgccaccatactcaggtaattttttgtatttttagtagagacagggttttaccatgttgctcaggctgctctcaaactcctgacctcatgattcgcccacctcagcctcccaaagtgctgggattacaggygtaagccaccatgcctggcctatcagggatattaatctgtagttctcttttattgttgtctgcttatctagttttggtgtcagggtaatgcttgccttcctagaatgagtttggaagtattctctcctctttttttttctaataatttaggaagaagtgatattagatcttcttta

SEQ ID NO: 606394 - DNA, 618 bp, Homo sapiens
tgctccatcttacttcacttaagagcaggatgctatggttctggcttcataaggaattagatggagacaaataaatgctcatctcatctcgacactctgccacacaggggttttgtttcttccccttcattctctcttttttaagctagctcacagtcttcttccattacggcagctttaagggttgctcagccttttaccaatttgaattaaaatgctgaaactttttctcccatgtttgaggggtaaagctaaaaatttatagaaaatatggaaataaaagggtaagttatctcatacaaggtcctgtatataagttaacattagacatcttttactatttttcattttttaaataaatgagagaacttctcttttgtgagtggtacctttttctaaacttttacagcacaatgaaacactgtcttcagaactaacttggaatactttgaatttctaatttaaaggtaactatgctttcatattgatgactcttctgcttattttttgataaaatataaaatagtctgccacctttagattctctgaaagctaagaatctgttcatttaacttgcttcttcaatawtaagttttacatgttagactgccaatttta

SEQ ID NO: 606395 - DNA, 363 bp, Homo sapiens
actgcatgttctcatttataagtgggagctaaatgatgagagcacaaggacacatagaggggaacaaacgctggtgccttttggagggtggagggtggaggagggaagagatcaggaaaacaagttatgggtattagcctgatgaaataatctgtacaacaaacccccgtaayacaactttgtctatgtaacaaacctgcacatatatccttgaacttaaaataaaaagtttaaacaagcaattttaaatacttgaatgtcagacattttctgcttctcacttctcaattttccgctcagtcaaattttcttttatgtgtgcttcagtctgcggcccagtctgactctgtcattaggatcact

SEQ ID NO: 606396 - DNA, 503 bp, Homo sapiens
caaatcttcaaaatctgaagcctagtaacatttccagatttcacttcctttcttccgtagtactgtaggtctgcttaaaatcttggttaggcaaagcacatatatcatcctcacttcccatagctttctctcccttcaaaattgagggaaaaaaataagaataaaacaagaactaacaatttgagaatactcactgtaactaggcactattgtaggtactttatgaagtaaataagttactattataatttccactttatgtatgaataaactgaggcaacaaaaagtaaagtaacttgtacgtcatgtaactggtgagtggtgaagccaggtactgaagtgtatagtgagtgagacagaatctaacaatatctgtatgttcacattccaatagcaataacattttagagaatgggaaatcttgaaaaactgcatcrtaatgtttaataaatctttaaaaaatctttaattctgtgtcagcacatgattactttctcaaaaga

SEQ ID NO: 606397 - DNA, 572 bp, Homo sapiens
aatgtcactaagtataagtgagttaaattcttctaacatgttgaaaagactcagactggatcagaaaacaaagtacaactataagctatttatargggtcacactcaaaacaaaatgacaggaaagattaaatgtaaagtttagacaaaaatatatcagcaaacaagaagaaaaaaagaaatcaaacattaagataatattatttaagaattatttcctcttgccagggtgaggggtctgctagccccatggcaggccctagattaaaaaataaataagtaaaataacaaaaagagtttttataaaatataaccttttaaaagcatgtttggctgggcacggtggctcatgcctgtaatcccagcactttgggaggcagaggtgggcaaatcacttgaggtcaggaattcatgatcggcctggccaacatggtgaaatactatctctgccaaaaatagaaaaattagctggatatggtggcacatgcctgttataccacctacttgggaggctgaggcaggagaattgattgaacctgggaggcagaggttgcagtgagttgagatcgcacc

SEQ ID NO: 606398 - DNA, 572 bp, Homo sapiens
aatgtcactaagtataagtgagttaaattcttctaacatgttgaaaagactcagactggatcagaaaacaaagtacaactataagctatttataggggtcacactcaaaacaaaatgacaggaaagattaaatgtaaagtttagacaaaaatatatcagcaaacaagaagaaaaaaagaaatcaaacattaagataatattatttaagaattatttcctcttgccagggtgaggggtctgctagccccatggcaggccctagattaaaaaataaataagtaaaataayaaaaagagtttttataaaatataaccttttaaaagcatgtttggctgggcacggtggctcatgcctgtaatcccagcactttgggaggcagaggtgggcaaatcacttgaggtcaggaattcatgatcggcctggccaacatggtgaaatactatctctgccaaaaatagaaaaattagctggatatggtggcacatgcctgttataccacctacttgggaggctgaggcaggagaattgattgaacctgggaggcagaggttgcagtgagttgagatcgcacc

SEQ ID NO: 606399 - DNA, 572 bp, Homo sapiens
aatgtcactaagtataagtgagttaaattcttctaacatgttgaaaagactcagactggatcagaaaacaaagtacaactataagctatttataggggtcacactcaaaacaaaatgacaggaaagattaaatgtaaagtttagacaaaaatatatcagcaaacaagaagaaaaaaagaaatcaaacattaagataatattatttaagaattatttcctcttgccagggtgaggggtctgctagccccatggcaggccctagattaaaaaataaataagtaaaataacaaaaagagtttttataaaatataaccttttaaaagcatgtttggctgggcacggtggctcatgcctgtaatcccagcactttgggaggcagaggtgggcaaatcacttgaggtcaggaattcatratcggcctggccaacatggtgaaatactatctctgccaaaaatagaaaaattagctggatatggtggcacatgcctgttataccacctacttgggaggctgaggcaggagaattgattgaacctgggaggcagaggttgcagtgagttgagatcgcacc

SEQ ID NO: 606400 - DNA, 313 bp, Homo sapiens
atgagtttgagtttatcaagcagccagctagagtgtagtaagatccaaaggtagagatcgggcttttaggaraagtggtagaagaagcctaaacacttcactattatctaattgaacagagctctgcattgagggttatctcacaccagcccacctttgataacaaaatggcattttctctttactttttggcaactcttgccaaaaaagctctcatggggctttacggagaggggaaagaagcgactgtcgggggaggaccttggcctccctggggccctggccataatgatgtcaaacaaaactagaacat

SEQ ID NO: 606401 - DNA, 599 bp, Homo sapiens
tgcacatcaatgtacactttactaacttctataacactaaaaaaattgaatgctcaggatttgaaaatttggaactaaatcatagtatttatcattttgaaaatataaacatgatttcttaatatctatatgattatcctcaaccagggatatcactggttttgataactgtcctggttgatagcatgcataccattgaaaacagtgtgattattacgggtatactggcagagggtctcctaggattagtagcatagagagaggattatgttccttgtgtctggaggggaaattgacaaaggatcatcccacaaaagcagtatgttaagtggtggaaaatatgagataaaaaggctttttgtggtggaataataacataatactactcctatgggaacttatcattggggcttaaaaaaagtcttccaaatatactttctgaaatcagtctattcatatrtagaggctgctttatgtgcttgtgtgtgtgtgtgtgtgtgtgtgtgtgtgtgcatgcactcatatgcctatccctatgtttgtaaagtataagaaattgttttttaatgtgcagtgataacttgaatcttagtttcact

SEQ ID NO: 606402 - DNA, 447 bp, Homo sapiens
agatctagaaaatagcctcaaacgggcaaatctaaaacttactggccttaaagaggtggtagaggtaggggtagaaattttattttaaaggataataacagataactcctcacctaagaaagatatcaatatccaagtatgagaaggttagaaaacataaagcagattcaatccaaataagactacctcagttcatttaataatcaractcccaaaggtcaaggataaagaaaaggtcctaaaagcatcaagagcaaaaaaacaagtaacacacaatggagcttcaatacatcttgcagcagacttttcagtagagagtttataggccatgagagaatggcatgacatatctaaagtgctgaaggaaaaatattttaccttagaatactatattcagtgaaaacatcctttgaacatgcagataaagactttcccagacaaacaaag

SEQ ID NO: 606403 - DNA, 597 bp, Homo sapiens
aaagatgtccactttccccactgtttttcaacatagtcctggaatttctagatagggcaatgagctaagagaaakaaataaagggcatacaaattagaaaggaagaagtcaaattatccttgtttccagatgacatgatcttatatttggaaaaatctaacgtctccaccaagaaaactattagaacatataaacaaattcagtaaagttgtaggatacaaaatcaacatacaaaatcagtagtatcctctatatgccaacagagaacaatctgagacagaattaaataaagtaatcccattcacaatggctacaaataaaataaaatacctagaaattaaattaactcaagaagtgaaagatctctacaatgaaaactataaaacattaatacaaagatttgaataggacacacaaaaatgaaagatattccatgttcatgaattggaagaatcaacaatgaacaaagaatcaatcaatgtaaaaatgtccatactactcaaagcaatctacaaatttaaggcaatccttatcaaaatactaatgacattcttcacagaaatagaaaaaacaattttaaaatttatatgaaaccac

SEQ ID NO: 606404 - DNA, 528 bp, Homo sapiens
tgttatatattttttggcattaatagcaggaatcttttggtttgtgcccataatacatttctagtggggacatatattctaggattctgtttcctactatgacatttttttttctttccaagattttcctctagatgttgtaatctttagaatgaygtaggccagctctgatatgtggttgctggacccaacttctggctgcctctaaaagcagctcccatgatgcagggtactcaatctgaatagccagtgaaacctcttaagaatagagatccttaaaccctatttcagatttattaaaaaagactgtgttggtgtcaaatcatttaacagatgtattagtgctgccaggattgataagcactactatagaggttcggctgcactggttttaaattgatacagatttttcagaaccaaggagtagatatcataggaagcagtgaatgtgtactgaagccatgtgaagattgcataggaatgctcaaagaccaacattcctgtctttaatggcagcagcttccctct

SEQ ID NO: 606405 - DNA, 597 bp, Homo sapiens
aaagatgtccactttccccactgtttttcaacatagtcctggaatttctagatagggcaatgagctaagagaaataaataaagggcatacaaattagaaaggaagaagtcaaattatccttgtttccagatgacatgatcttatatttggaaaaatctaacgtctccaccaagaaaactattagaacwtataaacaaattcagtaaagttgtaggatacaaaatcaacatacaaaatcagtagtatcctctatatgccaacagagaacaatctgagacagaattaaataaagtaatcccattcacaatggctacaaataaaataaaatacctagaaattaaattaactcaagaagtgaaagatctctacaatgaaaactataaaacattaatacaaagatttgaataggacacacaaaaatgaaagatattccatgttcatgaattggaagaatcaacaatgaacaaagaatcaatcaatgtaaaaatgtccatactactcaaagcaatctacaaatttaaggcaatccttatcaaaatactaatgacattcttcacagaaatagaaaaaacaattttaaaatttatatgaaaccac

SEQ ID NO: 606406 - DNA, 633 bp, Homo sapiens
ctatagtaaacaaaatggcatttcactggcataaaaacagacatatagatcagtgtaacagaatggagaacccagagataaatccatatatctacagtgaactcatttttgatgaaggtgccatgaacacacattggggaaaggacagtttcttcaattaatggttgtagaaaaactggatatccactggcaaaaaaaatgaaattcgacacctatctctcaccatatacaaagatcaaatcaaaatggattaaagacttaaatctaagaccttggactatgaaactgctaaaagtaaacattgaagaaattctccaggacattgatcagggcaaaaattttttgaagagtaccccaaaagcacaggcaamcaagcccaaatagacaaataggatcacatcaagttaaaaagtttctgcacagcaaaggatacaatcaacaaagtgaaacaacaacccacagaattggagaagatatgtgcaaactacccatctgacaagggattaataaccagattatataatgaactcaagcaatatgataggaaaatctaataatccgattaaaaatggacaaaatatctgaatagacatttctcaaaagaagagatacaaaaggcaaataattatatga

SEQ ID NO: 606407 - DNA, 453 bp, Homo sapiens
catgtgaagattgcataggaatgctcaaagaccaacattcctgtctttaatggcagcagcttccctctttgtgacagcatagcacatgcagccaaggagtttcatcaaggactccagctagattaggaagtgttgactttcaaattagaagtcaacatttaactttgattatgcatgaaactacaaagccaaatattggtaagtccctaatatccctttttatattagtgctattctaaatgttatatatgtaccacatactattataactgtttgaaatatgaatttacttatttacactattttattgccttaytccaaaaagatgaagaaaaatgtaaacaatggcttaagtagaaatctatgcaaagatactcatcagactctcatatctatttaaaatatcccttagcaaatggaaaaaataataaagtaaaataaatatataaggct

SEQ ID NO: 606408 - DNA, 556 bp, Homo sapiens
gccctcaagtctccttttgttaattttcctttcttcctatgctttctctgcttttatctcttcttacattctctgcagacctaggtaagtcaataatatcatagggtaaattaattcaatattayaacttttaatactttacatacagaagacacatcggggaaaaatacaatgtatacattttacttgtggcagttcagatacatagcacctggatgaagaggatccttgggaatcttatacttttcaaatcggatgatacggataaatttataatctgcttccatatatgattttatatgtcattctgaaataattctacctataataaatatcttgaagcactgctaatgttttgcatgaaatcatctatgcaaaagatagtgctattgaaactccaataaattgttgtcttcaataattataatgctcctagctagtcactatacttttaaatattattcttttagtctttcagattaatcatagaataatgatatgttaggaatgtttatcacattagtaacatagaaatgctggtgagaaattaggtcag

SEQ ID NO: 606409 - DNA, 626 bp, Homo sapiens
tatgtcattctgaaataattctacctataataaatatcttgaagcactgctaatgttttgcatgaaatcatctatgcaaaagatagtgctattgaaactccaataaattgttgtcttmaataattataatgctcctagctagtcactatacttttaaatattattcttttagtctttcagattaatcatagaataatgatatgttaggaatgtttatcacattagtaacatagaaatgctggtgagaaattaggtcagtgtgaatttaggtcagtaaccagtaacacacacacacacatacacacacacacaatataagtatctaatttggggtttataacagactgtggaggtttacaataaaatgaaacattataatgttttgcttctcattaaatatttatgtcttgtcctttcctttagttttccttttcctctcctttccttttttttctattctctctcttttccttttaaataattataatgtaataaaggattatggtagttatttcttgatacttcccattacattgttgctaaaattgtttatttctactattgttattgttatacccaagtggttaacctagagccctctcattacaataacatggaggaagcat

SEQ ID NO: 606410 - DNA, 537 bp, Homo sapiens
aagaacacacaaaatgaaggaaacattacagaaagacaaggtagttttccagaactgaaggcctgagcctctatatggtgaaggcccaccatataagtaagtattttatagttattgatgctacagttaatgcagttttaaatttttcagaaatacaattgattattttatattgaacttgcatatttagaatttgtcagtcttaattagttcaggtagttggctttatagattcctttgggttttgtataaaattaattatgtcatctgtgaataaaaaaaaaagattttacttcttttccaaactttgtgccttttcttactgtactaccatggctagaccttctgatacaatgtwgagtacaagttacaacaatgaatattcttgctttgttctctgtcttgaagaaggcactcgattaattaagtctgacattagctatagatttttgtaggtactcttattaaatggaggaaatttttttctattctagacttggtaaggggttttatgactaaaggttatttaatttgtca

SEQ ID NO: 606411 - DNA, 537 bp, Homo sapiens
aagaacacacaaaatgaaggaaacattacagaaagacaaggtagttttccagaactgaaggcctgagcctctatatggtgaaggcccaccatataagtaagtattttatagttattgatgctacagttaatgcagttttaaatttttcagaaatacaattgattattttatattgaacttgcatatttagaatttgtcagtcttaattagttcaggtagttggctttatagattcctttgggttttgtataaaattaattatgtcatctgtgaataaaaaaaaaagattttacttcttttccaaactttgtgccttttcttactgtactaccatggctagaccttctgatacaatgttgwgtacaagttacaacaatgaatattcttgctttgttctctgtcttgaagaaggcactcgattaattaagtctgacattagctatagatttttgtaggtactcttattaaatggaggaaatttttttctattctagacttggtaaggggttttatgactaaaggttatttaatttgtca

SEQ ID NO: 606412 - DNA, 526 bp, Homo sapiens
tcaaaatacaaattaaaacatatttttgaaacaacaataatggaaatgctacatgccacatttgtgggaattttgtagctatatttgtttatagctaaaatctatttatagccaaacttgtgaggtgtttatagctataaatgaatatattaattaaaaataaagtctggatataagtaatcaagcattcatttacagttcttaagaataacagtaaattaaacatctaaaaatataggaaggtgggaaatagtaaagttaatagaataaattaataaaatatcaagaaaacatagagtgcagataattaataamacccaaacttggttctttggaaagactgacaaaattgataaagatcctaagactgattcagaaaaaaaaatagtggaggtataaatatcaggaattaaaatgaggccatcactataggttccacaatataaaaaattgttaaagaatattataaccaagtttatgctcacatatttgaaatcaaaagacaaattcccataaaatacagctt

SEQ ID NO: 606413 - DNA, 537 bp, Homo sapiens
aagaacacacaaaatgaaggaaacattacagaaagacaaggtagttttccagaactgaaggcctgagcctctatatggtgaaggcccaccatataagtaagtattttatagttattgatgctacagttaatgcagttttaaatttttcagaaatacaattgattattttatattgaacttgcatatttagaatttgtcagtcttaattagttcaggtagttggctttatagattcctttgggttttgtataaaattaattatgtcatctgtgaataaaaaaaaaagattttacttcttttccaaactttgtgccttttcttactgtactaccatggctagaccttctgatacaatgttgagtacaagttacaacaatgaatattcttgctttgttctctrtcttgaagaaggcactcgattaattaagtctgacattagctatagatttttgtaggtactcttattaaatggaggaaatttttttctattctagacttggtaaggggttttatgactaaaggttatttaatttgtca

SEQ ID NO: 606414 - DNA, 610 bp, Homo sapiens
ggaacttcttaaatgaacatatacaaatggctaataaacatataaaaaggtgctcaatatcattagttatcaagaagatgctaattgaaacaatgagattctactacatgtccaccagaatgtcyacaattaaaaattactaatagtactattatgcattagggctgatatataatagcagaaattctcttctggagggactgtaaacagtacaataagtttgggaaagaatttggcatcatctcctggagttgagtatatgttttttatttttcagccattctacacctaggtatatatagccaagagaaatgtgtgcacatgtacacgaaatgaatgttcactgaaccattatttatagtagccccaaatgagaaacatacagtgttcatcaatcattacaaaaacaaagaaacaagcaaatagaggtgaatgtggccaaacaatagaagctatacaaaaatgaacatggataaactgaatttcataaatataatatcatgcctcgcctgtaatctcagcactttgggaggccgaggtgggtggatcacctgaggtcaggagttcaagactagtctgaccaacttggagtggccctatctatactaat

SEQ ID NO: 606415 - DNA, 555 bp, Homo sapiens
gaactttccaattacagtcacatgaaaagtatagtcattacgaactttcagtgccatgtcagagatggtcagtgctcactagtattcttctcttatttctggacatacaccaagacactgtccagctcccttgcagcacgatgtagctgtctgactgaagtctagttaatgaaaataaatgagagtggtatgtgtcaktttgggaccaaactattaaaacctgcacttgtaatacttagtcttcttccccattaccagttgaaagagtgcgattctagagcagtggttcttaaacttcttggtcttagaatttttatatatgtttaaaaattaattattgatcatccaaggagcccaaggagctttgttttaaaaaatgtggattatatctaatatatttactgtattagagtgtaaaagtaaaaaaaaaatgtaaatagttatcaatccatttaaagtcattaaatgttaatttaaaaaacagtttaatcaaagtggctacggtttctaaaagaaaaaaatagtgagaagaatgttgcaaatttctttaatatt

SEQ ID NO: 606416 - DNA, 583 bp, Homo sapiens
tcgttaagaactttccaattacagtcacatgaaaagtatagtcattacgaactttcagtgccatgtcagagatggtcagtgctcactagtattcttctcttatttctggacatacaccaagacactgtccagctcccttgcagcacgatgtagctgtctgactgaagtctagttaatgaaaataaatgagagtggtatgtgtcagtttgggaccaaactattaaaacctgcacttgtaatacttagtcttcttccccattaccagttgaaagagtgcgattctagagcagtggttcttaaacttyttggtcttagaatttttatatatgtttaaaaattaattattgatcatccaaggagcccaaggagctttgttttaaaaaatgtggattatatctaatatatttactgtattagagtgtaaaagtaaaaaaaaaatgtaaatagttatcaatccatttaaagtcattaaatgttaatttaaaaaacagtttaatcaaagtggctacggtttctaaaagaaaaaaatagtgagaagaatgttgcaaatttctttaatattggcttcatgtaagatagctgg

SEQ ID NO: 606417 - DNA, 615 bp, Homo sapiens
tacagtcacatgaaaagtatagtcattacgaactttcagtgccatgtcagagatggtcagtgctcactagtattcttctcttatttctggacatacaccaagacactgtccagctcccttgcagcacgatgtagctgtctgactgaagtctagttaatgaaaataaatgagagtggtatgtgtcagtttgggaccaaactattaaaacctgcacttgtaatacttagtcttcttccccattaccagttgaaagagtgcgattctagagcagtggttcttaaacttcttggtcttagaatttttatatatgtttaaaaattaattattgatcatccaaggagcccaaggagctttgttttaaaaaatgtggattatatctaatatatttactgtattagagtgtamaagtaaaaaaaaaatgtaaatagttatcaatccatttaaagtcattaaatgttaatttaaaaaacagtttaatcaaagtggctacggtttctaaaagaaaaaaatagtgagaagaatgttgcaaatttctttaatattggcttcatgtaagatagctggcttatcatatctacttctgcatatgaagaatccaggttcacacagataaat

SEQ ID NO: 606418 - DNA, 538 bp, Homo sapiens
caccaccaatcttatcagagaagtttttaaatattgagaatttttcaagcttctgatggccgataaaagttttccaaaattccaattttcacttgaacccatttgccacaaataccttctgtttgttgtcctttaaatgattagctcactctgttaattttkgggggaaattaatgaaatatccaagtccgagctgtctgttctttcaagcaaaaatagtatttccgaggggaaaaaagacaaattcagcttgaaattcagacttttcaagagcttttccttgagacaaccattgtacttttgtgtgcagcagttctttacatgtagttcccatttcttcatgcagaatgaatgataatgataaggacattcttagtagaaaccggtggtgtttgacagtaagcgagctgcagtgaagaacagaagtactagtattacagtttgatgccgctgctttaagataatagtagttttactcaccattgattttttattatcagtgccaatgtcaacatactgaaaaagacatataatgttc

SEQ ID NO: 606419 - DNA, 538 bp, Homo sapiens
caccaccaatcttatcagagaagtttttaaatattgagaatttttcaagcttctgatggccgataaaagttttccaaaattccaattttcacttgaacccatttgccacaaataccttctgtttgttgtcctttaaatgattagctcactctgttaatttttgggggaaattaatgaaatatccaagtccgagctgtctgttctttcaagcaaaaatagtatttccgaggggaaaaaagacaaattcagcttgaaattcagacttttcaagagcttttccttgagacaaccattgtacttttgtgtgcagcagttctttacatgtagttcccatttcttcatgcagaatgaatgataatgataaggacattcttagtagaaaccggtggtgtttgacagtaagcgagctgcagtgaagaacagaagtactagtattacagtttgatgccrctgctttaagataatagtagttttactcaccattgattttttattatcagtgccaatgtcaacatactgaaaaagacatataatgttc

SEQ ID NO: 606420 - DNA, 539 bp, Homo sapiens
agctttaggcgaagtgatgagaaaatatcaccatgatcatgtgtgttagttgttattgctgttttaagtagaatattaccagaaagagttgagctcaaacaagaattggcaggtttcattagcagaaatgatagggaagaagaagttcataaatctgaagccttgaaggaaatgtgaaaaccaactacttgtaggcttcttgcaataaaggataagaccaaaarcaattgtctctgagagtctaagttgactaagacagccttcatagcaaagatggaacaaaggatatagcctctccaactatgtctgatggcctcatgtagcagtgattaagcagagagacactggaatgaagatgaaagaactttgggtatagttgctgaaacagaattgactgaaataaaatagatcaaaagcttactaagttctcaaggaaactgtatggccaaagaaactaggaacctgaaactttggtatttatataactctctggcctcaatacttgcatgagccagatgcgggctgtgaatattaggtag

SEQ ID NO: 606421 - DNA, 331 bp, Homo sapiens
ctcaaaaactgttgattgtgaaactactagtgccaggcattgtagcaagtgctggtgatacaatggtaagcaaatcagatgtggtccctcctctcatataaataatatgattgcttttgctgacatatttgcatttgactcgatttgcattatatgccatactagtcctgcttaatactgaaccccaaattctaactgcttctgctcatattccaatataatttgcacagccattcaattatcacakctgtgagtcaaatgtttgaaaaagagaggcattaacaatgaaactgaccactgcaattctcagccatgttacggattagaaatt

SEQ ID NO: 606422 - DNA, 576 bp, Homo sapiens
ccgaccctagctccaagggaagctgaggaaatgagaattaatcttattacgaggaaagggagatggaaataaaaaattcttaaaaggaaattaattttcagtccctaaatggaagtggcaagggagagggaggytaagagtgtttcctacataagtgtttataaattcttcataaaagggattattggtgataaaatttaacaataattttaaagcagagataattgcatggatttctagttcagcatatttatatttggtctgattgttttatgccaaatatttggctcaaagatggaaaaagtagaagaaaattatcccaggctcttgcaaaaccacaaataaaatttacttcagctagttttatcctgttaggtgggataggttgcgaaggtatctatatgtcacactgagagactttttctagaacccacgcctagtctgtaaatttggggcaaattatttctagtcagtcaagaaattacagttgcctggtgtcattaggaatttcacacattgccacagtaagtagatttgttgcattttacaaataagagagatcacacatgttgttaa

SEQ ID NO: 606423 - DNA, 576 bp, Homo sapiens
ccgaccctagctccaagggaagctgaggaaatgagaattaatcttattacgaggaaagggagatggaaataaaaaattcttaaaaggaaattaattttcagtccctaaatggaagtggcaagggagagggaggctaagagtgtttcctacataagtgtttataaattcttcataaaagggattattggtgataaaatttaacaataattttaaagcagagataattgcatggatttctagttcagcatatttatatttggtctgattgttttatgccaaatatttggctcaaagatggaaaaagtagaagaaaattatcccaggctcttgcaaaaccacaaataaaatttacttcagctagttttatcctgttaggtgggataggttgygaaggtatctatatgtcacactgagagactttttctagaacccacgcctagtctgtaaatttggggcaaattatttctagtcagtcaagaaattacagttgcctggtgtcattaggaatttcacacattgccacagtaagtagatttgttgcattttacaaataagagagatcacacatgttgttaa

SEQ ID NO: 606424 - DNA, 576 bp, Homo sapiens
ccgaccctagctccaagggaagctgaggaaatgagaattaatcttattacgaggaaagggagatggaaataaaaaattcttaaaaggaaattaattttcagtccctaaatggaagtggcaagggagagggaggctaagagtgtttcctacataagtgtttataaattcttcataaaagggattattggtgataaaatttaacaataattttaaagcagagataattgcatggatttctagttcagcatatttatatttggtctgattgttttatgccaaatatttggctcaaagatggaaaaagtagaagaaaattatcccaggctcttgcaaaaccacaaataaaatttacttcagctagttttatcctgttaggtgggataggttgcgaaggtatctatatgtcacactgagagactttttctagaacccaygcctagtctgtaaatttggggcaaattatttctagtcagtcaagaaattacagttgcctggtgtcattaggaatttcacacattgccacagtaagtagatttgttgcattttacaaataagagagatcacacatgttgttaa

SEQ ID NO: 606425 - DNA, 581 bp, Homo sapiens
aactttatgaatgataattatcattcataaatgataattttcaaatgtctgaaactttatgaatgataattatcacaattgtaggatagataaatattattatattttcttattattccttattgttttccaggctttcaataaaatctgtaactgtctttcattattctctcttatttgatatgtactttttctgtcatttattctgcaagtgtaacctaatgacacaaagacatatttccagaataattcttttctaacttcctcccataagccagttataatggtttgaggcaatccaccagyagttatcaaaatgcttctgcttgccaaatctagaaacatgttgctttgcccaacatttgaaatatacatccacttaatgagcaaatatttcaaatcaaatgttcccactgtatgccagtcattgtgctatgggctgagaatgtaacagtgaatgacgcatgctctctctgacctcatcaattgaaaatgcaggcaaagaaggctgcttcatttaatacactgtggtaaataacaacagagatgcactgagcattcagcggtatcatttgagaggc

SEQ ID NO: 606426 - DNA, 436 bp, Homo sapiens
aatgataattatcacaattgtaggatagataaatattattatattttcttattattccttattgttttccaggctttcaataaaatctgtaactgtctttcattattctctcttatttgatatgtactttttctgtcatttattctgcaagtgtaacctaatgacacaaagacatatttccagaataattcttttctaacttcctcccataagccagttataatggtttgaggcaatccaccagtagttatsaaaatgcttctgcttgccaaatctagaaacatgttgctttgcccaacatttgaaatatacatccacttaatgagcaaatatttcaaatcaaatgttcccactgtatgccagtcattgtgctatgggctgagaatgtaacagtgaatgacgcatgctctctctgacctcatcaattgaaaatgca

SEQ ID NO: 606427 - DNA, 535 bp, Homo sapiens
attaactgcatcccacaaattttgctacatttttatttttattcagcttgaaatatttttaatttgtttgtgattccttcttcaatgcatgggttatttttaaatacgttgtttaatttaggacatttagggatcttctagttttttttwaattcctaattatgctgttaccagaaaatacacttcacaagccagcagaggggttacttggccttctttccaaatcaaataagggagtggaggatgcctcaaaacaatcatacaattttggaatttctgtcaacttcctatagtaatctgacattaatccctcagcctgatgagtaaagagagcaaagaagttgagagtaattttaaacagagagagggattagggtagtttacctccatccatcacatgacctagcaaggagcaaaactttcctatggttaataagacatattgctcatcattgggaaagaggacttgaactgcaaaagaatgtgggacacaccattaggaaaacagctgaaggaggctggaggagaatgtgct

SEQ ID NO: 606428 - DNA, 599 bp, Homo sapiens
taaagtttaaaagagctgttgacaaaagtgtwttgagaatgaaaacacaatgtgtttacttgccttttgttgaattcaatttagcaaatactatgtatatttataaaaatactttaattaaatttatatctagtttgtatcttgtcatcataaagctgcattttgcctaagtgtgtttaataagaaaagcaatggtctttcctacaatagatttcattaagaaatcaaggactgttggtatgtaattctcagtctgcagatgtttattattgaaaattatatttgttaaaatatttggtgtagaaaagtatttttttcttatgtttgtgaaatatttttgccctggagatgaatatacttaccaatcttgtatgtgttttcttgttacattaagcatatttttaaaagtgctctctcttaaaaatgtcctatgtaaaaaattaaatatatcactaatttaattacattaaaatacaacaaaaatatttatttttccacaacagcaaacattataatgaacaaaagacaaagaagctatttacaaagacactataaaggccaataagcatgtttaaaaaatcaaattactagtaatcata

SEQ ID NO: 606429 - DNA, 342 bp, Homo sapiens
actataaaggccaataagcatgtttaaaaaatcaaattactagtaatcatagacatagaaaacaacaagaagtcatcaatttcaggctaaggggagaaaaaggaagtgggagacacagactaaaggacatgtgcctgaacccaatgaccaatcttgtctcactgaaaatgttyatgcaattatgatacttcctgacatggtacacagcaacatagataaaatattcttgccaaagaaaaactgattttgaatctcattgagcttttagatctaaccatcagttcacaggagaaaaggagggaaaaaggaacaggttgaacactacagtgaaggattagtcaa

SEQ ID NO: 606430 - DNA, 342 bp, Homo sapiens
actataaaggccaataagcatgtttaaaaaatcaaattactagtaatcatagacatagaaaacaacaagaagtcatcaatttcaggctaaggggagaaaaaggaagtgggagacacagactaaaggacatgtgcctgaacccaatgaccaatcttgtctcactgaaaatgtttatgcaattatgatacttcctgacatggtacacagcamcatagataaaatattcttgccaaagaaaaactgattttgaatctcattgagcttttagatctaaccatcagttcacaggagaaaaggagggaaaaaggaacaggttgaacactacagtgaaggattagtcaa

SEQ ID NO: 606431 - DNA, 511 bp, Homo sapiens
cctcaaaacaatcatacaattttggaatttctgtcaacttcctatagtaatctgacattaatccctcagcctgatgagtaaagagagcaaagaagttgagagtaattttaaacagagagagggattagggtagtttacctccatccatcacatgacctagcaaggagcaaaactttcctatggttaataagacatattgctcatcattgggaaagaggacttgaactgcaaaagaatgtgggacacaccattaggaaaacagctgaaggaggctggaggagaatgtgctgcagaggaatttctgtttttggagaaaagagttgttttgttgrgccctcatgtgatattggctggcagttggccaggttctgcagatacacatttgtacaagcactctttttttactgactgtgagagttaattttatatgttaacttaactgggctaagggatgcccagatagctggtaaaacattatttctctgtgtgtttgtgtgggtatttcctgaaa

SEQ ID NO: 606432 - DNA, 448 bp, Homo sapiens
atgaacatatttcctgttaaatatatctttttctgtataaaattatatatatataattttatatatrtgtgtgtgtgtgtgtgtatatatatatatatatatatatagagagagagagagagagagagagagagagagagagacagacagagcaacttataggagatgccagttcttactttaaagttacttaggtaaaatatttggtaaaatacaggatttttaaggtcagagttcttacatctcttgtccacttctgtatgtcaatcactcagcaaaatgtacagcctgtttaagcacttaacaaatataactgaatttgttaaagaagctgtaaagaaattatattaggaactgaatatggcaaggtgactggtctgtggtacttttttgttaagtgattttaaggtgttacgggacactgactggctgagttgggctctgcctg

SEQ ID NO: 606433 - DNA, 448 bp, Homo sapiens
atgaacatatttcctgttaaatatatctttttctgtataaaattatatatatataattttatatatgtgtgtgtgtgtgtgtgtatatatatatatatatatatatagagagagagagagagagagagagagagagagagagacagacagagcaacttataggagatgccagttcttactttaaagttacttaggtaaaatatttggtaaaatacaggatttttaaggtcagagttcttacatctcttgtccacttctgtatgtcaatcactcagcaaaatgtacagcctgtttaagcacttaacaaatataactgaatttgttaaagaagctgtaaagaaattatattaggaactgaatatggcaaggtgactggtctgtggtacttttttgttaagtgattttaaggtgttaygggacactgactggctgagttgggctctgcctg

SEQ ID NO: 606434 - DNA, 653 bp, Homo sapiens
  misc_feature 284: n = A,T,C or G
gtcataggtgactggagatgatgccatagtcttggggcmcaggtccatgctaataggcttgcagagccttggaatataaaggagggctgtggcagaggtggtggccgaaagagaaaatggccaagaaaagatgcctaaaaaagcccttcagattagccttgaagactaaaagaaatgaagaaaaacgtggcagaaattggtaaatgacaaattttttgtagatatgctatgctaaataatcaccgacacttgtatattattgaaaattagctggacaacaatgnaatgttagtttgagatttgggaaatgaaaaaccaaagtgaggtaagtccaagatatcatccaacatgagaaaagaacgttactacctcccacgtcagctatttgcttcaaaagataaacgtatttcagaagaaacagaagatcgtgctcaaaaccaggaaatatgtccctttgaaatggactccaacagtaatgacaactccaaggttcatttgggaagggtttacacaagttcctcttcaggaaactgaccttctaggataaggaatgtcattccaaatagaagaatcaatacctgctattcctcaggacaaactaaaaattgatattgactattctagttgaacataatctactgacaatgtctttg

SEQ ID NO: 606435 - DNA, 653 bp, Homo sapiens
  misc_feature 284: n = A,T,C or G
gtcataggtgactggagatgatgccatagtcttggggcccaggtccatgctaataggcttgcagagccttggaatataaaggagggctgtggcagaggtggtggccgaaagagaaaatggccaagaaaagatgcctaaaaaagcccttcagattagccttgaagactaaaagaaatgaagaaaaacktggcagaaattggtaaatgacaaattttttgtagatatgctatgctaaataatcaccgacacttgtatattattgaaaattagctggacaacaatgnaatgttagtttgagatttgggaaatgaaaaaccaaagtgaggtaagtccaagatatcatccaacatgagaaaagaacgttactacctcccacgtcagctatttgcttcaaaagataaacgtatttcagaagaaacagaagatcgtgctcaaaaccaggaaatatgtccctttgaaatggactccaacagtaatgacaactccaaggttcatttgggaagggtttacacaagttcctcttcaggaaactgaccttctaggataaggaatgtcattccaaatagaagaatcaatacctgctattcctcaggacaaactaaaaattgatattgactattctagttgaacataatctactgacaatgtctttg

SEQ ID NO: 606436 - DNA, 653 bp, Homo sapiens
  misc_feature 284: n = A,T,C or G
gtcataggtgactggagatgatgccatagtcttggggcccaggtccatgctaataggcttgcagagccttggaatataaaggagggctgtggcagaggtggtggccgaaagagaaaatggccaagaaaagatgcctaaaaaagcccttcagattagccttgaagactaaaagaaatgaagaaaaacgtggcagaaattggtaaatgacaaattttttgtagatatgctatgctaaataatcaccgacacttgtatattattgaaaattagctggacaacaatgnaatgttagtttgagatttgggaaatgaaaaaccaaagtgaggtaagtccaagatatcatccaacatgagaaaagaacgttactacctcccacgtcagctatttgcttcaaaagataaacgtatttcagaagaaacagaagatcgtgctcaaaaccaggaaatatgtccctttgaaatggactccaacagtaatgacaactccaaggttcatttgggaagggtttayacaagttcctcttcaggaaactgaccttctaggataaggaatgtcattccaaatagaagaatcaatacctgctattcctcaggacaaactaaaaattgatattgactattctagttgaacataatctactgacaatgtctttg

SEQ ID NO: 606437 - DNA, 559 bp, Homo sapiens
accattaggaaaacagctgaaggaggctggaggagaatgtgctgcagaggaatttctgtttttggagaaaagagttgttttgttgagccctcatgtgatattggctggcagttggccaggttctgcagatacacatttgtacaagcactctttttttactgactgtgagagttaattttatatgttaacttaactgggctaagggatgcccagatagctggtaaaacattatttctctgtgtgtttgtgtgggtatttcctgaaaagattagtatttcaatcagtagactaagtaaagaagatccgagctcaacaatgtgagcaggtatcatctcatccatttagaaccaagaacaaaagacagatgaagatccaatgcttcccctatcttcctgagctgaggcccattktctcccacccttggacacaggagcccctgcttcttgggccttcagatttcaggacttacaccactggctgcccccattattcccatgccttcagccttggactgagagttataccatcagctcccctggttctaattcagactggatta

SEQ ID NO: 606438 - DNA, 598 bp, Homo sapiens
ccagcctagtcaatcactctgatgttcaatggggtatcacatgttaaaactagattgttctcacacatttgctggaagactagttttaacattttrttacacgtgcatgaagtgtcttttctaatttatttgtgtaatgtcattagtagtaaatagcttaactttcttttacagagtggacactttttaagttttattttcttatcttacaaatcttaacgtggcaagaagttccttagagccaccctaatacatgctaccagctaaaacctaatgtaagcaaacccagggaatgtgaaaaaaaatggtatatttagaactacttaaaaataattacagcaaaactcataaaacaataaaaaatgatgccaaaaacaccacattccttcatcaaaactcaatctatcatgtgtgttactctcttggggttctgttctctgctagagctaatccaatagaccaaatcactaaatcaagttaaggtattagtgaattaatgtttttctagtttcatgttttgaatattaacagcagacttctacaattcatctgcctctcaccaatcaagagaactatttggggattttacaagctgtaa

SEQ ID NO: 606439 - DNA, 431 bp, Homo sapiens
cagtttgttttgaagaccaaaaataaaatggtagcatttaactttgtagcattaactttgtaggatagaatatggaatgacttggccaaatcatgtaaaattagcaaactatacaatttttgagaggtttggagttttagattttgaatttgaaaaattcatctacgtaaattcccagagaaaacaacacagaagccatagcttgtctttttaaaaagtccaaagcatacaaatcatttccccaggtccgaagaaaaggaaacaaaatcttaaaatattcaagagtttgataaggtaaaaaaaagcaattttataaatttgatattcgaattttttayactattcatatatttgaagaattattcacttattttttattaaattttttgggaatgaaaaatagaactatcttttaatatcacaaatgtatc

SEQ ID NO: 606440 - DNA, 552 bp, Homo sapiens
tctgggacataaaaaaggatgctaggtaaaaactaaggaagtctgaataaaatatggactttagttaataatatctcaataatagttcattaattgtgacaaatgtattatactaatacatgataataaagaggaaattgggtgtagggttatatgggaacaccctgtaatatctttgcaatttttctataaatctaaatgtattttaaaataaaatttaataaatttttttaagaattgttttgcctgacctgtaaggtaaagcctagaggtggagtggctctagacttagtctaatctgtgtctcaaaatatcacaaggaactaggtagcttctatctgcccattctgctcaaagtggcagtttattttctatgtgtcttcttaggagtgagtaaacgttttttgcagacctcctttcaagtctcagaactgggtttaaaccaatctttggcaaagagactggaatggcaatgtttgagctagaacaaccatgatttatcctggargtgaaaatagatttatccttccccaggacttgtggggaaggaaa

SEQ ID NO: 606441 - DNA, 412 bp, Homo sapiens
tgaaacaagtggatatttaaagaacgtaagagcytcaaatgggaccaaagtgaataatgttcagcagaaatatttggaacatgaaatctgtagaatgttggattattgactttgctgatgggatctttgatttaactaattgcatccaatatccttttgtattgagaaacatttttggctggaaacatgttggaatgtgtgatggttaaatttatgggtcaactggctagatcatggtgcgtatatatttggtcaaacattattctgtgaagttgttttttggttgagatgaacatttaaatcaatggactttgaataaagcagattacacttcataatgtgggtgggcctcatctgattaggtgaagggcttcatagaaaatgattgacttcccctagcaagaaggaattc

SEQ ID NO: 606442 - DNA, 412 bp, Homo sapiens
tgaaacaagtggatatttaaagaacgtaagagcctcaaatgggamcaaagtgaataatgttcagcagaaatatttggaacatgaaatctgtagaatgttggattattgactttgctgatgggatctttgatttaactaattgcatccaatatccttttgtattgagaaacatttttggctggaaacatgttggaatgtgtgatggttaaatttatgggtcaactggctagatcatggtgcgtatatatttggtcaaacattattctgtgaagttgttttttggttgagatgaacatttaaatcaatggactttgaataaagcagattacacttcataatgtgggtgggcctcatctgattaggtgaagggcttcatagaaaatgattgacttcccctagcaagaaggaattc

SEQ ID NO: 606443 - DNA, 412 bp, Homo sapiens
tgaaacaagtggatatttaaagaacgtaagagcctcaaatgggaccaaagtgaataatgttcagyagaaatatttggaacatgaaatctgtagaatgttggattattgactttgctgatgggatctttgatttaactaattgcatccaatatccttttgtattgagaaacatttttggctggaaacatgttggaatgtgtgatggttaaatttatgggtcaactggctagatcatggtgcgtatatatttggtcaaacattattctgtgaagttgttttttggttgagatgaacatttaaatcaatggactttgaataaagcagattacacttcataatgtgggtgggcctcatctgattaggtgaagggcttcatagaaaatgattgacttcccctagcaagaaggaattc

SEQ ID NO: 606444 - DNA, 411 bp, Homo sapiens
gaattccttgatgacctgaaatagtctgaaacaagtggatatttaaagaacgtaagagcctcaaatgggaccaaagtgaataatgttcagcagaaatatttggaacatgaaatctgtagaatgttggattattgactttgctgatgggatctttgatttaactaattgcatccaatatccttttgtattgagaaacatttttggctggaaacatgttggaatgtgtgatggttaaatttatgggtcaactggctagatcatggtgcstatatatttggtcaaacattattctgtgaagttgttttttggttgagatgaacatttaaatcaatggactttgaataaagcagattacacttcataatgtgggtgggcctcatctgattaggtgaagggcttcatagaaaatga

SEQ ID NO: 606445 - DNA, 433 bp, Homo sapiens
cattagcaccagagactatgacttggaggggaaaaatatgagtggcagagagatcagttaagatgcaactggaatatttcagcctagagattatgaggatctggactagtatactaataacaagataatagcgtgagtgtgaaagtctgtacggatggagtatggacgagacttagtatagaatataggaatggaaggagagggaaaattcaatatgaagcyccaagaggcaggtaataaaagtaattccaaagccatttcagaatggttaggagctgtaacagaattgttagcatcaaagaagagccgtcctaggggctactttgaagaagaaaacatgagaatacttatgtgattgtttatatctggaatgcttgccaaataaaactggtcccagtaaacactaaaagttactataatccttttggataat

SEQ ID NO: 606446 - DNA, 500 bp, Homo sapiens
tgacaccttaaactgtcagtatatttttgaaaatcaatatctcctatttgcttaggaataaatttgaaatatcccttcaaccatttgtgattggttctaaaagcaaaactataaaaacaatwaaaaaaatacaaagcatgtgttacatgtccaaatattgttttgttattactaaatacgtttggattctactgtaggttgttcatgaccttactttatttttcacgaatttgcttatgactttttaatttcttaaattctaataatgagatttcttaataattcaagttttaaaatgttcttttttatgtttcattactcagcctgtcttccatgctatacactacaaattcaaacaaatttaattctctggaactgattctctgaaaaacctatatacagaattaaacaaatattaattagaaacatttgtttagaagtgagatgcatggccaggatcagctatatttgaatttttacaatatatgagaattaaactt

SEQ ID NO: 606447 - DNA, 599 bp, Homo sapiens
gttatagtttctaacaattgcttctcaataatagtaataataatacttgtctctgacattttatagcatgttttatattttttaaacttttttcaacattaattatttctcaatccttacctctctgtgagattaaagaactcagagaggctacatttctacaaagattacttcctgtatgaattttttatgtctaaagctcatatttgatatcaagcctggactaaagaactggctggaaccagagactatctaaaagagcctaacaatacaatataggcagatgcaattagcctatggctggcattgtgattagctggacacaccagttagaaacctactactttctgaatgccccaaagacatgaaaagctatttttatgtgatgctgcagtctcttttatatgtgtttcactygtcatggtagtgatttgtggaagaggctttccaatccccattgttgcggaccatttttggagtacagtaggtcttacttagcacaggatataattgtgagttgttgcatttattgttgatattattagattttgctgatcctggttgccaactaattcttttaagtactttggaggaataca

SEQ ID NO: 606448 - DNA, 599 bp, Homo sapiens
gttatagtttctaacaattgcttctcaataatagtaataataatacttgtctctgacattttatagcatgttttatattttttaaacttttttcaacattaattatttctcaatccttacctctctgtgagattaaagaactcagagaggctacatttctacaaagattacttcctgtatgaattttttatgtctaaagctcatatttgatatcaagcctggactaaagaactggctggaaccagagactatctaaaagagcctaacaatacaatataggcagatgcaattagcctatggctggcattgtgattagctggacacaccagttagaaacctactactttctgaatgccccaaagacatgaaaagctatttttatgtgatgctgcagtctcttttatatgtgtttcacttgtcatggtagtgatttgtggaagaggctttccaatccccattgttrcggaccatttttggagtacagtaggtcttacttagcacaggatataattgtgagttgttgcatttattgttgatattattagattttgctgatcctggttgccaactaattcttttaagtactttggaggaataca

SEQ ID NO: 606449 - DNA, 573 bp, Homo sapiens
cgattggattcttcatacccttgtgagacatgaacgcgtctgagctaaatgtttctgatgtgagcatgaagtgctgaaagggtggaaggatttgaaaggatggagagttcagataagaacataaaatatagatacctgagtgattagtagtcctggcggatgtatggaaattttaaggacagtttcagtgaggtcagttgatccagtggttggacacctcagcagaggtcagagacagcagaggaagaggatggcacagggaataagtacccctcccacagcatgtctctctctctcacacacacacagacatacacacacacacacacacacacacacacacacacacaccctttttatgaagtggtaacacaaaaagttctcagaaaccttagatattgatatgaacaaattgaactaaaaatgtayattacatgtatattacatcacatgcacgcacacacacacacacacacacccacacacacacacacagaccccagcaggagcagcagcaccaactgcatagggaagaaggaaagaagaacatactgtctcagacatgaagcaact

SEQ ID NO: 606450 - DNA, 521 bp, Homo sapiens
atttgattcttatgaccaaatggtgagatagatattaataatttttcttcatacagatgaaagaaacaaggcttacaaaaattatacagcctgtttcaaatttcctcactattacttggcatggttagaatccatatttaggttttacaatgtcaaagctcatactttatccactatattgcatttgttttattttatatttatctattcaatttacaaaactacatgcttaatatattatttcatataatttagaatataggcctgctcacattatrcctgataaagtatgatgtgtctataggtttgtcattaatttcacatctggtttattctttttttgctattcatttattcttcaaataaatatttactgaatagataatgtatgttaagagctaggtatgcaaaaaaaataagatgccatttctgataaaataatggtcatcttactgaaaaagagacacatcaacaattaaaatataacatggtcagtcttacagtagaaatgtatgtaaatc

SEQ ID NO: 606451 - DNA, 521 bp, Homo sapiens
atttgattcttatgaccaaatggtgagatagatattaataatttttcttcatacagatgaaagaaacaaggcttacaaaaattatacagcctgtttcaaatttcctcactattacttggcatggttagaatccatatttaggttttacaatgtcaaagctcatactttatccactatattgcatttgttttattttatatttatctattcaatttacaaaactacatgcttaatatattatttcatataatttagaatataggcctgctcacattatgcctgataaagtatgatgtgtctataggttwgtcattaatttcacatctggtttattctttttttgctattcatttattcttcaaataaatatttactgaatagataatgtatgttaagagctaggtatgcaaaaaaaataagatgccatttctgataaaataatggtcatcttactgaaaaagagacacatcaacaattaaaatataacatggtcagtcttacagtagaaatgtatgtaaatc

SEQ ID NO: 606452 - DNA, 521 bp, Homo sapiens
atttgattcttatgaccaaatggtgagatagatattaataatttttcttcatacagatgaaagaaacaaggcttacaaaaattatacagcctgtttcaaatttcctcactattacttggcatggttagaatccatatttaggttttacaatgtcaaagctcatactttatccactatattgcatttgttttattttatatttatctattcaatttacaaaactacatgcttaatatattatttcatataatttagaatataggcctgctcacattatgcctgataaagtatgatgtgtctataggtttgtcattaatttcacatcyggtttattctttttttgctattcatttattcttcaaataaatatttactgaatagataatgtatgttaagagctaggtatgcaaaaaaaataagatgccatttctgataaaataatggtcatcttactgaaaaagagacacatcaacaattaaaatataacatggtcagtcttacagtagaaatgtatgtaaatc

SEQ ID NO: 606453 - DNA, 601 bp, Homo sapiens
acgagtaagtaatatgaagacaaagagaagggatttaagaaggaagccatttcctatcaatcagaaaaacactctgttatattataccacattttactacttgcatacttacaaatattccaagggcacaacagatatctagatatgcaaacatgtacaacatatttcttcaggtaagtatactgaatgccagaaaaaacctctacaaatgtcattatttagatataaatgtgaaacagcaagaacattttgggagttactagagtcacttgaattctatattgttcctcagaatttggaaaatagaaaatccaaagtttaacaataaatggaatttcttagaatctcagcttttgatgctaaataatcaacaaagggtagtattttaaagaattaaggcgcaaatattacarccttaaataacactcaaaatgcctagaataaactttggtaaaatgccttttttacatcaacagttcagttttcaaaatcgacactgatgtctacttagctgaaagatttatttcattcttcaattatgataataataaataacagttatcaagagttattggaataattttaagtaaatggtatgcag

SEQ ID NO: 606454 - DNA, 565 bp, Homo sapiens
taaacctacatcctacagaaggatgtgtagacatgctgcctaccttaacgcaagtgctaggaattgcaagatggattttagttaggcctttttgcagtttgagaaagattgctgtaaagctcatagccataagacagaggcactgaggcactgtgtacgttaggagcacctgcaggaaggtaagtggtttcattcatcttgtactccagctttcccagatcaccactgttttctcctgtgcctccctagttgtgttttagaatgcttaaagccttccttgttcttaaaagtaaaataggccaggcgcagtggctcatgcctataatcccagcactttgggaggccgaggcgggtggatcacctgaggtcaggagttcaagaccagcctggccaacatggtgaaatcccrtctctaccgaaaatacaaaaattagctgggtgtgatggctcatgcctgtagtcccaactacttgggaggctgaggcatgagaatcacttgaacccaggaggcagaggttgcagtgagctgagataacgccactgcactccagtctgggtgacagag

SEQ ID NO: 606455 - DNA, 515 bp, Homo sapiens
caaatatgtaaggagcacttactatgtgccaggcactgtactgtcccctgaggaattttgcaggaagatagacaaagtccctgtcctcagggagcttacatttagtgccgagagggaaggtaaaagaacacctcccacagccctacagtcaccattgttaaggaaatttaaagggtttggttattgacttaaagatttctcaaggaaactgaatccccaatataaaaatttattgctgagtctctcctggtagcttgaaatgagaagtaacaatcttgggaactttgagataatcttcttcatyaagttaggcagagaactggaaaaagcccactataaagcaagaagaatgcagtaagatgaaataccatgctggagagaggttaagggtaaaatgagtcccagtatgggtaagtgaggatgccaggccctaaaataaaacttccatgtttaacttcttagaactcctaaaaacctctactgatctatgtcagccatctatcatatctgaaaag

SEQ ID NO: 606456 - DNA, 560 bp, Homo sapiens
tatcatgttgcccatgctggtctcaaactcctggactcaagcaatctacccgcctctgcctcccaaagtgctaggattataggcatgagccactgcactcgactagggggttacaattttaaattaggcagccagagaaagtctcactgagtcacatcaagatctggatgtcagggagcaatctgggaattcagaggaaggtagttaaaaacagagggacagcaagaacaaagcacagattaagggagggaaagagtagcagatgataggaaaggagtttccaggggggtcakattagggtcggccaactgccacttatttccagcaaaaatcaatacaacaaaatttcaatacattaaaagaaacctgatacctcatctagaatttgcttttaaagaatctaatctggctaggcgtggtggctcatacctgtaatcctagtactctgggaggctgaggcaggaatattgcttgatcccaggagttcaaaaccagcctggacaacataggaagaccttgtctctacaaaatagtaaaaaattagccaggcatggtggtgt

SEQ ID NO: 606457 - DNA, 284 bp, Homo sapiens
agaacttagataacttctccaaacttccttgctggaagtccaccactgatctgtctgatcagagtgagccagtgctctgtgccccacccttcctcactcctcacccgcactatccttagggaggccagcagccttgaacctgaaggaagaccactaaaagaagtatggcccataggtgagtgagaggcaggcttaaggagcagctggctacctctgagtcagccctgtagacagggtggccgtgcackgtggtcgtgaccaggtgctgcaggctcacctccctc

SEQ ID NO: 606458 - DNA, 355 bp, Homo sapiens
atataattacctctttaagaatctatttccaaataaggttgcattctgaaggactagggattagggactcagcatataaatttgggaaggggatgagattcagcccataacagcacatgtatacatgtgcacatgtgcatgtgtgtgtacgtgtgtacgtgtatgtgcatgtgtgtgatgggcccgggagcatgaagaargtgctttacagaaggcctggtaatgttggggaataccttggtgacatctttcccagcaagagttctggcagataagaaatctgactttcttctagcctcatcctgggtttgtgagtttatgaagaagctgaagagctccatcacttcccagctaa

SEQ ID NO: 606459 - DNA, 427 bp, Homo sapiens
tctttttgcgtgcctacaggcatttggatatcttttgtaatgaagtgtcaagtgttttgttcatttaaaaatttttattattgagttgtaggagttgttcgtatatttcagaaaaaactcctgtcatatacacatatatgcacatctatatgtataggaatttgtgtgtgtgtgtgtgtgtgtgtgtgtgtgtatatatatgcataaatatgtattttttgagacagggtctctgttgcccaggctggagtgtagtggcgtgattactgctcactgcagcctcaacctcctgaactcragtgatcctcgccctcagactctcaagtagctgggactacaggcatgtgccaccatgcctagctcatttcttaaaattttttgtggcaacagagtctcactgtcttgcccactctggtcttaaactcct

SEQ ID NO: 606460 - DNA, 622 bp, Homo sapiens
tctcgctctgtcacccaggctggagagcagtggctcgatctcagttcactgcaacctctgtctcccaggctcaagcaattcttatgcctcagcctcccaagtagctgggattacaagctcctgccacaacgcccagctaatttttgtatttttagtagagatggggttttgccatgttggccaggctggtctcaaattcctgacctcaagtgatctgcctgccttggcctcccaaagtgctgggattacaggcgtgagccactgtgcctggcttagtccattcttgtattgctgtaaagaactgcctgagactgggtaatttttaaagaaaagagatttaattgactcacagctgtacaggaagcatggctggcgaggcctcaggaaacttacaatcggggaagtgctgcacacttttaaacaaccagatctcatgagarctcactatcaggagaacagcaagggggaagtccgcccccatgattcaaacacctcccaccaggcccctccccaacactggggattataatttgacatgagatttgagtgaagagataaagccagactatatatcataaaacatgctgctaattctactgttttaaagttatcttttcatcca

SEQ ID NO: 606461 - DNA, 556 bp, Homo sapiens
ttttaaccatggtaaaaaagctggattttcctattctacacattacaggaagacagtaattcaataggacttgcagattgcccatgccaaaatctaggttttattctccttcctcccttttcttgttccccatcaaacaattcatttttccatttgtcaccacctacctcttgcctacactattgcaatagtctccctgcttctacttctatgtccatacagcaactacagttatctatttaaaacagatcagatcatatcaatccctcctcaaaaccttsctgtggcttcccatcacccttagagtttataaactctgcagcaagctccacaaggccctccataacctggcctctggcctatctctctgacctcttctattatgctcctctggccacactggccttgctgggaacataccatgctccctatgtctcaagatctttattttttttttattttttgagacagagtctcactctgtcacccaggctggagtgcaatggtgcagttttggctcactgcaacctctgcctcctgggttcaagtgattctc

SEQ ID NO: 606462 - DNA, 600 bp, Homo sapiens
ttttaattcgcccctagttaatatgtaaatttaatgtgatcctaataaaaatactgaattttggcctggtgcagtggatcacacctgtaatccaagcactttgggagctgaggtgggtgcatcacttgaggtcaggagttcgagaccygcctggccaacctagtgaaaccccatctctactaaaaatacaaaaaattagccaggcgtggtggagtgtgcttgtaatcccagctacttgggaggctgaggtgggagaatcgtttgaacctgggaggtggaagttgctgtgagccgagatcatgccactgcactccagcctgggtgacagagcaagacttcatctcaaaaacaacaacaacaacaacaaaactgaagtttttgtttattttcctggagctagacaagttgtcacaggttaggttctctgggaagcatatgctgagacagtgataagtgtacaagagcttagttagggtatactcttgggaacaacagtttggggaaggcagggaatcaggattgggcaaagggagatgtcaagctgtgatgcagcctcagtggaaacctcaggtaagcctgtggggaattcttaagatggaa

SEQ ID NO: 606463 - DNA, 600 bp, Homo sapiens
ttttaattcgcccctagttaatatgtaaatttaatgtgatcctaataaaaatactgaattttggcctggtgcagtggatcacacctgtaatccaagcactttgggagctgaggtgggtgcatcacttgaggtcaggagttcgagacccgcctggccaacctagtgaaaccccatctctactaaaaatacaaaaaattagccaggcgtggtggagtgtgcttgtaatcccagctacttgggaggctgaggtgggagaatcgyttgaacctgggaggtggaagttgctgtgagccgagatcatgccactgcactccagcctgggtgacagagcaagacttcatctcaaaaacaacaacaacaacaacaaaactgaagtttttgtttattttcctggagctagacaagttgtcacaggttaggttctctgggaagcatatgctgagacagtgataagtgtacaagagcttagttagggtatactcttgggaacaacagtttggggaaggcagggaatcaggattgggcaaagggagatgtcaagctgtgatgcagcctcagtggaaacctcaggtaagcctgtggggaattcttaagatggaa

SEQ ID NO: 606464 - DNA, 600 bp, Homo sapiens
ttttaattcgcccctagttaatatgtaaatttaatgtgatcctaataaaaatactgaattttggcctggtgcagtggatcacacctgtaatccaagcactttgggagctgaggtgggtgcatcacttgaggtcaggagttcgagacccgcctggccaacctagtgaaaccccatctctactaaaaatacaaaaaattagccaggcgtggtggagtgtgcttgtaatcccagctacttgggaggctgaggtgggagaatcgtttgaacctgggaggtggaagttgctgtgagcygagatcatgccactgcactccagcctgggtgacagagcaagacttcatctcaaaaacaacaacaacaacaacaaaactgaagtttttgtttattttcctggagctagacaagttgtcacaggttaggttctctgggaagcatatgctgagacagtgataagtgtacaagagcttagttagggtatactcttgggaacaacagtttggggaaggcagggaatcaggattgggcaaagggagatgtcaagctgtgatgcagcctcagtggaaacctcaggtaagcctgtggggaattcttaagatggaa

SEQ ID NO: 606465 - DNA, 600 bp, Homo sapiens
ttttaattcgcccctagttaatatgtaaatttaatgtgatcctaataaaaatactgaattttggcctggtgcagtggatcacacctgtaatccaagcactttgggagctgaggtgggtgcatcacttgaggtcaggagttcgagacccgcctggccaacctagtgaaaccccatctctactaaaaatacaaaaaattagccaggcgtggtggagtgtgcttgtaatcccagctacttgggaggctgaggtgggagaatcgtttgaacctgggaggtggaagttgctgtgagccgagatcatgccactgcactccagcctgggtgacagagcaagacttcatctcaaaaacaacaacaacaacaacaaaactgaagtttttgtttattttcctggagctagacaagttgtcacaggttaggttctctgggaagcatatgctgagacagtgataagtgtacaagagcttagttagggwatactcttgggaacaacagtttggggaaggcagggaatcaggattgggcaaagggagatgtcaagctgtgatgcagcctcagtggaaacctcaggtaagcctgtggggaattcttaagatggaa

SEQ ID NO: 606466 - DNA, 527 bp, Homo sapiens
ttccacttatttatgtcttcagtttctttcattagtgttttagtttttagtgcatagatctttcacctccttggttaaagttacaactatttcatttcttgatgttactgtaaatatgatctctcaattttgggggggattgttcattgttagtgtatagaaatgctatggacttttgtatgctgacatcgtaacctgcaactttgcagaatttatcaccagtttattactagattttttggtggagtctttaaagttttctctctatgagatcatgtcatcagcaaacagacattctcatttctttttctatatagatgtcttttatttctttttcttgccttattgctctgactagaacttycagtactatgttgaatagaagtggcaagagtgggcgttcttgtcttgtttctaatcttagaggaaaagcttttcagttttcaccactgagtatgatgttagctgtgggtatatgacctttattatgctagggtacattttttccataccttatttttcagggg

SEQ ID NO: 606467 - DNA, 436 bp, Homo sapiens
gaaaacattgctttctcagtggattagggagcagagaaattctagttaggtagaataaaagacttgttattggtctgttcgggttttagtctttccggtttagtcttagtaggctgtatgtgtcttggaatttgcccatttcttctagattttacagtttattggcatatagttactcatcatctagcttttcaataagggattaaaacaatgatgactcactgttgcaagcaagactctgatagaagaytttgcccatactgataaaaggcaaggcgaatccctctcaaacataagagtaactgaaatgaatattccagctgaacagatatagcctacattcaaatgaatagaacatctttagtctcctacaagaaagagatcttatttttgtctggtgcaaggcatgatgtctgtaagtatgctgaatgattac

SEQ ID NO: 606468 - DNA, 661 bp, Homo sapiens
atcatggtgacagttccagattctagaaatattatagtatttctttatattatagaaagtgacacacacacagtgaggcaagggtaaaaacacattaaaaagcattgataaatttttctcactgacaccagccctgagcaacatttgttccctagttctccttttccataacagactgaacagtgttattagaatgcagacatagccatttaaagtttgacaactggaaataaaggataatagaataaaaacaaaaccaattctaaaaaaaatagaattttcattacatgaaaacatatgaaattaaacacaaaattagtataacttacatgttttaaaagtatatacttcatttataaatatctctagttgataataatctattaagaatcataaatattcaagtgagcatttaaattttctatttaatagttcagaattcttgaagtcagattagtgtctttctgatgaatgtccataattaaaaggctttccacagtcactttatgtctctagttagacacataaaagcctttattacctactstgttgtaataagactttaaaattctgtaagtctcttatacttgtagaaagcctatggaagaaagaaaaagcttattagtaaggctaacatgttgcatactgtttcaaattattg

SEQ ID NO: 606469 - DNA, 661 bp, Homo sapiens
atcatggtgacagttccagattctagaaatattatagtatttctttatattatagaaagtgacacacacacagtgaggcaagggtaaaaacacattaaaaagcattgataaatttttctcactgacaccagccctgagcaacatttgttccctagttctccttttccataacagactgaacagtgttattagaatgcagacatagccatttaaagtttgacaactggaaataaaggataatagaataaaaacaaaaccaattctaaaaaaaatagaattttcattacatgaaaacatatgaaattaaacacaaaattagtataacttacatgttttaaaagtatatacttcatttataaatatctctagttgataataatctattaagaatcataaatattcaagtgagcatttaaattttctatttaatagttcagaattcttgaagtcagattagtgtctttctgatgaatgtccataattaaaaggctttccacagtcactttatgtctctagttagacacataaaagcctttattacctactgtgttgtaataagactttaaaattctgtaagtctcttatacttgtagaaagcctatggaagaaagaaaaagcwtattagtaaggctaacatgttgcatactgtttcaaattattg

SEQ ID NO: 606470 - DNA, 632 bp, Homo sapiens
aacagcatatcaaaaagataatccaccatgatcaagtgggtttcataccagggatgcagggatggtttaacatacatgagtcaataaatgggctatatcacataaacagaattaaaaacaaaaatcatatgattatctcaatggatgcagaaaaagcatttgaaaaaatccagcatctgtttaggactaaagccctcagaaaaactggcatagaagggacatacatcaagataataaaagccatctatgacaaacccacagccaacattatactgaatcaggaaaagttgaaagcattccacctgagaaatgsaacaagacaaggaaaccctctttcaccacttctattcaacatagtactggaagtccttagccagagcaatcagacaacagcaagagggcacccaaaccagtaaagagtaagtcaaactgtcactgttcaccaatgacataatcgcatacctagaaaaccctaaagacttatcctaaaagctcctaaaactgatcaccaacaacgaccaagctgagaatcaaataaggaactcagccccttttacaacagctgcaaaaacaaaatacttaggaatatacctaaccaaggaggtgaaagctctctacaaggaaagctacaa

SEQ ID NO: 606471 - DNA, 581 bp, Homo sapiens
tcataacaatggtgaaatcatttggggaggatttctcatcccatttccatctcctgcctctataatcatttcatcctgtttctgcccccaaactgagtttacctctcaaaaaatttccaatgactggtctcaggtacaccccagaggtcattgccagttttcagtatcacagctgccctgggatgactgttggggtttgaaaagccttttctgccagcagcttctaaaaagtaaagttgtctttgtcaggaaagcctaaacaagatcagaactagattatatggtacaccaaatcaggcatatgttttgacatcattgttcttaacatcagtgacctatttaaaagttaatagaacatgaacagaggtggccacatgacggctatctaaatgtgaattcctgctttgctaagactaattgcagccaaacataaggagcaaagtggaactaacacaaggtggattgccttaaaatttactctttttaatagtttaagaatacctatgagccacgygcaaaagaatgaagttggatccttatctcacaccatatacaaaaaataactcaaaatgtattaaaga

SEQ ID NO: 606472 - DNA, 586 bp, Homo sapiens
atcttttctaactgataaattttttaaattgggcaactttttcctgatgttttcaccaggagaaacagatggactggtaccaagtattcaccatagacaccatacctcatttaatcctcaaaacactcctgggaaggagtagatgatgtaactgaggctcagcgatgattaggtgacttkcctgctattgaatgagtctcaacattctaaagcatgtcacccctatgccaaagcccatgtttctttcactatttgataaaagtgtcatagtcttagcccagaccactttctccaggtaagtcgtcaaacaatcttttactaatgcatctcctccccaggataaggaaggaaccaaaagacagaatagtattttatttctgagctggactcttggtctgttttttgcatttatttctaacaattatttgccatatttttgcatcattgctatggtattttcttcctcatcttgctcatatgtgggtaactgtcccaacattttatttgctctgatacaatgttggtgacttctttacttttgttttctaatgagctgatattaaaataacaatggaagagaatgttg

SEQ ID NO: 606473 - DNA, 586 bp, Homo sapiens
atcttttctaactgataaattttttaaattgggcaactttttcctgatgttttcaccaggagaaacagatggactggtaccaagtattcaccatagacaccatacctcatttaatcctcaaaacactcctgggaaggagtagatgatgtaactgaggctcagcgatgattaggtgactttcctgctattgaatgagtctcaacattctaaagcatgtcacccctatgccaaagcccatgtttctttcactatttgataaaagtgtcatagtcttagcccagaccactttctccaggtaagtcgtcaaacaatcttttactaatgcatctccwccccaggataaggaaggaaccaaaagacagaatagtattttatttctgagctggactcttggtctgttttttgcatttatttctaacaattatttgccatatttttgcatcattgctatggtattttcttcctcatcttgctcatatgtgggtaactgtcccaacattttatttgctctgatacaatgttggtgacttctttacttttgttttctaatgagctgatattaaaataacaatggaagagaatgttg

SEQ ID NO: 606474 - DNA, 586 bp, Homo sapiens
atcttttctaactgataaattttttaaattgggcaactttttcctgatgttttcaccaggagaaacagatggactggtaccaagtattcaccatagacaccatacctcatttaatcctcaaaacactcctgggaaggagtagatgatgtaactgaggctcagcgatgattaggtgactttcctgctattgaatgagtctcaacattctaaagcatgtcacccctatgccaaagcccatgtttctttcactatttgataaaagtgtcatagtcttagcccagaccactttctccaggtaagtcgtcaaacaatcttttactaatgcatctcctccccaggataaggaaggaaccaaaagacagaatagtattttatttctgagctggactcttggtctgttttttgcatttatttctaacaattatttgccatatttttgcatcattgctatggtattttcttcctcatcttgctcatatgtgggtaactgtcycaacattttatttgctctgatacaatgttggtgacttctttacttttgttttctaatgagctgatattaaaataacaatggaagagaatgttg

SEQ ID NO: 606475 - DNA, 556 bp, Homo sapiens
tactggaaactagcacaaaaatttgatgataaatacagaccaataaagatattaaaatatgaatgagaaatgaagagaaatagagattagattaaaggattttactaaatrtataatatatgaggctctccaaaagaatagaacaatattgaaagactggtaaaggattaagaattgaagaaaaatgtcagattttttaagtgcctattaaatgatagaaaggataagtgaaataaaacctagcttgacaaagcaaaggtagcacagttatggaacgaaaggataaaaaaaaatcataaaagctaacagaaaaaaaggacaaaaatcttagaaagtaaaaattatacttatagcagactcccctttcccagcaatacatgccaaaagacaatgaagtaaggtcttcaaagtgctaaaaagaaattactaataaaatgtaattttatacccagctaaaaatcattcaagagcacttacataatatagacatttaaaacctacaaaactccactgatgcttgataaaagaactactcaaagacatactatagcaagga

SEQ ID NO: 606476 - DNA, 556 bp, Homo sapiens
tactggaaactagcacaaaaatttgatgataaatacagaccaataaagatattaaaatatgaatgagaaatgaagagaaatagagattagattaaaggattttactaaatgtataatatatgaggctctccaaaagaatagaacaatattgaaagactggtaaaggattaagaattgaagaaaaatgtcagattttttaagtgcctattaaatgatagaaaggataagtgaaataaaacctagcttgacaaagcaaaggtagcacagttrtggaacgaaaggataaaaaaaaatcataaaagctaacagaaaaaaaggacaaaaatcttagaaagtaaaaattatacttatagcagactcccctttcccagcaatacatgccaaaagacaatgaagtaaggtcttcaaagtgctaaaaagaaattactaataaaatgtaattttatacccagctaaaaatcattcaagagcacttacataatatagacatttaaaacctacaaaactccactgatgcttgataaaagaactactcaaagacatactatagcaagga

SEQ ID NO: 606477 - DNA, 543 bp, Homo sapiens
gtgcctggcttatttcacttaacataatgtcctccaggttcatccatgctgtcacagataacatgtgacactttgtaagttagttaatgagatgtcagtatggtccatctaaatattaatggaaggcaagtsctcccctactgttgaacttcacttctgaaggcaggtatcagaaaaataaaggaggaaaaaactacaatgtatctaactatgacttatgttattgagaaattaaagtgcatattgaagctgtcaatctcaacattgccaaccatcattcaaacataggatgtgtttatgatgaagcatcttaaagcatcctgggaaaattacaatgatgactcccaactttccattagctaggaatgtaaagagttacaaatatgtgtccaaccataaagatatttgacatgaatatgttgagctctaaacaagaaaagtaattttggacaaaacaatatcattaaatgctgagagaagttcttctattttaataactgaatttaggaaaaacaagtccctctgctatttgctggctggatt

SEQ ID NO: 606478 - DNA, 543 bp, Homo sapiens
gtgcctggcttatttcacttaacataatgtcctccaggttcatccatgctgtcacagataacatgtgacactttgtaagttagttaatgagatgtcagtatggtccatctaaatattaatggaaggcaagtgctcccctactgttgaacttcacttctgaaggcaggtatcagaaaaataaaggaggaaaaaactacaatgtatctaactatgacttatgttattgagaaattaaagtgcatattgaagctgtcaatctcaacattgccaaccatcattcaaacataggatgtgtttatgatgaagcatcttaaagcatcctgggaaaattacartgatgactcccaactttccattagctaggaatgtaaagagttacaaatatgtgtccaaccataaagatatttgacatgaatatgttgagctctaaacaagaaaagtaattttggacaaaacaatatcattaaatgctgagagaagttcttctattttaataactgaatttaggaaaaacaagtccctctgctatttgctggctggatt

SEQ ID NO: 606479 - DNA, 543 bp, Homo sapiens
gtgcctggcttatttcacttaacataatgtcctccaggttcatccatgctgtcacagataacatgtgacactttgtaagttagttaatgagatgtcagtatggtccatctaaatattaatggaaggcaagtgctcccctactgttgaacttcacttctgaaggcaggtatcagaaaaataaaggaggaaaaaactacaatgtatctaactatgacttatgttattgagaaattaaagtgcatattgaagctgtcaatctcaacattgccaaccatcattcaaacataggatgtgtttatgatgaagcatcttaaagcatcctgggaaaattacaatgatgactcccaactttccattagctaggaatgtaaagagttacaaatatgtgtccaaccataaagatatttgacatgaatatgttgagctctaaacaagaaaagtaattttggacaaaacaatatyattaaatgctgagagaagttcttctattttaataactgaatttaggaaaaacaagtccctctgctatttgctggctggatt

SEQ ID NO: 606480 - DNA, 543 bp, Homo sapiens
gtgcctggcttatttcacttaacataatgtcctccaggttcatccatgctgtcacagataacatgtgacactttgtaagttagttaatgagatgtcagtatggtccatctaaatattaatggaaggcaagtgctcccctactgttgaacttcacttctgaaggcaggtatcagaaaaataaaggaggaaaaaactacaatgtatctaactatgacttatgttattgagaaattaaagtgcatattgaagctgtcaatctcaacattgccaaccatcattcaaacataggatgtgtttatgatgaagcatcttaaagcatcctgggaaaattacaatgatgactcccaactttccattagctaggaatgtaaagagttacaaatatgtgtccaaccataaagatatttgacatgaatatgttgagctctaaacaagaaaagtaattttggacaaaacaatatcattaaatgctgagagaagttcwtctattttaataactgaatttaggaaaaacaagtccctctgctatttgctggctggatt

SEQ ID NO: 606481 - DNA, 580 bp, Homo sapiens
ttctcttccattgttattttaatatcagctcattagaaaacaaaagtaaagaagtcaccaacattgtatcagagcaaataaaatgttgagacagttacccacatatgagcaagatgaggaagaaaataccatagcaatgatgcaaaaatatggcaaataattgttagaaataaatgcaaaaaacagaccaagagtccagctcagaaataaaatactattctgtcttttggttccttccttatcctggggtggagatgcattagtaaaagattgtttgacgacttacctggagaaagtggtctgggctaagactatgacacttttatcaaatagtgaaagaaacatgggctttggcataggggtgacatgctttagaatgttgagactcattcaatagcaggmaagtcacctaatcatcgctgagcctcagttacatcatctactccttcccaggagtgttttgaggattaaatgaggtatggtgtctatggtgaatacttggtaccagtccatctgtttctcctggtgaaaacatcaggaaaaagttgcccaatttaaaaaatttatcagttggaaaaga

SEQ ID NO: 606482 - DNA, 578 bp, Homo sapiens
tatacaatctaaaaatgatgtttggttacttcttttcaaattgttttttttctctctttctttctttgctttactgcaccatctacagccttcaatataaccaacaatgtttagtaaatgttgtgatcagtgtaatctttgtcttgttttcagtctggaagggaaagcttttaaatgattcaccactaagtcaattatttgctatggttttatttttccagataccgcctattagattaagagagattccttctttttcctagtttgttatttaaaaaaaaaattaatggatattaaaatttgagttttttttgcacctattgaaatggtcatatgcactttttctctttaattacatactacctttaraaatgtgttgaatagtttgtggggctattttctaacataaatatttttaaaaaatgcatctgagtatatcagttccagttcttttgactacaaaaatagtataagcccaaaatggaacttattgtcttgtttaaccataacttcagcacaagtgaatgtagtcatcaaattatgtcaccaggactatttcttttcatcattatttctct

SEQ ID NO: 606483 - DNA, 612 bp, Homo sapiens
tttttctctttaattacatactacctttagaaatgtgttgaatagtttgtggggctattttctaacataaatatttttaaaaaatgcatctgagtatatcagttccagttcttttgactacaaaaatagtataagcccaaaatggaacttattgtcttgtttaaccataacttcagcacaagtgaatgtagtcatcaaattatgtcaccaggactatttcttttcatcattayttctctgtgttggctttttccctgcttttttttcatgtgagggaaagtaactgccgaaagccacagggcaccctactcaagctttgagtacaacagaatgatgttaggcttctttctctcagctttttaagcaaaactgtcattgtatcttattggctctcactgggtcatgttctcacctctaacgccatcaccgtgctagtggaataaaatgaactgatcgatgatcaagttttacttacatcttgactactggaacctaggttggtgtcaactcatcctggatttcatggattgagaacgggggagggtgtaggtggctcctcagaggaaaactgaagttcagttagcagcactaagataaaaggatagctcccta

SEQ ID NO: 606484 - DNA, 620 bp, Homo sapiens
ttgttgaatcctttttctgcatccattgagatgatcatgtgattttttgtttttaattctgcttatgtggtgtatsacgtttattcacttgtgtattttaaaccattcctgcatccctggtatgaaacccacttgatcatggtggattatctttttgatatgctgttggattcagttaggtagtattttgttaaggatgtcagcatctatgttcatcaaggatatcggtctatcgttttgttttttggttatgccctttcctggttttggtattagggtgacactggcttcatagaatgaattagggagggttccttctttctttatcttgtggaatagtgtcaaaaagattggtaccaattcttctttgaatgtctggtagaattctgctgtgaacccatttggtcttggactttcttttgttggtaatttttaaattgccatttcaatcttgctgctttttattggtctgttcagggtatctaattctgcctgatttaagctaggagggttgtatttttccaggaatgtatccatctcttctagttttctagtttatatgtgtaaaggtttcatagtagccttgaatgatcttttatatttcagtggtgtcagttgta

SEQ ID NO: 606485 - DNA, 620 bp, Homo sapiens
ttgttgaatcctttttctgcatccattgagatgatcatgtgattttttgtttttaattctgcttatgtggtgtatcacgtttattcacttgtgtattttaaaccattcctgcatccctggtatgaaacccacttgatcatggtggattatctttttgatatgctgttggattcagttaggtagtattttgttaaggatgtcagcatctatgttcatcaaggatatcggtctatcgttttgttttttggttatgccctttcctggttttggtattagggtgacactggcttcatagaatgaattagggagggttccttctttctttatcttgtggaatagtgtcaaaaagattggtaccaattcttctttgaatgtctggtagaattctgctgtgaayccatttggtcttggactttcttttgttggtaatttttaaattgccatttcaatcttgctgctttttattggtctgttcagggtatctaattctgcctgatttaagctaggagggttgtatttttccaggaatgtatccatctcttctagttttctagtttatatgtgtaaaggtttcatagtagccttgaatgatcttttatatttcagtggtgtcagttgta

SEQ ID NO: 606486 - DNA, 558 bp, Homo sapiens
tattacctgcatgaccgtgagcaagctaccaaacctctctgtgactttgtttcttcatcttaaagatgggaatcacagtattcacttcatttaccagtggggcaaataacatcttatggtgtcactcccatttcatttatttatttatttatttatttatttatttatttatttattcgttcattcattcattcattttttgagatggagtctcactctgtcacccaggctggagggcagtggtgcgatcttggctcactgcaacctccgcatcctgagttcaagcratcctgctgcctcagcctcccgagtagctgggattacaggtgtgcgccagcactctgggctaatatgttgctcccattttagatctagccatgccctttccatgtaaacctaacagttcaagcttctcttgagtgttctttggtgatccctctagatgagttagccaaagctgctgtggctgtgaaatgaaggaaagtcaccatcctaggtggggcgaaaagacatactccagaacaaggatgcttttaccactaataatagttaatgtct

SEQ ID NO: 606487 - DNA, 532 bp, Homo sapiens
tcggcgtcgttgttgatgaccatctccagggcctcagcagacacctccccgcctccggcccctccgccatcagggctstggctggccatcaccctggcccggatctcctccaccaggttctccatgcaggcggtgagggagatggctgcgtactcgtggatgcgcacggagattcgggtgtccaccatccagcggaaaaagcgacccactgagaaggtgaggccgcagcgcgcggacttgccccggcgcagcccgtcgccggcgctcatgctgtacagggacagcgccttgacggctgccagcgcgcagctctcggccagcgcccagctgtgcaccaggcgcacggcgctctgcacctcaaagcgggtgcacttggcgtgcagcacgctcaggcgctgcgcctcgcgggccacgcggatcagtgccctgcggagcagcccggccaggcgcctcaccgcctcggcggagaactggggcagccgccggccgccagcgcctttgcggagcacccgggccacgtctccttcggtcc

SEQ ID NO: 606488 - DNA, 542 bp, Homo sapiens
gtcccaaacggtccgccagagcgctgttggttcagcagtcccatgcccggtgcaggcatgtcccgccgctgccctgtggctactcacacgcacgtgcgcaaacggacctgtgccccctccagtggaaccgcaggctcaaggcggggattgtgcattcgctctccccaagtcagcctcccccactcctgaatggctcctttgtgttgcattttacacagttctgaccttgggccgtgagttggatatgaactagaaatgtctggtttgtctctttccttcttaaattaatggcctttacccccggtgaaactgctttttatttggcagtttcgcttaattttgcctttccgcgggtctttatttatgcaacatcgccgcccgatggttagaattgggaacagagtcaaagatggaagtactgtaataccaaagacgcaagtcagcagagatcaaactaacaaaggagaaygcagtcacactttacagacgtgagattagaaattaaagtaggcaatgaggtccaacttgtcaaaaatacaaaa

SEQ ID NO: 606489 - DNA, 608 bp, Homo sapiens
ttagaattgggaacagagtcaaagatggaagtactgtaataccaaagacgcaagtcagcagagatcaaactaacaaaggagaatgcagtcacactttacagacgtgagattagaaattaaagtaggcaatgaggtccaacttgtcaaaaatacaaaagtaaattttatgcaatttaaaactttattggggaaatataatattaaaggcaatgtcgccctctaatggatatattcaaaggaaatgaatttcagaaaggtttcccygtccccccttttcttcgttgtgcgcacccatcaaacctaaagagaattacttaactggaaatttacaacggggaacttactgaatgaaaggttattggaggaatcatctggagtgggaaaaagagcctatgggatttatattaatatattcaaattacttgatgacttaaagtgtagataatcaaacatgcctccaactgaatctgagaatcctgtgaatgttgacctgcaacatgaagatatattatgcaaaattcagccatgggaaatgcttctgaacaaacaactgagtttctttaataaataagtttcaaggaaagaaagagatggagagaagacctaca

SEQ ID NO: 606490 - DNA, 608 bp, Homo sapiens
ttagaattgggaacagagtcaaagatggaagtactgtaataccaaagacgcaagtcagcagagatcaaactaacaaaggagaatgcagtcacactttacagacgtgagattagaaattaaagtaggcaatgaggtccaacttgtcaaaaatacaaaagtaaattttatgcaatttaaaactttattggggaaatataatattaaaggcaatgtcgccctctaatggatatattcaaaggaaatgaatttcagaaaggtttccctgyccccccttttcttcgttgtgcgcacccatcaaacctaaagagaattacttaactggaaatttacaacggggaacttactgaatgaaaggttattggaggaatcatctggagtgggaaaaagagcctatgggatttatattaatatattcaaattacttgatgacttaaagtgtagataatcaaacatgcctccaactgaatctgagaatcctgtgaatgttgacctgcaacatgaagatatattatgcaaaattcagccatgggaaatgcttctgaacaaacaactgagtttctttaataaataagtttcaaggaaagaaagagatggagagaagacctaca

SEQ ID NO: 606491 - DNA, 494 bp, Homo sapiens
cttctagtcagcctgaggactggcagtaccaagtaaacccagaatgtgtctgtgtttgtgttttgtgtgatatgggaaaaagaataggaggaagayagatagagatgaatatatatatatatatatatatatatatatatatatatatatatatccagccatcttagaatgaaccaattctttgatttcagttcaacttttgggagttggccagtgtggtgaaatacaaaactttgggtcaaggaaagaaaggacatggtttcttatatatacgtgcatgtgttcagttaagccaatctgctggtaatgtgtttgattttaagaatgcaaattatattaagagaaaatgtcatcccaactcgggccttacccaaacattatttttgaagaaacattgtttttgaagaaaaacagctgtcattaagctggacaaggagaaaagaacataacagaacactggcaaacattggaacaattccaagtggagttgacaa

SEQ ID NO: 606492 - DNA, 494 bp, Homo sapiens
cttctagtcagcctgaggactggcagtaccaagtaaacccagaatgtgtctgtgtttgtgttttgtgtgatatgggaaaaagaataggaggaagatagatagagatgaatatatatatatatatatatatatatatatatatatatatatatmtccagccatcttagaatgaaccaattctttgatttcagttcaacttttgggagttggccagtgtggtgaaatacaaaactttgggtcaaggaaagaaaggacatggtttcttatatatacgtgcatgtgttcagttaagccaatctgctggtaatgtgtttgattttaagaatgcaaattatattaagagaaaatgtcatcccaactcgggccttacccaaacattatttttgaagaaacattgtttttgaagaaaaacagctgtcattaagctggacaaggagaaaagaacataacagaacactggcaaacattggaacaattccaagtggagttgacaa

SEQ ID NO: 606493 - DNA, 494 bp, Homo sapiens
cttctagtcagcctgaggactggcagtaccaagtaaacccagaatgtgtctgtgtttgtgttttgtgtgatatgggaaaaagaataggaggaagatagatagagatgaatatatatatatatatatatatatatatatatatatatatatatatccagccatcttagaatgaaccaattctttgatttcagttmaacttttgggagttggccagtgtggtgaaatacaaaactttgggtcaaggaaagaaaggacatggtttcttatatatacgtgcatgtgttcagttaagccaatctgctggtaatgtgtttgattttaagaatgcaaattatattaagagaaaatgtcatcccaactcgggccttacccaaacattatttttgaagaaacattgtttttgaagaaaaacagctgtcattaagctggacaaggagaaaagaacataacagaacactggcaaacattggaacaattccaagtggagttgacaa

SEQ ID NO: 606494 - DNA, 494 bp, Homo sapiens
cttctagtcagcctgaggactggcagtaccaagtaaacccagaatgtgtctgtgtttgtgttttgtgtgatatgggaaaaagaataggaggaagatagatagagatgaatatatatatatatatatatatatatatatatatatatatatatatccagccatcttagaatgaaccaattctttgatttcagttcaacttttgggagttggccagtgtggtgaaatacaaaactttgggtcaaggaaagaaaggacatggtttcttatatatacgtgcatgtgttcagttaagccaatctgctggtaatgtgtttgattttaagaatgcaaattatattaagagaaaatgtcatcccaactcgggccttayccaaacattatttttgaagaaacattgtttttgaagaaaaacagctgtcattaagctggacaaggagaaaagaacataacagaacactggcaaacattggaacaattccaagtggagttgacaa

SEQ ID NO: 606495 - DNA, 551 bp, Homo sapiens
gtctaagctcagactctccttgggtgggtcttgctatggctgctgtggcagatgggggtgagattcccaggtcactggaattgtatacctaagaaatattatggctgcctctgctgagtcatgcaggttgtcagggtacttggggaaagccggcagtcacaggcctcacccagctcccatgcaaaccaaagggctggtctcactcccactgtgcccccaccccaaccccaatagccccaagtctgtttccaggcagagggcaagacaggcttgaaaacctgcttcaggctacagcctcccagctgtgaaaggaaagggcttggttcttcccccaactgtggaatctgcacacyggatttgtgccctcccccaagttctggccaggaggcttttcgccctattcaaatcgtttcacagttcagctagagatttccttctccctgtggagttttacccccacaaccccactcctctggctgctctgccgatggatccccatggtgccaggcaggaatggccctctcggggacccagtgagctaccagggcctt

SEQ ID NO: 606496 - DNA, 553 bp, Homo sapiens
ggaggcataatcgtcatggctgctcagtggtggcaggcagtggggtggaccgaggtccctctctctcagggcctgcctggataccagcctgagctcctggctccctaacctgcccccagaagagccctcactccatctggctgatgagaatgagccctggcgcgggcttgagggaatacttgaaaattttattatctttttttcttttttcttttttttttttttttttgagatggagtcttgctctgttgcccagtctagagtgcrgcagcgcaatctgggctcattgcaacctccacctcccgggttcaagcaattctcctgcctcagcctcccaggtagctgggattacaggtgcgacaccatgcccggcgaattttttgtatttttagtagagatggggtttcaccatgctggccaggctgatcttgaactcctgacctcatgatccacccgcctcagcctcccaaagtgctgggattacaggcatgagccaccgagcctggccgaaaattatgtattatcttaatggctatgaacagtgttcactggg

SEQ ID NO: 606497 - DNA, 617 bp, Homo sapiens
gccaggcactagggcttgcagtcagggagaagtaggagatacacaggaccttcagcagctttcctgtgccagctgcccttcagccaatgctaggccccaagtggattctcccaggtcctgtggcccaagaggtgaaattccctccagcatcaccacatcttacagatcctgaagagctgtacttgccacagccctcagctatcccaggaggcagccagggcaagactgcttgtccccactcacaartgagaaaaccaaggcatagggaaatgaagtttgagcccagagtcacggaggtctaaagaacaaggcctggaattgaaccgggcacttcttgccacaaactcagtgctttggcctttcttagttcttctgccgcagtcagaggcaaccccaggagagtctaccatggacgaggcattgctctgagagctttacacatatgaatagattttatcctcacaaaaatcctgtggggtggatactactactatccacatgttacagatgaaaaaacatagacagagacatttgataccttgctcaaggtcacacagggctagaaagtggcacagccaagatgtgaaccagtctttatcactatgctatgctgcacc

SEQ ID NO: 606498 - DNA, 617 bp, Homo sapiens
gccaggcactagggcttgcagtcagggagaagtaggagatacacaggaccttcagcagctttcctgtgccagctgcccttcagccaatgctaggccccaagtggattctcccaggtcctgtggcccaagaggtgaaattccctccagcatcaccacatcttacagatcctgaagagctgtacttgccacagccctcagctatcccaggaggcagccagggcaagactgcttgtccccactcacaaatgagaaaaccaaggcatagggaaatgaagtttgagcccagagtcacggaggtctaaagaacaaggcctggaattgaaccgggcacttcttgccacaaactcagtgctttggcctttcttagttcttctgccgcagtcagaggcaaccccaggagagtctaccatggacgaggcattgctctgagagctttacacatatgaatagattttatcctcacaaaaatcctgtggggtggatactactaytatccacatgttacagatgaaaaaacatagacagagacatttgataccttgctcaaggtcacacagggctagaaagtggcacagccaagatgtgaaccagtctttatcactatgctatgctgcacc

SEQ ID NO: 606499 - DNA, 584 bp, Homo sapiens
aatttgaaaaacagttctaaaggcatgaggattaacaaaggatytcaaaacatgaagtgcacatggtcagatatgtgttttaataataatgacaacaataggaaccactgatgcaatacctactatttgctaagccctttgtaattattaatagaagctactgtgtattatttgccagacacggtgataaacatttgccttcagtatttcatttggtccccacaacatctctccgatgctgctttttattatctccatctcatagagaatgaaagtgacactcaactcgatgatcagacttgccctaagttccactgacatcggtggcagaaccaggaccagaacctagactgctgacattgagacctggttgccatgactccctgagtaactgaaactcctggaaagttgcagaggttcccttgcacagcatattctacagacttccctgggagaagccttgtctctccaagcacaaagaacggctggaatcaaaattccatgtgcatcctaatttctgtgcataatattttaaatgacaaatcaggctgcaatcagaaagcccctaaccaaaattcaagcca

SEQ ID NO: 606500 - DNA, 584 bp, Homo sapiens
aatttgaaaaacagttctaaaggcatgaggattaacaaaggatctcaaaacatgaagtgcacatggtcagatatgtgttttaataataatgacaacaataggaaccactgatgsaatacctactatttgctaagccctttgtaattattaatagaagctactgtgtattatttgccagacacggtgataaacatttgccttcagtatttcatttggtccccacaacatctctccgatgctgctttttattatctccatctcatagagaatgaaagtgacactcaactcgatgatcagacttgccctaagttccactgacatcggtggcagaaccaggaccagaacctagactgctgacattgagacctggttgccatgactccctgagtaactgaaactcctggaaagttgcagaggttcccttgcacagcatattctacagacttccctgggagaagccttgtctctccaagcacaaagaacggctggaatcaaaattccatgtgcatcctaatttctgtgcataatattttaaatgacaaatcaggctgcaatcagaaagcccctaaccaaaattcaagcca

SEQ ID NO: 606501 - DNA, 584 bp, Homo sapiens
aatttgaaaaacagttctaaaggcatgaggattaacaaaggatctcaaaacatgaagtgcacatggtcagatatgtgttttaataataatgacaacaataggaaccactgatgcaatacctactatttgctaagccctttgtaattattaatagaagctactgtgtattatttgccagacacggtgataaacatttgccttcagtatttcatttggtccccacaacatctctccgatgctgctttttattatcyccatctcatagagaatgaaagtgacactcaactcgatgatcagacttgccctaagttccactgacatcggtggcagaaccaggaccagaacctagactgctgacattgagacctggttgccatgactccctgagtaactgaaactcctggaaagttgcagaggttcccttgcacagcatattctacagacttccctgggagaagccttgtctctccaagcacaaagaacggctggaatcaaaattccatgtgcatcctaatttctgtgcataatattttaaatgacaaatcaggctgcaatcagaaagcccctaaccaaaattcaagcca

SEQ ID NO: 606502 - DNA, 584 bp, Homo sapiens
aatttgaaaaacagttctaaaggcatgaggattaacaaaggatctcaaaacatgaagtgcacatggtcagatatgtgttttaataataatgacaacaataggaaccactgatgcaatacctactatttgctaagccctttgtaattattaatagaagctactgtgtattatttgccagacacggtgataaacatttgccttcagtatttcatttggtccccacaacatctctccgatgctgctttttattatctccatctcatagagaatgaaagtgacactcaactcratgatcagacttgccctaagttccactgacatcggtggcagaaccaggaccagaacctagactgctgacattgagacctggttgccatgactccctgagtaactgaaactcctggaaagttgcagaggttcccttgcacagcatattctacagacttccctgggagaagccttgtctctccaagcacaaagaacggctggaatcaaaattccatgtgcatcctaatttctgtgcataatattttaaatgacaaatcaggctgcaatcagaaagcccctaaccaaaattcaagcca

SEQ ID NO: 606503 - DNA, 604 bp, Homo sapiens
agcactgattataactaatatttgcctagtgctttactgcttacaaagcttttttttaacctatatccattgattsagctcgtgtaacagacttgtgaagtaggtactattatctccattttacagataaaaaatcacaactcagagaggtaaaggaatttgtccaaatcctcacagctaataaaatgaagaactagtatatggatccaggtcctcttaattcaagtcccatgctatccttaagtgctgttttcatatttatcttgaatgataatcatctgcttataaatggaaggaaatggtaataagtgctcaataacctgaaaaactgccaagttttggcctcttccctttcccaatgttagggctcaaaaaattacaccctaaactgtggtgctttggcatgccgagtactttgaactaaaggagattggaaggcctcagaagcaagttctccctgaccttctcctcctttccgctctcttacccctcttacctctcttctcccatgaagcaagtaatagaaactggaattcttcttccccaaggtggtttcaaggaagtagaacccctctgccccaaagcaagccataaaacctagacc

SEQ ID NO: 606504 - DNA, 580 bp, Homo sapiens
tttttcccactggcatttccagcttattcccactacttctccatgacaccctcaagcagcaggggctttttgttctctgattctygctttgtttcatgtgaaggtggcagtcccagcacctaggccttaccatttctattaccctagtttctgacggctgccaaaacaaaacactacaaactgggtgactgaaaacaacagaaatctagcagtcgcagttttggagcttagaagtctgaagtcaaggtatcagcaaggccatgctctctctgatgactctagagatgaatccctccttgctcttccagcttctggtgtttgccagtgatccttggtgttccttggcttctagatgcatcactccagtcacatggctgccttctccctgtgtttctctttatatcatcttccctcaatgcatgtctgtttccaatggactgtgggttaggacttcaccatatctttttttagggcacgcaattcaacccacagcaccaccccgagtctgctggggcaagatgacagaatggttaccagaatctgaagacaggatagctctgtggaaagggcttccctagaa

SEQ ID NO: 606505 - DNA, 439 bp, Homo sapiens
ttctcattttgccctgtgaggtagggatttttggttccctgatttttcagatagggaaatagaggcctaattccttgtccgaagttactcagtgagcaagtagctgagctgggatttgagcccaggcactcygaatcaagaacacatattctcaattgtcatatgaaagagtagttgtgggtcagaggacctggctagtgaagcacacacactaggtgtcctatgtgaagcgcacacactaggtgtactaggcttcagtggaaaatgaagcagccctttattactagcaactggtcatgcatccagcatcccttcctcactgcccccccacccacactcatggctctctgggaaaagctgagataaggagataagctttgccaggaggtctgtgcaagggtttcttacccagcactcctgaacctaagacggtgagagc

SEQ ID NO: 606506 - DNA, 630 bp, Homo sapiens
gagaagtaattggaacgtgattctgaggatttgagcttagagaaagggacagatggcaacttcggatcaagagggagcacacaggagaaggagcagatgctggcagggaccaggaatgtctgcacaagaagaaatcctgcaaccttcactaccacagaactagagagcaaagatgagtttccaaagaggtgggagagggtctgggctggaaaagaggcccagagaggcagtaggtggaacgtcccctggcactccaaaattcactatttgtacctccaagggaagctgtcagggaggggacaggagcactctgagcccctgccctgaccccacagaggtgcaaacttacttcstgctggctaggtaaagtggaatcaaaggcagaaaagttccccactggctgacattttggggagctcacagaagggtgagtttcttaaatccaatctcagcaccaatgaggagctgaaacatattgtacccattagaaaagaaatgcaaatcagaaagtcaggcatttgtgtccatgacaacagggggaacgtattttggcaaatctgagttcatttatattcaaataaatatttcagtctatgactctggcacttttttgcatgagatatttcagaa

SEQ ID NO: 606507 - DNA, 630 bp, Homo sapiens
gagaagtaattggaacgtgattctgaggatttgagcttagagaaagggacagatggcaacttcggatcaagagggagcacacaggagaaggagcagatgctggcagggaccaggaatgtctgcacaagaagaaatcctgcaaccttcactaccacagaactagagagcaaagatgagtttccaaagaggtgggagagggtctgggctggaaaagaggcccagagaggcagtaggtggaacgtcccctggcactccaaaattcactatttgtacctccaagggaagctgtcagggaggggacaggagcactctgagcccctgccctgaccccacagaggtgcaaacttacttcckgctggctaggtaaagtggaatcaaaggcagaaaagttccccactggctgacattttggggagctcacagaagggtgagtttcttaaatccaatctcagcaccaatgaggagctgaaacatattgtacccattagaaaagaaatgcaaatcagaaagtcaggcatttgtgtccatgacaacagggggaacgtattttggcaaatctgagttcatttatattcaaataaatatttcagtctatgactctggcacttttttgcatgagatatttcagaa

SEQ ID NO: 606508 - DNA, 527 bp, Homo sapiens
ggactttatgccaccttatacaaatgtgacgtatttttaaaaatccagatttgtcaaacaaacaaaggtaattattctctttataaaatgattatttgttctaraaaataaatctttatatgacacttttaaactgtcagctctaaatatgatttaatgtactattcctcagaaacacattccttttctaaaaaccgacatacacgtattttcaaactgatttatttttttcccaagatatttttatttttttagagtaagtggcagatcactattttctaggattcattcattcactcagttaagaaatacgtgctggattcctattctatgccagacactatcttatacttttcagttatggcagagaatgaaacagacaaaatattctatcctcatggaatgtatactctaatggattatacctttttttgttttaataaataggatatgctattcattctgctaattttaagtatttcctggcacagtgctttgcacatagcaggaactttctatagatttat

SEQ ID NO: 606509 - DNA, 527 bp, Homo sapiens
ggactttatgccaccttatacaaatgtgacgtatttttaaaaatccagatttgtcaaacaaacaaaggtaattattctctttataaaatgattatttgttctagaaaataaatctttatatgacacttttaaactgtcagctctaaatatgatttaatgtactattcctcaraaacacattccttttctaaaaaccgacatacacgtattttcaaactgatttatttttttcccaagatatttttatttttttagagtaagtggcagatcactattttctaggattcattcattcactcagttaagaaatacgtgctggattcctattctatgccagacactatcttatacttttcagttatggcagagaatgaaacagacaaaatattctatcctcatggaatgtatactctaatggattatacctttttttgttttaataaataggatatgctattcattctgctaattttaagtatttcctggcacagtgctttgcacatagcaggaactttctatagatttat

SEQ ID NO: 606510 - DNA, 566 bp, Homo sapiens
ataactaggtatagacttgcgggttctaggatataagcatattcctttttttaagtaacatgaaattgatttcaaagtggttataccaatttacagtcttattatcagtgaaggagcattcctattgccctctacccttgtcaatatttggtatcacytaacttttcaagtcttgtcagtctggtaggtgtaaatgatatcttgtggcagtctcactcgcattttgctgattatttatcatgacttccgcagggctggcttcttcttgtcattcaaatttgagcttaaacatctggagccaccttgttcttcttaactatatcaacctattttaattcccactatctgatattccttccttcctctctttttcaaaaaatgtttgttggtctattttagtttctcctctacaaagcttgtacatagtggctgctcaatagatacttactgaatatttattaaataaataaatgtgctaactttatttctgttcagatcaatatttgctttcttcctgcttggtatatgttctgtcttccatcttgctttcagtttcatcttatact

SEQ ID NO: 606511 - DNA, 566 bp, Homo sapiens
ataactaggtatagacttgcgggttctaggatataagcatattcctttttttaagtaacatgaaattgatttcaaagtggttataccaatttacagtcttattatcagtgaaggagcattcctattgccctctacccttgtcaatatttggtatcacctaacttttcaagtcttgtcagtctggtaggtgtaaatgatatcttgtggcagtctcactcgcattttgctgattatttatcatgacttccgcagggctggcttcttcttgtcattcaaatttgagcttaaacatctggagccaccttgttcttcttaactatatcaacctattttaattcccactatctgatattccttccttcctctctttttcaaaaaatgtttgttggtctattttagtttctcctctacaaagcttgtacatagtggctgctcaatagatacttactgaatatttattaaataaataaatgtgctaactttakttctgttcagatcaatatttgctttcttcctgcttggtatatgttctgtcttccatcttgctttcagtttcatcttatact

SEQ ID NO: 606512 - DNA, 575 bp, Homo sapiens
tcacaactttgatattgcaatagcagaaaattggggtaaatatgtgtggaagatagaaccacatatcacccaataaagttttaaagatgaatgaggcaaaaatattactatcttctgaaacagtgaaaatcttttttgtgataccttttatgaaataygatctcgcattacttctatatttgaaattatgtaagacaaaagttccattttcatcatatatatatttttttaaaaaagattgttgtatgctgcataaccatggcaaactaaatgtgctttcacccaccctcctagaaccttaataaaatatctataaaggaagtaaaaaaaatacagaagtccaagaggacaaagtggattgaatatgaaacagcatctggtgagaaaaatttcaacaaaaaatctggttgatggaagatttgtaacaatgttggcgtctacagaggggaagtttgatgagaaatgagtgattcctcttcagaggcacaaaaaggcttaacacaggtgtgaggtgccatgaggcaaaggtgggaatggggcattttctggaaggctgtatgtggagtgattagaca

SEQ ID NO: 606513 - DNA, 595 bp, Homo sapiens
agtgaaggaaagtgacaggataaaacttgtatagccaacttgggaagaaaacagtccaagctgaagcaggaggacagaggaccccagagaaaatacaaaaagtaattgatacagttgagtatctggaaaatattactgatgagtgtaagacaatgataaaagaacactaggaaaaattagccactggtgcataaagtatcacagatgaaaacaagaaaatgcttattcttagtaaaatggaggattatatgataaagagacctggtcatagttcacaagtcacagaagggggatgatatttgacttcaccaaaagctgtgtcataactataccaaggtaatgttaggaggggaattgggagtaagaaatggaataggtgagattttttttctaccatgacagaaagtcaataaatactacctaaaatagatagaacagaacatttatagtttaagcatatcagttggaaatatggaggtaaatrccagtagaaagagctagaaatgttgagagtggttactgctggaacaggacttggggagacagggcacatggctatggatttcactataagcctttggttttttgttttttg

SEQ ID NO: 606514 - DNA, 611 bp, Homo sapiens
acacagtagaaaacatcagctgagaagacaagaaatttatcatagagttttgtgtttgcacaaaagatggataatagagttcaagctctgccaaagtgttggggcctttgtaaacacattggaatttccgttgaaattccattccttaggaataaagatgatgttctaggaaagaggacaaaactaaaatagccaagccctaacaaagctcaaaccaatccttgataatggtgttttctgcctaatcaaggaaaacctaacacgttgagagaaagakagagagagaaagagagagggcgtattatccagacttcttaaaatagttcatcctcgaagtccaacattaaatttaaaaaattacaacacattctaaaaaaaaaataaaatatctgaaaaatggtagaaagaaacaggcaataaaacagccctatatttgattcagatattagagtttcaaatggatttaaaagtaactatgattactatgtccaagaaaacaaagaggtcattggagaatttcaccacagaactggtatttttgttttttaaaatgagtcaaataaaattctagaacagtaaaataatatacccaattaataattcaaatagct

SEQ ID NO: 606515 - DNA, 589 bp, Homo sapiens
tgaatgtttatgaatgtacaattttttagatcattaattacaaacaatactgaatgaacatctttataaatgaatttggatgcacttccttaattactatagataagactcttattttgcaaagtattattcaactatttatgagtccctttctctttgtactgagagattcaatttgttaaactctgattggaataagtatcttgttttgacatktggttaaggttttggtttaaaattttcattaggagttaaataattactagtccatacgtgggaagaaacccatctcttttatgtccaaatatcagcattcttatggagttgaaagggtcttagatatcatataagccaatctccttagtttacagattaggaaattgaggccaagaatggttaaattactttctccagatcaaatatataattatcatcaattttaaagtcaaaggactagatttcctcatcccaaattcagtgctctttccatatccaaaaaggctgtcaagagataggtgcaaggctctcacctgaactgctttagataattcctgttaatttaacccgtactcagataacgtgtttctaa

SEQ ID NO: 606516 - DNA, 549 bp, Homo sapiens
aattaaattcttactgactatagtcaccatgttgtgcttccaaataaatcttattcaacctccctattatttttgtacccattacccatgccccattctcccaactacccttcccagtctctggttaccatcattctactttctatctctatgagttcagctgttttaatttttagctcccacaaacaagtgagaacatgcaaagtttgtcttattgtgcctsgcttattttacttaatataatgacctccagttccattcatgttgttgcaaatgacagaatttcattcttttttatggccgaagaatactccattatgtatatgtaccacattttctttatccggtatctgttgatggacacttgggttgctcccaagtcttggctactgtaaacagtgctgcaataagtatggaagtgcagatatttctttgatatactgatttcctttcttttgggatatacacaaaaactaaaaatagagctaccatatgatccagcaatcattgatcaagcataaagctaccatatgatccagcataaatcta

SEQ ID NO: 606517 - DNA, 603 bp, Homo sapiens
atatgtaacaaaccagcacgttgtgcacatgtaccctaaaacttaaagtttaataataataaaattaaaaaaaaaaagatctggctcaagcacgacttacacaaattcagtatataagcacgggcaaagaatttaactttttggggtttccttgatcaaatctataacaaaaggacatttaaaattcagtggttttatcattttctttaacgttttaaacattagtcatcatgctgcagtgcagctattacaagaagcccaataactgggcctgaagttggattgtcagttggcgatcacaggacaaaatctggaatctctgctgactcatattcctccttatttcctcaagaaacgccctgtgaaatagaagcatgaattctatggacctagggatcacagtttataatcytcaagagagaaaatttggattatgcccccatatatatataaaattcagaagtaggagaaagaaaacactacttttatgaaattctttttttgctcagattttttctttagttaaacaaaaaaaaatttaatctctgtgttttatttggatttcttattatttattaagataataaatgtatgctgttttat

SEQ ID NO: 606518 - DNA, 627 bp, Homo sapiens
atagttatgataaaatatgcaatatgggaatgcttggcatatgagtcatcaatagtatcatcaaaataagttttgtatcatacttaatgaactgtttgcccaccttaagatcatgaagaccttctatmgtgtttcactatagtcatcttacacttttatctcttaaacttaggctggggattcatttgaattagtgtttatgttgttgttgttactagttttgttctttgctgttgttgttagttttttgttgttgttattatatggtgtggggtaatggtttaagtttttcatgttttgtttctggctttttggtttttgtttttttttgcatgtgtataatccagactgtcccacatttattaacataggggaaaaactggtatttctctagttgtaatttaccatgaacttcattttagctcaacctaattttgattggacttttccataggtctagtaacataaagtttttaaaacattttccccaagtgaaaactattagaaaactgtcaggaaattagaaaatatagtatgtggctttccaattcattatttaataaaagtgattattattttagatcttcaaatatcctagttacttactttctgcccaactctatattc

SEQ ID NO: 606519 - DNA, 458 bp, Homo sapiens
agatgaccattaagattttgttgttggaccgggcacggtggctcacacctgtaatcccagcactttgggaggcctaggcgggcggatcacgaggtcagatcaagaccatcctggccaacatggtgaaacctcgtctctactaaaaatacaaaaagtatctggatgtggtggcacgtgcctgtagtcccagctactcgggaggctgaggcaggagaatcgcttgaacccgggaggtgaaggtcgcagtgagccaagattgagccactgcactccattctggagatagatactcaaaactttttttaaaaaaggttttgttgttgatttactgacaggctgtaagtccagcaggtgcctctgttggtaaagccgcaaaagggctgatggggctacwtgaggaagaacggaaagaaactgcaaaagattgatggatggaataaaaaactgattgaggaatt

SEQ ID NO: 606520 - DNA, 589 bp, Homo sapiens
gtagctttagccaaaagaaaaactctagttgcagacctaggaaaaattaaatatcatcccttccctctctcactcattcattcatttatttttcattcattctgaacatactcaytgagtccctgccatgtgctgggtgattattactcatgcatattactctggcaagaatgtttctttttcttacttatcatgtttatgtgacattcagcaattaatggggcattttttcagagtattagggaaagttcctctccatctcttccttaatttcagtctgtcaacttgtttaaggacatatgttgccttattttatttttttcattttctgagtacttatttgatgttgaatataactgagtccctcctgactcatcttttaaataataataataccaataataatataaaatgttcatagttattacgtagatcaaatttagtgattaatgtgtagagtttaaatcttggctcattgtagacagcaagtgacaactctgttgaagagtctcaacgtaggtaacacatattctatattattttttaaattgaatataatataattgtattagttcttttattacatggc

SEQ ID NO: 606521 - DNA, 589 bp, Homo sapiens
gtagctttagccaaaagaaaaactctagttgcagacctaggaaaaattaaatatcatcccttccctctctcactcattcattcatttatttttcattcattctgaacatactcattgagtccctgccatgtgctgggtgattattactcatgcatattactctggcaagaatgtttctttttcttacttatcatgtttatgtgacattcagcaattaatggggcattttttcagagtattagggaaagttcctctccatctcttccttaatttcagtctgtcaacttgtttaaggacatatgttgccttattttatttttttcattttctgagtacttatttgatgttgaatataactgagtccctcctgactcatcttttaaataataataatascaataataatataaaatgttcatagttattacgtagatcaaatttagtgattaatgtgtagagtttaaatcttggctcattgtagacagcaagtgacaactctgttgaagagtctcaacgtaggtaacacatattctatattattttttaaattgaatataatataattgtattagttcttttattacatggc

SEQ ID NO: 606522 - DNA, 350 bp, Homo sapiens
gtcactgtagctagaaagtgtgagagctaygatctcatgacatgtcttctggctttcagtctggtgttagaacaatctatgggttctttccagatttgtcttccctggcagatgatgtctttctgtgcattaatagtagatgatatacagtggtccagaatcttgatgactgtgcaacaaatggtatcctgctctcactgtatttttacagtttagctgcttaaaatctgatgttccaaatgatccagtgttttcaatcataaatgatatggtactattgagtcatcaaatgcattggttctaattttttatacatatatattcacatctatgtttgtgtatgtatgtgt

SEQ ID NO: 606523 - DNA, 543 bp, Homo sapiens
gtcatgagctggaatattttcatttaaaaagcacagtcggacattaaaaatgtgataatctttatatctttaaacacttttttgtaggtaaccttggtgtgtataatggcaatagaagagaatgagatagcgctggtctatactgaaattactcaggaacaawctattttgaggctcctaaattggtgactatctaatagtagttaccaccgtgaaggatctcagggttgcttattgaaaatataaaagggcataaatgtatataaaacagtagacaatagaaactaagaaagcaaaaaaaaaaaaaaactgttctccaatttttctctctaaatatccaagtctctatgaccagtgaaaactctggatcagaggatttcaaattcttcatgattaagggactaaaaacgtggtactatcataagggtaatagaataaggtcactctgcagagaagcttccagcaaggcatgacttttgtgcatttctgttacatccagacacatcctgacttttgtgcatttctgttacatccagaacattg

SEQ ID NO: 606524 - DNA, 584 bp, Homo sapiens
taaaatgaaaatattagaaacaaatgaaaaaaaaacccacagcaacagaaactgtacaagtctcattagtagatatgacacagctgakgaaataagtacacttgaaaataggtcaacataagttacccaaactaaaatgcgaaagaaaaaagtatattgataagaacacaacacatcattcaagggctgtggcacaatatcagaccttctaacatacatataatttgaataccagtaggagatgacagggaaaacaggatggaagaaatagtcaaagaaacagtggctgagaattttagaattttttattattactaacagtaaccaaaccacagatttcagaaactcagaaatgaccaaacatgataaacaacaacaacaataacaataacaatacacacacacccctctaaacatatcatattcaaatccctgaaccaaagataaagagagaatcttgaaggtagctaagagaaaacaacacttttcctgcagagaaacccggataggaatgatgacatacttctcaccagaaaccatgcaagctggaagacaatggaatgacatatttaaagagttgaaag

SEQ ID NO: 606525 - DNA, 583 bp, Homo sapiens
aggaatcatgtgaaggtataaactccctggtaaatactaagtacccagtcaagccctgaatattaaaccactgtaattgtggtgtgcaaactatgcatatcttgagtagaaagacagataaatctatcaaaaataattacaaaaacttttcaagatatagacaacataataagactaaatagaaccacaaaaatttaaaaagcaggagagatgaagttaaagtgtggaatttgtattagttttctctttgcttgtttgatagtttgtgtttcttcttgcaatcagtgttaagttgtcawcagtttaaaatatgggttataatatgttatttgcaaccctcatggtaacttaaaatcaaaaaacatacaacagatacacaaaaaatgaaatgcaaaaaaattaaaacatagtactgttgcagaacttttccctagttcagctaaaaacaaggttctttgtcccatgcccatgaaaattcaggcttgcagacagtttgaatggtaagtgagacagagttttgttgggtgaaaaggaagaaaagggggaaacagggactcttgctaggccagagtccctgctagag

SEQ ID NO: 606526 - DNA, 547 bp, Homo sapiens
atggcagcacacataggctttgggtaatgcgcaggctctcactcagtgtgtctggcaaaaggcctcagattctgcatttctaataagcgccaaggtgccacctgtgctgtaggtcaggggaccacacttgcagtggctaatgccagaaggttacttgtgcccttcaagtcccaagtctgagggatttttcccagccagcgtgctgcatggatgttgtgctggccagaattcctgacagttcatgatcaggtgtaattagagcagaacttctccaggacagctcactgcttggcggcacagcaagaggctgccaccagagaagtraacccaccagagaagtgaacccaccagagaagtgaacccatgagaaacaaaggcacccagttgtccagaaacaatgggctccacacccccgtattctgcattggtcattttgcctcactccaaacagaaggcaaagttagaatttgctgttaagcctgaaagccaagtctcctgactttagagacagttgagaagcaaaagcaaagggagccgggggtgcagt

SEQ ID NO: 606527 - DNA, 547 bp, Homo sapiens
atggcagcacacataggctttgggtaatgcgcaggctctcactcagtgtgtctggcaaaaggcctcagattctgcatttctaataagcgccaaggtgccacctgtgctgtaggtcaggggaccacacttgcagtggctaatgccagaaggttacttgtgcccttcaagtcccaagtctgagggatttttcccagccagcgtgctgcatggatgttgtgctggccagaattcctgacagttcatgatcaggtgtaattagagcagaacttctccaggacagctcactgcttggcggcacagcaagaggctgccaccagagaagtgaacccaccagagaagtgaacccaccagagaagtgaacccatgagaaacaaaggcacccagttgtccagaaacaatgggctccacacccccgtattctgcattggtcattttgcctcactccaaacagaaggcaaagttagaatttgctgttaagcctgaaagccaagtctcctgactttagagacagtygagaagcaaaagcaaagggagccgggggtgcagt

SEQ ID NO: 606528 - DNA, 348 bp, Homo sapiens
agcctttcatctttgagtacacagaggtccttctctttctcctttactagcttctcmttcccctcctcctctcaagcttcaggcctcagttattttctcattgcattcccttatttggcgatcctatttatttctacagtgctagcagtcactttttggccgatgactcccaaatcttaataaggtgctacctctctttccaatgtacttgcccaagtaacctatcttttccagcctgacggggttttcctctctacctttttattcatacagttttaagcctctactcaagccttccaaatcttaccacccttaaaaatcgagctgaagatccaggtcacagttccc

SEQ ID NO: 606529 - DNA, 359 bp, Homo sapiens
tatttgcctgcagttttctgcgtggacaattgagttttttaattcaattkaatacatatcaaggagtgcaactcctaagagtatggttagccttgtcagaaaccaccatactgccttccaaagtggctctatcattttgcattcccatcagcaggaagtgagtttccagtagctccacctcctcactggcaatcagtaatcagtgctctgaatttggggcattctaataggtgtgtagtggtatcttattgttgttttaataatttgatttaggaagcaagtcagctcagccaccattctgtgagctgtgcactgcagctgatctgctccctcttgaataaaagggtcttgattgaaaa

SEQ ID NO: 606530 - DNA, 359 bp, Homo sapiens
tatttgcctgcagttttctgcgtggacaattgagttttttaattcaatttaatacatrtcaaggagtgcaactcctaagagtatggttagccttgtcagaaaccaccatactgccttccaaagtggctctatcattttgcattcccatcagcaggaagtgagtttccagtagctccacctcctcactggcaatcagtaatcagtgctctgaatttggggcattctaataggtgtgtagtggtatcttattgttgttttaataatttgatttaggaagcaagtcagctcagccaccattctgtgagctgtgcactgcagctgatctgctccctcttgaataaaagggtcttgattgaaaa

SEQ ID NO: 606531 - DNA, 359 bp, Homo sapiens
tatttgcctgcagttttctgcgtggacaattgagttttttaattcaatttaatacatatcaaggagtgcaactcctaagagtatggttagcyttgtcagaaaccaccatactgccttccaaagtggctctatcattttgcattcccatcagcaggaagtgagtttccagtagctccacctcctcactggcaatcagtaatcagtgctctgaatttggggcattctaataggtgtgtagtggtatcttattgttgttttaataatttgatttaggaagcaagtcagctcagccaccattctgtgagctgtgcactgcagctgatctgctccctcttgaataaaagggtcttgattgaaaa

SEQ ID NO: 606532 - DNA, 517 bp, Homo sapiens
gcggatgctggcacaccagaaatgcaaagtcaggcactttccacagaactgacatcacatgcatgttcccggtgggcccactggaggaattctggcacatctagtagagaatgctgggcagttaggaaaagggcacattataagtaactgtgataaagagagccctttattatatctcttggataatcacaacattgatrggggcagagacaatcaatcaacagtgcttaagacaatcttttgccaaactgtgaaaaacgttcttccagtcccctctgaaagcctgactcccggaaatgtagagggcgtgcctcctgggaccgtcttcacatccttcccatgggaaaggcaggcactctcggttagcgtctggggttgcatgaaccgaccacactatggaggtagtgagccgccatctttgcagctgttgctcttatcacagagagacttctttgtataaccttccttgtagtgggctcctgtgctcctgggagtcctataggcaaaaattcttgaa

SEQ ID NO: 606533 - DNA, 517 bp, Homo sapiens
gcggatgctggcacaccagaaatgcaaagtcaggcactttccacagaactgacatcacatgcatgttcccggtgggcccactggaggaattctggcacatctagtagagaatgctgggcagttaggaaaagggcacattataagtaactgtgataaagagagccctttattatatctcttggataatcacaacattgatgggggcagagacaatcaatcaacagtgcttaagacaatcttttgccaaactgtgaaaaacgttcttccagtcccctctgaaagcctgactcccggaaatgtmgagggcgtgcctcctgggaccgtcttcacatccttcccatgggaaaggcaggcactctcggttagcgtctggggttgcatgaaccgaccacactatggaggtagtgagccgccatctttgcagctgttgctcttatcacagagagacttctttgtataaccttccttgtagtgggctcctgtgctcctgggagtcctataggcaaaaattcttgaa

SEQ ID NO: 606534 - DNA, 549 bp, Homo sapiens
gggctcactgaaacctccacctcctgggttcaagtgactctcctgcttcagcttcccgagtagctgggattacaggtgtgcaccaccacacccagctaatttttggttttttagtatatacggggttttgccatgttggccaggctggtcttgaactcctgacttcaggtgatccgcccatctcggcctcccaaagtgctgggattacaggtgtgagccaccacgcttggcccaatctgcatsaactttattccttttttaaaaagtaagcctagtttcattttgcctgtgacataatttttaaaatatcttttttaggaagatacttttaaatatgttgtattttataggaatatacaatttttaaattgtaaagtgacaacttattattgggtacatttatggggtacaaagtgatggtttatgaatacaatgtagaataattaaatcaagctagttaacatatccatcacctcaaatactcaacatttttgtagtgaaaatatttgaaatttctctttgcaattttgtaatatagaatattctatt

SEQ ID NO: 606535 - DNA, 538 bp, Homo sapiens
ttactcttatactagtaaaatactcagcctccagcaattcatgaaaataatcattcatgtgttcctccagtttatggtaagtaactcttgggaactgtatttctctggaytgtctatctctctagatcttaaggtggcagtttgcccttgtcaccacagttctctgataagcccaataaaagttgttaattttccatttgtccaactttttcttgttataagacaggagtaatgacttttaaactctctacatgtaagaacagaaactggaagtccaccacagaattttttattcagtaggtctgggaggggggaagttataaacatattttaaatatatttttatctagaagtatattagaacaggctaatttcaggaattttgtgagtcagttgttaaacatagacattactcaaaattaaattatataaacttattattaaataaatcatattaaaaacaaagataataattactcaaggatcatcacttcctagttatgctattaaattttactactaccgtccagaagtggtg

SEQ ID NO: 606536 - DNA, 538 bp, Homo sapiens
ttactcttatactagtaaaatactcagcctccagcaattcatgaaaataatcattcatgtgttcctccagtttatggtaagtaactcttgggaactgtatttctctggattgtctatctctctagatcttaaggtggcagtttgcccttgtcaccacagttctctgataagcccaataaaagttgttaattttccatttgtccaactttttcttgttataagacaggagtaatgacttttaaactctctacatgtaagaacagaaactggaagtccaccmcagaattttttattcagtaggtctgggaggggggaagttataaacatattttaaatatatttttatctagaagtatattagaacaggctaatttcaggaattttgtgagtcagttgttaaacatagacattactcaaaattaaattatataaacttattattaaataaatcatattaaaaacaaagataataattactcaaggatcatcacttcctagttatgctattaaattttactactaccgtccagaagtggtg

SEQ ID NO: 606537 - DNA, 538 bp, Homo sapiens
ttactcttatactagtaaaatactcagcctccagcaattcatgaaaataatcattcatgtgttcctccagtttatggtaagtaactcttgggaactgtatttctctggattgtctatctctctagatcttaaggtggcagtttgcccttgtcaccacagttctctgataagcccaataaaagttgttaattttccatttgtccaactttttcttgttataagacaggagtaatgacttttaaactctctacatgtaagaacagaaactggaagtccaccacagaattttttattcagtaggtctgggaggggggaagttayaaacatattttaaatatatttttatctagaagtatattagaacaggctaatttcaggaattttgtgagtcagttgttaaacatagacattactcaaaattaaattatataaacttattattaaataaatcatattaaaaacaaagataataattactcaaggatcatcacttcctagttatgctattaaattttactactaccgtccagaagtggtg

SEQ ID NO: 606538 - DNA, 538 bp, Homo sapiens
ttactcttatactagtaaaatactcagcctccagcaattcatgaaaataatcattcatgtgttcctccagtttatggtaagtaactcttgggaactgtatttctctggattgtctatctctctagatcttaaggtggcagtttgcccttgtcaccacagttctctgataagcccaataaaagttgttaattttccatttgtccaactttttcttgttataagacaggagtaatgacttttaaactctctacatgtaagaacagaaactggaagtccaccacagaattttttattcagtaggtctgggaggggggaagttataaacatattttaaatatatttttatctagaagtatattagaacaggctaatttcaggaattttgtgagtcagttgttaaacrtagacattactcaaaattaaattatataaacttattattaaataaatcatattaaaaacaaagataataattactcaaggatcatcacttcctagttatgctattaaattttactactaccgtccagaagtggtg

SEQ ID NO: 606539 - DNA, 539 bp, Homo sapiens
aaatccaaaatacagtcaacctacccagcatattcatcttcattattagtcttcctttactttttttcttttttyagttcctcaatcttacagagctctctaacttcagagcctcagcctggaatactcttccttttgtttttcacttggtttctgttcactgttcaaatgtcatcttaaaaatgtgatttatttcattttataaaggccttctcaaggtttaactaaaatatatgtactcagaaataaatcaatggaagaatccaaaaataatttccttaaacatatgaacttagcagtactccatggtattacatactttcttttttgttcctatttatagtctcaactgcccatcaaaagaggatgtaaagtttattggaatatcctcctttaccaggtactcctatatttttgcaggcaaattcagaggcaagctccagagaagcataattgctgtgtattataaaataagagagaaatcaaactctaggagaacagagatttgcatgggagaggaggggaaaaaaggaaagcca

SEQ ID NO: 606540 - DNA, 539 bp, Homo sapiens
aaatccaaaatacagtcaacctacccagcatattcatcttcattattagtcttcctttactttttttctttttttagttcctcaatcttacagagctctctaacttcagagcctcagcctggaatactcttccttttgtttttcacttggtttctgttcactgttcaaatgtcatcttaaaaatgtgatttatttcattttataaaggccttctcaaggtttaactaaaatatatgtactcagaaataaatcaatggaagaatccaaaaataatttccttaaacatatgaacttagcagtactccatggtattacatactttcttttttgttcctatttatagtctcaactgcccatcaaaagaggatgtaaagtttattggaatatcctcctttaccaggtactcctatatttttgcaggcaaattcagaggcaagctccagagaagcataattgctgtgtattataaaataagagagaaatcaaactctaggagaacaragatttgcatgggagaggaggggaaaaaaggaaagcca

SEQ ID NO: 606541 - DNA, 539 bp, Homo sapiens
aaatccaaaatacagtcaacctacccagcatattcatcttcattattagtcttcctttactttttttctttttttagttcctcaatcttacagagctctctaacttcagagcctcagcctggaatactcttccttttgtttttcacttggtttctgttcactgttcaaatgtcatcttaaaaatgtgatttatttcattttataaaggccttctcaaggtttaactaaaatatatgtactcagaaataaatcaatggaagaatccaaaaataatttccttaaacatatgaacttagcagtactccatggtattacatactttcttttttgttcctatttatagtctcaactgcccatcaaaagaggatgtaaagtttattggaatatcctcctttaccaggtactcctatatttttgcaggcaaattcagaggcaagctccagagaagcataattgctgtgtattataaaataagagagaaatcaaactctaggagaacagagatktgcatgggagaggaggggaaaaaaggaaagcca

SEQ ID NO: 606542 - DNA, 623 bp, Homo sapiens
tttaaagttccttgtgattctcagtttcataagaatttttaaaatcatgaatattaaatgttaacagatactttctgtctatattgaaatgatcatatgcttttttaccacattaagctgttaatgtggtaaattacactaagggtttttaaatgttaaaccaatcttgatatcttggcacagaccaagcttccttatgatgtatgtattaagcatttgttgttgttgttgttgttgttactgaactttattggataatattttattgaggatttctctaygtttgcaagtgaaattggcatataatatttgtttctcatactgtatttcaggttttaatatcaagggtaatgctagcctcataaaatgagttttggagtatacccacttttagtgttctgttttcatctatgtatgtttgacacataccacaattgaagtcatctgaatctggaattatctttgaaggaaggtttttaaatcactcatataaatttctttaatagcttccagttttcaatttttgtttgtctgctttggtaaagtgtaattttttaaaagcttttttacattttacctaaattttcaaaattcaaaattgaaatacaataacataatatgca

SEQ ID NO: 606543 - DNA, 652 bp, Homo sapiens
gggtataaagtgaatatttcattgtgggcttgatttcaatttctctgatggctaacaaygtccaccatattttcatatgctttttgatcatttgtatatattttcttgagaaatgagcattcagattgtatgatgaataattatttgtctttattaatgaattgtaagagttctttatatatgataaaagctcttatcagatatatgtttcacaaatattttctatttctgtgggttatcttttcactctgtatatgcttttgatgcaaacatttaaaaattttcataaggtcaaatttgtctactttttcttttgttacgtatgctttcagtgtcacatgtaagaatcctatgccaaatccaaggtcttacccctatgttttcttctaagagtgttacagttttagctcttaaatctgtctttaataaattttgaattagtttgaaaatatgaggtaagggtctaagttcattcttttccaggtggcaatccagttatcctggaacaatttgttcaacagaatatcctttccccattgagtgatctcggcaatcataaaaaaatcagttgactttaggtaaatgggtttatttctgaactctcaattgtatcccattgatctacatgtctatctttgtgccaataacacat

SEQ ID NO: 606544 - DNA, 652 bp, Homo sapiens
gggtataaagtgaatatttcattgtgggcttgatttcaatttctctgatggctaacaacgtccaccatattttcatatgctttttgatcatttgtatatattttcttgagaaaygagcattcagattgtatgatgaataattatttgtctttattaatgaattgtaagagttctttatatatgataaaagctcttatcagatatatgtttcacaaatattttctatttctgtgggttatcttttcactctgtatatgcttttgatgcaaacatttaaaaattttcataaggtcaaatttgtctactttttcttttgttacgtatgctttcagtgtcacatgtaagaatcctatgccaaatccaaggtcttacccctatgttttcttctaagagtgttacagttttagctcttaaatctgtctttaataaattttgaattagtttgaaaatatgaggtaagggtctaagttcattcttttccaggtggcaatccagttatcctggaacaatttgttcaacagaatatcctttccccattgagtgatctcggcaatcataaaaaaatcagttgactttaggtaaatgggtttatttctgaactctcaattgtatcccattgatctacatgtctatctttgtgccaataacacat

SEQ ID NO: 606545 - DNA, 652 bp, Homo sapiens
gggtataaagtgaatatttcattgtgggcttgatttcaatttctctgatggctaacaacgtccaccatattttcatatgctttttgatcatttgtatatattttcttgagaaatgagcattcagattgtatgatgaataattatttgtctttattaatgaattgtaagagttctttatatatgataaaagctcttatcagatatatgtttcacaaatattttctatttctgtgggttatcttttcactctgtatrtgcttttgatgcaaacatttaaaaattttcataaggtcaaatttgtctactttttcttttgttacgtatgctttcagtgtcacatgtaagaatcctatgccaaatccaaggtcttacccctatgttttcttctaagagtgttacagttttagctcttaaatctgtctttaataaattttgaattagtttgaaaatatgaggtaagggtctaagttcattcttttccaggtggcaatccagttatcctggaacaatttgttcaacagaatatcctttccccattgagtgatctcggcaatcataaaaaaatcagttgactttaggtaaatgggtttatttctgaactctcaattgtatcccattgatctacatgtctatctttgtgccaataacacat

SEQ ID NO: 606546 - DNA, 679 bp, Homo sapiens
tatgaacattcatgtagtagtgtttatataaacttatgctttcttttctcttggtaaatacctagacatggaatagctggatgatatagtaggtatattttaacatttaataagttgacaaataattgttttctattttccatgtctaccagccatgtgagagttttagttcctccacatacttgtcaatacttgatatgatcagtcttttaattttagccattctaataggtacttagcagtattgtatggtttttaattaatactgatcatcttttcatgtgctcccatgctatctgtttatctactctggtgaagtgttagctcaagtattttgctaatttttaaaaattgggttgtctcaatattgctttgaaggttgtttatacattctagttataaatattttatcaaaatatgctttgtaaataattytccccattgtgtcacatttctttgcattctgttatcaatgtctttcaaagagaaaaagttttaattttgatgaagtccaatttatgaattttatcttttatggactctgcttttaatgtcccatctaaacaaatgctgaacccattcaaaattatatattatatgcttttctgtatatatataatcatttgattaaaagtttaaaagagtcaattcttaattatgaatcttctagtaaggcaaa

SEQ ID NO: 606547 - DNA, 631 bp, Homo sapiens
aaaataaattgctaccaattttatctttaaattttcaagttgtttgtggttaaatttatgacaggtagaatggtrgagtggaaggagcattataattggaaatctgtgcagtcttgcatcagataacctaaactttctaggcattagcttgaatgcttgctaattctgttataacttaaaaatatattgtttatctgtaaagttaacctaatatagtatttggtgcttaaacagaattttaatttttccttttgctttgttacaacttaatttttatttgagatagtgtcctaaattgtttctgtctcccatcttacactcactttttttaagtcggagaccagcttgatagcaaactttgttcatagttctgtgttgataggagaaaatctatttcagaaaattccaagatctaaaatcatactacttaaaccacatatgttatgaagcccacatgtacctttaaaatctgaattctatactattgtctttatttctggattcaggagtgtttggaatttttctttatgcttaaatataatgaaagggaagggattatatgggaagttttagtttgtcttggaaaatgcagacattaaaactaaaatgcagacattaaaacttactgtag

SEQ ID NO: 606548 - DNA, 596 bp, Homo sapiens
agggcagacttaacttgagatatagtatatagtgtttatcctttttgatacagggtcttactctgtcaccttcccaggctcatgtgatccacctgcctcacctcccacgtagctgggactgtaggcgtgcaccactatgcccggctaattttttattttttttgtagagatggggtcttgctctgttgcccaggctggtcttgaactcctgtgtgcaagcagtcctcccacttcggcctcccaaagtgctgggatgataggcgtgagccacygagtctggtcggtttatgtttttaaaaagtccatttctcccaccttcagccagccttcctttagcttatgcagacatgattgcccttccttttgttacagtgtaagacaactcatttcttaaaatacagtctgcaaatatagtgtgtattcctgttttttttttttaagttaattttttagagacagggtctcgttctgtcgctctggctggagtgcagtggtgcagtcatagctcaagcatccttaacttcctgcgttcatgcctttctctcgcctcagcctcttgagtagctaggactgcaagtgcatgccaccgtgcctgg

SEQ ID NO: 606549 - DNA, 622 bp, Homo sapiens
gcttgagcccaggagttcaggaccagcttaggtaacacaagtagaccccakctctacaaaaattaaaattaaaaaaattagccaggcaaaaggattggaaagagaagttctcagacattggttttcagctttaacttcttgtctgcacagaggataaaagcatccacacgaaaattttgtatttttctccaaggagcaaggaacaaactaccaatgtttttaagttgcagacagcatctgtatatccagtacagaaattttattttaaaagttcactcagggctggcaatgatggctcacacctgtaatctctccctgcactttgacagacgagacagggggatcacttgagcctgagcaacatagcaagaccccatctctaccaaaaaaaatttgttaaagtaaaataaaataaatagctgggtatggaggcacacacctgtggtcctagctacgtgggaggctgaggtaggggaagtgcttgggaccaggacatcaaggctgcagtgagctatgattgtgccactgcactccagcctgggtgacagagtgagatcctgtctcaaaaattagaagataaataaaagttcacacaggcaagaaagaaaataagaatagattg

SEQ ID NO: 606550 - DNA, 622 bp, Homo sapiens
gcttgagcccaggagttcaggaccagcttaggtaacacaagtagaccccatctctacaaaaattaaaattaaaaaaattagccaggcaaaaggattggaaagagaagttctcagacattggttttcagctttaacttcttgtctgcacagaggataaaagcatccacacgaaaattttgtatttttctccaaggagcaaggaacaaactaccaatgtttttaagttgcagacagcatctstatatccagtacagaaattttattttaaaagttcactcagggctggcaatgatggctcacacctgtaatctctccctgcactttgacagacgagacagggggatcacttgagcctgagcaacatagcaagaccccatctctaccaaaaaaaatttgttaaagtaaaataaaataaatagctgggtatggaggcacacacctgtggtcctagctacgtgggaggctgaggtaggggaagtgcttgggaccaggacatcaaggctgcagtgagctatgattgtgccactgcactccagcctgggtgacagagtgagatcctgtctcaaaaattagaagataaataaaagttcacacaggcaagaaagaaaataagaatagattg

SEQ ID NO: 606551 - DNA, 556 bp, Homo sapiens
atttttgtgttatgtattaatggtaccaaaacatttttgttcttcccgaaatgattactaaacatttcagtaaaaatattattttaamtttttggtttaatatttggtaaattctgctcagtttatttcaatacttggctttaaatggcatcatagctgaaaatggaattgcccaaagatgttaactactcaactatacatgcaaatgtagaattcattatttagattataagaatttcatgttactttcaatactgttataaatatatgttgttttgtagtctcaaattttattaaaatcatgcattttatagcaaataaaaatctatttccttgaagatattaatacaactttctcacatttttatttacaagaactaaaccttaaaaacaataacagacaatatattgctcttgccttcattacaatgtatcttgaattgtctgtataaagcaacaggctatgcaaattaacaggtattaacctttatatctatccaggcacgttttaagttacggtgacaagtgtcagtactcctcatacccaaatggccac

SEQ ID NO: 606552 - DNA, 622 bp, Homo sapiens
  misc_feature 587, 588, 589, 590, 591, 592, 593, 594, 595, 596, 597, 598,599, 600, 601, 602, 603, 604, 605, 606, 607, 608, 609, 610,611, 612, 613, 614, 615, 616, 617, 618, 619, 620, 621, 622: n = A,T,C or G
actctctgcttgccaacattaccgccattcctgcctgcaagactcccggtgctaggggaggcagagcacttagaaaagagagggagaagaccaagcaggggcaggagctgaagaagctgacaggctaccacrggactccatcctcaactcccaggaatgtgtcaccaagccagagccaggatgaggagtaccagtctcctggctccagtctgggtgctgacactgagcccttgctacctgcttctatttttatgagcacacatactccctctccctagccttccaaaaaatgcctataatgcaaaaccttccttattccccaggaaaatggcttatatattgttggcaattaataattatatgataaactttctcacatcatatttttcttctttctccttttctagcaagcagtttggttataactgggataactctaggtcccagtttatccctgttgttccagagtaattatagatactatctctttcactctctgaagcatctgggttggtttgaaatatcaattttacactaacctgtttatattaactgatcaaataagaatgctcccacttcagatgctnnnnnnnnnnnnnnnnnnnnnnnnnnnnnnnnnnnn

SEQ ID NO: 606553 - DNA, 635 bp, Homo sapiens
acctcccaccgggtccctcccacaacatgtggggattatgggagctacaattcaagatgagatttgggtggggacacagccaaaccatatcagcactaaacacactaggactctatatctttgattaattttgtctactgtctagctcctttgctcacatgtcttgttcactgctgcatccccagcacctagaataggayctgatataccaaaggaatggaaatcttaggtgcattaatgaattagtaaacgattccttttagtttgagaaaagcaaggatttttccctttgaatgactttgtctatatataggtcagtgtttgagtgaaaaacaccagaaggagaagtgacaactagaggcaagaagggtagaggaagaaaactgcaagtttggggtggcgatggtaaggattccaagtggcaagcagcaggcccacaacagcagcaaaggcatgggggtcaaagccctcccgtgggcagatgggatgtcgagcaggtgactgatgcctgtgagctcgggggggcaggggcaaggctctgggcccttctagggtctctctgtatgtgaatgctgtctgggttcctatgtgtttgaagggaaaaacagacagatgaacagttttgaggctgtttc

SEQ ID NO: 606554 - DNA, 635 bp, Homo sapiens
acctcccaccgggtccctcccacaacatgtggggattatgggagctacaattcaagatgagatttgggtggggacacagccaaaccatatcagcactaaacacactaggactctatatctttgattaattttgtctactgtctagctcctttgctcacatgtcttgttcactgctgcatccccagcacctagaataggatctgatataccaaaggaatggaaatcttaggtgcattaatgaattagtaaacgattccttttagtttgagaaaagcaaggatttttccctttgaatgactttgtctatatataggtcagtgtttgagtgaaaaacaccagaaggagaagtgacaactagaggcaagaagggtrgaggaagaaaactgcaagtttggggtggcgatggtaaggattccaagtggcaagcagcaggcccacaacagcagcaaaggcatgggggtcaaagccctcccgtgggcagatgggatgtcgagcaggtgactgatgcctgtgagctcgggggggcaggggcaaggctctgggcccttctagggtctctctgtatgtgaatgctgtctgggttcctatgtgtttgaagggaaaaacagacagatgaacagttttgaggctgtttc

SEQ ID NO: 606555 - DNA, 530 bp, Homo sapiens
aacacaggaacagaaaaccaaataccraatgctctcatttataagtgggaattgaacaatgagaacacatggacacactgggcaaacaacacacactggggcctgtcagagggtgggagtgggaggaaagacagcagcaggaagaacagctaatggatgctgggcttaatacctaggtgatgggacaatctgtgcagcaaaacaccatggcacacatttacctatgtaacaaaactgcacatcctgcacatgtactcccaaacctaaaagttggaaataaaaataatagtaataataatctgactagtcccacatctactggactttgtctacacttggtattcattctacctgcaatgttttcctcccagatctttatatttaccaatcagttcaaggatgattagaccttctcttaagcttcataaggagaaataaaatactttacagacaagcaaatgctgagagattttgtcaccaccaggcctgccctaaaagagctcctgaaggaagcactaaacatggaaagg

SEQ ID NO: 606556 - DNA, 508 bp, Homo sapiens
tctatgcatattggatgttgtaatgagcaaacatgtgaatasgtcagatcacatttcatgctcccttgtgtgatgggcatgacactaaatgtatggggtatatataaaaatataagctgggtataaagtttttaccttgcaatggtagtgacaatagtcacaaaacttttgtggggagaactccatgattccctcctttacactgccactcatggaaggtgttgcaatggctgacgaaggccaaggccataactgaaccatagtgctaagggtaaaggtgaatttgagtgagaaaaaaaaatcataattaggaaaaatcatcctccctttgatgtggtcccttcacagaggtgctaattatcaaagacaaagataatatgatatccccaggaaaaagaggaagatcctctttgtgacatatggacacttattctgtgaaacaagcaagctctcctgactcattctggtctagcccacacagtcgtttctgaaggttcaacagtaagct

SEQ ID NO: 606557 - DNA, 427 bp, Homo sapiens
aaggcatacaagttgatctatgccacatctgataccatgaaccatgttattaaataaaaaggttctactgtgcttacaaaaaaaaaaactactctaaagtatagaatattccagaaagaactgaaacagattcccaaatagagctgaaatgagttggacaaaattataatactaactcattgactataaaaattattttcagcttcagaaggaaataaaagttaatgcaatgaatggaagtgaagtaaaataaccttgaaagtgatgattaactgatgaatagattattagaaaactatttaaaatgaaatatgacccaaatcaaagcttttggctaatatttgagtacttaaaaatactaggtgtcttaaaaaagaacttctarctttatactgaaaccccaaagcaagcgaatagacaaaaaata

SEQ ID NO: 606558 - DNA, 584 bp, Homo sapiens
tcacctgcccagagctttaagctagctgttctcagtacccactggatatcaagcttatgtrggatggcaccttttttttttttttttttttttggagacggagtcttgctctgtcacccaggctggagtgcagtggcgcaacctggactcactgcaacctccacctcctggttcaagcaattctctgcctcagcctcctgagtagctgggattacaggcacctgccaccacgcctggctaattttttgtatttttagtagagatggggtttcaccatcttggccaggctggtcttgaactcctgacctcttgatccacctaccttggcctcccagagtgctgggattacaggtgtgagccaccatgcctggcctggcactatttttaatggtactttctgtctggtctaggaccattttcatgtatgacacatgtgtgaaaagcaaaataaattatctttttttttacctggaaggaagttgtttagggcagagagtatatatgaggcaataaagcaagatgttttttatagttttagggtcacaaacctgttctacggatgtagtgtaatctgcagacattca

SEQ ID NO: 606559 - DNA, 584 bp, Homo sapiens
tcacctgcccagagctttaagctagctgttctcagtacccactggatatcaagcttatgtgggatggcaccttttttttttttttttttttttggagacggagtcttgctctgtcacccaggctggagtgcagtggcgcaacctggactcactgcaacctccacctcctggttcaagcaattctctgcctcagcctcctgagtagctgggattacaggcacctgccaccacgcctggctaattttttgtatttttagtagagatggggtttcaccatcttggccaggctggtcttgaactcctgacctcttgatccacctaccttggcctcccagagtgctgggattacaggtgtgagccaccatgcctggcctggcactatttttaatggtactttctgtctggtstaggaccattttcatgtatgacacatgtgtgaaaagcaaaataaattatctttttttttacctggaaggaagttgtttagggcagagagtatatatgaggcaataaagcaagatgttttttatagttttagggtcacaaacctgttctacggatgtagtgtaatctgcagacattca

SEQ ID NO: 606560 - DNA, 571 bp, Homo sapiens
cctgtgatccctttgccatctcctccatctcccctgtcaaaaattgaaatgctccttttgtttttagtcctatcagctgatagtacagaagaatatatgcaaactaaaatatgccgaggacatggtgtagctcccatgggaatatcccaaagggttttattggatactaagatataaagtgcctaaattccccgattctgtcactttacatagtaaagtcttgataaacrttcatcattttgaatataagtcagccagttttgacaaagtcgtgcattttcaagttcgtctccaaatacccggagcaaatcaatgcaaatagctgtggctacaggtgtcctcatggttcatttgggtagtgtactggcatctgttcactcatgactcatctggtcaaccttgtgcactgtatgtacaatagaaatgtctgactagtcaaaaaacctgagtttttagtcccaactctgtcttgaactagctgtgtgatcaatcttaaataagtcacttgattctcctgagctctgtttcttcctctgaaaataaagccattgaattatggtggtttgaaaga

SEQ ID NO: 606561 - DNA, 571 bp, Homo sapiens
cctgtgatccctttgccatctcctccatctcccctgtcaaaaattgaaatgctccttttgtttttagtcctatcagctgatagtacagaagaatatatgcaaactaaaatatgccgaggacatggtgtagctcccatgggaatatcccaaagggttttattggatactaagatataaagtgcctaaattccccgattctgtcactttacatagtaaagtcttgataaacattcatcattttgaatataagtcagccagttttgacaaagtcgtgcattttcaagttcstctccaaatacccggagcaaatcaatgcaaatagctgtggctacaggtgtcctcatggttcatttgggtagtgtactggcatctgttcactcatgactcatctggtcaaccttgtgcactgtatgtacaatagaaatgtctgactagtcaaaaaacctgagtttttagtcccaactctgtcttgaactagctgtgtgatcaatcttaaataagtcacttgattctcctgagctctgtttcttcctctgaaaataaagccattgaattatggtggtttgaaaga

SEQ ID NO: 606562 - DNA, 537 bp, Homo sapiens
agctatagtcttttaaatcagaaattgagcaaggcctttattttttctcattggctctctttgtaacatatcactacacatatcactgctggtgtgttgataatatttaatgatcattatattagcaatattaataaagyatgttaattctcttttgcagttatgtcagttcccttgtgttaaaaagaaatcattagtaattccgcattaactcacaaaaattttccaattatttcagggctgagttttcaaacttccacagagacctcataaataaataaggcctttgcatgtgacaatttaaacccctctatttcagcttccatgtgcagcaattttgtaatcagccataaggaaaggaagagcaggctcctgaggtgtttaaagggtctggagtttgcactttgacttgccaatttcaattaaaggcttcttcagcagtatacaagtagggttgagattgtacttttttcatagattttttctagtattttaataaatcttattcatcttttactgttcctttgtcttggtata

SEQ ID NO: 606563 - DNA, 567 bp, Homo sapiens
tgtagtcgaattgattgtttttagttcacatattgaatttctatatcttatttaagaaatcctgactatcccaaggtcataaaggaattttcctatcttctgtttttaaagttttataattttcttttcacatgctttaaaactacctgaaattgatttttgtgtggggcatgaagtaagggtccaatttcattttttgttccatgaagaacccattgtcccagtgccttttattaactaatctgtcattgcctcactaatctgcaatgtcagttttctcatatatcaggtttccacataaaatggatttattgcwagactctcttgctgttctattggtttacttatctgttcctgagccaatacaaagttgttaattgctgtagctttatataattttatatcttatagggcaaatttttcaaatttccctttatcgaaaacgggcaattttatgatattggttattctatcgatgaaaatggtaccgttcacttatttgtatattttaagacttttcaataaaagtaaaattttatccgtaaaagtcttttatatgttttctta

SEQ ID NO: 606564 - DNA, 501 bp, Homo sapiens
catgaaaacattatctaaccatgtctggaattggctggttaataatttagcatttctatgtttatgttcttaagagattttggactatagcttttcctttttgtactatcactgtcagattttggtatgtaagttatgccagcctcartaaataaaaaagagagtctactcttttttctctattttaggaatagtttaaaattagaataacatgccttttgaatatttcataataatgccagtaaaaccagcattttttgctggtttgattttattaatggatatggactattcaattttcttacttatttgtgagtaaattttggaaagttatagttgtctaggaatttacccatcttatctcagttttcagggtttatttggtatgaaactgatcataatattcttaatctctcctccatgtgtaggtattccacactttgccttcttaaaaagtattcatttataacttttcttccctgatttttttttccagaattt

SEQ ID NO: 606565 - DNA, 485 bp, Homo sapiens
gaatatggggggactctattaagactcgtatgtatattaaagaatgtcataaaacaatgcatatgtgtgcaaaagacaattcattttttaaaaatgctttaggtgttgcttttgtaaggcatagcattttgctgcactccttccaaaacacagggccctagtaaccaccctaactgccttacccacgggtggtcctgccaaccaggttggcttcctcattcctctacagtccttgtccaaataaaaagtccttccttacccaggtggtattccttacttcttcattcctctacagtctttcttcaaataaaaagtccttccttacccgggtggtgtgtcttactaccctcctgtgtttctctcgtccttctactgagctaaaatgtgtcataataccagctcccttctgttccacatacagcaaaatcctacttctcttcccagacctaacasaaagaccaactcatggagatttctaatcatct

SEQ ID NO: 606566 - DNA, 604 bp, Homo sapiens
caataatgatttattgagtgcctgcatgtctcaagccctctgctaggagctgcaggtttgtgtgatttgtatatgccttgcttccatttgtgtttgacagtgccatggggatgtttcctggggtaggcatttcactgtcagctagatttctgctcgacttcatggctgtcattgtgcgtgactgtgtcatctatgctctcacacaaaccatagactgaggggagcaatttcacagttgaaattctaggtgccataaccttccagtacaggaggtgttatgggggcaatagggaggtgggctggtcctcactctacactgttgggcagactcatcagaaatactgaggagtaagtctggcctggtgaacccatgcaaattcatggtaactgaagaacatgtagaaatgatagacattatacaacagaataaaaagataaaaaattgttcataatcatcaagaaataaccactrttactctttttgctaccttaatatttactttgtacatacacatatgccacacacacacacacacagaggcatgtaacacaaatacacttgcaaaaatggagatgcactattttatagcctatatttttcttg

SEQ ID NO: 606567 - DNA, 604 bp, Homo sapiens
caataatgatttattgagtgcctgcatgtctcaagccctctgctaggagctgcaggtttgtgtgatttgtatatgccttgcttccatttgtgtttgacagtgccatggggatgtttcctggggtaggcatttcactgtcagctagatttctgctcgacttcatggctgtcattgtgcgtgactgtgtcatctatgctctcacacaaaccatagactgaggggagcaatttcacagttgaaattctaggtgccataaccttccagtacaggaggtgttatgggggcaatagggaggtgggctggtcctcactctacactgttgggcagactcatcagaaatactgaggagtaagtctggcctggtgaacccatgcaaattcatggtaactgaagaacatgtagaaatgatagacattatacaacagaataaaaagataaaaaattgttcataatcatcaagaaataaccactattactctttttgctaccttaatatttactttgtacatwcacatatgccacacacacacacacacagaggcatgtaacacaaatacacttgcaaaaatggagatgcactattttatagcctatatttttcttg

SEQ ID NO: 606568 - DNA, 588 bp, Homo sapiens
accagaaacctttagagaattaaacactgtttttatatataattaccatttacttaatcttttgtggtgcttgtagttttatataaatatagtataaatttgttattttagacattttaaattgtgccattcaattcagtggcattaattacattcacaatgttatgcaaccatcactactatttccaaaaaattttatctccccaaatagaatcattgtaaccattaagcattagctcagcatatttcctcttccccagtccttggtaacctctaatctactttctgtctctacaaattttcctgttcaagatatttcatataaggggaattatataatatctgtccatttgtgtccagcctatttcacttgctataatgtttgcaagtttcacccrtattgtagcatgcatagaaacttcattcttcttatggctgaataataattttgcattgtatgtgtagaccacgttttgtttatccattcatttgtgatggacactcgttttcacctttgtctcttgttaaaaggattcaactactttgtcttttaaaatttgtaatcaacatttgctgaagtgtatttat

SEQ ID NO: 606569 - DNA, 507 bp, Homo sapiens
aacttattccaaaggtaaagaatgtatgggcagaatctagcaataggctcttgggaagaagaaaacccatatgaaactttggatagtttaatcaggaaagaaaaaaaactctattagctagagggagagattaaaaaagacaatgtgagcagaaaacaaggaagaggggaacaaaagaaaagtcatgagaataaataagtaagaaaaatagaagtcaagtggttgtggtgagtggtaagaccattaaaaatttttactgactgccacctttgacaaaatcagctacctcctccagtattctgtcattagtagaaattagctaattgtttggaatctgtaaaaaaaaaaaggatgaaatccagtgggtattcatagctgtaaaggctatatagtctgaactayggtggaatgttattaaaatatgaaaacaagcagcacagggtctcaggctggagcagttatacagagtaagaagatgtcatttcaaaatcacttttctgataatta

SEQ ID NO: 606570 - DNA, 588 bp, Homo sapiens
accagaaacctttagagaattaaacactgtttttatatataattaccatttacttaatcttttgtggtgcttgtagttttatataaatatagtataaatttgttattttagacattttaaattgtgccattcaattcagtggcattaattacattcacaatgttatgcaaccatcactactatttccaaaaaattttatctccccaaatagaatcattgtaaccattaagcattagctcagcatatttcctcttccccagtccttggtaacctctaatctactttctgtctctacaaattttcctgttcaagatatttcatataaggggaattatataatatctgtccatttgtgtccagcctatttcacttgctataatgtttgcaagtttcacccgtattgtagcatgcatagaaacttcattcttcttatggctgaataataattttgcattgtatgtgtagaccacgttttgtttatccattcatttgtgatggacrctcgttttcacctttgtctcttgttaaaaggattcaactactttgtcttttaaaatttgtaatcaacatttgctgaagtgtatttat

SEQ ID NO: 606571 - DNA, 548 bp, Homo sapiens
ccaatccttttaatttttctcttgctaaagaggtctatccaaagagaaataaaaatgtttattggttacaagaaaaactttttaaaaacaaaaatgtagtactttgtgctmaaataggttttggtattttccttcatcactgaaggatttttgttttttgataaaattttagaaactgtatatttaacataatttacagcatctagttgttaagtagcatctttgcacacattttttagaagttaagatctggtattggggtgatgagattgagagattataggaagttgatgaattgacatctaaactcagccacagaatggagatggcaaagacaatatagatacaggattcctaggttcaaggaaagcaggggatgggagccattattgagtaggggatggatccaagggggctgtaaagtttctgagtttgaacaagaaacagaaggagaagagttgcaaagttccatgtgaataattcacttttcttccgtaatctcatgtaattggcatataatctcactgcaagaacactaatgagcgaaa

SEQ ID NO: 606572 - DNA, 613 bp, Homo sapiens
catataaactttggaattattttgttgatatccacaaaatatcaattggggagatttcattgaatctatatatcaagttgacaagaacagacatcttgacactattgggtcatcctatctgtgaacatggaataatttctccatttatttagtctttcatttctttcatcagagttgtgcagttttcatcatatagatcttgaacatgtttcgttagatttatacctaagtattagtccctgcctcttgaccctctgctttgcttacctattkaacattattctcaggtcatctgcaattcccattccctttgccgcttcactcatcttttacatattgcaagtcttcttgtgatcatacggtggtaatagctctcagactctggcaagtctgagcatttgaagcaggagaaccagcatctgagaaaatcagaagcctacaggatactctggactctggctgtggtagactgggctgttgaaacaagtttgtgtcaaagttctagcttgattttcttatgctcctccaactgccttcttacttctacccgaagaccttatgctttctgataacttgaaaagagctcagcctttggggtcagcctggaatacaa

SEQ ID NO: 606573 - DNA, 550 bp, Homo sapiens
atctatatatcaagttgacaagaacagacatcttgacactattgggtcatcctatctgtgaacatggaataatttctccatttatttagtctttcatttctttcatcagagttgtgcagttttcatcatatagatcttgaacatgtttcgttagatttatacctaagtattagtccctgcctcttgaccctctgctttgcttacctattgaacattattctcaggtcatctgcaattcccattccctttgccgcttcactcatcttttacatattgcaagtcttcttgtgatcatacggtggtaatagctctcagactctggcaagtctgagcatttgaagcaggagaaccagcatctgagaaaatcagaagcctacaggatactctggactcyggctgtggtagactgggctgttgaaacaagtttgtgtcaaagttctagcttgattttcttatgctcctccaactgccttcttacttctacccgaagaccttatgctttctgataacttgaaaagagctcagcctttggggtcagcctggaatacaa

SEQ ID NO: 606574 - DNA, 548 bp, Homo sapiens
tatattgaacaagcaatttaaaattatgatcagcacacacttgtgtctcctacaatccctttaaactttattaaatggaggtgattttccgtctgtcttaagatgaagactttgacaggcaccaacttttctgttcattttcaggtaatataatgtggtcacctatgtcaaaaataagctycaattcagaaattaaaatgttttgtctcatgtaacactcaatgatctaaatattatttagcagtcacatctcctctgtttccccagatcttcttcctggcttcaggttagatccttctactctctactgttcttctgctaacctcctctcccattttctttgccatttgactcccagtggggtcttggggttggctgtgtgaagggagaaagtgtaagggaataaacctgttcttatttgactatgtggcttctgggtctgttggcttcagagatgtgaaccagctggccctccttcttatggagctcttcaaacgttctctagagaatccctgatatggattttcacccaaatctcatcttgaaat

SEQ ID NO: 606575 - DNA, 548 bp, Homo sapiens
tatattgaacaagcaatttaaaattatgatcagcacacacttgtgtctcctacaatccctttaaactttattaaatggaggtgattttccgtctgtcttaagatgaagactttgacaggcaccaacttttctgttcattttcaggtaatataatgtggtcacctatgtcaaaaataagctccaattcagaaattaaaatgttttgtctcatgtaacactcaatgatctaaatattatttagcagtcacatctcctctgtttccccagatcttcttcctggcttcaggttagatccttctactctctactgttcttctgctaacctcctctcccattttctttgccatttgactcccagtggggtcttggggttggctgtgtgaagggagaaagtgtaagggaataaacctgttcttatttgactatrtggcttctgggtctgttggcttcagagatgtgaaccagctggccctccttcttatggagctcttcaaacgttctctagagaatccctgatatggattttcacccaaatctcatcttgaaat

SEQ ID NO: 606576 - DNA, 208 bp, Homo sapiens
tagccacattccagctgtgatatagataacctrgcaccggacttgagtactaatttgaaatatgatttcctatgttgaaaaaaagtcccaaactattttttgcttaaactttcaactgtcatttagtaaattgctaaatgcataaatgaatgtttggtgcctaataaatattattgattcagaatatcaaatatcaaaaagatatttt

SEQ ID NO: 606577 - DNA, 208 bp, Homo sapiens
tagccacattccagctgtgatatagataacctggcaccggacttgagtactaatttgaaatatgatttcctatgttgaaaaaaagtcccaaactattttttgcttaaactttcaactgtcatttagtaaattgctaaatgcrtaaatgaatgtttggtgcctaataaatattattgattcagaatatcaaatatcaaaaagatatttt

SEQ ID NO: 606578 - DNA, 492 bp, Homo sapiens
tttgtcttttttgagatcttataatttcctctctatacacattggtgtacatgcttcaacctaagtttaaaatgtcatttcagctttttcttcttttttttccagcctgtgacttatgcatttctggaaacagtattactgacatcrtatcaatttttaaaacttgaagcatttctcattacttctgtctttccatcatctcagcacctatccagtgccaatgtgtctgggattctcaattcacaatgtgtttgttcctgtttgggaagccaaattacaaacaactcatgtttagcaacagattttaattctttaactgtcaataaagattgaattaatacacttttattcatacttcgtcattcttctttacttcctttcaccaccgtgacctccactgtaaaagtgtaatcaatttgaatatcccctatccaaaatgtttgggatcaaaaatgtttaaaagtttagatttttgaacatttgcattttact

SEQ ID NO: 606579 - DNA, 539 bp, Homo sapiens
cacattggtgtacatgcttcaacctaagtttaaaatgtcatttcagctttttcttcttttttttccagcctgtgacttatgcatttctggaaacagtattactgacatcatatcaatttttaaaacttgaagcatttctcattacttctgtctttccatcatctcagcacctatccagtgccaatgtgtctgggattctcaattcacaatgtgtttgttcctgtttgggaagccaaattacaaacaactcatgtttagcaacagattttaattctttaactgtcaataaagattgaattaatacacttttattcatacttcgtcattcttctttacttcctttcaccaccgtgayctccactgtaaaagtgtaatcaatttgaatatcccctatccaaaatgtttgggatcaaaaatgtttaaaagtttagatttttgaacatttgcattttacttactggtggagcactcctaatgtgaatatctgaaatcaaaatgctccaatgagcatgttctttaagcatcatgtcaactttcaa

SEQ ID NO: 606580 - DNA, 539 bp, Homo sapiens
cacattggtgtacatgcttcaacctaagtttaaaatgtcatttcagctttttcttcttttttttccagcctgtgacttatgcatttctggaaacagtattactgacatcatatcaatttttaaaacttgaagcatttctcattacttctgtctttccatcatctcagcacctatccagtgccaatgtgtctgggattctcaattcacaatgtgtttgttcctgtttgggaagccaaattacaaacaactcatgtttagcaacagattttaattctttaactgtcaataaagattgaattaatacacttttattcatacttcgtcattcttctttacttcctttcaccaccgtgacctccactgtaaaagtgtaatcaatttgaatatcccctatccaaaatgtttgggatcaaaaatgtttaaaagtttagatttttgaayatttgcattttacttactggtggagcactcctaatgtgaatatctgaaatcaaaatgctccaatgagcatgttctttaagcatcatgtcaactttcaa

SEQ ID NO: 606581 - DNA, 539 bp, Homo sapiens
cacattggtgtacatgcttcaacctaagtttaaaatgtcatttcagctttttcttcttttttttccagcctgtgacttatgcatttctggaaacagtattactgacatcatatcaatttttaaaacttgaagcatttctcattacttctgtctttccatcatctcagcacctatccagtgccaatgtgtctgggattctcaattcacaatgtgtttgttcctgtttgggaagccaaattacaaacaactcatgtttagcaacagattttaattctttaactgtcaataaagattgaattaatacacttttattcatacttcgtcattcttctttacttcctttcaccaccgtgacctccactgtaaaagtgtaatcaatttgaatatcccctatccaaaatgtttgggatcaaaaatgtttaaaagtttagatttttgaacatttgcattttacttactggtggagcactcctaatrtgaatatctgaaatcaaaatgctccaatgagcatgttctttaagcatcatgtcaactttcaa

SEQ ID NO: 606582 - DNA, 533 bp, Homo sapiens
ggcttggaagtttgatttacaatgtaacattattggaaggtggagactaacaagaggtgatkgtgtcaggagggtggagtcctcatgagtggattaacattgttactgaagtagtgggctagttataaaacgagtgggttgttataaaaagagatctgcccgtgctttctcttttgcatgctcacttccaccttcagcccttccaccatggatgacccttgctagatgctcttggacttcccagcctccaaaaccatgagccaaataaatgtctgttctttataaactatcctgtctcagttattctgttatagaacagaaaacagactaaaacaaaacatttggtatctagaagtgggttgttactctaacaaatacctgagaatgttaagtggctttggaactggataatgggtagaggctgaaagaatttggaggaacaagctagaaaaacacccatactgcagtgaataaagtgttaaaggcaattctggtgagggctcagaagacaatagaactagagagagcctgaa

SEQ ID NO: 606583 - DNA, 527 bp, Homo sapiens
gctagatgctcttggacttcccagcctccaaaaccatgagccaaataaatgtctgttctttataaactatcctgtctcagttattctgttatagaacagaaaacagactaaaacaaaacatttggtatctagaagtgggttgttactctaacaaatacctgagaatgttaagtggctttggaactggataatgggtagaggctgaaagaatttggaggaacaagctagaaaaacacccatactgcagtgaataaagtgttaaaggcaattctggtgagggctcagaagacaatagaactagagagagcctgaatctacttatagatgatttaagtggttatgaccagaatgttggtagactattatkgacagtaaaggtctttctgatgaagtctcagacagaaatgaggaacaaggtgttggaaactagataaaaggccatcttgttataaagtagcaaggaacttggctgaattgtgtctgtgtcctaggactttatgaaatacagaacttaagagctggaatat

SEQ ID NO: 606584 - DNA, 478 bp, Homo sapiens
agctagactatctagtggaaaagatacctgatcagtcaagcactctggctgctgcattgttacttttgaccacatacagtgacatgcaagagaaaaaaataaaggtaaaatttttaattaaaaaagaagcagaatagaaaastttggaaaacttttgtatgaccaagtgaccttttgttaaagagattaatatggatagaaggaagtcaggtgctacttgtaaagacaaggggagaaagatcctgaaggcatttctaagatcttccaggctgccctcctattataggctcagatctctaaaagggcagagtgcttttgggaaatgggtccaggaagaccttcaagagcttgctggccagagatacctcaagactttgctccccacattctgatgaagcattctttggctgttctagctgcatctcaagcaggcttaggtgtggctcaacctgctgctcaagaagatacaagctgtaaa

SEQ ID NO: 606585 - DNA, 478 bp, Homo sapiens
agctagactatctagtggaaaagatacctgatcagtcaagcactctggctgctgcattgttacttttgaccacatacagtgacatgcaagagaaaaaaataaaggtaaaatttttaattaaaaaagaagcagaatagaaaagtttggaaaacttttgtatgaccaagtgaccttttgttaaagagattaatatggatagaaggaagtcaggtgctayttgtaaagacaaggggagaaagatcctgaaggcatttctaagatcttccaggctgccctcctattataggctcagatctctaaaagggcagagtgcttttgggaaatgggtccaggaagaccttcaagagcttgctggccagagatacctcaagactttgctccccacattctgatgaagcattctttggctgttctagctgcatctcaagcaggcttaggtgtggctcaacctgctgctcaagaagatacaagctgtaaa

SEQ ID NO: 606586 - DNA, 478 bp, Homo sapiens
agctagactatctagtggaaaagatacctgatcagtcaagcactctggctgctgcattgttacttttgaccacatacagtgacatgcaagagaaaaaaataaaggtaaaatttttaattaaaaaagaagcagaatagaaaagtttggaaaacttttgtatgaccaagtgaccttttgttaaagagattaatatggatagaaggaagtcaggtgctacttgtaaagacaaggggagaaagatcctgaaggcatttctaagatcttccaggctgccctcctattataggctcagatctctaaaagggcagagtgcttttgggaaatgggtccaggaagaccttcaagagcttgctggccagagatacctcaagactttgctcyccacattctgatgaagcattctttggctgttctagctgcatctcaagcaggcttaggtgtggctcaacctgctgctcaagaagatacaagctgtaaa

SEQ ID NO: 606587 - DNA, 592 bp, Homo sapiens
tagcttataagatatcccccctctccaactatcttgacttctggcctygtgtaattctctctccttgaagaacttggctctgactcataaaataaatcaatattgaagggatgtcatgtccatgattagattacgagaggttgtaatttttatcttgctagagtatcctctcctttggtgactttgataaagccagatgccatattgtgagccgtcccaacagagaggcccacatagcaaagaactaatcacagcctccagctaacagccaccaaggaactgaatatggctgaaagcacatgtgctcgaaagtgattccttccatggtggagctttcagatgaaatgtcagtccgggttgacactttgcaactttgtgagagaccccaaagaagagaacccatataaaccatgtctgtattccatgacttgtagaaactgtggtataattttaagctgctaaatttgtgatagtttattacacagcaatagataactaataaagatggctactttttcttttgtggttttatggcatttctgtacatatttctatcataccacttctcatatcctattctccattatgtaga

SEQ ID NO: 606588 - DNA, 592 bp, Homo sapiens
tagcttataagatatcccccctctccaactatcttgacttctggccttgtgtaattctctctccttgaagaacttggctctgactcataaaataaatcaatattgaagggatrtcatgtccatgattagattacgagaggttgtaatttttatcttgctagagtatcctctcctttggtgactttgataaagccagatgccatattgtgagccgtcccaacagagaggcccacatagcaaagaactaatcacagcctccagctaacagccaccaaggaactgaatatggctgaaagcacatgtgctcgaaagtgattccttccatggtggagctttcagatgaaatgtcagtccgggttgacactttgcaactttgtgagagaccccaaagaagagaacccatataaaccatgtctgtattccatgacttgtagaaactgtggtataattttaagctgctaaatttgtgatagtttattacacagcaatagataactaataaagatggctactttttcttttgtggttttatggcatttctgtacatatttctatcataccacttctcatatcctattctccattatgtaga

SEQ ID NO: 606589 - DNA, 592 bp, Homo sapiens
tagcttataagatatcccccctctccaactatcttgacttctggccttgtgtaattctctctccttgaagaacttggctctgactcataaaataaatcaatattgaagggatgtcatgtccatgattagattacgagaggttgtaatttttatcttgctagagtatcctctcctttggtgactttgataaagccagatgccatattgtgagccgtcccaacagagaggcccacatagcaaagaactaatcacagcctccagctaacagccaccaaggaactgaatatggctgaaagcacatgtgctcgaaagtgattccttccatggtggagctttcagatgaaatgtcagtccrggttgacactttgcaactttgtgagagaccccaaagaagagaacccatataaaccatgtctgtattccatgacttgtagaaactgtggtataattttaagctgctaaatttgtgatagtttattacacagcaatagataactaataaagatggctactttttcttttgtggttttatggcatttctgtacatatttctatcataccacttctcatatcctattctccattatgtaga

SEQ ID NO: 606590 - DNA, 551 bp, Homo sapiens
tgtgcttattagctgtttgtgcatcttgtcttgtgaagtgcctgttcaaattttttgtgcacttttaattgaggtgtttgtcttctaattgttgagttttaatatctatctatcygtttatctatctattatctatctatctatgtatcatctatctatctgatatgaacccttcatctcctatgtgtattgcaaactttttccagtctgtggctgggccttatcattttcttaatagtctctttcaaaaaggattttaaaaatttgataaactctcatttgttaatatttttctttcatgatttttgctttttgtgttctaggaaatctttgcctaacccaaatcatgaagattttatcctttgttttcttataggttcatcttttctgtttaggtaaattatccatttcatattaatttttcatttttcttttcatacagattccagttttttcagcaacacatgtcaaaagactatttttttctcattgaattattttgttattgctataaaaaatcagttaaagtaaaaatcaatcaaatatggatc

SEQ ID NO: 606591 - DNA, 551 bp, Homo sapiens
tgtgcttattagctgtttgtgcatcttgtcttgtgaagtgcctgttcaaattttttgtgcacttttaattgaggtgtttgtcttctaattgttgagttttaatatctatctatccgtttatctatctattatctatctatctatgtatcatctatctatctgatatgaacccttcatctcctatgtgtattgcaaaytttttccagtctgtggctgggccttatcattttcttaatagtctctttcaaaaaggattttaaaaatttgataaactctcatttgttaatatttttctttcatgatttttgctttttgtgttctaggaaatctttgcctaacccaaatcatgaagattttatcctttgttttcttataggttcatcttttctgtttaggtaaattatccatttcatattaatttttcatttttcttttcatacagattccagttttttcagcaacacatgtcaaaagactatttttttctcattgaattattttgttattgctataaaaaatcagttaaagtaaaaatcaatcaaatatggatc

SEQ ID NO: 606592 - DNA, 551 bp, Homo sapiens
tgtgcttattagctgtttgtgcatcttgtcttgtgaagtgcctgttcaaattttttgtgcacttttaattgaggtgtttgtcttctaattgttgagttttaatatctatctatccgtttatctatctattatctatctatctatgtatcatctatctatctgatatgaacccttcatctcctatgtgtattgcaaactttttccagtctgtggctgggccttatcattttcttaatagtctctttcaaaaaggattttaaaaatttgataaactctcatttgttaatatttttctttcatgatttttgctttttgtgttctaggaaatctttgcctaacccaaatcatgaagattttatcctttgttttcttataggttcatcttttctgtttaggtaaattatccatttcatattaatttttcatttttcttttcatacagattccagttttttcagcaacacatgtcaaaagactatttttttctcattgaattattttgttattgctataaaaartcagttaaagtaaaaatcaatcaaatatggatc

SEQ ID NO: 606593 - DNA, 445 bp, Homo sapiens
aattgaaaagagacatggaagggtactgctttatgatcttgcaactagccatcttttctttcctttactcttcttgcctacctagagtaaatcacctactatgtaagacaataatttttttttctgggacttaatagataacttccaggaagacatgactagattatttrgaacatgcaatctatgtaataaaataaaagagtgtggttcctatgttacattttctctggacaacaggtaaaagttgagacaggtgcatattatgatttttgctttcacagtctgtttcttggccctgctgaagtctccaattagatgcatatagctatcattacattagaaaattttcattcaagcactctagataagtatacatgaaactgtcataagaaaaagcataatcagcataattcacattcatggtaactcctaaagctgagagtga

SEQ ID NO: 606594 - DNA, 445 bp, Homo sapiens
aattgaaaagagacatggaagggtactgctttatgatcttgcaactagccatcttttctttcctttactcttcttgcctacctagagtaaatcacctactatgtaagacaataatttttttttctgggacttaatagataacttccaggaagacatgactagattatttggaacatgcaatctatgtaataaaataaaagagtgtggttcctatgttacattttctytggacaacaggtaaaagttgagacaggtgcatattatgatttttgctttcacagtctgtttcttggccctgctgaagtctccaattagatgcatatagctatcattacattagaaaattttcattcaagcactctagataagtatacatgaaactgtcataagaaaaagcataatcagcataattcacattcatggtaactcctaaagctgagagtga

SEQ ID NO: 606595 - DNA, 553 bp, Homo sapiens
agctggttggagaggagcatctatgtagaatttatgtttgagggagaaacaaatcttattctcttaagctactgaaatttggggggttattggttacatttattagccttccccagataggtatggactctgggccaaactgccttggttycaatctcatttcgtcaaaagctgtgtgaccatgggtaagctatttaatctctctagtgcttcaatttccttatatatgagatggtgatagtaacattatgtacctcataaagtattgggggaactgaatgagatacacagccctttaataagcctggcatataagtagaagttattatttccaaagatgactctcattttgagatcatttccaaatatggatctcttatagagttggatagataactataagctgatttgttaaaagaaaaattatccaaatttgacattcaactgcaagagtgttgagatttgcagaaagaaaataagaggagagaggaaagtaaggaataaggaaggaagggaggaaagaaggaagacttctttgttctatgcagcttat

SEQ ID NO: 606596 - DNA, 604 bp, Homo sapiens
taacccaacgaatttcagatgaagtctaaaatagggctttctgtgattcacatgcaccagtgaagaatataggattatatatatgcttttatatatagttataagtatatagatgtatatatatgtgcgttcacacacacacaaatagactctatgtgcatatatacaaacattcctccaaattccaattgccttttctttgataggtttgatagcaatgtaaaatcatatactctaaaaggtttcttattcacattatcatcataacaatgtaaatcattgctacttctcacttggttaaattggaaaagattcaaacacacattttaaaactctttttaaattaccttgctttttcatagaattatgcataacagaaaataatgtttagtctattatttttatcttgaatgttttcatgccaatttcagaaaaattgtgacccttttttatagttcattttccaagaagcacggatagtattgaaatatttttmtttttcacagatattaattaatttctgggataaatacacatcagtgataagtaagttcagttaaatttttcaatgtttaaatgttggatagaatatctttcatttgac

SEQ ID NO: 606597 - DNA, 441 bp, Homo sapiens
cttccctactatctccttcttcctacctccttcctaccttctctcattttgtctttccttcagtagctgggactactccccagctgccagaatctctggatttaacctgtcctaatgtccccaggtcttagagagctctgagttttcaaaccttgggcctggttgcctaataacaaaccctacctccctaggccctcccacagcctttggctccctccccatgctgtatgtaataggctttgagccacttttcttacccttcaaggatgtctatttcaaccaatggctttagtataaaaccactgacctctggagccagggactcaaaatgggcattggtccagaggctggaaccttagagatttatctggcaagaaargggttggggacaagctaaactgaaatttccagaactagggatttatttaacaaatgtttaca

SEQ ID NO: 606598 - DNA, 646 bp, Homo sapiens
aaccttgctcgacacaaaattttacttatcaaatgtgaaaaccatggtcattagcatttaaaagaatttgttttaaaagtagctaaagtttaattgctttaaatattcttgtcggaatatgcagccggctgttggttcaacgttcttattaaagagggacggtgtttaattaatcgctgaatttcattgaaaaatatttactttatttctgggtgaagtataaaagagacgtcttgctggaccctcaaggargaacagatttgagggaggtgaatgctttgtagggagttgctggcagagtgacccaggtacagtgctcacctctggattggatgcattttggggaacttttcccatgaaagtttctgaagcaaacctcaccaatcccctttttaataggcatcaatgggaagcatctgtggctccctgcaaaatgctagaatgtgtatttttgtttttcagagaccctgcgaacatggaggccggtaaagagggggaatttcatgcggagaagagcagcctgttcacttctaagtgggttcaccttttaacatgggttaaagtgtaactgtgaccctggtaatcagtactgcttgttgagcactcgctgtacaccaggcactatgttgagttttttaaatgcata

SEQ ID NO: 606599 - DNA, 345 bp, Homo sapiens
ctgcagtagatggcctttggatttgaactgccacctcagctcttccttcatctccagcccaccagcccacttgcagattttggacttgccagcctctttaatggtgtgaaccaattcattaaaaataaatctcttggccaggtgtggtggcccacgcctgtaattccagcactttgggaggccraggcaggtggatcacctgaggtcaggagtttgagaccagcctggccaacatggtgaaatcctgtctctgctaaaaattcaaaaaattagccaggcgtggtggcatgggcctgtaatcccagctactcgggaggctgaggcagaagaatcgtttgaacccag

SEQ ID NO: 606600 - DNA, 422 bp, Homo sapiens
cctgggtgacagggtgagtccccatctcttaaaaaaacaaacaaacaaaaaaagaagtagaaatgactgtccacatgagaccagcacaagggctggctggtctcatctcaaaaagtaaaaattggattttaagagccactggagaatactcatcaattactactttttaaagtacaagtgacragattgacattagccaagctctaagtctaacaaacctagttgtagtttccataactaggtccttaggggcctgctttggtgaatagacaaggatttgtggtaagcatatcaatcgtttatgtgtaaatagtgacgcacacttggctgggtctcttcaacatcagtcctcctcttaggtaactaaagccctcccccctcactcaagttgccattcctatttgctttcaaaaatcccttct

SEQ ID NO: 606601 - DNA, 637 bp, Homo sapiens
gaggttgcaaaaccctgttctagtccctttacagttttccaggaacccttggtgactgcaatgtccttgtgagataagcaggttggagactgctaaccccatttaagagttgaggaaggcccgggtgggcagatcacgaggtcaggagttcgaaaccagcctggccaacatggtgaaacctcttctctactaaaaatacaaaaattagtggggcgtggtggcacacgcctgtaatcccagctactcaggaggctgaggcagaagaattgcttgaacccaggaggcggaggttgcagtgagccgagatcatgccactgcactccaacctgggcaacaagagtgagactccatctcaagaaaaaaaaagaagagttgaggaaattggcagagttcaagtgacgggctcaaagtacacagtaagtagtagtgatgagaccagaactagatcctttcaccacctctagttgaattaaaagagtggaaagcaccctttgtaggctacaagtastgttttgggaaatgaaaatggtttacagatatgtgcctgtcccctacatatttcttaagaaacagacactggccagggtacttacccatttgataggctgtctaggtttggtggcaccagacctgggaa

SEQ ID NO: 606602 - DNA, 599 bp, Homo sapiens
atgttgaattattgtggtggggggggggggttgtggtaaaagaatatggctttagagccagactggtctggatttgagttstaaattaatagctccctagctgagtgaccctgggcccatgacttaatctctcaagtcatcagattcctcatctgttaaataggataacaatgaaactattagagggctgttgtgattattaaatgagatgattttgggaaagaatctagaacaatgtctggcatataagcagatgctcaaaaatgtcagctctactccccatattcctaagtcttccacttactctggaagctgtgtcccaattcaatgttgtattcctagaatttagaataaagccctggacatagtaaacattcaataagtgaaagtttgatgggtagataaagggtaggagagtagtgagaaaaaaattagggcttatagtcaactcagatttgaattacagctccattgttttctaaccactaagtgatcttgagcaaattacttactctcttccagcctcagtttctatatgggtaaaatgaggatagtactaacttgccaacctttttaaggatagaaggttacatatacaa

SEQ ID NO: 606603 - DNA, 576 bp, Homo sapiens
gtgaatgttttatattttacataaatctaactaaagagtacccactgcagagggggttcccaaatatcatgtagataaaataatgtattccttggatgtcagttagtctccttatccagacttccaagttctggcttgatggatcaatatacaaagaggccatggcagcaagctacacaacttggacttttcctgaatatcgaatctgtcagtagcagagaccaatactgattctctgatatggtaccattgaccagccagtcacttggtggcagaatgattatagtatactccttccataatgaaggggcagtgatttgtcctcgctggaaagygcatttattatggacttgaatctgctttttctatactaatgcttcttctagcaccatcatccatgggttatattaatagaatgtcttatttacctatggtgtcctacacagcattcattctgacaaacatactcattttgctgcaaagacatagcagtgataggctcatgcatataatatttattggtcttatccttgcagttcctagaatatgtcaagcatgcatctacctctggacctt

SEQ ID NO: 606604 - DNA, 598 bp, Homo sapiens
aaatcttgtgacacagagtattctaaaacattactcactaattcattttatttactatttcaacaaatatgtatcacgtgcctgctatgtttagattgtatttagattgtgctaaggaactggaatatagaagaagtaaaaacagacacattccctaccctcagatgcttccagtctattggggagatagacattgatgaaaaaaatcacatatgtagttgaaaaatttaatagtaaatagggcttaaatatacagtgataagcgataaggtataaatatatgataacctataatagtgatttggatagggtgggaaaaagggaagcaggaaaataatccaaaatctttaatctttgaagaattgaaagccaccaaagtgtttttttttaatttggggggaacttcagtgawcaaatgtgcatttgattcactgaagagaataagttcaattaagtttgtactggcagggatatataatgtaagaaagacactggattttaaggcacacaacctagattcaagaaactattattatttaattggatataagatttgaatggcaattacaagggttgattatgatacttcccaatttta

SEQ ID NO: 606605 - DNA, 608 bp, Homo sapiens
aaagacacaagtgatgggattcaggagcaagaggccaatcttctggctcctattggctggaaagttggaggtcatgacctcaaaggctgtctgcctaaagattcaggatgtgatagaattattcaggatctatagtagttgggtaaacaggtcgtcagcgagccctgacagcagggatctgccttcccagctgttactaccaggctcagtgcctgtcattctgcacattgccacttggagcccaccaagtgtgtgaaatctgcaatgtgctttgcagtccagctgagagatactgtccttgagaccacacatggactcacacagtcctggcaggtgaggctcaatgaggagaagagatttgttgaagaaaggccacactacacattaatggtatgactgggaatggtgtcaagagctcctgcctgactgttccaaggtcttccaatatattacactgcccytttaatgaaaaacagctaccactggtgtagacatagaaggacaggaagaagcctagaatagggtgtaaagtagtggcccttgatctatatcaggtcatagctacctctggaagtctggtagaagttacagatcctctcccagaaaaa

SEQ ID NO: 606606 - DNA, 540 bp, Homo sapiens
acacaaattaccaaatcttccccaygttaaaaaaaaatatgtggagtggtcagcattgtgattgtacacacacagacacacacacacacacagatacttaaaactttattatattttaaagatgtgccaagatatttttcataggtttacatatttaccagtataaatcataaagaaagggtatttcagtagattgatttaacccaggattttgttcttctaaaatacatggattctctttagagattacaaaccatatagctttgtatacattataaataacatatacatattttaatacttccattaaggaagaatagtaaatcataagtgttttgcaactggactttaatctatgccagagaaatgcccttgttattctgttgtttcttgggttgtcctttatcattttccttgctggcctaatcacttaaaatataaccttggaaaagtaccttacttttctgagttctaactatttaaaaaaactatggataagtacatttataaaactttctccttatttccttattacagttt

SEQ ID NO: 606607 - DNA, 541 bp, Homo sapiens
  misc_feature 454: n = A,T,C or G
gtgtttagcaaggacacagctgtcagttcagtgtgtatatatacatatatatacatatatatgtatatatatacacacacacacatatatatacacatatataatatcacttgcattatatattctgttagaaaacacaggccaggagcagtagttcatgcctgtaatctcagcatgaaccactttgggaggcccaaggtggaggattgcttgaaaccaggagtctgagaccagcctgagcaacatagcaagatcccatctctataaaaatatttttamattaagtaaatacataaaagaaatcagttcgtggtggcacatgcctgtaatcccagctacttgcagattgaggcaggagaattgcttgaacccaggagcagaggttgcagtgagccgagatcgcaccgttgcactccagcttggcaacaaaaagtgaacttcatccaaaaaaaanaaaaagaagagaaagaaagaaatcgttaaacaaatttaaaacgtattgcatagcatcaaaaatgaatgttaggaataagttataaat

SEQ ID NO: 606608 - DNA, 568 bp, Homo sapiens
ctctaataaagtgaaaccctactcattactgccagggcagctccaagccgtccatgagggatctgcctccatgacccaaaaacttcccaccaggccctacctcaaacattggggatcaaattccagcatgagatttggaggggacaaatatccaaactagatcaagagggcaatccactttccttagtctacagattygaatgctaatctccctcagaaacactcttacagacacactcagaaataatatttacccaaatatctgagcaattcatgacccagacaagttgacacataaaattaactgtgacaacactccttctctgcaaagtatctttctttcctattgcagacaagttcatgtggaaaaagacatggtcaccacaatctccaagggtaaatgtagccattgcaactatgtgaaaagactgtcttgaattccttagtctctcacctaaatatttcaggaaggaactagttgacccaccttaggtaaaataccccaaattcatacaatcagttttcaggtgtgaggtcacttttaaacaaatgcaactgtttccatagt

SEQ ID NO: 606609 - DNA, 574 bp, Homo sapiens
attagtttttttattcatttataatattttttcaaatgcctaaaatactttcttagttcttcagaaatttcaaatctactcaatttttatgggttagtgaattgaacagctggctcatatcactcattacgctctgagaaggtgayatcgtttctatgttctgggaatattttataattttaaaatctatgataacattatttatccttcaacttgataaacactgctttttactctcttacagccaaacatccacacaaagataatatttttttcaatcaaaagcactcaaatttccacgatgatcactggaggctcttttttaaacattactataacttgtgattttggctctatcataagaattttatgcttcttgctccaaacaatgctttttgggggtgaaattagatttttttcaattcttctctttcatatgccacactatatttcagacaatctctgactcacactcagcaaatactctccagttataaatcccaggactgtgtttctcaagttatcattgattacatattattattactttttaatctgcaatccaatgcattcc

SEQ ID NO: 606610 - DNA, 506 bp, Homo sapiens
attaaaatcacatctttaagagagaaaaaaatttaaaaacacagtcaaataaaaaataaattcaagaataactgaaaaaawactctactcaaatgagatgaaactagaaaagtaattctgttaatataacataatagggttctatgatattctcaaacgatcacgctagctccccagcaatgaatccaaaccaagatgaaaactttgaaataccagataaagaattcagaagattgattactaagctgctcaaggagataccagagaaaggtgaaaaccaaaataaagagatttaaaaaacaattcaggatatcaataaaaaatttccagagaggcagatatcataaagaaaaaccaaatagaacttctggaaatgaaagacatacttaggcaactacaaaacactggaaaatttcaataataaactagaacaagtagaaaaaataatttcaaatatcaaagacaaggcttttgaattaacctaattagacaaagataaagaaaaa

SEQ ID NO: 606611 - DNA, 506 bp, Homo sapiens
attaaaatcacatctttaagagagaaaaaaatttaaaaacacagtcaaataaaaaataaattcaagaataactgaaaaaatactctactcaaatgagatgaaactagaaaagtaattctgttaatataacrtaatagggttctatgatattctcaaacgatcacgctagctccccagcaatgaatccaaaccaagatgaaaactttgaaataccagataaagaattcagaagattgattactaagctgctcaaggagataccagagaaaggtgaaaaccaaaataaagagatttaaaaaacaattcaggatatcaataaaaaatttccagagaggcagatatcataaagaaaaaccaaatagaacttctggaaatgaaagacatacttaggcaactacaaaacactggaaaatttcaataataaactagaacaagtagaaaaaataatttcaaatatcaaagacaaggcttttgaattaacctaattagacaaagataaagaaaaa

SEQ ID NO: 606612 - DNA, 506 bp, Homo sapiens
attaaaatcacatctttaagagagaaaaaaatttaaaaacacagtcaaataaaaaataaattcaagaataactgaaaaaatactctactcaaatgagatgaaactagaaaagtaattctgttaatataacataatagggttctatgatattctcaaacgatcacgctagctccccagcaatgaatccaaaccaagatgaaaactttgaaataccagataaagaattcagaagattgattactaagctgctcaaggagataccagagaaaggtgaaaaccaaaataaagagatttaaaaaacaattcaggatatcaataaaaaatttccagagaggcagatatcataaagaaaaaccaaatagaacttctggaaatgaaagacatacttaggcaactacaaaacactggaaaatttcaataataaactagaacaagtagaaaaaataatttcaaatatcaaagacaaggcttttgaattaacckaattagacaaagataaagaaaaa

SEQ ID NO: 606613 - DNA, 566 bp, Homo sapiens
ttttggctcactttttcttacttcttattagcggattgtcctatagtttgagtccctttgtttatagcttatttaccaagtcaaaactgttaaccaactggtacaactccagctgtatccccacaggctacagagaaatccagaccctcctcattttgtctccaatgtaactgcaaatccataaaagtygtccttctcatgttgattccttggaaagtcaagtcctttagaaattctaatgaagaactaggtatttacactgctgcttccttaccacaggccatggaagtttaattgggagaaaagaacatctgcttatacgaaaacatattatattcagccatccctgccctgactttggcctttaaaaacagtggcattaattatctcaacaaatgaatcttcgggataaaaataatctaaatattattttacgcttactacatatttgcaacgtgctaagctctttatggttgctaccacaaaaaacatttataatatgaggtgggtatttttattatatacattttcagtttaaagacagtaacttcagaatgtaacttgtc

SEQ ID NO: 606614 - DNA, 643 bp, Homo sapiens
tggtctatatatttgttgcattattttcctctcctagtttgcttactcactgaagaaagaaccaattattaaaaacaattttgtatactgtatggcacacagtacaggtaataaatgtttaaaaaaataaattaataagtgtatttaggcaagtccacaaacactagagaaagtgcgttcctgggtaaagttgtcagatctgtaaaaaatagtaattgtccataatgtttctactctgaaatagaaacatttaaaatagggaggatcaaagagctttagaaaataatgaagagcctatgtccaaaaacttcacaattcctctgggtaaatgtaatcttaactaaaatttaggatcattgctataaaactaaaatcatatttgttgtgtgaaaatatcawtacgattatatttgatatccaacttttatgggaacctaccacccattaagcattttattccctctcttgctcttgagatctgtttgtgaaggttatgtccacttaatagtgaaaaataatctgaactgttatatttttccaagagaaataagaaaaaaattgaaaggcagaaatcactatcacactatatgatgagtctttgcatcttctgaaataatatagaatacatttattttattttcag

SEQ ID NO: 606615 - DNA, 582 bp, Homo sapiens
tcagcctcccaaagtgctgggattacaagcatgagccactgtgcctggctcaagctttaattaaagaaggaaaatgagaatccaccagaatcatgaaggacaccccacactgtggggaggaacataccatcatacagtccgtgtgatggtatgcagctgaaaaaagagagtgaagctccagtaygtgagaggggaagacagtctctctctgtaactcaccctatcactgggaatctattccaggccgagggagagcactttgtttcttccaagccctggagctaatgtggggagaggcttggagatgctgtgagggaaagatactgggaaaagctgcagacattttcccagacccaggaccaagagcgggacatcatttttcatctgacagcataaaaagtcagtctttctttggtgacctggcagcatggctgtgcaggcattttagtctcaggtcagaaattgcagcatctgttctggagtagggtaagagtctccatagccggaactgtggaaagtacctcagcagaacatgctagaattgtgttgtcccccactgcatgcctggggcaggaggagagc

SEQ ID NO: 606616 - DNA, 576 bp, Homo sapiens
cccacctttcctgggcatagattgtgaggcagtggggccctctctgctctatgcctaggcagatcttgaggcattcagagcactcacacacctgaatsagcaatctgactcaccctacccttcctgtgcagagatcttggtgcagggggggctctctctgctccacgtccagacagatttccagggatttggaacacctactcaccaggaacagtaacctgacctgccctacccttcctgtgcagagattcttgtgcaaggagatctcttcattccactctcaggcagatctccacatatttggagcacccactctcctagattaggagttcaggctgtccctcttcccacgtagagaacttggagccaaggaggtttcccagctccacacctaggcacacctctcggtgtttggtggccaaccactggattctctctcagagaaggtgcttgtgcttgccattaggggacctataggcagacctgcccagtcttgccccacccatcttggcccacacctcccagggctgagcagggagctcagactattgtgtgctccacaaatcaggccattgc

SEQ ID NO: 606617 - DNA, 568 bp, Homo sapiens
aagcttcataatttttctcagggcaaattgtggatgagagtataattaaatctaatgtcattaggattttattgaaacaacgaaaccccttttccctcagcccttaagactgctgtattatgcaatgacagtttcttaaaatgaaaaaagatcaatcccacaaattttttaaaaaaatcaattatccaatgggaaagagayggattaccattgattgcatcctgcctgtgttagagatgatggatggctgcagtcacggcattgatctctgggaacaggcttatactgtcttgcatggcttattatggggccacccactcagaggatgcatacatacacaacaaatttcacattttacattctatgagggtctttttggctattcttttgctcatacgactttgactgtgtcacaaaaattaagcattgttacttgcttttaaaaatttgttcagataagatgaatataaagaacttttggacagacagtgctgtaacagaatgcgagaacagccatataaatgatcttctggtagcgattgtagtttgttccaaagtgaaatgcctg

SEQ ID NO: 606618 - DNA, 575 bp, Homo sapiens
ccacatttatatatctgaacacacccaaaaataaaaatagaagagatttayggatgacaaaacactgctgtctggattaaactctgtgggcatgactacagggaagcctgcacagctgataagggtggatatttaatttctgccttataggagtcttagtgggagatggcatatctctgaaaacttcagaggtgaaaagctggtgatcataattttacccaagtggcttttttttttttgtatcgcaactaacgtcgagtaaaatgtctttaaatgggttattctcattacaggggttctatgcagaacggatcatccttctccaacattgatctgaattgttgaacaaaactccagattatcttagaaatatttttgttataacttggcaacaggatgctatagaaaatgggggtgtaaacagaagtatagaagtcagttaaatttttctcttcagagtatcatctatcccatcactgcgatgactacctcattgccctaatattgggtgactattttattattatttaaatcgaacagtaaggtatctgaataggagacagggaaatgcagag

SEQ ID NO: 606619 - DNA, 575 bp, Homo sapiens
ccacatttatatatctgaacacacccaaaaataaaaatagaagagatttacggatgacaaaacactgctgtctggattaaactctgtgggcatgactacagggaagcctgcacasctgataagggtggatatttaatttctgccttataggagtcttagtgggagatggcatatctctgaaaacttcagaggtgaaaagctggtgatcataattttacccaagtggcttttttttttttgtatcgcaactaacgtcgagtaaaatgtctttaaatgggttattctcattacaggggttctatgcagaacggatcatccttctccaacattgatctgaattgttgaacaaaactccagattatcttagaaatatttttgttataacttggcaacaggatgctatagaaaatgggggtgtaaacagaagtatagaagtcagttaaatttttctcttcagagtatcatctatcccatcactgcgatgactacctcattgccctaatattgggtgactattttattattatttaaatcgaacagtaaggtatctgaataggagacagggaaatgcagag

SEQ ID NO: 606620 - DNA, 575 bp, Homo sapiens
ccacatttatatatctgaacacacccaaaaataaaaatagaagagatttacggatgacaaaacactgctgtctggattaaactctgtgggcatgactacagggaagcctgcacagctgataagggtggatatttaatttctgccttataggagtcttagtgggagatggcatatctctgaaaacttcagaggtgaaaagctggtgatcataattttacccaagtggcttttttttttttgtatcgcaactaacgtcgagtaaaatgtctttaaatgggttattctcattacaggggttctatgcagaacggatcatccttctccaacattgatctgaattgttgaacaaaactccarattatcttagaaatatttttgttataacttggcaacaggatgctatagaaaatgggggtgtaaacagaagtatagaagtcagttaaatttttctcttcagagtatcatctatcccatcactgcgatgactacctcattgccctaatattgggtgactattttattattatttaaatcgaacagtaaggtatctgaataggagacagggaaatgcagag

SEQ ID NO: 606621 - DNA, 587 bp, Homo sapiens
tgtatattttttgtttttctgaatctttattatatataactttaactccaaaaaaaaaataccctagaaacaaataattttccaaagaatcagttaggaaatctttataaatatttcactraaactattactattcttaaaaccaaaacattgatgatcaaatattatgatttataccttagtgcaatcattttcccatgcaaacgtcccactgctaatgtttttagaacctctgatggttgattattgttaaaagcacatttaggggaaatgagaatgagccaagaagagctggaaaaccattcagatgaagttgatcaatgatacaatattccatgaacttaagtacaagtcctctgtttttaatgatcgattattacacttcaattattatttaaaatttctacttatttttgattgcttagatatggcaggagtcattgtgttaacaaaatagtagaccatgtctactgctgcaatcttctgacaatgagtttgcttatataaataagtacagacacgctaggctcaaggggattgccaccagtaagtgatcttcaagtggaaagagctgacaaaaaacgcca

SEQ ID NO: 606622 - DNA, 459 bp, Homo sapiens
tggttgattattgttaaaagcacatttaggggaaatgagaatgagccaagaagagctggaaaaccattcagatgaagttgatcaatgatacaatattccatgaacttaagtacaagtcctctgtttttaatgatcgattattacacttcaattattatttaaaatttctacttatttttgattgcttagatatggcaggagtcattgtgttaacaaaatagtagaccatgtctactgctgcaatcttctgacaatgagtttgcttatataaataagtacagacacgctaggctcaaggggattgccaccagtragtgatcttcaagtggaaagagctgacaaaaaacgccaggctctctccccctttgttaaatcaatattcttgagtacaaagttaaaactccaatgctctgcctaggaaaaacctctgcagcaaaagcttaacagttgaaaatgatg

SEQ ID NO: 606623 - DNA, 518 bp, Homo sapiens
gaccttgatctccccggtcaaacaatgtctataaataatgcactaagcattttcacatgtggggtgagcaacattcttcatatttgctcatgaattcacattgcttcttatgacgctgcttcagttttctgtgtagttayctttaaaaggttgattacatgctttcctttaaaatgagagcattgtgtctgtgaatttcaatataaagcctagggctgtgaactggaagaggaaaaaaaataataacattccagtaacatcaagttaaatgtttgatgagtttgttttgataaaaacagtttatgtttttactactttacatgtaaaatgaatgattgccaatcagaatagagccattatttttgcatctcgttcttagatggttctcagtagggcattctggaagtctggattagctgtccaagaatattttacagaagctaaatttgtctccttccaaatcatctgcaaacctccaggtttacacaaacacaatgaaaagggttcttcattgtatt

SEQ ID NO: 606624 - DNA, 518 bp, Homo sapiens
gaccttgatctccccggtcaaacaatgtctataaataatgcactaagcattttcacatgtggggtgagcaacattcttcatatttgctcatgaattcacattgcttcttatgacgctgcttcagttttctgtgtagttacctttaaaaggttgattacatgctttcctttaaaatgagagcattgtgtctgtgaatttcaatataaagcctagggctgtgaactggaagaggaaaaaaaataataacattccagtaacatcaagttaaatgtttgatgagtttgttttgataaaaacagtttatgtttttactactttacatgtaaaatgaatgattgccaatcagaatagagccattatttttgcatctcgttcttagatggttctcagtagggcattctggaagtctggattagctgtccaagaatattttacagaagctaaatttgtctccttccaaatcatctgcaaacctccaggtttacacaaamacaatgaaaagggttcttcattgtatt

SEQ ID NO: 606625 - DNA, 459 bp, Homo sapiens
tggttgattattgttaaaagcacatttaggggaaatgagaatgagccaagaagagctggaaaaccattcagatgaagttgatcaatgatacaatattccatgaacttaagtacaagtcctctgtttttaatgatcgattattacacttcaattattatttaaaatttctacttatttttgattgcttagatatggcaggagtcattgtgttaacaaaatagtagaccatgtctactgctgcaatcttctgacaatgagtttgcttatataaataagtacagacacgctaggctcaaggggattgccaccagtaagtgatcttcaagtggaaagagctgacaaaaaacgccaggctctctccccctttgttaaatcaatattcttgagtacaaagttaaaactscaatgctctgcctaggaaaaacctctgcagcaaaagcttaacagttgaaaatgatg

SEQ ID NO: 606626 - DNA, 503 bp, Homo sapiens
aattcttttcttttctcagaaatacacttttaccttaccacttaagcttagacttttggctctaacaaattttcttttgtaatgaaactatatctatctgaraaacaaccataacaaacaaagaaacaaaacagagactggcccccgtacccgctacacacaaaaaaactcacaatgcctgaattttctatatcatttaacacatttttttcattaccagctttaattgtatatcagcttttctgaatgaaccttgtacaaaatgaagggattttatttgcatgttttattccatattgctatggacaagaaaagattgtaatgggggagggaagatgtaaaatggactcttcaaactggggtattactgccatctagtgtgatgcactgtaacccagaggggaaggaaaagatgatctgtgagacaatccaatctgaaattgtaggagtttgagggagggaagagagcacttctccgaagaaatagccaccaccctcccgca

SEQ ID NO: 606627 - DNA, 568 bp, Homo sapiens
aagcttcataatttttctcagggcaaattgtggatgagagtataattaaatctaatgtcattaggattttattgaaacaacgaaaccccttttccctcagcccttaagactgctgtattatgcaatgacagtttcttaaaatgaaaaaagatcaatcccacaaattttttaaaaaaatcaattatccaatgggaaagagatggattaccattgattgcatcctgcctgtgttagagatgatggatggctgcagtcacggcattgatctctgggaacaggcttatactgtcttgcatggcttattatggggccacccactcagaggatgcatacatacacaacaaatttcacattttacattctatgagggtctttttggctattcttttgctcatacgactttgactgtgtcacaaaaattaagcattgttacttgcttttaaaaatytgttcagataagatgaatataaagaacttttggacagacagtgctgtaacagaatgcgagaacagccatataaatgatcttctggtagcgattgtagtttgttccaaagtgaaatgcctg

SEQ ID NO: 606628 - DNA, 568 bp, Homo sapiens
aagcttcataatttttctcagggcaaattgtggatgagagtataattaaatctaatgtcattaggattttattgaaacaacgaaaccccttttccctcagcccttaagactgctgtattatgcaatgacagtttcttaaaatgaaaaaagatcaatcccacaaattttttaaaaaaatcaattatccaatgggaaagagatggattaccattgattgcatcctgcctgtgttagagatgatggatggctgcagtcacggcattgatctctgggaacaggcttatactgtcttgcatggcttattatggggccacccactcagaggatgcatacatacacaacaaatttcacattttacattctatgagggtctttttggctattcttttgctcatacgactttgactgtgtcacaaaaattaagcattgttacttgcttttaaaaatttgttcagataagatgaatataaagaacttttggacagacagtgctgtaacagaaygcgagaacagccatataaatgatcttctggtagcgattgtagtttgttccaaagtgaaatgcctg

SEQ ID NO: 606629 - DNA, 608 bp, Homo sapiens
cagcagcaatatgagggcaggaatcaggtcttttctattctttgaatttccagcacccagcctttttttttttttcttaccctatgccctgtaacctactgtattagtctgttctcacttctgtaaagtgagaactatacataaaggactgcccaagacttgataatttataaaggaaagaggtttagttgacatacagttatgcatggctggggaagcctcaggaaacttacaatcayggcagaggggaagcaaacacatccctcttcacatgatggcaggatagagaagtgccaggcaaaagagggaaaagccccttataaaaccatcagatctcatggaaactatcacgagaacagcaacatgggggtaactgcccccatgattcaattacctcttactgggttcctcccacgacacgtagggattatgaaaactacaattcaagatgagatttgggcgaggacacagccaaactctatcacctacttaaaataataaaataacaaaccatataaatgaataggccatttggtcatgctctgcctttgaattgacaaatatctgaagttgccagtgtttaaaattattgttcccctaaaagagaa

SEQ ID NO: 606630 - DNA, 573 bp, Homo sapiens
aaattattgttcccctaaaagagaaaaaaaaggaccaatcttgactcattatctaaaatatttaaatataaaaatgaagacaccatttgttcatctagtcaacatatatttatcgagtattgtgtaccaggcattgttctgagctctggaaaatagaaatttaaagaaagagagaaacatggtttttatcttcatagaacttagtgagagagacataaatatatgaaagaattatacaaataaatgtaaaatgatagctgtgataagagctaggcaggatacttaatggacaattactgggtgctatggaagtgattaatagaagctatagatctattcaagggtggcagggaagcatccaaggggaagtgaggcttcaacaggttttgaaggaagggtaggtggtaaccaggctgagaagggaggagggatgggcaaagcgagaaygtagacaggaaggaagggcacccatcaggcaggcctttgcagcagcggtgagaatttggctctttattttcagagcaacgacaggctgttacagccacatcttcttagtgatatgatcatgagagt

SEQ ID NO: 606631 - DNA, 606 bp, Homo sapiens
ttttaatgccacactttgtggaaattgataaacacctgggagtaatcagataagactgaacacaacttgaatcttttttgatgagcagttgtgatgtaaagtgaaaaagatgttgggcctggagtcagcagatttggttttaaatttgaagtctatttcacatattagatgcttaattttgagcaacttccttaacctccctaaactccagtattctcaactgtaaaatgatgtaataatgcctatcayacagtggttttgaaggccttaaattgcttttgcatattaaagtacctagcaaagacccggggtacagaaagctttcaataattgactattggataaaaatatgaatgagtttaatttgactgttgggaaatacctttttcccagatgaaacagccattgacttgcaaaacatgaggggcaatgactgagatgaagacagaggagcatggccagcctagtgcagacagtgtattgaaatccttatagagtgtttacagaaatgcctgccctgtcttgaggtaagaagatccttcccaaatctcacctcgggttcttagtgtcatactgggccactcagagcccaaggaaactccccag

SEQ ID NO: 606632 - DNA, 606 bp, Homo sapiens
ttttaatgccacactttgtggaaattgataaacacctgggagtaatcagataagactgaacacaacttgaatcttttttgatgagcagttgtgatgtaaagtgaaaaagatgttgggcctggagtcagcagatttggttttaaatttgaagtctatttcacatattagatgcttaattttgagcaacttccttaacctccctaaactccagtattctcaactgtaaaatgatgtaataatgcctatcacacagtggttttgaaggccttaaattgcttttgcatrttaaagtacctagcaaagacccggggtacagaaagctttcaataattgactattggataaaaatatgaatgagtttaatttgactgttgggaaatacctttttcccagatgaaacagccattgacttgcaaaacatgaggggcaatgactgagatgaagacagaggagcatggccagcctagtgcagacagtgtattgaaatccttatagagtgtttacagaaatgcctgccctgtcttgaggtaagaagatccttcccaaatctcacctcgggttcttagtgtcatactgggccactcagagcccaaggaaactccccag

SEQ ID NO: 606633 - DNA, 606 bp, Homo sapiens
ttttaatgccacactttgtggaaattgataaacacctgggagtaatcagataagactgaacacaacttgaatcttttttgatgagcagttgtgatgtaaagtgaaaaagatgttgggcctggagtcagcagatttggttttaaatttgaagtctatttcacatattagatgcttaattttgagcaacttccttaacctccctaaactccagtattctcaactgtaaaatgatgtaataatgcctatcacacagtggttttgaaggccttaaattgcttttgcatattaaagtacctagcaaagaccyggggtacagaaagctttcaataattgactattggataaaaatatgaatgagtttaatttgactgttgggaaatacctttttcccagatgaaacagccattgacttgcaaaacatgaggggcaatgactgagatgaagacagaggagcatggccagcctagtgcagacagtgtattgaaatccttatagagtgtttacagaaatgcctgccctgtcttgaggtaagaagatccttcccaaatctcacctcgggttcttagtgtcatactgggccactcagagcccaaggaaactccccag

SEQ ID NO: 606634 - DNA, 530 bp, Homo sapiens
atgttccatagttttcccaaatcgaatggttctgggtgaaggctatgttggaggcagggcagtggagcttgggggatgggacagaatgctttccacatggcccattggttgctggctgcatctccagaaataacttagccctgtgcttttcccaaatgaaggctgctaaaaagggctggcttcctcagaagaggmtaaatgaagccactgaatgctcaacaaaaatgggctctaacatttttataaatttctttctttttttagagacagagtctccctatgttgcccaggctggtctcaaaatcctagcctcaagctatcctcttgcctcagcctcccaagtagctgggactacaggcacttgccaccattcccagctttctatcacttttaacagcaacattccaggttgatttggcagcgattattgtgaagagggtttcctgaagaggcccaggaagaggggtgatgcctgtcacccaccaggggtcatgaaaggctgtgtgtctggagctgaaggggacagaggg

SEQ ID NO: 606635 - DNA, 530 bp, Homo sapiens
atgttccatagttttcccaaatcgaatggttctgggtgaaggctatgttggaggcagggcagtggagcttgggggatgggacagaatgctttccacatggcccattggttgctggctgcatctccagaaataacttagccctgtgcttttcccaaatgaaggctgctaaaaagggctggcttcctcagaagaggctaaatgaagccactgaatgctcaacaaaaatgggctctaacatttttataaatttctttctttttttagagacagagtctccctatgttgcccaggctggtctcaaaatcctagcctcaagctatcctcttgcctcagcctcccaagtagctgggactacaggcacttgccaccattcccagctttctatcayttttaacagcaacattccaggttgatttggcagcgattattgtgaagagggtttcctgaagaggcccaggaagaggggtgatgcctgtcacccaccaggggtcatgaaaggctgtgtgtctggagctgaaggggacagaggg

SEQ ID NO: 606636 - DNA, 632 bp, Homo sapiens
agctctctgtagcaagactgaatttaccactatgctcctgtatcctttggagatcccaggacatgaaaaatccattgtaacaggacacaggaaaccctgcctcttcagggtcagccttcaaatcactgcatcaggaaacatttcattaaaattttctagtagaagaggtaaccttgtgttttaagtaaaaraacataacctaaagcatatgtagggaataatacctaatggaagaatacgttattaaatatctgctcaaaaataatcttggttctaccaagaaaagtatattatgggacacagtataactgtagcccaagcataaaactcaaatctcaatgttcatgattttttgtttgtttgtttgcctctctctttgtctttctctctctctgaagagaagaaaatttaggtgattttaaagctacagttctcacaaaaggtttatgctcatcttttcactgatgctcctatgcatttagtttctgtttcattccatcagcatgccaaaagaaatcaatttataagcattacagactttctctctgagttattgaaaataaatgctaattcatgggaaaattgcaaacatgttacaaggtacaggtaatatcttttaatgtatgttgtga

SEQ ID NO: 606637 - DNA, 638 bp, Homo sapiens
aagactgaatttaccactatgctcctgtatcctttggagatcccaggacatgaaaaatccattgtaacaggacacaggaaaccctgcctcttcagggtcagccttcaaatcactgcatcaggaaacatttcattaaaattttctagtagaagaggtaaccttgtgttttaagtaaaagaacataacctaaagcatatgtagggaataatacctaatggaagaataygttattaaatatctgctcaaaaataatcttggttctaccaagaaaagtatattatgggacacagtataactgtagcccaagcataaaactcaaatctcaatgttcatgattttttgtttgtttgtttgcctctctctttgtctttctctctctctgaagagaagaaaatttaggtgattttaaagctacagttctcacaaaaggtttatgctcatcttttcactgatgctcctatgcatttagtttctgtttcattccatcagcatgccaaaagaaatcaatttataagcattacagactttctctctgagttattgaaaataaatgctaattcatgggaaaattgcaaacatgttacaaggtacaggtaatatcttttaatgtatgttgtgaaagtatgctgaaccatatg

SEQ ID NO: 606638 - DNA, 638 bp, Homo sapiens
aagactgaatttaccactatgctcctgtatcctttggagatcccaggacatgaaaaatccattgtaacaggacacaggaaaccctgcctcttcagggtcagccttcaaatcactgcatcaggaaacatttcattaaaattttctagtagaagaggtaaccttgtgttttaagtaaaagaacataacctaaagcatatgtagggaataatacctaatggaagaatacgttattaaatatctgctcaaaaataatcttggttctaccaagaaaagtatattatgggacacagtataactgtagcccaagcataaaactcaaatmtcaatgttcatgattttttgtttgtttgtttgcctctctctttgtctttctctctctctgaagagaagaaaatttaggtgattttaaagctacagttctcacaaaaggtttatgctcatcttttcactgatgctcctatgcatttagtttctgtttcattccatcagcatgccaaaagaaatcaatttataagcattacagactttctctctgagttattgaaaataaatgctaattcatgggaaaattgcaaacatgttacaaggtacaggtaatatcttttaatgtatgttgtgaaagtatgctgaaccatatg

SEQ ID NO: 606639 - DNA, 545 bp, Homo sapiens
atattatgggacacagtataactgtagcccaagcataaaactcaaatctcaatgttcatgattttttgtttgtttgtttgcctctctctttgtctttctctctctctgaagagaagaaaatttrggtgattttaaagctacagttctcacaaaaggtttatgctcatcttttcactgatgctcctatgcatttagtttctgtttcattccatcagcatgccaaaagaaatcaatttataagcattacagactttctctctgagttattgaaaataaatgctaattcatgggaaaattgcaaacatgttacaaggtacaggtaatatcttttaatgtatgttgtgaaagtatgctgaaccatatgagctgggctcatagttttatatactgtgggtataaaagctctcggtatgtttgctaggaaatatggaggcaattcaggagggtgctttgctacagagcatgcattttatgtttgtcttcctaaatcttgccaatacatactggttataagcctcaggataaatttgcaatagaattttctg

SEQ ID NO: 606640 - DNA, 632 bp, Homo sapiens
agctctctgtagcaagactgaatttaccactatgctcctgtatcctttggagatcccaggacatgaaaaatccattgtaacaggacacaggaaaccctgcctcttcagggtcagccttcaaatcactgcatcaggaaacatttcattaaaattttctagtagaagaggtaaccttgtgttttaagtaaaagaacataacctaaagcatatgtagggaataatacctaatggaagaatacgttattaaatatctgctcaaaaataatcttggttctaccaagaaaagtatattatgggacacagtataactgtagcccaagcataaaactcaaatctcaatgttcatgattttttgtttgtttgtttgcctctctctttgtctttctctctctctgaagagaagaaaatttaggtgattttaaagctacagttctcacaaaaggtttatgctcatcttttcactgatgctcctatgcatttagtttctgtttcattccatcagcatgccaaaagaaatcaayttataagcattacagactttctctctgagttattgaaaataaatgctaattcatgggaaaattgcaaacatgttacaaggtacaggtaatatcttttaatgtatgttgtga

SEQ ID NO: 606641 - DNA, 620 bp, Homo sapiens
ttagacatttctagatcataactcttccatacctatgttaaatttttagactacttcatccaaccttcttcattccactgcgtctcttttgtgtgctgccatatgactttttagtagccctagaataatggcaccctgaagaagtgtctggatttccactctgtaatttgggttgggttttaagggccttaaaaaatggtttttagtatcttctttgatcatttatatatttatttttatttgtatttctaaagagacaggatctcattatgttkcccatggtggtcttgaactcttgggctcaagcaatccttccacctctgcctcccaaagtgctgggattataggcgtgagccaccatgcccagccaattatttaaacttattgaataaacagtgctaaaatcaagtgacagctagttgaccacttgagaagaccagtttctgagattaattttggactgttgccgatttggaaactctgaaaagaggaaaacgtggctgtagctttctttaatggaatttcctctggcaaatattctcttgaattgcatagcagtatttaattcacaaaatgtcagcgagaaatagtgttagctcacttggccctccagaagaaac

SEQ ID NO: 606642 - DNA, 574 bp, Homo sapiens
aaaaaaaaattaaaagcttgacagattgtcagaaaattttttgttatagttatgtcttcagtgaactgagaasagtgagctttgctttccttagaagacaggggctaaaaagattctcttccctgtgtgttacaagagaggaaaaatgcatgtcttctcaatgcaaacctcaccctttccaactatgcgcccaggtctcctccacacagcaaccccttccctgaccagacacatcactttttagagctggaatttaatttcctcacccagtgaaaaattaaaatgcttaagtaataacattcagcaacattgtctgctctctggtattcacaaaaacagggcaattatgctttgcctcgggtggctgatgaggccactttgaatttaaggcattatttaataatatccatgcttgcatctaagtgcattgttataattattggccataaagctgggggggggcgtgtatgtatgggggaaatagttttaactatttaatttgatgatgtaacaacactcttgccattaccattcctgcaaattcatatctagcaacaacatgcaacacctttat

SEQ ID NO: 606643 - DNA, 574 bp, Homo sapiens
aaaaaaaaattaaaagcttgacagattgtcagaaaattttttgttatagttatgtcttcagtgaactgagaagagtgagctttgctttccttagaagacaggggctaaaaagattctcttccctgtgtgttacaagagaggaaaaatgcatgtcttctcaatgcaaacctcaccctttccaactatgcgcccaggtctcctccacacagcaaccccttccctgaccagacacatcactttttagagctggaatttaatttcctyacccagtgaaaaattaaaatgcttaagtaataacattcagcaacattgtctgctctctggtattcacaaaaacagggcaattatgctttgcctcgggtggctgatgaggccactttgaatttaaggcattatttaataatatccatgcttgcatctaagtgcattgttataattattggccataaagctgggggggggcgtgtatgtatgggggaaatagttttaactatttaatttgatgatgtaacaacactcttgccattaccattcctgcaaattcatatctagcaacaacatgcaacacctttat

SEQ ID NO: 606644 - DNA, 583 bp, Homo sapiens
aacattttgattatgttttagcttcttatacatatgtacattagaagctttaaaatttcaatctggggagatgttagctggaagtatagaactgaaggggaggctcaagactgcattcaaataatgtgaaaatttaaaataaaatttggttgcatttaaattggggaagtttgcaggaagaatttatggaaaccttggtaggctcaagctggtgttctcaatggtgttctgttttatatttcagaacagaaagattaatgcaaatctacttatttgatagattaacaatgatgacttagaaagaataaacgtttagttcttattcacttaacagtacaggaataacaaaacagtaaaaatgtatgcagargtagctcttagatcatttggaacagtttttattcaactcaggaaaagagaaaagaacatagagaagtatgcctgggatatttttagatgccagcactggaatcggcatacatcacttccactgcttcttgccacatataactgcaaaggagatgagcaatatagtctagtatgtccccaagaagacgaaaaaatagccttgctcaaccactaa

SEQ ID NO: 606645 - DNA, 607 bp, Homo sapiens
aaatgggcatctggcatatttgttcataktcagcatataccaataccatgatgtactgatgcatgtgcttttgaatttttcatttgaattttcaatttcccttcagaatctgttaatagaaaatgagcatccctggtattcacctatgtcacaaatttgtccaagacaggaaagtggggttagtgacgtttatccagaaatgaaatcaagggcatggagctcattttcacaagaaatatattgtattcaataatgtgagagcagctaagtttaaaagatattgggcatccactgagtcccagaggctgtaccctcaatatataaatgatctgtctttgctattttagcagggtcaacagccattatttttggtagccacttgtcatagttccttgtgattaaaaatgcaatggttatcgtcagtgtacattacctcactcctgccacctatcccgggcctcttctcagatgacccaaggttcagacatggttgtagcacagaatactgaactatgtggttagagggttttcttccatttgtaacctcacaaagtgcaacattggctgccactgaatcaaaagagaatgaatcagaagcatgtgaata

SEQ ID NO: 606646 - DNA, 495 bp, Homo sapiens
cctacacaggtcaggtcagcacccttccagaaaactttgaaattgttctaagaaagacaaattaaattatgaagagatttcagccatttcctggtacagaatacagtgaaaaacgatagcaagatctttcattagggaaagtgaaaggcaagtgaatacataatagcagtacacaacattatggagggtattaaaggtgacgaaatctacactgcaaggggaagagttttaagatcagtaaagttttacacagttgcaagtaaacacctggaatgtgttgctattagagactcttaggctaaatttaagaaatttgacttaaattaacaggtgataaataggagggtaamtaaaagctaataatattttagtagaattgtgggaacagcaactaccaattttcctttttttttctattttcagatactctcctttaaaaagttataccatagagcaatataaaaatccctatagttctatgttttagactatata

SEQ ID NO: 606647 - DNA, 581 bp, Homo sapiens
gttatatttggattatactgccatgtagctgtataccctaccccatgtattgattttttaaatatataaatgagtttgaaacctataagaagaagagcttcgagctgggcacagtggctcacacctgtaatctcagcactttgggaggccaaggcgggcggataacctgaggccaggagttcaagaccagcctggccaatatggcaaaaccccatctctactaaaagtacaaaaatagccaggcatgatagtgggtgcctgtaatctcagctattcgggaggctgaggcatgaggatcacttgaacccaggagacagaggttgcagtgagcagagatcatggcactgtactcctgccagggtgacagagcaaaatcctgtctcaaaggaaaaaaaagaagagcttattttttaagtaatttcaacttttattttatattcaggggtacawgtgcaggtttgttacatgggcatactgcatgatgctgaggtttgagatatgagtgatcctgctacttagatagtgagcgtagtttccattagtttgtttttcaaaccttgccctgctccctccctccctcc

SEQ ID NO: 606648 - DNA, 617 bp, Homo sapiens
tggagctaccagaaatctgcacattatgcaaatgagatgcctagtcctcgttggtttcttataaaagcttctgtattcaactgtgaaatggaaaccctttttcaggacccctctctgtggcagacagctttctctcttctgattatttaacttctgctctaacctcacccttgtcatgtctgcatccttgatttcctcggccgtgagacagagaacttctggtggcaccccagacartgaggctgtttcaaaatgtttagaaggggataattatagaccaattgctttgtggatttttccactgtctttcttagttttaacagactagtgaaatattctatgtgagacaaaatcaagtagcacttcacagcaagcagtgaaatatttttgttcatgagttccacatttactctaaaaacatcccaagaacaggaacatgggagagtaaatctacctacttcagttgtctaattttacagaataaactgaggcccagctaagagaaaggtcttgtgaatgctttgttccctgcttcccagttcattagtctttggcctgtaactatattaccccttcaaagagggcaaaaaaacctaatttctgtaaaagaatgtggt

SEQ ID NO: 606649 - DNA, 613 bp, Homo sapiens
aattaaacaaatatttatagaaatatagaatgtacccaatctacgaagccttaaaacttagctaaattttaacaattattagtaaaagatkaatgtgttccaacggcccttctacttcttcctcacctacctccaatctatgaggatgattcttctttagggaaaaaggaaataaactatctgtgcacttaatcaggctagaccaggctatttggtagctgtcacttgaaatagatgtgatgtcacctttttgtgaataaatgaaaacatgccccttaaataaatgataaacaggaaccagcagccatagagtataaggaggaaggtgagggggagaggcaggtgtaataaaaataaataaataagtgaaccaaaaggattttacaaagtgcaatgataaatctctctgggctctagttgttgcgtttatttgaaagacacgaagcaccttttgggtgctccttaaaccattttatctttacctgtgcacagtttgacaatcgcttttttacttcagggaaagagtaaaggacagaaaagaaaaattgaaacaaaaaaaggacaataaaagaatagacagagctcacaaacttgagttattgctaacgtccta

SEQ ID NO: 606650 - DNA, 617 bp, Homo sapiens
tggagctaccagaaatctgcacattatgcaaatgagatgcctagtcctcgttggtttcttataaaagcttctgtattcaactgtgaaatggaaaccctttttcaggacccctctctgtggcagacagctttctctcttctgattatttaacttctgctctaacctcacccttgtcatgtctgcatccttgatttcctcggccgtgagacagagaacttctggtggcaccccagacaatgaggctgtttcaaaatgtttagaaggggataattatagaccaattgctttgtggatttttccactgtctttcttagttttaacagactagtgaaatattctatgtgagacaaaatcaagtagcacttcacagcaagcagtgaaatatttttgttcatgagttccacatttactctaaaaacatcccaagaacaggaacatrggagagtaaatctacctacttcagttgtctaattttacagaataaactgaggcccagctaagagaaaggtcttgtgaatgctttgttccctgcttcccagttcattagtctttggcctgtaactatattaccccttcaaagagggcaaaaaaacctaatttctgtaaaagaatgtggt

SEQ ID NO: 606651 - DNA, 496 bp, Homo sapiens
attgagaacacaaatcgcacattgaggacattgaacatacttagtttggagtatttttaaaaggcagacagaaaaggaaaaacacacaaatttttttttttttttttttttttttgagacggagtcttgctgttttgccccggccggagtgcggtggcgctatcttggctcactgcaagctccgcctcccgggttcacgccattctcgtgcctcagcctcccgagtagctgggactacaggcgaaaattatttttaagttgatccagaatttcaatttttttttaactttttactgccttggtatagaaaaagataaatttgattaaagtaggtaaaaaaatgtaaacttcaacattctgtaaactagattactaacaacctttgaaaatgatttttctgttagcatgtgtaaaacttttgataatktatccataattaattatttttcttttatttcagtgttaaataggatagtaacgctaggtaagatatgtt

SEQ ID NO: 606652 - DNA, 608 bp, Homo sapiens
aatcacccggcccctaagtatgccgaatctgtaaccatgttagtatgtgccctcaaaccmgttaaacatagttgacccttgaacaacatgggtttgaacttcatggattcactcacatgtggattttcttctgcctctaccacccttgagaaagcaaaaccaaccattcctcttcctctttctcctccacctactcaaagtgaagacaacaaggaggaagacctttatgttgatgatccaggtccacttaatgaatagtaaatatattttcttttcttttctttttttttttttttgagacagggtctttcttgctctgtcatccagcactggagcaatcacagctcactgtagcctcaacctcctctgggctcaagtgatcttcctgcctcagcctctggtgtacctagactacaggcacacaccgccacactcggctgatttttttcttttttgtggagatggcggtctcactaagttgcccaggctggtatcgaactcctggcaccaagtgatcctcctgcctaggcttcccaaaatgctaggattataggcataagccactggggctggcctcttttattgtgactctcctagtaacattttcc

SEQ ID NO: 606653 - DNA, 612 bp, Homo sapiens
tgactcagtctctccatgttctaagttcttggaagcaagaattcaatcggtctagtttgagtcagggacctatctctgggctgcctggctcactgtccactcaaaagaggccatggaaacacattctatgaaaggtgaaagcaagcagctgctccaaaaagagaggtgtggggtgctaagtctataattgcagagaaaatgattgattggcatctttaatgcmtttgtattcatctcagcaaaacggtacctgtttgagattctgccattttgcaaagaaatacggttatatcctcatgtgcaatttttatccaaactaacctaccagaagatttagagaaaaatcaactaaatatttattcaaaaaccaaatattccaaattgagtgaagtaaaagtatgttgcttccattttggtcagtttatccgtgtgaaacggaataactataaaacaccaaaatactttcgtcatttgatctctacttccgttgtcattactcaagacagttcaagtcaatatattcacaacaagaaaaaaagtacacaaaatcaaaacacaatctcatttatctgcattttaaatgaaactagagagatggggttataaatacta

SEQ ID NO: 606654 - DNA, 612 bp, Homo sapiens
tgactcagtctctccatgttctaagttcttggaagcaagaattcaatcggtctagtttgagtcagggacctatctctgggctgcctggctcactgtccactcaaaagaggccatggaaacacattctatgaaaggtgaaagcaagcagctgctccaaaaagagaggtgtggggtgctaagtctataattgcagagaaaatgattgattggcatctttaatgcctttgtattcatctcagcaaaacggtacctgtttgagattctgccattttgcaaagaaatacggttatatcctcatgtgcaatttttatccaaactaacctaccagaagatttagagaaaaatcaactaaatrtttattcaaaaaccaaatattccaaattgagtgaagtaaaagtatgttgcttccattttggtcagtttatccgtgtgaaacggaataactataaaacaccaaaatactttcgtcatttgatctctacttccgttgtcattactcaagacagttcaagtcaatatattcacaacaagaaaaaaagtacacaaaatcaaaacacaatctcatttatctgcattttaaatgaaactagagagatggggttataaatacta

SEQ ID NO: 606655 - DNA, 474 bp, Homo sapiens
cttgaatgcctgacttcaggtgatccacccaccttggcctcccaaagtgctgtgattacatgcatgagccaccgcgcctggcctcaaagtatcttattgtactgctctcaccctttttcttgtggtagagaagggataaagcagaatggtgtgagatttcatttgctactcagaattgcatgcaatttaaaacttatgaactgtttatttctggaatttcccatttaatatcatcagactgcaattgaccatgaaaamcattgaaaccacagaaagcaaaactgtggataatggggaaagtgcttagctaatggtaaactctacaaatgtcaatgttgatattattctagttacagtggtaataggagagaggggtacacaagggagcgttttaaagcctattccaaacatcaatcatccatttttttcttcattcaaaggaagtatacagattgtcatattgcatgcctactg

SEQ ID NO: 606656 - DNA, 600 bp, Homo sapiens
caaaataagtattgtctacaatgaggtaaaatgggatggtgttaagaaaggggatacaacaaagcagaaagggatgtaaagtgctagcactaaagaagtaaaggtatcataaggtcaggctgaccaccaaagggaaaaaaatccctgcaagccaggtgctgaagccatcaaaaaacgtgggtgaatccttcaaagtggtagctgattatgagcagaaaataatatagaggtcttgttataatctgcaagaaaacaacttttattggttatacctatttcttttttaaaaaatagaaatgaggtcttgctatgttgcccaggctggtcttgaactcctaggctcaagcaatcctccctccttggcctcttaaagtgttgggatcacaggcatgagccattgtgcctggctagttgtatcttatttctaactgaaaataaatggaactatcttaattagaataatgaacttatatctggaaactttttggttatttaaaataaaatccaatctgaaggaataaagcaagcccctgtgaatgaggwtcaaatgaaagtaaggggggctctgaagtctttcccttgtgtagagtagaccatagg

SEQ ID NO: 606657 - DNA, 562 bp, Homo sapiens
aatttccctaacaaactcattttaatttcattagtctaattgttctcagagtttttgtcccagtaattttatgagttactatgctggaaaatagtacaaggaacatcttagaagttccctattgctagacccttttagttccttgatgagacaaacttgctttcaataggataactctgttttcaaaaaacaaatgacccaaatggaaattctgattggcagtttacatgtttaacttacctcatcatatgatttacaaaggctttgttacagttagtattgtacttgcaaaaactgcagtggatgtatatagaaaagtggcttgcaaaatcttttattttggaatgacattcaatgcacttgtgaatkccccgacgacaccttatggagacggaaaaaaaagataaaaagagattataaaacaaaaataacaggggaaaatcttattaacattttattaactgaagccaaaatgtttaaattggtatctttaagtagactcataatttcaaaatttgctttgaaacaagctagagtaagtgtaaaaaatttaacaccagtt

SEQ ID NO: 606658 - DNA, 494 bp, Homo sapiens
aaacatatgtatataaggcaaagaaggagaaagaaatttgtagtctgatgtgtgcttgctcatgaaaaacagcaatgctatgctatccaggagcaaaacttgcttctctgagagtagattagtaatactaacttcaacaaacctatggcattcaaggcactgtgacagatgctggggacacaaagataaattaaatataattcctgatcttaaatatctyatagtctagcaactgaaaaagacatacacactgacaactggaatagctcaaaaacagcctacagaacattgaaacgacctgccaacttagtctacaatctagttgcactagaaatatccctccaacaaaccacatcaatcaactaaaaaaaacaatggttagaagtttttctttacaagcataagaatgataaaacctaaaattaaagtcttaataacaatcagaggtcaattttaatattatattcaatagataaaaccagcagtagtttgtt

SEQ ID NO: 606659 - DNA, 582 bp, Homo sapiens
tagttcctgttagatgaatagattgtgaatattttctttcattctaccaggtaatctgtttaccctgtggattgtttcctttgttttacagaagctttttagtttgatatagtttgttttcctatttttgcttttgttgctattgttcaaagtcttatccataaaatcttttcctagaccaatatcctgaagcattttacctatgttttcttctgaagcattttaccttgttttcttctaatagttttatagttttgggcctgactttaagtctttaatccattttaagttgatttttgtawatggtgagagttggggatctagatatttttttctgcatataagtatccagttttccttgcttcatttatagaaggagggtgtcttttccagatgtatgattttagtgctcttgtcagaaatcagttggctgtaaatatatggatttatttattgggtttctattatgttccattgacataactttcgtttttataccaataccatgctgtttgggttacatagctttgccatatattttgaagccaggtagtgtgatgcatccaactttgttcttttggt

SEQ ID NO: 606660 - DNA, 582 bp, Homo sapiens
tagttcctgttagatgaatagattgtgaatattttctttcattctaccaggtaatctgtttaccctgtggattgtttcctttgttttacagaagctttttagtttgatatagtttgttttcctatttttgcttttgttgctattgttcaaagtcttatccataaaatcttttcctagaccaatatcctgaagcattttacctatgttttcttctgaagcattttaccttgttttcttctaatagttttatagttttgggcctgactttaagtctttaatccattttaagttgatttttgtatatggtgagagttggggatctagatatttttttctgcatataagtatccagttttccttgcttcatttatrgaaggagggtgtcttttccagatgtatgattttagtgctcttgtcagaaatcagttggctgtaaatatatggatttatttattgggtttctattatgttccattgacataactttcgtttttataccaataccatgctgtttgggttacatagctttgccatatattttgaagccaggtagtgtgatgcatccaactttgttcttttggt

SEQ ID NO: 606661 - DNA, 493 bp, Homo sapiens
atagttgagcaaaatcaactaacataaaacttactttatattaaattgttgaatatgtcattactgactactgtactgaaagtggaaaatataatagttgtatgagtaatttaagtacagtttctactgaatgtatattgttctcacaacatcctaaagtcaaaaaatcataagtcatgccatcttaagtttgggactgtctgtattaaatttgcaaacagtaatcagaaaaaaayttatactatttattaataatttgtgtttctgtttacacaaatagaatgtttttaagccaaaaaattatgtgtttctatattaaatgacagtaacaggcatattttcccatgttataaaacattgaggaaagtcaaaaataactgaacgaattgctgtagaaaatacttgttcctggaagacaggatcatgagccaattaaaacactgtacatatcaaggctagcagcttgtttattgagaattcttcataattgttg

SEQ ID NO: 606662 - DNA, 591 bp, Homo sapiens
tgtacatatcaaggctagcagcttgtttattgagaattcttcataattgttgactctctacgcacacctatcttaagccattatgtcatatattctaaccacactcaaccagtactctatcttgcaatatccatcttaaaacaattaagaccagtcttaaagctctgtaaatatttccctctaatgctcccattgtaaaaaactgttgagactcttctatggtgggctgtccttcagtgactaggtctaatatatttaacttttggtcaatggattttttgggtggtctcatgaagagtaaaaacttcatatcttttccaaatacaactgtgcacatttgtgaaactcacgctgattgaaaaatatagaagaaaactaatwcatttgataatttggttttaaaaatgttatttaattttcaaacacttttaagatttttaaaactatccattttcaaaattgttagtcacttatgtaatttaaagttaggtattataactctttaataacgaaaaaggaaattttactttagcaaaagtagagttttattagccatacaaccatataaatttataactgcaacatggaatt

SEQ ID NO: 606663 - DNA, 593 bp, Homo sapiens
cattaaaaattctaacttatatgaggtccacattaaagagatttctctaacttttacataaattggagcaaacaagttactagaacacaaaaaataaacacagtgattttcaaaggtatttttcaaaatcaaaaggtctgcaactttggttttattttcctgctattaaaaaatcattaaaccaacaagtgaataagagttattctttattctctttctgggataacaataaactccaacccatacaaaggggtaattttttaattgttactttattcttattcttcttggaaagtgaggttagtttctttacatatcagtgttgtccctggtttcataagcttctaccaaaaagagaatatcaaaagttctgaggtttgatatgaagtgattattatagccgcatatatgtggaaatgctatttcaagsctattttatttcctgtttgccacacttcataccacagagtagtacctaaaagttaaatgcattttcttgaaatgagccacatgataaaacagtgcataagaaaatggcaatagggtgcagtgcaagtttgctgtgaaaatgagtaaaccagatgtcagcaatg

SEQ ID NO: 606664 - DNA, 593 bp, Homo sapiens
cattaaaaattctaacttatatgaggtccacattaaagagatttctctaacttttacataaattggagcaaacaagttactagaacacaaaaaataaacacagtgattttcaaaggtatttttcaaaatcaaaaggtctgcaactttggttttattttcctgctattaaaaaatcattaaaccaacaagtgaataagagttattctttattctctttctgggataacaataaactccaacccatacaaaggggtaattttttaattgttactttattcttattcttcttggaaagtgaggttagtttctttacatatcagtgttgtccctggtttcataagcttctaccaaaaagagaatatcaaaagttctgaggtttgatatgaagtgattattatagccgcatatatgtggaaatgctatttcaaggctattttatttcctgtttgccacacttcataccacagagtagtacctaaaasttaaatgcattttcttgaaatgagccacatgataaaacagtgcataagaaaatggcaatagggtgcagtgcaagtttgctgtgaaaatgagtaaaccagatgtcagcaatg

SEQ ID NO: 606665 - DNA, 591 bp, Homo sapiens
tgctagaaccaagaggctcaggccccagtacaagcaaataatgggtccacagtttctgggccttaagttaagctaggagtagatatagagaacctagctagctcattagttatttactgaaagctgaaacaccactttgaccattcttttatttgttagatgctccaaaaagtacattggtttttagatgacctctaggatgctgccctggtgataggtggtaggtaatacttttttttttttttttttctgaaaacttaagggacctcaatttcataaggagaagagttaatgatatcaatgcttacacaaaatagtattgctaatttcatccaactactcgacagtttactaaataaacaacccaattacaaccagctatttytcatgaggcagtcatagtttttttttttattatactctaagttttagggtacatgtgcacaacatgcaggtttgttacatatgtatacatgtgccatgctggtgtgctgcacccattaactcgtcatttacattaggtatatctcctaatgctatccctccccactgccctcaccccacaacaggccccggtgtgtggtgttcccc

SEQ ID NO: 606666 - DNA, 591 bp, Homo sapiens
tgctagaaccaagaggctcaggccccagtacaagcaaataatgggtccacagtttctgggccttaagttaagctaggagtagatatagagaacctagctagctcattagttatttactgaaagctgaaacaccactttgaccattcttttatttgttagatgctccaaaaagtacattggtttttagatgacctctaggatgctgccctggtgataggtggtaggtaatacttttttttttttttttttctgaaaacttaagggacctcaatttcataaggagaagagttaatgatatcaatgcttacacaaaatagtattgctaatttcatccaactactcgacagtttactaaataaacaacccaattacaaccagctatttttcatgaggcagtcatagtttttttttttattatactctaagttttagggtacatgtgcacaacatgcaggtttgttacatatgtatacatgtgccatgctggtgtgctgcacccattaactcgtcatttacattaggtatatctcctaatgctatccctccccactgccctcaccccacaacaggccccrgtgtgtggtgttcccc

SEQ ID NO: 606667 - DNA, 572 bp, Homo sapiens
ccagcctatatctttttcctgtgctgcatacttcctgccctcgaacgtttgactccaagttcttcagttttggaactcagacttgctctccttgctcctcagcctgcagatggtctattgtgggaccttgtgattgtgtgagtttatagttaataaactattagttctgtccctctagagaaccctgactaatacatattttggtaccaggagtggttctagaggaacagaatattaaggatggagttctttcattggttttggggtttctgyggttggctgcttaatatgattagaccccaaaatgctaagactctacttctaatagtatggagaacactgatagtctttggtgtgaactgtgtagagagttatgcaaaataaatgcatttgacactcctgattcattgctcatgagagacaaggagtttagtaactctacacgtaatacctttgaccatatgtagagaaccaaggaacataatgaagctggttggttgctcctaagttcagtggatgtagtgatgaaagaaaatgattaactcagggagtctgtctcccagcttcagaag

SEQ ID NO: 606668 - DNA, 600 bp, Homo sapiens
gcctctgtaatgcagagattcataaagattaaaaataaaatgatgagcaaaagaacaaaagtacataagcaaagcaaacaaaaataggattgaggkgttagtttgttatgaaccagtccccctgcaaatgatagttaggaactctggaaaaaaaaatcaaaaatattttaaaattaaaaaaaagcaggacatttgaagaaaagagtgaaaatttatggaaagttggaagttatctatcctagtggcttctccattattcaaactttcaccctgaagagcacaatagtttcaatagtggcagctcagtgtgtttaaaactcctataatacaccatgctgtctttctaaaacaagtgcaaaaagctctggatcaccagagatgccaaaaggtaagtggagaactccagaaaatactgtgaaaatggccatactgaccaaagtaatttatagattcagtgctatatccatcaagctaccatggactttcttcacagaattagaaaaaactacttcaaatttcatatggaaccaaaaaagagccggtatagccaagacaatcctaagaaaaaagagcaaagtgggaggcatcaagctacctgac

SEQ ID NO: 606669 - DNA, 600 bp, Homo sapiens
gcctctgtaatgcagagattcataaagattaaaaataaaatgatgagcaaaagaacaaaagtacataagcaaagcaaacaaaaataggattgaggggttagtttgttatgaaccagtccccctgcaaatgatagttaggaactctggaaaaaaaaatcaaaaatattttaaaattaaaaaaaagcaggayatttgaagaaaagagtgaaaatttatggaaagttggaagttatctatcctagtggcttctccattattcaaactttcaccctgaagagcacaatagtttcaatagtggcagctcagtgtgtttaaaactcctataatacaccatgctgtctttctaaaacaagtgcaaaaagctctggatcaccagagatgccaaaaggtaagtggagaactccagaaaatactgtgaaaatggccatactgaccaaagtaatttatagattcagtgctatatccatcaagctaccatggactttcttcacagaattagaaaaaactacttcaaatttcatatggaaccaaaaaagagccggtatagccaagacaatcctaagaaaaaagagcaaagtgggaggcatcaagctacctgac

SEQ ID NO: 606670 - DNA, 531 bp, Homo sapiens
attattaagaaattataagtactacatttgctggttgtgtattaataataagttacttacatcctcattgctrtaactttggaacattcttatagatctcatttacattagagagaaatggaatttgggggaaggtgacaataatttgtgttttattcatttttttcaacttttattttggattctgagggtacatgtgcagatttgttaaatgggtataatgtgtcatgctaacatttggggtaataatgatcccatcacccaggtagtaagcatagcaaccaatagatacattttcagcccatgccgccctttcttcctcctccctctagtagtccccagttgataatttttctttcataatttttgacttattttttcatgatgactgattttccagtggagataaaaatagttttcatttttagcactcttgtgttagtcttccatacttattttgagcacactgtcagaaatactcagtttagatttgagagagttcagcttagatttgagattcattcacattgt

SEQ ID NO: 606671 - DNA, 565 bp, Homo sapiens
gggtaataatgatcccatcacccaggtagtaagcatagcaaccaatagatacattttcagcccatgccgccctttcttcctcctccctctagtagtccccagttgataatttttctttcataatttttgacttattttttcatgatgactgattttccagtggagataaaaatagttttcatttttagcactcttgtgttagtcttccatacttattttgagcacactgtcagaaatactcagtttagatttgagagagttcagcttagatttgagattcattcacattgtagctttgggagcttgataaaatagcagttaccttgagttttatgtttctcatctgtggaattaaaatcttagtacatayattggggtacatagtagaagctaagtaaacagtagtcattactatgactaaccaccatatgtctaatagtcataggccaaaataatcacttccagtcccagtccatttgaccaatttaaaatcaataattttaatgcatgcagtagcaatggaaatggtctgtattctatcatttgcatgcctgctgttttccac

SEQ ID NO: 606672 - DNA, 585 bp, Homo sapiens
tgttaataatcagcaggatagggaaacttagaaaatctgggtgaattgttacaaaggtgcaytgctgtggctctctgctttgaaatgcctcggatgtagtatatttttaagcattgctatttttttaaccaaccctatagttagatattaagcacagttctttagatggatattacacattttcagggattcctgcacgatgcttttgatataaattctttaacttcgcacaaccattttttggaggccgattcggcatatcactagatagaaatgccaaggcttaactgatatggccttgtagttctctggctgagtgataagctaactttcaggcacttttgtgagttgttcaataaattctccatcgaatgttgaggacaagtatgtttaaaatcctctcgaaaatgacttaccatatccagttcactttgccataatttggagtatctgaatcaaagacacttctatggtttgtaaaataacacagggctttaaaataaaatttaaaacagtaaaataaagcattttcttagaaaagagtgaacagaatagtgacaaaattaacaacggagtagtgcagtg

SEQ ID NO: 606673 - DNA, 560 bp, Homo sapiens
gtttcttcttaaaattcagttaaaattataacaacaaaagaagtgtgctcttttcacaaagataagaagcagaaaagtttctgatgaaaatgatcacctgttcgtttgtacattgtttttactgattctcatttaacatgaaatatttttgtctctattaaatattcagtaataacaatctgttaataatcagcaggatagggaaacttagaaaatctgggtgaattgttacaaaggtgcattgctgtggctctctgctttgaaatgcctcggatgtagtatatttttaagcmttgctatttttttaaccaaccctatagttagatattaagcacagttctttagatggatattacacattttcagggattcctgcacgatgcttttgatataaattctttaacttcgcacaaccattttttggaggccgattcggcatatcactagatagaaatgccaaggcttaactgatatggccttgtagttctctggctgagtgataagctaactttcaggcacttttgtgagttgttcaataaattctccatcgaatgttgagg

SEQ ID NO: 606674 - DNA, 601 bp, Homo sapiens
agcatgcactttaattaatagaaatattcacttgctctcctattacatctctaggaatcatgcaaattgcctcttggaatcaagtagaagaaaattagggtttgtgtctaatcagaggcaactagatcaggttatttttaatataaagaatatctagtttatatcacctggaccctcaatgaatccatagattcagagaattttggtgctttagacacaaaaatactaacacaaactttacttgatcttcttagaacgatgtagtagagggaggaatcataygtgtccagcataattctttaacactttttcactacataggaatagcctgagtttcccatggtaacttcaaaaagaaaaatagtagacacttaatccttagttgcatcaacttcttttttatacttcctggttgagtctgtcttaataggtagacttatttctcagtctctggtgtacttgctttacttttgttaatttctgccaaagctgcattgttaaaaaaaaaaaaaaagtcatcatcattgtcatcactttcatatttaatttttcttctatccttaccacccatttcaaatacgacattacttccaaggttaac

SEQ ID NO: 606675 - DNA, 358 bp, Homo sapiens
agcaagtagacagtgggtctggagatagaacttaaaaattgtaaaatcgcataatatggtttttctaatggcattatttcttctaatacaaagattatgtacagtactaccttaattttttaaccatgtatggcctagacaaaagagtgtgtttctgtcaaagacattggagaataatcacttttaataataattttaaacaaatcactgtcagatatgctactagcatccgcttctgcatatacartgcctttctcatgttagggttgcacatacagaagacaaggtaaatatttcaaaagtttcttaggaaaaaagttaatgaaagccccagattgaatatttatatgtcaagata

SEQ ID NO: 606676 - DNA, 457 bp, Homo sapiens
gcatacaaacaatatctaaataagctcaaatgaatttagtttattgtgtattaattggaactcattttttctcacaatatttcattaggatgagcaagagaggttaaatcgtgcttayatttctctactatacccgtattctttatagtagacatatctttggattgtctacctgggacctcaatcccttaggacctccctctttccatcccattcacataaccatcacgaagaatgacatatttttgcatgtacctacccttggttgtgttttattaggctagacattggcacttggcttcagccaggccagtgattctcttccctagaatttttgaacgtgtatcagtgttgggaacagacttttctagtggcagattatgtagtgtgtaaaatttgctattatgatcatctatcctgccatgtgaataaagcctataagcaataagataaaatg

SEQ ID NO: 606677 - DNA, 439 bp, Homo sapiens
tctgcttctggcctggatggtcctacacaggtatcaaatggtgacagatatgagggataggaagaatgcaggccagggattcagaatcggtatattataaatttttcttaaatagaacaarcagggacaggttgggaggacaatcgaggcaaaaatgaggcaatttaatatacttttttatcattgagcagattaattttaattttgaccttgcttctcattaactgtatttggccttccctaaaatagaatatgtctggagtgtaggaagaatagtaatcaaggcagtgtttgtggatcggattgagtgaacagttaagtggcaaggtcagagaagtagaagatggaagaaacatcacgtcactctaaaccgcctggtttgtattttcctgaaatattggaatctttggaaaatttgaaacagaggaattatacccaa

SEQ ID NO: 606678 - DNA, 542 bp, Homo sapiens
aaattcattctctgtcacgctttgttccgttgctggtgaggagctgtgttcctttggaggaggtgaggcactctgatttttagaatttgcagtttttctgctctgtttattccccatctttgtggttttatctacctttggtctttgatgatggtgacgttcagatggggctttggttttgatgtcctttctgtttgttagttttccttctaacagtcaggaccctcagctgcaggtctgttggagtttactggaggtccactccagaccctctttgcctgggtatcagcagcagaggctgcagaacagcgaatattggtgaacagcaagtgttgctgcctgatcgttcctctggaagttttgtctcagaggggtacctggccgtgtgaggtgtcagtctgcccctactggggtggtgcctcccagttaggctactcgggggtcagggacccacttgaggaagcagtttgtctgttctcagatctccagttcygtgctgggagaaccactaccgtcttcgaagctgtcagacagggacattt

SEQ ID NO: 606679 - DNA, 629 bp, Homo sapiens
caaaccctcaacaggctttctacctagctgattgactcagtcatttcactacaaatgcaagtgatgtaagtgattcacagccttgtcattcattcatggcgtcctcctgctacttgcctgtttgtttatagagcacagtgaagggaatgaaataatggaaaggacaatgttgtcttcttgatgcccgataaaatcaagaccttccatcaattcttggcacatgtattctaatcatatatctgaaggatccagctattctgctcacttccctcatgttctgcactcttcttactgagttcagtattggttttctgctttcaccaactccatagcatctctcatcaaaatttatttccataatagcatatctcaggtttcaaattgtattcagattagtcaccttgaatatrcaaacatccttgaatatacaaaatttaaagtgagttcactttaaattcaacatttctgaatctttatttgtgattttccctctaaattcatctgactcatgatcacatggtgctctgaagatagaaagatttcctgctggagtatgttaagtgtacatttttacaaggcactgtatgcagtagacattcacaaaatgggggagatgaggaaaactgtca

SEQ ID NO: 606680 - DNA, 533 bp, Homo sapiens
cctactcccatttaaatttaattttttgtatatatacaaatttatttctgaaaaaaattatgcagcttctttgagaacagcatattttcttactttattttacagacctgaaagtataaaacagatgtttaatgaattaaaataaagggaaaacaaatattttcttgatttatcacttttcttatgtttttaaaattgcgaccatgtttaacagacaaaaaattagtatacatagcatgtcccttgtgaatatgcttgtgggcatatgggatatgattattgaaactagagatttagactgtcacacaaaattagggatgcttattttatgtcagtgacatctctctcattattatatctatcttcacttacaaacraacatagtaaaatagctaaatataatatattcactcttatcttcacatttgaacatcccacataaaaagaagagcttctgctttagtgaccaaaatactatttctcatagtaatataactcaagcctatacccgagtcaaagatgcaatgcaggct

SEQ ID NO: 606681 - DNA, 440 bp, Homo sapiens
tcaaggaatagagtaactgttacctgttgcacacctaaacattcaaarccaagatgctggctagaagtagatggtgagacaaggttgcctgaaagcagtttgcattcggcaaggttgcctcagagttacccatgggagggggatggctgcggtttatcctcaaatgtatgccacacacgaggatcatctagagaattaaggctatgctagggtgaactgccaggagccaggactgagggacaaatgagttgacaaaagtttgtttcatggggcaatggtgaaaaaaaagttttccattaattcctattcccaccttcaatcccagataaccattaatctactttctgtttctatagaattgcttttaaaaaacatttcatataaatggaacaacatagtagtggccttttgcacctggtttctttcgctgagcgtaatat

SEQ ID NO: 606682 - DNA, 440 bp, Homo sapiens
tcaaggaatagagtaactgttacctgttgcacacctaaacattcaaagccaagatgctggctagaagtagatggtgagacaaggttgcctgaaagcagtttgcattcggcaaggttgcctcagagttacccatgggagggggatggctgcggtttatcctcaaatgtatgccacacacgaggatcatctagagaattaaggctatgctagggtgaactgccaggagccaggactgagggacaaatgagttgacaaaagtttgtttcatggggcaatggtgaaaaaaaagttttccattaattcctattccyaccttcaatcccagataaccattaatctactttctgtttctatagaattgcttttaaaaaacatttcatataaatggaacaacatagtagtggccttttgcacctggtttctttcgctgagcgtaatat

SEQ ID NO: 606683 - DNA, 618 bp, Homo sapiens
gttttctgccatctggccttctcacaacaaggcagtttatttctccaagcctgtaagagtctctcactctagtcagttaaggcagaaaattatataatataaagtaatcacaagagtggcatccatcgcctttgccgtattctattggtttgaatcaagttacaggttctacctgcrctcgaggggagggaattatgtaagaacatggtttactttggtgttactttatggtgtatctaccatatcattataacatattttaaggcacagaaacccataggagataacaggaaggatactcatctgtaaaatttcttgacactttgccttgtgtgtttcagaattttctaaagtaataaaacccatcagatagagttgcagtcccttgtgtttgtccccttcttatttctccctcttgtccaggaagtaaccactataaaaaatttggaattgcacatttttattcatgtttttatactatttctataaatgtatatatgcatgtatggaaactatataaatggagtcatactgtacatgggcttcaactttcaatattccctttttgaggttcatccatggtgacacatgtggctttagtctattcatttgctttgt

SEQ ID NO: 606684 - DNA, 618 bp, Homo sapiens
gttttctgccatctggccttctcacaacaaggcagtttatttctccaagcctgtaagagtctctcactctagtcagttaaggcagaaaattatataatataaagtaatcacaagagtggcatccatcgcctttgccgtattctattggtttgaatcaagttacaggttctacctgcgctcgaggggagggaattatgtaagaacatggtttactttggtgttactttatggtgtatctaccatatcattataacatattttaaggcacagaaacccataggagataacaggaaggatactcatctgtaaaatttcttgacactttgccttgtgtgtttcagaattttctaaagtaataaaacccatcagatagagttgcagtcccttgtgtttgtccccttcttatttctccctcttgtccaggaagtaaccactataaaaaatttggaattgcacatttttattcatgtttttatactatttctataaatgtatatatgcatgtatggaaactatataaatggartcatactgtacatgggcttcaactttcaatattccctttttgaggttcatccatggtgacacatgtggctttagtctattcatttgctttgt

SEQ ID NO: 606685 - DNA, 471 bp, Homo sapiens
gttatttcatagaggtgcttacagtattctctgatggtactttgtatttctgtgggatcagtggtgatatcccctttatcatttttctttcgtgtctatttgagtcttctctcttttcttattagtctagctagtagtctttctattttgttaattttttttwaaaaaaagctcctggattcactcattttaagggttttttgtgtctctatgtcataatttcagacaaaatagactttaaaccaacaaagatcaaaaaagacaaagaagggcatcacataatggtaaagggatcaatgcaacaataagagtgaactatcctaaatatacatgcaccaaatacaggcgcacccagattaataaagcaagttcttagagacctacaaaaggacttagactcccacacaataatagtgggagactttaacaacccactgtcaatattagatcaatgagacagaaaattaacaa

SEQ ID NO: 606686 - DNA, 583 bp, Homo sapiens
caataagagcctcactgattttatgcacaccacagatggggcaactgagtttctagattgctaacacgcaaagcttacttctcatgttattttgatgttgatgagcttcaaagagaaaagcattttgcaatatttattaaacatttttagagtcttcagactaaataacaagacattattagcaaaagtatatgtacttcgattttcacgttttctcaattgataacatttaaaatatcacacacacataaaataggaaacactaataacaaccctcctaattacctcatagtgctgtgctttgaagtctcctttttagggtgaaatactttaattgttaaagaacaaattaattttaaataattaaaaatagacatgttttcaaaaaatgtatatcattttttgatatacttaagttcagtgtatatcattttgttctcctaagcatcaatttttatattaagagaggaagaaatttatataaaatataaytgagggaaaaattaaataacgatatactttccaggtatgaggttaatttgtaatttatacctgtgcaattctgaaagccactggatagctt

SEQ ID NO: 606687 - DNA, 573 bp, Homo sapiens
actataaagactgaataacatccacacatacacatatagagaattaatgttgtagttctttggttggtcatttgtttgtttagtgactcaattgaactatttctgtgaaattcattttcactgtagtttgatgtctctgatgtccctgttaagatttttttcttgcctttatctttttgcttgatgaccaataatataacataatcaagtgggatttattctaaagatataaagattccttattattactctctcagtaaatacaatttgtcacagaaatagagcaaaaaatgtatatgattatytctgtggattgtaaaaactcagtggtaagacacattctaaaagtctcattaaaacactacctcaaaaattattttataaaaataatttacttcattgatttatttacctatttttttaactgacataaaagttaacatcatatttcatgagaaaacaatgaaactttctctagaaaaggcaaagaacaagataaagacctcctttatcaccaaaaacatttacaaatcttctaaggctatgaaaataaatgagagtaaaacttaaatg

SEQ ID NO: 606688 - DNA, 573 bp, Homo sapiens
actataaagactgaataacatccacacatacacatatagagaattaatgttgtagttctttggttggtcatttgtttgtttagtgactcaattgaactatttctgtgaaattcattttcactgtagtttgatgtctctgatgtccctgttaagatttttttcttgcctttatctttttgcttgatgaccaataatataacataatcaagtgggatttattctaaagatataaagattccttattattactctctcagtaaatacaatttgtcacagaaatagagcaaaaaatgtatatgattatctctgtggattgyaaaaactcagtggtaagacacattctaaaagtctcattaaaacactacctcaaaaattattttataaaaataatttacttcattgatttatttacctatttttttaactgacataaaagttaacatcatatttcatgagaaaacaatgaaactttctctagaaaaggcaaagaacaagataaagacctcctttatcaccaaaaacatttacaaatcttctaaggctatgaaaataaatgagagtaaaacttaaatg

SEQ ID NO: 606689 - DNA, 599 bp, Homo sapiens
catctcttgaagtaataataagctttaatatgttttcagatgtttattatcattagtggttcttattttataaattgcctcttcaaattctttgcaaatttttacaggggtgttcttctttttcttttttctttttaactactctttatagattgagtatggataaggtttggctgtgtccacacccaaatctcatcttgaattgtagttcccataatccccacgtatgtgggagggaccgggtgggaggtaattgaatcatgggggcagtttccctcttgctgttcttgtgatagtgagttctcatgagatctggtagatttataaggggcttttccccctttttgcttgcacttctttttgctgccgccatgtgaataaggacgtatttacttccccttccaccatgcttgtaagttgcctgaggtatccccagccatgctgaactgtgagtcaattaaacctctttcctttataaattacccactgttgggtatttctccatagcatcatgagaatgggctaatacaggcatgaactcastattttgtgtgtgtgttcatgttttttacagtatgcttgctttaaatatattgaca

SEQ ID NO: 606690 - DNA, 627 bp, Homo sapiens
tgaaccactgcgactgggcataaagttttaaaaattgcataatctcacatttttctcaacatccttaacaggtaatccaacgtaagatgactatttcttttaaaattagaaaaatktaataaataagcacaaatgattagttgaatgattttaaaaagagctgtcatataagtagttagataattaagttaattaaatttaaagataataattaaataattgttttaaaagattagtcaagtatgtaaaagatattaactaaatattgtttatatatatatgctcatggtgacccaatattttgctggaggtcatcttgcaacaacagagattaacctctgtgtctcattcattgttacattcttagcacccagcagagtgcctgaaatacagcagatgctcaagaaatatctgctaaaatgaagaaataagaaggactttttgtcagatgaacgattacaaccccaaaacatatatcccaacatcttttgcctataaaggaagccccaagataattttcattgcatttttcccatgttcacattacagccaaatcaactttcttgtttctaagacatacagtgcccaaatcaaagagaaaaggtatatcaaaaatccaaatttttc

SEQ ID NO: 606691 - DNA, 616 bp, Homo sapiens
ctatgtaaattgtcactaacctttgtctatatttctggcagataatattatacaatgaaaaaatgtagatatgttaatttattcttcaacaaacacattttttattcaatttttcacccattgtggtctagcatgttgatgaataagctgtgccttattcacctttgtattcatctttgtatgccttattcatcatgtaatttgtcacaaaacatgtagtattatacaaaaaaaatagaattcagtaagttttctggttaaaaaatgtacatacatttttaatagatatccaaaattctatctattgatcaatgatcaatagatagcctatatgtctattaaaaaataaaataagaaaaattaccaatctcacttatcaaattataaactacatatgctagagtggtatttaatattaaaagmttatttaataaaataaaaaatactacaaaggaagataaaatataattaatggaggagaaacaccatgtgtctgtttaggtacttaaatatcaaattttatgtaatgtcaaggaaagctcgttggatgttaattatgaaaattataaggatgcaaattgtatttggaagaataaatttgagactaggtaataaa

SEQ ID NO: 606692 - DNA, 616 bp, Homo sapiens
ctatgtaaattgtcactaacctttgtctatatttctggcagataatattatacaatgaaaaaatgtagatatgttaatttattcttcaacaaacacattttttattcaatttttcacccattgtggtctagcatgttgatgaataagctgtgccttattcacctttgtattcatctttgtatgccttattcatcatgtaatttgtcacaaaacatgtagtattatacaaaaaaaatagaattcagtaagttttctggttaaaaaatgtacatacatttttaatagatatccaaaattctatctattgatcaatgatcaatagatagcctatatgtctattaaaaaataaaataagaaaaattaccaatctcacttatcaaattataaactacatatgctagagtggtatttaatattaaaagcttatttaataaaataaaaaatactacaaaggaagataaaatataattaatggaggagaaacaccatgtgtctgtttaggtacttaaatatcaaattttatgtaatktcaaggaaagctcgttggatgttaattatgaaaattataaggatgcaaattgtatttggaagaataaatttgagactaggtaataaa

SEQ ID NO: 606693 - DNA, 434 bp, Homo sapiens
ttctctctggtatagcctttttgtcataaatgtcctttgtaaakgttataaatgtgctattttaacagctccacacgaattccaatatgttgcagtttcattttgcttcagctcaaaattacaactaattttcacttttattccttcatatgtcttgggattttccagaggtttttttttattgatttctcttttagtttaattgattgaaaagtccagagaatgtatcttgtatgccttgaatccttaaaacaatttagatttgtcttctgttccagaatatcatctatcttggcaaatgtctcatgtttccttaaaaagaatggtgttctgctgttgatggtgtgtaatctataaatatcaaattggtaaattttgtttgtaacatttgtcagatcatctatattaccaatgatcttctatctacctgttct

SEQ ID NO: 606694 - DNA, 434 bp, Homo sapiens
ttctctctggtatagcctttttgtcataaatgtcctttgtaaaggttataaatgtgctattttaacagctccacacgaattccaatatgttgcagtttcattttgcttcagctcaaaattacaactaattttcacttttattccttcatatgtcttgggattttccagaggtttttttttattgatttctcttttagtttaattgattgaaaagtccagagaatgtatcttgtatgccttgaatccttaaaacaatttagatttgtcttctgttccagaatatcatctatcttggcaaatgtctcatgtttccttaaaaagaatggtgttctgctgttgatggtgtgtaatctataaatatcaaattggtaaattttgtttgtaamatttgtcagatcatctatattaccaatgatcttctatctacctgttct

SEQ ID NO: 606695 - DNA, 566 bp, Homo sapiens
attgtttactttatgaaaatatttaaagtacagaagcaagttccacgagggccttgctcctcaaatcatggcccacctatcagcagcatcagcatcacctgggagcttgcaagaaatgtagaatcactgtgcccaccccagcctgctgaaccagaatctgaattttaataagatctccaggtaattcatattaaagtttgaggagcactaaactgaygcactttaaaactgcagttttacacctttggggagcttttgaaaatcctaatgcctaagatgaaatccaggtatcattattttttaaagctcctaaaatgatttcaatgtgaagccaagatggagagccactgattttttaaagaaaacttcatatccccaccataaacgaaaagccagtatcacctaccataaatagatagaaattgtaaaaaaaagattaaagactatcaataattttcaatacatactattgtgtgagcttgatatctacactcttttaaaagataggtgttaggcgtctactactgccatactgagacattctttttaatctaatcagaagaact

SEQ ID NO: 606696 - DNA, 566 bp, Homo sapiens
attgtttactttatgaaaatatttaaagtacagaagcaagttccacgagggccttgctcctcaaatcatggcccacctatcagcagcatcagcatcacctgggagcttgcaagaaatgtagaatcactgtgcccaccccagcctgctgaaccagaatctgaattttaataagatctccaggtaattcatattaaagtttgaggagcactaaactgatgcactttaaaactgcagttttacacctttggggagcttttgaaaatcctaatgcctaagatgaaatccaggtatcattattttttaaagctcctaaaatgatttcaatgtgaagccaagatggagagccactgattttttaaagaaaacttcatatccccaccataaacgraaagccagtatcacctaccataaatagatagaaattgtaaaaaaaagattaaagactatcaataattttcaatacatactattgtgtgagcttgatatctacactcttttaaaagataggtgttaggcgtctactactgccatactgagacattctttttaatctaatcagaagaact

SEQ ID NO: 606697 - DNA, 646 bp, Homo sapiens
atcataaaaatgtgttaaatactctggccagtgaggtgcttaactcaatgcattgagatcagagaaggctttaaaactaaagtcttctaggcaaaggattgtgggtggggaaggtatttcaggcagaagaaatagcccatgcaatgctatggaggtaggaaagtgtgttgcacgttcagrcaatggctcctaaaataaagtggcaaggtgcatttgcaggggttgcagaagggagctgatggtgcgggaggtaccttgtgggttgtgcaaagattttggatgttggctggtaaagcagaggtctcaaacctgcaacccatggaccacactgtgtattgggatggggtgtgtaactgtgttgcttgcaagcctctcctgaaacactggaagacctgaccacagttggctgtcattctctcatgggaaactaccaagtggagctaaatggtgaccaccctcctgcaatggggcatgcgatatcctgctcaccggaagtgcccacatggcatgcccacacatttatatttcctgcccaggccctgtcatcttttgagtttgcaaaatctaacgcggtgccattgaaaggaacagggattttgaaatgatgcctcatgctgccttgggatgatctatttagcaagttctc

SEQ ID NO: 606698 - DNA, 646 bp, Homo sapiens
atcataaaaatgtgttaaatactctggccagtgaggtgcttaactcaatgcattgagatcagagaaggctttaaaactaaagtcttctaggcaaaggattgtgggtggggaaggtatttcaggcagaagaaatagcccatgcaatgctatggaggtaggaaagtgtgttgcacgttcagacaatggctcctaaaataaagtggcaaggtgcatttgcaggggttgcagaagggagctgatggtgcgggaggtaccttgtgggttgtgcaaagattttggatgttggctggtaaagcagaggtctcaaacctgcaacccatggaccacmctgtgtattgggatggggtgtgtaactgtgttgcttgcaagcctctcctgaaacactggaagacctgaccacagttggctgtcattctctcatgggaaactaccaagtggagctaaatggtgaccaccctcctgcaatggggcatgcgatatcctgctcaccggaagtgcccacatggcatgcccacacatttatatttcctgcccaggccctgtcatcttttgagtttgcaaaatctaacgcggtgccattgaaaggaacagggattttgaaatgatgcctcatgctgccttgggatgatctatttagcaagttctc

SEQ ID NO: 606699 - DNA, 646 bp, Homo sapiens
atcataaaaatgtgttaaatactctggccagtgaggtgcttaactcaatgcattgagatcagagaaggctttaaaactaaagtcttctaggcaaaggattgtgggtggggaaggtatttcaggcagaagaaatagcccatgcaatgctatggaggtaggaaagtgtgttgcacgttcagacaatggctcctaaaataaagtggcaaggtgcatttgcaggggttgcagaagggagctgatggtgcgggaggtaccttgtgggttgtgcaaagattttggatgttggctggtaaagcagaggtctcaaacctgcaacccatggaccacactgtgtattgggatggggtgtgtaactgtgttgcttgcaagcctctcctgaaacactggaagacctgaccacagttggctgtcattctctcatgggaaactaccaagtggagctaaatggtgaccaccctcctgcaatggggcatgcgatatcctgctcaccggaagtgcccacatggcatgcccacacatttatatttcctgcccaggccctgtcatcwtttgagtttgcaaaatctaacgcggtgccattgaaaggaacagggattttgaaatgatgcctcatgctgccttgggatgatctatttagcaagttctc

SEQ ID NO: 606700 - DNA, 561 bp, Homo sapiens
atatttcatgaatatcattgacatatggaaaaatctattattcatgtctaagtgaaaaaaatcaagttgcacaacaatattattgtataatctcgttttgtggggataattattattactagttgtactattattgtgggcatataagcatcctggagatataaacaccaagtggccaagaaacctctggttatctattgcagcatagcaaaccccaaaacttagaggctaggagcaacaatttacgattatttgtcatggttcctgggctgactgggctctgctgggtggttcttgcttctggtctctcatgcatttgcagccagtgagcagtgggactacacccacttgggagctttattgagctggatatccacgatggctcattcccacgggtgacagtggatgctggatattggcyatgagcttcactgaggctttcaaccagaggccctacacatggcctaagtggcatgtgcctcttacagaaaggcaactgggttccaagaaggagcataccaagagcatgtgttcaaaagacccacttatgacctaacctta

SEQ ID NO: 606701 - DNA, 361 bp, Homo sapiens
aataacttgtattgtgacacacacataacgtstaatgggatctcacaaataatgtgtaatggtaaaggtaaaggtaaaggtaaatgtaaacaggtattggaagaacaagggagaattcctgaactgtgatgttcaggccaagtcttgataacagaagggtatgggaggtgggtcttccagaggaggggacaatgtgtgtgaaggttcggaggccagggagagcaggggcaccccagaaattgcaaggacttccctctgtgggaatgtgactatgaggggttggtggccagatgggaagccagaagggaagatggcaaagcagatccgaagggctgggagggtcacgataaataacttgaat

SEQ ID NO: 606702 - DNA, 558 bp, Homo sapiens
agcaacaaaactgggcctcaaaaatacaatgttgaatgacaaaagcagtatatagaatggcagtttcagtataaaagaaagcaaaaggctgggcacagtgatgtgcacmtgtagtcccagctacttaggaggctaaggtgcaagggtcacttgagccctggagttcaaagatgtaaagcaccatgattgcatctgtgaatagccactgcactccagcctgggcaacatagcaagaccgggtctctgaaaaagaaagaaagaaagaatatgcagacatggcactggacactgcacatagcctgcagcatggtggttgcctctagagaaagaagatggaaaagaatgagaacagagcttcttcagaggagacttcaactgtatctatagtgtcatttctttctttaaagagagctgaagtaaatatggcaaaatgttaaaatgtattaaatctgagtgatgagcacaccaggttttgcaggtgtgtttattataagaatttttacatgtgaactattgtatgacattttaaatggctaccaagaaaggaagagagacaga

SEQ ID NO: 606703 - DNA, 479 bp, Homo sapiens
gcagatgaggaaactgagtcacagagcagtgagattacctaactttcccttggttactcctgagtaagaggatgaagtaggaatgaagctcaagctgtgtgggtctaaagcctattctattatttattacagtttactgaatctgaatagactcctagctctaaaatgaaattattgacaattctttttaaataggtaatgtggtaaagaataragaacatgagttttggagggtaggtttatgtcagatctgtcttttactggctgtgtgacctaaaacaggttacataacttctctgaaccttcctttttatgaaagtctgtaaaatgaagataataatacccacctttcaggattaaatttgataaagcttcttaagagcctttcatgatgccagcactggtggctattattgtttaatcaactaactggatggcagtcaatctataattttctctagccaatagggtaaaccgca

SEQ ID NO: 606704 - DNA, 479 bp, Homo sapiens
gcagatgaggaaactgagtcacagagcagtgagattacctaactttcccttggttactcctgagtaagaggatgaagtaggaatgaagctcaagctgtgtgggtctaaagcctattctattatttattacagtttactgaatctgaatagactcctagctctaaaatgaaattattgacaattctttttaaataggtaatgtggtaaagaataaagaacatgagttttggagggtaggtttatgtcagatctgtcttttactggctgtgtgacctaaaacagkttacataacttctctgaaccttcctttttatgaaagtctgtaaaatgaagataataatacccacctttcaggattaaatttgataaagcttcttaagagcctttcatgatgccagcactggtggctattattgtttaatcaactaactggatggcagtcaatctataattttctctagccaatagggtaaaccgca

SEQ ID NO: 606705 - DNA, 479 bp, Homo sapiens
gcagatgaggaaactgagtcacagagcagtgagattacctaactttcccttggttactcctgagtaagaggatgaagtaggaatgaagctcaagctgtgtgggtctaaagcctattctattatttattacagtttactgaatctgaatagactcctagctctaaaatgaaattattgacaattctttttaaataggtaatgtggtaaagaataaagaacatgagttttggagggtaggtttatgtcagatctgtcttttactggctgtgtgacctaaaacaggttacataacttctctgaaccttcctttttatgaaagtctgtaaaatgaagataataatacccacctttcaggattaaatttgataaarcttcttaagagcctttcatgatgccagcactggtggctattattgtttaatcaactaactggatggcagtcaatctataattttctctagccaatagggtaaaccgca

SEQ ID NO: 606706 - DNA, 606 bp, Homo sapiens
taatatttactatatattcaattaagataaaataactaatacattttttgcaatttaattcaattgcaacaaattcaaaatttcttacctacaggtacatagaaagacaaaagattgtcctaagaaaaatcaaaatttagtttccatttttaaattagtatgttattacatttaaacctatatgttaccacaaaacaatgcatttttgttttgaataactcttttaacagaaaatatttctaatcaattttgaaatatattaatatcttgacttaatccaaagcagayttcagatgacaaataatgaaatatctaccttaaataattgttacttctatatattaaatgtacatgcatacattcatttgtagcatataaatttttttacatttaaaactaatatacaactaaatgaaaacaaattttaatcgataaatagatgtaagaggcttaagcatgactaaatcacctattttcttgtccagagtaatctgtttattctgtaattcaaacatgatgtaaattgcttagcccactgagacctgtgtcagacggctgacttaaaaaaaacaaaaataattaatttatgttattttatgtcaccaa

SEQ ID NO: 606707 - DNA, 601 bp, Homo sapiens
gataggtaagtgtaggagttatattagcagggtggtggaataggaggttctatatttcatccccctagaaaaacaccaatttaagcatcatatatggtctttgcaaggaccccagaatctagcaaagaacttgcagcaccctagaagagcacaggactaataatggcctcatttaattgggtatgaagaatggcttcactatgatattttttttttcatcttcccctccctgaagttggcacacctcagaaccaagagagagatcctcttagcctattatttctaccacaagggaaaaaaaaaggagrtggatgttcccaatgtccaccacctttcagagcactccctgagatacctgctcctgtctcacctcacccaaagtactgagggatacagcatagttggaagacttagagacaactaggaacagagaggaggagcagatagctctcagcagtcaatgtagccccaagtagccatggattccaagcacacagctcagattgaagctgtcagcatagatcatagcagccagtgcagattgctgcagctgtgaggcctccagcacattgtgcagctcccagttagcaccatagctctc

SEQ ID NO: 606708 - DNA, 530 bp, Homo sapiens
gatagctgccactcacctggattacggcagccggtgagaatctcagtagataatgaggatcactgcagatggcatgakatttagcagactacggatctcagcagtcatccaggatctcaacagtggctgtgactctcagtaactggctaggctctgcggaattcagagaaggcacacaattctggcacttctccctcaggagaaagggaaggagagaagaagagtttcacctgatgttctggcctctcagttcacaatcctaggagaaaagagagagtgactctcagtacctggtgtggatcaacgggattgggaaaagatgcactattctgatttttcagttttcaggaaggagggaaaaaagtgaaacttgtgccagcatctcagctttttagtatactatcctagggaaaaggagtggatgacttttagcacccagctcagttttgcagatctggaagaaggctcatgattctgagacttctcccaaaagagagggagagtacagaaacatgcacattcataaaaca

SEQ ID NO: 606709 - DNA, 449 bp, Homo sapiens
aatggctaaccagtgattgtatacccaacaaaaatgtctaytaaaaaggaaggagaaataaagtcatttccagacaaaagctgaaggaacttgttaccagcacacactccttacaaaaatgcaaaggaagttcttgaagatgaaataaaagaaatatagacaacaacacaaaagcatatgaaaatatgactcactttataaagctaactataaagacaatatagtatactgttttgctataatgataatatggaagtcattcataatttttatataaaattaaaagtcaaaagcattaagaataaatataagtataaatatgttattgaatccataatcttaaacaatataaactgtgttatccataaaacatgaagcgcaggttggggagtaaaagtatagatgtgaatgaaggaaatatattaccaatttaaattggcctattatat

SEQ ID NO: 606710 - DNA, 599 bp, Homo sapiens
ttagacctcaaagaactcaagaaaaagaaaaagaagtaaaagtttcaaaaggataaagtaataaatgaaagagaaactagaaaaacaacagaataagagttggcttattgaaaagacaaaatagatcaacccttagctagactaagaaggaaaagagacaacataaaactttaaaaattaaaaatgaaggaggygacattacaactgaatgccacagatataaaaaggatcaaaagatactggtataaataattatatgccaacaaattggataactcacaagacataggcaaaagtatacacctatggtgactgaatcagtaaaaagtacaaagtataaacaaattaatattgagtaagaagattggatcaataatcaaaaaacttctgacaaaagttcaggactagatggctttacaggtgaattctaccatttaacaatgataaaaaccaattcttctcaaactcttatgacatcactgaaggggaggaaacacgaccaaactcattttatgaagccagcattaccctgataccagagcaagagaaagataccacaagaaaataaaaatacaggtgaacatccctgataaatacag

SEQ ID NO: 606711 - DNA, 549 bp, Homo sapiens
ttagctagactaagaaggaaaagagacaacataaaactttaaaaattaaaaatgaaggaggcgacattacaactgaatgccacagatataaaaaggatcaaaagatactggtataaataattatatgccaacaaattggataactcacaagacataggcaaaagtatacacctatggtgactgaatcagtaaaaagtacaaagtataaacaaattaatattgagtaagaagattggatcaataatcaaaaaacttctgacaaaagttcaggactagatggctttacaggtgaattctaccatttaacaatgwtaaaaaccaattcttctcaaactcttatgacatcactgaaggggaggaaacacgaccaaactcattttatgaagccagcattaccctgataccagagcaagagaaagataccacaagaaaataaaaatacaggtgaacatccctgataaatacagatgcaaaactcctcaacaaagtactagcaaactgaattcaacagcacattaaaaggatcatataccatgagcaagtaagagt

SEQ ID NO: 606712 - DNA, 526 bp, Homo sapiens
attttgctgtgttattatgcttaccgagtttccatctctttattttaccaaagattgttttaatctcatgggatattgggaatgagatatcccagtctcactataggaaagtagagagagagagagacaaaaattttcatcacattccagatagcagtgtgtcaacttctagatcagtttcccctggctaataccctgagtagccctcagtatgaaagcagccttacagtggagataaagtaacaggcagagcaggagctgctattaataattaattgagcctatcacctctaaacatccgaggaccagccaccgaagaagaaagcatcaggggaagattaaaccgcaaaaccatctttacaagaagctgatcttgactcaggtctaggttmctgccaaattagaagtggggaggaaatgtgtcccaaaggtacgaatagactaatctctgttagggacatcttagtaacaagaaatttttaagtgtccagggttggaggagaggggatgggaggagtattattgg

SEQ ID NO: 606713 - DNA, 387 bp, Homo sapiens
agacaggacctggccactattagtgtcccgcctggctatggtggggagggagtctattccttggcccagaatcttccttgccagtatcatcttagtcaattttacacttttccaaggaagcttcccacactatcttgacycctatctaaggttttattttccccagaagacctaaatctggatgattaacagaaaataaagaaaagtggtacttttttttcctctccagtggccaagggagaaaaggaagggagttggattgctgaagaaagagacagctttggaatggccactggagttttaaagacttagatgcaggcttatggatgaggtgagggattaatcacttccttttcttttaaagagtgacttgaggcagaaggacag

SEQ ID NO: 606714 - DNA, 387 bp, Homo sapiens
agacaggacctggccactattagtgtcccgcctggctatggtggggagggagtctattccttggcccagaatcttccttgccagtatcatcttagtcaattttacacttttccaaggaagcttcccacactatcttgacccctatctaaggttttrttttccccagaagacctaaatctggatgattaacagaaaataaagaaaagtggtacttttttttcctctccagtggccaagggagaaaaggaagggagttggattgctgaagaaagagacagctttggaatggccactggagttttaaagacttagatgcaggcttatggatgaggtgagggattaatcacttccttttcttttaaagagtgacttgaggcagaaggacag

SEQ ID NO: 606715 - DNA, 522 bp, Homo sapiens
aaacaaatattagaaaagtattttacccgaaaagccccacagtctgtaggataaattgcctgccatggctacagccacagggaagtttcacaygattacttgcccaagatcctcataaattgtcagctttgccagtcagatgttaaaccaaacttgagggataagaggaagagtcataaacattaaatacataatctttcaagtgtgtgccttcatttcctgactgtttcttctccaaagggaattgttttctcttctctttctctttttccttttcctttgacgttgcagagaggagtcagaaatcatcagttgggtttctgattcaccacacaatggagctctgggaaagaagggctagcttaggggaaaaggaaaaagtgttacaatcagacggtcttgggtgttcattcttgctctgtcacttgccagtgttaagtcttcccgtgatgtgcttaacctctccaagtcactttttcctcgtctataaaatggagatagtcattcctaaccctaagggtc

SEQ ID NO: 606716 - DNA, 617 bp, Homo sapiens
aagggaaacaaatattagaaaagtattttacccgaaaagccccacagtctgtaggataaattgcctgccatggctacagccacagggaagtttcacacgattacttgcccaagatcctcataaattgtcagctttgccagtcagatgttaaaccaaacttgagggataagaggaagagtcataaacattaaatacataatctttcaagtgtgtgccttcatttcctgactgtttcttctccaaagggaattgttttctcttytctttctctttttccttttcctttgacgttgcagagaggagtcagaaatcatcagttgggtttctgattcaccacacaatggagctctgggaaagaagggctagcttaggggaaaaggaaaaagtgttacaatcagacggtcttgggtgttcattcttgctctgtcacttgccagtgttaagtcttcccgtgatgtgcttaacctctccaagtcactttttcctcgtctataaaatggagatagtcattcctaaccctaagggtcaccgtgaaatttacgtggaattacacatataaaaggcaataagtagtagggactcaataaatggctgttgttattattatcgttgttatt

SEQ ID NO: 606717 - DNA, 574 bp, Homo sapiens
tagtagggactcaataaatggctgttgttattattatcgttgttattattatacttgaataggatatttaagatamttcagtggtcaccaataggagtcctagcacacccttccctgcttccagactcctaattgtcctcccttgcatcatttttctccatagcccttatcaactcctcatatacaatatatattttcttatttgtaattagttgttttcctgttagtgaatgttaactccttgagggcagagatcttagtccgctttgttccactgccaaaattccagcgtttattaaatgtctggcacatagtatatgtccaataaatatctgttggatgaatgaacgaatgaacccactactatactctgatccccacttctcatgataaccactggaaaaaggaagaactcacatcatcttccagtgcaccctatggaagtttgatgcctactaaatagaccaaataaacatccttgttccagatatttctactgtgtaacaaacatgccaagcttaatgccgtaaaacagtaagcactctactttgctcatgattttgtgcatgacact

SEQ ID NO: 606718 - DNA, 574 bp, Homo sapiens
tagtagggactcaataaatggctgttgttattattatcgttgttattattatacttgaataggatatttaagatacttcagtggtcaccaataggagtcctagcacacccttccctgcttccagactcctaattgtcctcccttgcatcatttttctccatagcccttatcaactcctcatatacaatatatattttcttatttgtaattagttgttttcctgttagtgaatgttaactccttgagggcagagatcttagtccgctttgttccactgccaaaattccagcgtttattaaatgtctggcacatagtatatgtccaataaatatctgttggatgaatgaacgaatgaacccactactatactctgatcccyacttctcatgataaccactggaaaaaggaagaactcacatcatcttccagtgcaccctatggaagtttgatgcctactaaatagaccaaataaacatccttgttccagatatttctactgtgtaacaaacatgccaagcttaatgccgtaaaacagtaagcactctactttgctcatgattttgtgcatgacact

SEQ ID NO: 606719 - DNA, 574 bp, Homo sapiens
tagtagggactcaataaatggctgttgttattattatcgttgttattattatacttgaataggatatttaagatacttcagtggtcaccaataggagtcctagcacacccttccctgcttccagactcctaattgtcctcccttgcatcatttttctccatagcccttatcaactcctcatatacaatatatattttcttatttgtaattagttgttttcctgttagtgaatgttaactccttgagggcagagatcttagtccgctttgttccactgccaaaattccagcgtttattaaatgtctggcacatagtatatgtccaataaatatctgttggatgaatgaacgaatgaacccactactatactctgatccccacttctcatgataaccactggaaaaaggaagaactcacatcatcttccagtgcaccctatggaagtttgatgcctactaaatagaccaaataaacatccttgttccagatatttctrctgtgtaacaaacatgccaagcttaatgccgtaaaacagtaagcactctactttgctcatgattttgtgcatgacact

SEQ ID NO: 606720 - DNA, 514 bp, Homo sapiens
gccaaaatcccactacagaccaagcctagtgaggataccactgctgctgcctctaagaaccaaacatcccagcttgcacccgctccactgctggcaccaggcacagagtcctgctgaggcactgctgctggaatacaatctccactatgcctgcatcgtgtttataagcttttgttattgatattttcatatatacayacacacaatagcacagtataatgccaacttaaataattctcagctcacagtcaatcttgtttcatttgtctccctacccacttgtccccaccctcataatatttcgaagcaaataccacttatcctataattttatccaaaacaatttcaacatgtatgtctagaatggcgtttctcaatcttggcactgctgacatcttggaccagataattctttgctgtcgggggctgtcttgtgcattgtaggatgttaagcagcattcctggtctctacccaccagatgccagtatcaccctcttcactctcagttgtgac

SEQ ID NO: 606721 - DNA, 570 bp, Homo sapiens
cttctttggctgagctccagaccctaagaaaagcaaaagctcatcatagttctaagattgtccccttcttcccactccataatcaattacacattactaataataagcatgatgtcttgctttcactcagtctgagtgaccagttaggttctataggcgatctctttgacacatggcagtggtcaagttggcatcttgattcactgtccagggaattacaagctgacctaatcagctgatgtgattagttaaaagtatgcaaacaatattactccattcctttaatttggcttaattattacatttgttatttagaaattttagataaattataaggtgaactgaaaagctgctcttagttccttttcattataatgttagttttttgatataatcttaaacaaaattcaaataaaaaatatagttatcaaatgtttaatgcttttccatgtatggcagttattaaaataaattgattacacaaaacacatcttcagtgaaaaaytgtagtcaagaaacttggtaatgtcagtagattacagcactgcactatgagatgagtaaaagtgt

SEQ ID NO: 606722 - DNA, 465 bp, Homo sapiens
ggatgcactgtgataccatagagtagtggttgtgcttcaactgaacgagaaatcaaacagtggggtggagattcactctacacagctagcatccctaaagctgggaatctctattggctgtggaaagataaaagctaaaataactctgacacaaaaatgaaaacaagcacataccctagtacaaggacattcatagaaaaaaacccaaacaaaaacatattttcatacattttctgagtcagaaagaatgtcttctgaaaagaacattagcatgacytttcccaacataagcattttcaaagtagaaaggagtatgaaatctataaaaagatacacatatacaaaaaagaaatgaattagtttttaaaagctataaatggacatttgatagaaaaaagagacactattgagcaaataaaattcatttccaaacattacaaaaactcaaagaatttcaaaaatcag

SEQ ID NO: 606723 - DNA, 568 bp, Homo sapiens
gtcacacagtgagttattgccagatcaaacctggaatgatgaagtgctctttttctcactgctataacaggagtcctatggtcaaatgtgcctaaggacgagtcatgcagtatacaaaggtcaattaggcacrccattagagactattcagaattggagtgctggctgggcacagtggctcttgcctgtaatcccagcactttgggaggctgaggcaggtggatcagctgaggtcgggagtttgagaccagcctgaccaatgtggagaaaccccgtctctactaaaaatacaaaattagccaggcatggtggcgcatgcctgtaatcccagctacttgggaggctgaggaagaagaatcgcttgaatccaggaggcagaggttgcggtgagccgagattgcaccattgcactccagcctgggcaactagagcaaaactccatctcaaaaaaaaaaaaaaaaaaaagcattggagtgcctatgtgcttttgaaaggggcagtcaaccaagaaactatgattcaaatacacaatagaatgcaatacagctgtataaaagaatgagaaagc

SEQ ID NO: 606724 - DNA, 568 bp, Homo sapiens
gtcacacagtgagttattgccagatcaaacctggaatgatgaagtgctctttttctcactgctataacaggagtcctatggtcaaatgtgcctaaggacgagtcatgcagtatacaaaggtcaattaggcacaccattagagactattcagaattggagtgctggctgggcacagtggctcttgcctgtaatcccagcactttgggaggctgaggcaggtggatcagctgaggtcgggagtttgagaccagcctgaccaatgtggagaaaccccgtctctactaaaaatacaaaattagccaggcatggtggcgcatgcctgtaatcccagctacttgggaggctgaggaagaagaatcgcttgaatccaggaggcagargttgcggtgagccgagattgcaccattgcactccagcctgggcaactagagcaaaactccatctcaaaaaaaaaaaaaaaaaaaagcattggagtgcctatgtgcttttgaaaggggcagtcaaccaagaaactatgattcaaatacacaatagaatgcaatacagctgtataaaagaatgagaaagc

SEQ ID NO: 606725 - DNA, 649 bp, Homo sapiens
ttactcatccgacataactccaaacttgtaccctttgaccatcatcccttatctgctcccctgaacctgtcattcacagtaaccaccttttgactttttctgagttagacttttaaaaattccacacataagtgagatcatgcaatacgtttctttctgtgtctggcatgttcacgtagcataacatcctgcaggctcatctatgttgtcacaggtggctgaatagtgtgagtatatatctcacaatttatttagccattcatccattgatggatacttaggttgttttcctatcttggcctttgtaaataatgctgcaccaaagaagacagaaataacatgtctaagtgttactgattttgttcccatttgctatatacccagaagtgagaktgctggattgtatgatagtgctgtgtatttttatttttttgtgaaacctccatactgttttccataatggcttcatcaatttaaattcccactgaaagtgtatcagggttcccttttcaccacgcctttgccaacacttatcttttgtctctttgagaatagcaatgctgataggcatgagaagatagctcattgcattatgatttgtattcccctgatgactaacaatgttgaacagcttttcatatacgtgttg

SEQ ID NO: 606726 - DNA, 649 bp, Homo sapiens
ttactcatccgacataactccaaacttgtaccctttgaccatcatcccttatctgctcccctgaacctgtcattcacagtaaccaccttttgactttttctgagttagacttttaaaaattccacacataagtgagatcatgcaatacgtttctttctgtgtctggcatgttcacgtagcataacatcctgcaggctcatctatgttgtcacaggtggctgaatagtgtgagtatatatctcacaatttatttagccattcatccattgatggatacttaggttgttttcctatcttggcctttgtaaataatgctgcaccaaagaagacagaaataacatgtctaagtgttactgattttgttcccatttgctatatacccagaagtgagattgctggattgtatgatagtgctgtgtatttttatttttttgtgaaacctccatactgttttccataatggcttcatcaatttaaattcccactgaaagtgtatcagggttcccttttcaccacgcctttgccaacacttatcttttgtctctttgagaatagcaatgctgataggcatgagaagatagctcattgcattatgatttgtattcccctgatgactaayaatgttgaacagcttttcatatacgtgttg

SEQ ID NO: 606727 - DNA, 524 bp, Homo sapiens
acgtgtgtgtgcacgtgcctggcctctgcctgtgcaagcatcggagagcagaatatttgtccttttcttctcttgctcgttcttaatattaactcacagggatccctctggtatcttccgaactctagatcccagtgaatcttttggaagtttctaattcttcagtctmattctctctcaagaccttatgctcagcaatttgaagaggctgtctctcttttctctttgttttgaaagtgaaattaataatttctgtgaaaagtgttaaaagggagactcttcttagaaacaataggtaacttattggcattcttttccttttcttaaataacactttctcacctcactcttcccaacccacccccacaactatggtgctagggaaagaggagcaaccataaaataaaaaggtaaagacactagcagggtgttaaatgacaagacattgtgtgatcatcaacagagtattggcaaaggtcccagggctaagaatacaaacagctaagaaggggccggtcattgtt

SEQ ID NO: 606728 - DNA, 434 bp, Homo sapiens
tcctcatgatcggattcgtgcccttatgaaaacagacaggagaaaggttgttgctcacttctctccatcacgtgaggttacaagaacagaacagtcatcggcacaccaggaacccagccctcaccagacaccagaggtactgacaacttcatctcagacttccaggcttcagaactgtgagaaataaatatctgctgtggttgggcatgatggctcatgcctgtaatcccagcactttgggagtctgaggtgggaggactgcttgagtcaaggagtttgagaccagcctggacaacatggcaagatcccctctctayaagaagttctaaaaattagcctagtgtggttccatgttcctgtagtcccagctactcaggaggctgaggcaggaggatagttcgagcccgggagtttgaggctgcagtgaactgtga

SEQ ID NO: 606729 - DNA, 628 bp, Homo sapiens
tgcatttatgttcatcagagatattggcctaaaattttctttttggttgttgtgtccttgtctggttttgatatcagggtaatcctctccttgttgaattagtttggaagaattcttttgtctttaattttttgagaatagtcgataaaaattggtattagtttttctttaagtgttgcctagaattttcagtagtgaagtcattaggtcctgggcttttctttgataggatatctttaattactcattcgatctttttctttggttggattttctatttcttcataattcagtctttgtagttgcatatgtccmggaatttatccatttcttccagcttttccaatttgttgacatataattgttcataattgtttcttatgatagatcctttgtattcctatggtaccagttgcaatggttcccttttcatctctgattttgagtcttctatctcttttttaaaagtttcttgattgattgagttattcctctagcccaccagcaagtttcataaggcttgagtattctttaccctcaaagactttttctcactgtgagggacactagtcttaatctggcaaaagtacctggagctattctgaatgctccagatggtctccagtta

SEQ ID NO: 606730 - DNA, 628 bp, Homo sapiens
tgcatttatgttcatcagagatattggcctaaaattttctttttggttgttgtgtccttgtctggttttgatatcagggtaatcctctccttgttgaattagtttggaagaattcttttgtctttaattttttgagaatagtcgataaaaattggtattagtttttctttaagtgttgcctagaattttcagtagtgaagtcattaggtcctgggcttttctttgataggatatctttaattactcattcgatctttttctttggttggattttctatttcttcataattcagtctttgtagttgcatatgtccaggaatttatccatttcttccagcttttccaatttgttgacatataattgttcataattgtttcttatgatagatcctttgtattcctatggtascagttgcaatggttcccttttcatctctgattttgagtcttctatctcttttttaaaagtttcttgattgattgagttattcctctagcccaccagcaagtttcataaggcttgagtattctttaccctcaaagactttttctcactgtgagggacactagtcttaatctggcaaaagtacctggagctattctgaatgctccagatggtctccagtta

SEQ ID NO: 606731 - DNA, 498 bp, Homo sapiens
cttaacacattccacaccattacttttttataaactgtaaacacatatactttaagttttaggcataaagattgctaagtctttttatgaagacccgtgacttctttctgaatgtcattaactgcactatgtaaaatcagaaaggtttttattctcttctattcagctattaccttatatagaaattctactatgtaagtgaattacggaaacaagaacaaataatcccagaacaaggctttgcttgagattagagtcacaaatcataatcatttggatttggtcccatcayccagatgcattaccgaaagatttctctttgaggtttctccctctacaaattgttgcctcacagtcgaggatttgctatgtgtttgcagctaaagacaaaaacacccctaaacactttgtaagattttatctacaaaacttcaatgtgttatttcctgtcattttatcatccttctataagcaggtcataaccagaaaaaaaaaaat

SEQ ID NO: 606732 - DNA, 498 bp, Homo sapiens
cttaacacattccacaccattacttttttataaactgtaaacacatatactttaagttttaggcataaagattgctaagtctttttatgaagacccgtgacttctttctgaatgtcattaactgcactatgtaaaatcagaaaggtttttattctcttctattcagctattaccttatatagaaattctactatgtaagtgaattacggaaacaagaacaaataatcccagaacaaggctttgcttgagattagagtcacaaatcataatcatttggatttggtcccatcacccagatgcattaccgaaagatttctctttgaggtttctccctctacaaattgttgcctcacagtcraggatttgctatgtgtttgcagctaaagacaaaaacacccctaaacactttgtaagattttatctacaaaacttcaatgtgttatttcctgtcattttatcatccttctataagcaggtcataaccagaaaaaaaaaaat

SEQ ID NO: 606733 - DNA, 526 bp, Homo sapiens
acaaattgggtaatttccagtcttgtgttattacaaatgttgctgcaatgaataatcttttatatttgccgttctataaatatagaattatttataggataaattcccagaagtagaattgctaggtcaagtggtaaatgcatttgtaatttatatagatgtcttccataatgtttgcactgccctgtacactagcaggatatctgagtgcctgtttcttcacagctctgtcaaaagtgtgagttgtaaaactttggggttttggtaatctgaggtgtgaaaaaagtagcctttatatgtcattttaatttgcattctcawattacctgtaagccatttgtatttttctgtgaactatctgctcaggttttttttactgctttattgcctcattagtcttttccttctctatttctaataatgtttatatattagggagattagttctcttagagaagaatgagttgcaaatgtttttctaatttctcatttgtctttcaaattcatatagccatgcagaagtttt

SEQ ID NO: 606734 - DNA, 586 bp, Homo sapiens
tgtgtatggcccaggatgcttgtcctcataatttaacagtttcaaccaattatccaacacattctctgtcatsctgcaaagtgtctaactacgcaatgacaatgcagccttaaggatgcgccaggtgactgcaatatatgttaaaggccacaatgaagtcataagaatttagaagtgtgttcacttatggcgactgtaattccaagactttgacttgagaaaacctcctgaaaatgcctgtgagtaaaaaatttctcctgatcactagagctataaataataggtggaaatatccaggtctagactcacagctcttagagtgctcaaaggagaatacattcccatgagctcatgcattcattcattcaatgagcatttcagcttttgctatgtatcagctactacttggtacatactaattggttctgaaaatctcaaagcttaatttacaagttgattccagtaagaggttaaaaacctggccttcttcagaatagaaaatgtctgagacctttattaaagaaaatgcatacacacatacacatacacatacatacatgtgcatacacatacccaagtttgttgt

SEQ ID NO: 606735 - DNA, 609 bp, Homo sapiens
tttcacctcaaaatagatagctagaaggaccccttgctgacttctggccagaacatcagatgcatggctgcccactgcagagctcgaagacagcaggaagtggtatcatctttctaaaatamgagtatcactttaggtacccaaaaggagacttaagagttgactgtaagtggtgggagcctagggaggtggatattgtcaatcctgaaaggaaaggaatggcccccaaatatcctcttaatttttctactgttataacgttggatttttcaatgatacgattcaaatgtcctctttatgttcatgcatcattatctaattttacattctacttcaagaagttcacttaagtcacctcagaaaagacttttaaaaaataagttccaaatgatctaagacagctcccttctgtccttttgacctctgttgtgcttatgccaaccttcacattcctaattgctggatttctgaacaaatctctgtgactatcaaatcagcatttgcaccttgatgtttcccattatcatttcagtgtggctagtaaaactcctcactcttcttactcacagtgacttcaggccaaaatcatgatttgtgggcaaacaccat

SEQ ID NO: 606736 - DNA, 609 bp, Homo sapiens
tttcacctcaaaatagatagctagaaggaccccttgctgacttctggccagaacatcagatgcatggctgcccactgcagagctcgaagacagcaggaagtggtatcatctttctaaaataagagtatcacwttaggtacccaaaaggagacttaagagttgactgtaagtggtgggagcctagggaggtggatattgtcaatcctgaaaggaaaggaatggcccccaaatatcctcttaatttttctactgttataacgttggatttttcaatgatacgattcaaatgtcctctttatgttcatgcatcattatctaattttacattctacttcaagaagttcacttaagtcacctcagaaaagacttttaaaaaataagttccaaatgatctaagacagctcccttctgtccttttgacctctgttgtgcttatgccaaccttcacattcctaattgctggatttctgaacaaatctctgtgactatcaaatcagcatttgcaccttgatgtttcccattatcatttcagtgtggctagtaaaactcctcactcttcttactcacagtgacttcaggccaaaatcatgatttgtgggcaaacaccat

SEQ ID NO: 606737 - DNA, 609 bp, Homo sapiens
tttcacctcaaaatagatagctagaaggaccccttgctgacttctggccagaacatcagatgcatggctgcccactgcagagctcgaagacagcaggaagtggtatcatctttctaaaataagagtatcactttaggtacccaaaaggagacttaagagttgactgtaagtggtgggagcctagggagstggatattgtcaatcctgaaaggaaaggaatggcccccaaatatcctcttaatttttctactgttataacgttggatttttcaatgatacgattcaaatgtcctctttatgttcatgcatcattatctaattttacattctacttcaagaagttcacttaagtcacctcagaaaagacttttaaaaaataagttccaaatgatctaagacagctcccttctgtccttttgacctctgttgtgcttatgccaaccttcacattcctaattgctggatttctgaacaaatctctgtgactatcaaatcagcatttgcaccttgatgtttcccattatcatttcagtgtggctagtaaaactcctcactcttcttactcacagtgacttcaggccaaaatcatgatttgtgggcaaacaccat

SEQ ID NO: 606738 - DNA, 546 bp, Homo sapiens
gctagtcattaatcaaaccatgatccaaatggctgtttattgccaaccaagggaaagtgctatgaagagacaagatatgtagcctgcagttctgaaaggcttcaatgaaaagatggaataagtagtctacggctgtttgagggggttacagattaaggagtttgtagttgttttaagatcttttaagggaaaggctggaataaaggaaatgaacaggagtcaggattcaatttgtcaataagcaggtgagatcacttaattctttaagaactgattaaattttttagtttctgtaattaaatatatgtctgtattctcttttgttagaaaaggtcagccctcatgccaggggtacctggggtagctatttgtgtcctgacaaaagagactcttcttccatgttttaaaaataaacgtttccacccagagacagtaaggaagmtgaaaatagctcaagattagctctaagagatcaagccaagtaaagcctttacccaagctccagaaaacccatttctggaagataatcatgtccaaataaatgtt

SEQ ID NO: 606739 - DNA, 532 bp, Homo sapiens
tattaaacaactgcctgacatggccccatctttttggcctgataaaggagcagaccagagtggttctgccagtctacaaaggatgcacagtgagggttttggcatcctctgattcaccttttgacaccagagggtagaaaactccaccctccaatcacgctaatgttttttgtactgggacccatgaagggccatgaagctccatyacacatgtgcgtatttctcgtttcataaacattcatgactcctattgcttcatgaatatgtatatttggccaccctgctcagcatacatgccagttccccttgcacctcccttaaagtatctgtttctggcttctggctgcaggctttgctccccagcctgtcagaatggccaccctgcaggctgcaaccccttatgagaaatataggtcttttctccaaatttcggaaccctgccattcttcagctgacactccattgaaaggttttaaggaagaaagcacgatctggaagtgacaaaaggattaaaactcccaaatccaggccc

SEQ ID NO: 606740 - DNA, 532 bp, Homo sapiens
tattaaacaactgcctgacatggccccatctttttggcctgataaaggagcagaccagagtggttctgccagtctacaaaggatgcacagtgagggttttggcatcctctgattcaccttttgacaccagagggtagaaaactccaccctccaatcacgctaatgttttttgtactgggacccatgaagggccatgaagctccatcacacatgtgcgtatttctcgtttcataaacattcatgactcctattgcttcatgaatatgtatatttggccaccctgctcagcatacatgccagttccccttgcacctcccttaaagtatctgtttctggcttctggctgcaggctttgctccccagcctgtcagaatggccaccctgcaggctgcaaccccttatgagaaayataggtcttttctccaaatttcggaaccctgccattcttcagctgacactccattgaaaggttttaaggaagaaagcacgatctggaagtgacaaaaggattaaaactcccaaatccaggccc

SEQ ID NO: 606741 - DNA, 546 bp, Homo sapiens
tgccatgaaatgtaaactggttaagacaggaagtaggagggtgatgaaggacaccaaaaaggatatgatcaatggatggtgggtcttgttggggttgaggaatccctgaaatctggatacaagagggagtgatgtggaaagctagcaggtgctagatttacagtagaaattgtttcttctcttgttggtgtcttaacctatcttgacttggacccagtgccaaagatttctgtgaatattccagataatggccaatgccttaactttaccagaacaagtgtatatctctcagcagaagaattatttccaatctcagctcctgctgcatctacatgcgtgccgagataaaattccagagtcaggccaaactggaagscacagcactgatggaggtcagaggaaatgggcttcgatcctgcctttgtcacaaggggaacaccacacctctccctcagcttgtttcctgctattgaaagtaaacgctgagctgtgagaatagaatcaacataaaaattctgtaatggtacctgtgcttaatgtgctata

SEQ ID NO: 606742 - DNA, 523 bp, Homo sapiens
cctcacaatcatggcagaagatgaaaggcatatttcacatgcggcagacaagagaagagagcttgtgcagggcaactcccccttataaaatcatcagatcttgtgagacttattcactatcacaagaacagcacaggaaagaactgcccccatgattcaattacctcccactgsgtccctcccacaacatatggaaattcaagatgagatttgggtggggacacagccaaaccattatcagggaggttactccccaccttcaaactagagattagccctgctgtctttccctctctgcctcagctagcaaaacccagccaccactaccttcgccacctcaactctcctcttggaaaggagccacaccacctcaagagaagcacttaaatacctcatgtcacctcttcagagaatattttgataggaatgaaatgatctgaaaattaggatcaaagatcctttcatttaaaatggttcattcctgtggagattgttcaggttttcttcctcagacatctccata

SEQ ID NO: 606743 - DNA, 589 bp, Homo sapiens
tacaatatcctgctttgcaaatgagcaacaatggagcagatagagaatattaagttatcaacaagaagttgcttacttggagatgtgagtggtcagagacttctcatatcctgtggtctgatggtaatcattcctcttaatggggattgaatatcggttctgagggaagaaatcagaaagccatattctaatggttttaaaaagcaccgacaatggtagtgtgcttttttatttttaagaaatatcaactgaatgtgttctttgtatttattacawagttaaatagccactgtaattttcatgtcttttggtaatttattttcttttgcattgtaggttagatttaataacaaggccacctaaatgaatatcttgtgactttcctgtttaagtatttgccagatctaagttatttcagatataagattttctagcagggaagagaaatcgaaatccactcttatctagtaagctcactttaacacaaatagaatcttgaagtcagtacttttgacagggaaattcttgctggtatgtcttctaagccacaattattgaaggatgaatacttcttatttccatttaaact

SEQ ID NO: 606744 - DNA, 626 bp, Homo sapiens
tatgtgttcaagagtaggggattttgagactgtgaaaatgtgagatcataagattgccttccttttttaaaatagaccttctttcttagagcagttttagattcacagcaaaattgaccagaaagtacagagatttcccatatactccctgccctatacacatacaacctaccctactatcagcatccccaaccagagtagtgtatttgttacaattgatgaacctacatggacacattattatcaccctaagcttgcagtttaccttagggttcactctcaatgttgtacattacatgagtttgaacaaaygtataatggcgtgtctccacctttatagtatcatatagaatattttcattaccctaaaaatcttctgtgctctgcctaatgaatagtgtgaccctctttaccctccttagctccaacccctggcaaccacctatcttatgttttccacttttcagccattgcttaatggcgaaagtcatcttagagagtttggaactctctatatccaaatctaacacaatatcatgcaggtctgtcaaagaccagttgctttttcctaagctgaataaaaatcatccttctccagctggctttctctgcccaactgtttccat

SEQ ID NO: 606745 - DNA, 626 bp, Homo sapiens
tatgtgttcaagagtaggggattttgagactgtgaaaatgtgagatcataagattgccttccttttttaaaatagaccttctttcttagagcagttttagattcacagcaaaattgaccagaaagtacagagatttcccatatactccctgccctatacacatacaacctaccctactatcagcatccccaaccagagtagtgtatttgttacaattgatgaacctacatggacacattattatcaccctaagcttgcagtttaccttagggttcactctcaatgttgtacattacatgagtttgaacaaacgtataatggcgtgtctccacctttatagtatcatatagaatattttcattaccctaaaaatcttctgtgctctgcctaatgaatagtgtgaccctctttaccctccytagctccaacccctggcaaccacctatcttatgttttccacttttcagccattgcttaatggcgaaagtcatcttagagagtttggaactctctatatccaaatctaacacaatatcatgcaggtctgtcaaagaccagttgctttttcctaagctgaataaaaatcatccttctccagctggctttctctgcccaactgtttccat

SEQ ID NO: 606746 - DNA, 587 bp, Homo sapiens
ttgctaacactctcaccttgtcaagggaaagaaagatatgaatatatgatatgccttcaaagtccttaaaacatggttcacattgctgcagaaaagacagcacaggagaaaggaggtgtagatggaaaggttgagatggctctgggagaaaagatggtgcaatgccgtggagatgaatagaccaaatgcagaggaagaccagcccaaaccaaatcagcaagtcagaaaatgtctaaaagccataggacatgtttccaaggtctctaacaaagtaatttgccttcctaataagtaccccagttatgattctgggaaagttgaatctcagaggaagttgctcaagatcaaataagttattaaaagagctatgaaaaaaatgctgaaattcttgaattccatctggccccttgccctcacaaaaacactaagtttctgattccatttcaagccccctgaattcaaagtctaaaagcatgacagggcatgaaatagccctctctcctaagtgaaaggatttcctttccccagcaccaatgactccggctgttttccrtattttccctattataaattctgtcaccatcttt

SEQ ID NO: 606747 - DNA, 512 bp, Homo sapiens
gctgtgaacatcaaccatatgtgcaaacctgggcaagttctgtctctgtggggttttgtgagtgggaggaggaaatggatgatcagatgactacacagatgttcaaaaagatcctgggacggcaagacaacttgcatccatttcagcttccttagaggcaaacagaaaggacaaacaaaagcctggaggtaaagcaaagaaagcaaattacaggcctgtggccaaagcagcttaaaggcacaagattccattaattgcaaacacattttcttaggaacaaaacactcactgataaaggaagcaaaattgtggtgttggaacccagcaaatttgtaatcacaacaatggtgcttcaaattaaaaaagcattggaacttgaggcmgtttctcaaatctatgcattatagctgatataaaaacaaaagactaagatttaatctacatgaattagaaggaatgtttcctccgtctttgatctccaaagaaatatgggtaatgcttttttctgcttt

SEQ ID NO: 606748 - DNA, 492 bp, Homo sapiens
tgggaaggtttgtttttgtcttagtccgttggggctgctgtaataaagtactttagaccaggtaatgtataaacaacagaaatctaccgctcacagttctggaggctgtgatcgaaatgccgacagatttggtgcctggtgagggcttaatctctgcttcaaagatggaaacttcttgttgcatgctcacgtggcagagaggtgaacaagctccctcaggcctttttgttataaggtcacccatcccattctaatcacctccaaaaagcctcatttctcaatactatttgctttggggttagsttttaatattgaattttgggagagagcattattcagaccacggcgggtaacgtaaaaaaaggttacaactgtcaggtggatttataggcagaccttcaaaacctgcctatccacagtgcctgtcaataacggaatccttggttctagcatgagaatgtaaactagcggccatgaggtgtgcacagaagg

SEQ ID NO: 606749 - DNA, 492 bp, Homo sapiens
tgggaaggtttgtttttgtcttagtccgttggggctgctgtaataaagtactttagaccaggtaatgtataaacaacagaaatctaccgctcacagttctggaggctgtgatcgaaatgccgacagatttggtgcctggtgagggcttaatctctgcttcaaagatggaaacttcttgttgcatgctcacgtggcagagaggtgaacaagctccctcaggcctttttgttataaggtcacccatcccattctaatcacctccaaaaagcctcatttctcaatactatttgctttggggttagcttttaatattgaattttgggagaragcattattcagaccacggcgggtaacgtaaaaaaaggttacaactgtcaggtggatttataggcagaccttcaaaacctgcctatccacagtgcctgtcaataacggaatccttggttctagcatgagaatgtaaactagcggccatgaggtgtgcacagaagg

SEQ ID NO: 606750 - DNA, 649 bp, Homo sapiens
ttactgtatgattccattgaaatgaaatgcccagaacagggaaatctaaagcgacagaaagtagattagtaattccaaggactggaggtggggaaaagggcagggagactacatgtgactgcaaatgggcacagggtttctttctcaggcgagaaatgcttggaaattacacagaagtgatggttgtataaccttgtaaatatgctaaaaaccactaaattatatactttaaagtgtaaaatgtatgtttctgaggttatatataatttataatgtatgaattatatctcaattaaaaaaagaattttggacaccaaaaaaaaatcaatgatcaatcaaaaatgaaaaatccatctaagttattgttgaagtcatggacttgagtgagtttccccagggaaagtcagaaaagaaaaattaatcaattatgactttattataaaaatcttaagtcgtcttkgaaagtagccaagatataaacaaacaaataaataaacacaatgctttccttatcttttggagaacttgaattctttccaagtatctgttaaccccttcataatttattacgacaggcttggtgaaaactgtatcccacaaaaccaaaactggcaggattcagcccttgcttagccagcaagacttgccc

SEQ ID NO: 606751 - DNA, 649 bp, Homo sapiens
ttactgtatgattccattgaaatgaaatgcccagaacagggaaatctaaagcgacagaaagtagattagtaattccaaggactggaggtggggaaaagggcagggagactacatgtgactgcaaatgggcacagggtttctttctcaggcgagaaatgcttggaaattacacagaagtgatggttgtataaccttgtaaatatgctaaaaaccactaaattatatactttaaagtgtaaaatgtatgtttctgaggttatatataatttataatgtatgaattatatctcaattaaaaaaagaattttggacaccaaaaaaaaatcaatgatcaatcaaaaatgaaaaatccatctaagttattgttgaagtcatggacttgagtgagtttccccagggaaagtcagaaaagaaaaattaatcaattatgactttattataaaaatcttaagtcgtctttgaaagtagccaagatataaacaaacaaataaataaacacaatgctttccttatcttttggagaacttgaattctttccaagtatctgttaaccccttcataatttattaygacaggcttggtgaaaactgtatcccacaaaaccaaaactggcaggattcagcccttgcttagccagcaagacttgccc

SEQ ID NO: 606752 - DNA, 472 bp, Homo sapiens
ttttgatgggattacttagctacattaagattaatgttgccagaaaagcatagttacatttgaacttaagatccacaaagaatgtcttagtataaagtgtgccacatgcaacatttgtccaattattgcatgaaacgtacttgtacttaaaatctctttgttgcatatctaaaattgagatttgactgggtgacatgtatctttgtttgctaaatctggcaaccagaattaggataaaaagttgaccaaagatattcattcaattctcaaattccaatgtgttgaaayggaatggtcatgccattattaaccacagcaaaagcataatgttctaaaatttatatgtagcttgaggcaaatttgggtatttatatttgaacatgagtattcaaatctgttttctaggaattcacatcactaaaaactgtcataaggcccctgcaagaactgaatgttgtcaatgtttcctcat

SEQ ID NO: 606753 - DNA, 472 bp, Homo sapiens
ttttgatgggattacttagctacattaagattaatgttgccagaaaagcatagttacatttgaacttaagatccacaaagaatgtcttagtataaagtgtgccacatgcaacatttgtccaattattgcatgaaacgtacttgtacttaaaatctctttgttgcatatctaaaattgagatttgactgggtgacatgtatctttgtttgctaaatctggcaaccagaattaggataaaaagttgaccaaagatattcattcaattctcaaattccaatgtgttgaaatggaatggtcatgccattattaaccacagcaaaagcataatgttctaaaatttatatgtagcttgaggcaaatttgggtatttatayttgaacatgagtattcaaatctgttttctaggaattcacatcactaaaaactgtcataaggcccctgcaagaactgaatgttgtcaatgtttcctcat

SEQ ID NO: 606754 - DNA, 583 bp, Homo sapiens
cctgtttgccagcctttccagaacttacagctgaattccatttctaaggtttaaataggatttttttcccttactacagtctacacttaaagtctagtaaaagtagataagtagattgtatataatttggcatcaaccaggacgcagtgcaacaattgccagtatgaatgtggaaggaaaaaaaagtgaataaaaaatatcctatgggtacatcgaaatttcaatagtctgtgaaaatgaagtattggctttggtctcccgtggtrtgtcatgtagctgtgtgcctctaaaaaagcagaggggaaaatgccatcacctactggaacctgtatatctcctatcttacgatgggctagttggctcatgatatctcctatcttatgacgggctagttggcttatgaacagaaacacaagacggcatgtacggaaatcaacaagcatggtttttaaaccttccctgaacatcctgaagacggtcacaaagattgaaacacagggccgtgatgccaggaaaactggatcgccacaaattctgtctcttgaagttaggaagtcgtagcattgcaatgcaaagcaacgtg

SEQ ID NO: 606755 - DNA, 540 bp, Homo sapiens
cttttaattgccagggtgggattctctacagtgttttgccttctggcacagtgactgaaatctcgtagatattgatggccccatcaggctggattcagtgaggaacagagcccctctgatagcytgaaatgaacacgcagcatgagcaagatagaaatctttgttgtcttaagccactgacatttagaggttgtttgttactacagcataacttagtctatgctgactgacaccctggatgttctactgcctgcttttcagagactaaatggacaatctgtgtatttagttcttcaaggacaaatagatactctcattttccctgattccagactttgtatagtttgccaaattaggttttaacgttggagatgctgacacccaaagtcttaaccagaggagctgaggttgcttcttccagacttttattctcaaatgaatttcatgcactaaggagggagtattgggatacatcatgttgggcatttctgccagtaacatggagaccaggagacagaccttcctgaaggaggtggtctg

SEQ ID NO: 606756 - DNA, 529 bp, Homo sapiens
aataattttacatttccttgtattgtctggcaaaggcaatatcaaacttacactgcttcctaatggcaaaagataaataaaggaaacaagaatagataagtgtgtattgaaacagaaccttttcatttccaagtaccctttttgtaagtatacacatttctaaattgctcttcagtaaaaataagctttcaggggaaaaatgaatattcagcatacctgtaatcattaatctatcattagataaataatttatctgggttactagttaagatgcytccgcttaataaacattctttcattcattcaactaattatttgttgagagattatttatgctccccaaaaagagactgcagcactaaatcagaaagatcaagtacctcgtctcatgaaatttacattccagtaggggactatggacagaacattagtaaacaaattgaagaaaaatatattttaagatggttatggatattatatggtaaataaaagaataaaatgagttaggatgatcagcctgctacgatgt

SEQ ID NO: 606757 - DNA, 529 bp, Homo sapiens
aataattttacatttccttgtattgtctggcaaaggcaatatcaaacttacactgcttcctaatggcaaaagataaataaaggaaacaagaatagataagtgtgtattgaaacagaaccttttcatttccaagtaccctttttgtaagtatacacatttctaaattgctcttcagtaaaaataagctttcaggggaaaaatgaatattcagcatacctgtaatcattaatctatcattagataaataatttatctgggttactagttaagatgcttccgcttaataaacattctttcattcattcaactaattatttgttgagagattatttatgctccccaaaaagagactgcagcactaaatcagaaagatcaagtacctcgtctcatgaaatttacattccagtaggggactatggacagaacattagtaaacaaattgaagaaaaatatattttaagatggttatggatattatatggtaaataaaasaataaaatgagttaggatgatcagcctgctacgatgt

SEQ ID NO: 606758 - DNA, 608 bp, Homo sapiens
gtaagtactgtttatcaccaagaaaagttgggcacatttagtctgataatgtagtgaaagaccttgaatttatctagagcatttttccccaaagttatttcacatttacgacctcattgtacctactacagccctttacagacgttattatttccattttccaatggagaaaatgatctatattggctgaagactagaacacagatgttggactttatactgtaggctttgtatgtgtattttgattttgccagtaagactagagtcacccctactgtctcagcattccctgagatcatgctaagaggactagactgtacccccatggtcccaacattccctccatcaagtgacctcttatttatttatttattttttgagacggagtctcgctgtgtctcccaggctggagtgtggtggtgcgatctccactcactgcaagctccgcctcccgrgttcacgcccttctcctgcctcagcctcccgagtagctgggactacaggcgcccgccaccacgcctggctaattttttgtatttttagtagagacggggtttcactgtgttagccaggatggtctcgatctgctaacctcgtgatccgcccac

SEQ ID NO: 606759 - DNA, 431 bp, Homo sapiens
gtgcacggctgtagtcccagctactcgggaggctgaggcacgagaatcgcttaagcccaggaccagagattgcagtgagcagagatcatgccactgcactccaacctgagcaacagagtgagactgtctcaaaatgaaacaaaataaaacaaaaagaagatgtaataatgagaatgatgcccaccatacattaagaaaaaaagaagagttgcagaataggttttcttaacacatgaatgtacatcaagatgctatccagtaacaaatttctagtttgtagggttatggttggtttaccttttcttttttgtttatctctattttataactttttwaaatgagtatgtgttcttttggaaaaatgcaacattggaaagaaaaaattcaacatggcatgttaaaaggtttatctgtttttcaaaggtgttgag

SEQ ID NO: 606760 - DNA, 428 bp, Homo sapiens
tggtgcaattgagggactgaattttaaatctgatttcatttgaattaatttaaacttaaaaaccagcagtgtaagctatttcataagctgttttggtgggactatatttcatggtaaccattgcatccatagaatagtatggtagtgtatgtatttttcactgttttttaatatgggtgctagaaaatttaacattccacacatggttgatgttctgtttctcctggacagtactggactgtggcttctaggacctggtcatgattctaaagaatgtgtctgtggcagacagactctggagtgkgtccccatgagcccttccttgtgacgttcagacccttatttaattccctttctttgagtatgggcaggacatgtgtcttgctgaaaaccaatagactatggcaaatgcgatgggccatcactcc

SEQ ID NO: 606761 - DNA, 393 bp, Homo sapiens
atataaatatatatatttaggtttttgtcgagacagggtcttgctctgtcacccgggttggagtgcagtggcatgatcatagctcactccagcctcaacttcccaggctcaagtgatcctccctgagtagctgggctacaggtgtgcactatgacacctractaatttttaaatttcctgtagagacaggatttgctaggttgcccggctggtctcgaactcctgaactcaggcaatccatctgcctcggcctcccaaagtgcttggattatagacatgagccaccatgcccagcctccctacacgaattcttcatgttagccagcattatttccaggctactgcaggtacaagcctttgtgctcaggtactgcctccatcctcagggactct

SEQ ID NO: 606762 - DNA, 533 bp, Homo sapiens
actcctgcaggccagagctcttccccatgcctccaagaaggaggtgaaatcaaacctcccattcattggcaaggtcgggggaaatggtcaggggtgcctgggatgyaatcatacatccgaaaactcgcaggaagtgtccactctgtcattcagcagaatttaccggtgggcactggaggccaagccttgcgtcaagaatgaatagaaccgtgacccggtccttgtaaagctcatagacaaaccatgatggcaatgtggagcctgaagaagacgtgcatgccacgggcagcaggaggaggaaggaccagtttctgctaggtggcacagggagtgaggaaaatctctgcagaggtgatatttgaggtgaacgatgaaggctaaacgacgttctgcaggtagagaagggggagggcagtccaggcagaggccatggcaagtgcaaaggccctgaggtgggtgggggatgagtgcagaggaaggaggaggagcacagctgggggcctggggcactattttgtgtgggttttatcctg

SEQ ID NO: 606763 - DNA, 555 bp, Homo sapiens
ctgcaggccagagctcttccccatgcctccaagaaggaggtgaaatcaaacctcccattcattggcaaggtcgggggaaatggtcaggggtgcctgggatgcaatcatacatccgaaaactcgcaggaagtgtccactctgtcattcagcagaatttaccggtgggcactggaggccaagccttgcgtcaagaatgaatagaaccgtgacccggtccttgtaaagctcatagacaaaccatgatggcaatgtggagcctgaagaagacgtgcatgccasgggcagcaggaggaggaaggaccagtttctgctaggtggcacagggagtgaggaaaatctctgcagaggtgatatttgaggtgaacgatgaaggctaaacgacgttctgcaggtagagaagggggagggcagtccaggcagaggccatggcaagtgcaaaggccctgaggtgggtgggggatgagtgcagaggaaggaggaggagcacagctgggggcctggggcactattttgtgtgggttttatcctgcttcttattacagccggatatttttg

SEQ ID NO: 606764 - DNA, 528 bp, Homo sapiens
aaggcaggaaagtaccgctttgcctgctgggactagacccatgcagcctttgtggrcctccttccagcagagcctttaaaacatttcatgagtgctgattctaggcctgcaggtagagtctcagggtggtgccatctgcagcgttccaagtgtctcccttgctttcactcaaggggggtggaatccctccacctccttggccattttcatctgtctcctgggtgtgtgccacaggctcccatggccccaggctacttggcaacaccctgagttatgttagagatataataatgaattatacaatgcattatacataattaatttataataaaacacgcacgcaatggtttaatttctccaagtgaatgatgtgctatccgccagatcctgctggaacgcctcccctaactgactgcttcttggtctggaggtgatggccagctgccctagggagggatgttggcatgaggaacctgccaagtcacatattccccctggctacctctggagtatgtaccacaggagaac

SEQ ID NO: 606765 - DNA, 620 bp, Homo sapiens
cgtgggagtctgggtcagcagccccaggtttggacagctgcagctgtgcctgggagggcagggctcctgccttcttcgtggagtgggaggcctgggcctgcagctgcacctccctgctgcagccagcgtgatggcagtggccactccagatggcctgtctctgccatcatcagaaggttcttgttttctaaatcccatttttttttacccctattgatttgggatttatacctctacttttgtttttttagaggtttactttgaaactttacatacgttttaacttaacaaactctgagattatcttaacccccttctataacaatacaaggacttcargacatgttaactctgaacccctactcttggcatttgcatagtattttagtctttgccctttgttagccctgccagttataataataaaaattaataatagttttgttgttactgtataaagacaatgtttttacattttttttttaccattttattgctcatttttccttcttgcatctcagaaagaccttctgggatcactttaattccaaagatgttaccttgctgaatgccctgtcctgatagactcagtttttgtttaatctaaaaatatctctact

SEQ ID NO: 606766 - DNA, 620 bp, Homo sapiens
cgtgggagtctgggtcagcagccccaggtttggacagctgcagctgtgcctgggagggcagggctcctgccttcttcgtggagtgggaggcctgggcctgcagctgcacctccctgctgcagccagcgtgatggcagtggccactccagatggcctgtctctgccatcatcagaaggttcttgttttctaaatcccatttttttttacccctattgatttgggatttatacctctacttttgtttttttagaggtttactttgaaactttacatacgttttaacttaacaaactctgagattatcttaacccccttctataacaatacaaggacttcaggacatgttaactctgaacccctactcttggcatttgcatagtattttagtctttgccctttgttagccctgccagttataataataaaaattaataatagttttgttgttactgtataaagacaatgtttttacattttttttttaccattttattgctcatttttccttcttgcatctcagaaagaccttctgggatcactttaattccaaagatgttacyttgctgaatgccctgtcctgatagactcagtttttgtttaatctaaaaatatctctact

SEQ ID NO: 606767 - DNA, 550 bp, Homo sapiens
ccaaaggacttacagaacctgtcacaaaagatgcctgagtggaggcccctttatcaattaccctgggccctcttatctgtcaggggcccacctggtccagctgttcagaacttatccataaattccaggcaagccccatactaatttggcagtaaattgcacatgaataccaactgcatagaaatgcttagcaaatacttccacttttcctgtgacatcttgaaggtccagcaaagactcagaggctctgagggaatacatacttcacacctttggacaagatgatccctgggccgaaatgaacaaaaatgactgagctagcctatatttgtctacattttattcaattcaacaaacacttattgagctgtataaaggaactttgccaatcactcaaggagaaacaaakatatataaagtgcagtcctgtaatcaagaagattgtaacctattacagttgaacctgtagacacatccacagataactagtacgaaaaatagaatgcgataaattctggattagaggctgggtcagagtggagtaggagag

SEQ ID NO: 606768 - DNA, 525 bp, Homo sapiens
ttcataatccattctggctctgtcatctgtgaatttaaaacctttttgagcttcatttattttttaagcctgttttctcttctttggattgcaaatcccataaatttcctacctgttgaatggtgtatcctttatttgtctaaatgccagctctttctccttgcccagatctcagactcctgaaagacggaagayaaagaatgcccccgggaagccatgtgtaccttggatgtacctttccttatatggcacttctgtttcaacaatcactgggttgaaagggaccttgagtatagttaaatggaatttttccaattctacccatcagacccctcctttccttatttcttcccaatctgcttaatacactcagtgagggagcacttactacttccagaagcaaccagatccaactttgcagaatgtttttttttaatgttgtttaaaaatcagtctcccctaagataggatgattcatgtggtaatggattagagttggagacagtgtgaacataatatagatac

SEQ ID NO: 606769 - DNA, 468 bp, Homo sapiens
agggtcaggaagccttatgaatgttgtgagaggcagcttttctcctcaaatgtgaggcagctcacacaaaagaartacaaatagttaataaacaaacaaaaaattcaatctcaccagcaatcaagtttgaagtatatcagctttgacctatcaaattgtaaaagagatcttaaaatttctagtttgaagtatcatggaataaaaattttcataactactgggagcagttataatacaaattatcatgaaaacagtgtggtgttatggatcaaaaatgctaaatctgtccttttgatgcagcaatttggcatataaaaatgtatcccgaggaaataatccaagatacaattaaagttttatggataaagctgcttaaaattttctccccaactttttgatattatacattattcaaatgtgcatcaatagcataataattcaattattgcacattcattttatggaacg

SEQ ID NO: 606770 - DNA, 654 bp, Homo sapiens
gtggttttatctgtctattaatattatgttacattttcttattaatatttgatttttaaaaatattctgcaatgagtatatttgcttttgcagtcagaaaataaagcaatggatgttattttaaaagaaatagctcataaagtaaatatatatatttacatataatatttgtttatttatttatttattttgagatggagtctcattctgttgcccaggctggagtgcagtggtgtgttctcagctcactggaacctccgcttcctgggttcaagcaattctcctgcctcagcgcccccagcagctaggattacaggcacatgccaccacacccagctaatttttgtakttttggtagagacagggtttcaccatgttggccaggctcgtcttaaactcctgacctcaagtaatctgcccaccttggcctcccaaagtgctgggattacaggtgtgagccaccatgcccggccaaaaatatgtatttaaatttaacctattaaaaatgtaactttaagactcaatatggtgctgtatacccagtttcatagccacttatttattcttcttttaatgaatatgtattgagtgtcttttctctgttaggtgctgttttaggcactgaggagacaacctttttgtttgcagaaactc

SEQ ID NO: 606771 - DNA, 563 bp, Homo sapiens
gatcattcatctgcatatttttcttttttctttactaatcaagtttgagactgtagcctactttcactgttgccagtttacctcccatttcctcttaaactcatgccacttcttttgtcttcttctttttctttttctgtttctttcatatatatttttacatatatatwtttttttcctgtcttgctctgttgcccagagtggagttcagtggtgatctgagctgcaacctgtacctcccaagttcaagtgattctcctgcctcagcctcctgagtagctgggattacaggtacctgccaccaggcccagctaatttctgtatttttagtagagacagggtttcaccatgttggccaggctggtcttgaactcctgacctcaggtgatcttcctgcctcagcctcccaaagtgctgggattacaggcgtaagccacaatgcctggtccaaactcataccacttcttaatcactgaccactctaggaacaaatctgatggattattttagtctttttctaacatatttgggtcatttgctgttgataactcattttattaaaa

SEQ ID NO: 606772 - DNA, 620 bp, Homo sapiens
aaagtactgttctaccctcctatatcaagtatcctttgaaacatatgcggcctttgactgagcaaagaaataaaagaagatggaaggaagagagaaaaattcagggaaaggctttgctacagttttgctttgggacaatcagtaaccgttttctctacgtggaagttcgttagacattttgggaactgtcttgccctcctgggaaatatttagtttggtttaattacaaaaaaaaaaaaaacagcttttttttttttcttttctttcttttttgagacggagtcttgctctgtcgccaggctggagtgcagtggtgcgatctcggctcactgcaacctctgcctccccagttcaagcgattcccctgcctcagcctcctgagtagctgggactataggcacctgccaccacacccggstaatttttgtatttttagtagagacagggtttcaccatgttggccaagatcgtctggatctcttgacctcatgatccacctgccttagcctcccaaagtgttgagattacaggcatgagccaccatgccgagccaaaaaacaaacaaacaaaaaaaccccaaaaaaacccagctttttaaacacaacctggaggagactagt

SEQ ID NO: 606773 - DNA, 598 bp, Homo sapiens
attgcagtgagcagagatcacaccactgcactccagcctagcgacagagtgagactctgtctcaaaaaaaaaacaaaaacaaaaacaaaaaacaaaacaaaaaaaaacttagaggagttgaggaggcagacatttggggcaagagtattataggcagaaggagktgtaagtacggagaccatgaggaagttctcttcctgtaataagccaaagagaggctagtgggtgataaggtcagtgagaaaatgtatattgtatgaaattctgttaggccttgaggcattgtaattactttgcctttcatgatgaggaaatgggggatgtcactagagggttttgaacaggaaagtgactgctatgagttatgttttaaatgatcactctagcccacattttgagatgaggtgaaggtggaagccttacttcaataaaccaagacaggaataacggtggcttaaaccagagtagtggcaatatggttagtaaaatgagagacttaagttacatttacagcgtggagtcttctaatcatagaatttagtgatgagttggaagtggctttgagagagaaggaaaaacatcaagaatgacttcaaac

SEQ ID NO: 606774 - DNA, 507 bp, Homo sapiens
tggatataaatctggagtcatcttgatttgtctatatcagtagtattgatgaaatcactaaaggagtaaatttacacacaaaagagaaggtccaagggctaacctgggacaccccaacattaagaggttggtaagatgaaatggaaaagagaacttcwcaagagagtcccagtgaggttggaagaaaatcaccagtgagtggcatgcttgaatgtaatgaagatggtaggttaagaaggagaatgtgatcaactgtgtcaaatagtgctgacagttcaagtaagaggaggatggagaactgactttagactgagcaatgtggagtttattgatggccttaaggggagcagttttggtagaattgtggagcaaaattttggagtgagtaagagagagaatgagatgaactggagatcagagactatacaaaacaatagaaatcaccaatattgtcataatagactacaggtattatagctagctttaaagataatgtttatgttcgta

SEQ ID NO: 606775 - DNA, 526 bp, Homo sapiens
aaggctatggatataaatctggagtcatcttgatttgtctatatcagtagtattgatgaaatcactaaaggagtaaatttacacacaaaagagaaggtccaagggctaacctgggacaccccaacattaagaggttggtaagatgaaatggaaaagagaacttcacaagagagtcccagtgaggttggaagaaaatcaccagtgagtggcatgcttgaatgtaatgaagatggtaggttaagaaggagaatgtgatcaactgtgtcaaatagtgctgacagttcaagtaagaggaggatggagaactgactttagactgagcaatgtggagtttattgatggccttaaggrgagcagttttggtagaattgtggagcaaaattttggagtgagtaagagagagaatgagatgaactggagatcagagactatacaaaacaatagaaatcaccaatattgtcataatagactacaggtattatagctagctttaaagataatgtttatgttcgtaactttttttgaa

SEQ ID NO: 606776 - DNA, 477 bp, Homo sapiens
gatggccttaaggggagcagttttggtagaattgtggagcaaaattttggagtgagtaagagagagaatgagatgaactggagatcagagactatacaaaacaatagaaatcaccaatattgtcataatagactacaggtattatagctagctttaaagataatgtttatgttcgtaactttttttgaaatgatggcagtttctagacttgctagaagaccttgctattgaacattttatgaattagcatatctattactgtatcactaatttgtgtttttaatattgtgataactatgtcaagttaattgaagttatttatagtcctatatttttatttatgcatttaaaaacattgttctcagaaaggatcccttgtgattaactagtagtccttagcaaaaaaacttaagaaccattcccattttagggtcactctcaagatttctacagakcctttccttctcctatgcttta

SEQ ID NO: 606777 - DNA, 581 bp, Homo sapiens
tctgagggtgtaaaatagcagcagactgaagatagtaattataacttttttcaacatctaccctgtggataccagcgcttggcaggacctgtgcaatrgggatgtgtataattaagagagaagggtctgtagaaaggctgtggggaggagataattcatttacactctctctccctatgtctgaatagaagcgtaactacttggacaagttaaatgatatctgacctataaagggaactttcatgaacctcccatttatcacgtatcttgaaagtgcattttaaatctcaaaccttagctctccccattttaattcctttccttcttctttgagcagtcatatttggaggatctcaaaatgcaagagtgtgagaatcaaaattaggatagtttgccccaggagtagtaggatagtgagtgttcctttgtcaaatttggctctggtgctggaattttaacatgtgttattggctctggggattatgttctggttccggctgagttaaagcttgctttgcttttgttttctgtaagtatttaataaaatggcaggattcgcttacttacttattgaattcttt

SEQ ID NO: 606778 - DNA, 581 bp, Homo sapiens
gaggaaaactggaattaatgtaggctttggagccaaacagataagtgcctgaattctgtctccctcgacttcttagatgcatactgtcatgcaagatgattaattttactgaattggcattgtcatttggaatgtattttatcacctacatcatagggtgattgtgagaataagatattatacatttctatagtgcctactgggcttggtacatagtgagtaatcagtaattgatagatattattcagagtcatgatacaatgataccacaaaataatcgttatctttttcttcctattctctattgatgatctatgtatataacatccattttcctgtcttatattgtacctgagtcagaataaaatggatcttttcagggaaacaatactcagagtaagattagaaaataccaaaggcacctaggaaaagtttctgacttttcagaggttagaggaagtcttcctwctattttgttgtttaccatgtattatatgataagaaatttggaaagactttgataatgctatatatgttaatgtgctccaatgttttccaaagcatgtttacgtctagtatct

SEQ ID NO: 606779 - DNA, 585 bp, Homo sapiens
attgatagatattattcagagtcatgatacaatgataccacaaaataatcgttatctttttcttcctattctctattgatgatctatgtatataacatccattttcctgtcttatattgtacctgagtcagaataaaatggatcttttcagggaaacaatactcagagtaagattagaaaataccaaaggcacctaggaaaagtttctgacttttcagaggttagaggaagtcttccttctattttgttgtttaccatgtattatatgataagaaatttggaaagactttgataatgctatatatgttaatgtgctccaatgttttccaaagcatgtttacgtctagtatcttggtacttttcctaattgagatctgagcttattacttccrttttatatatgagaaaactgcacaaaattacattacaagccaatgacagtgtttaggccagaatccacagctccaggtctagtccagtaatttctctacttgtagcccaaggcctataataatcagccttttgtgggaaagacttgaacaattcagcaattaaaaaagaaaaagtagcagtcgattccgccaa

SEQ ID NO: 606780 - DNA, 602 bp, Homo sapiens
ttatgatatgaactaaatctcaaatatcatacatattttgacaaagatagggaaataaggatcttttgtttaatatactagagtctcagtgagactctcacaagtgtgacattcatgtattcacatatgattctttaaacagacatttattaaacatatagtatatctcaaaacctgccttaagcatgtttaggatacaaaaaaaatgtaagattttttcctccctgtaaaatttccctgaaaggaagataattatagatataagtaaatatamttcaagttagaaaattttaatggctatagaagtaaaataataataatatacaattagagttgaatggggaagaaaaatgcttttggttgtatcagaaaatagtttatgtaagagttaaatttggttataaaatataatttgtcaaaaagcaatgttccaggcagaagaaataatttgagcaaattagagatagaccctgaaggagacgttcaaagagtggtaaatcatggttttgttggagcatattggtattaagagtaattgcatagagaaacagaaagactaggttgagcccagattgtgttaagtcatggggagatgttagaac

SEQ ID NO: 606781 - DNA, 578 bp, Homo sapiens
tatttcattgcatttattcatgagactgagagtatgtcttatttatcctgttgtatccagcacatagtgtgcccagattgaatgaataaaataatgaatgaatgactgcataaatgaatgaataggataattgagcttagtctgaatctatgttttccagtttcttattttgaatcacctaagagcttgttaataatactgactcttagctgttacctaggatgtactctaaggaaaaagctaggagattctttttattagataagcttggggaacatgagtctaaattattatcttaatttatttacttatctttcaaatagtcagcatttttatgcacatatttctgatctgaaacctgccaaactttgtggactaatcactggtcctgaaatgaattgtggaaatgttattatagggacaaagtaattatctttgcagcattagataagggaaaaagtgaatacgagcaaatcatttttggtgggggagggttagtaactttttgcttagtrtatggtttattgctcaataaatattaaacatgcagtattaaattaaagtggttactgaattat

SEQ ID NO: 606782 - DNA, 572 bp, Homo sapiens
ttcaaattccatacagttgaaaggaaagaggtgaagattcctgcgttcaaagtggactctaaccttaagatttatttgtaaattttacttaaaattaccttgagaggaacctaagatattctcctggcagtgcctagttgcaaattatttctatccttatgtcataaatcttgataataagtcttttaaaatgcactcgagaaatgtattttgtgtttatagtgctggattttagtgagtcaaattgtgttcaggcagtatgtttgcctcttcatgttctgtgtgacactggagtaaaatggagacttcagtcattcagctgcaggctctaagaaagtctgttgtaactgtgcattttaattaaccgactcagctgaggaaatattgtctctctactgtggtgwagctgtctgccttgtaaagtacctccctggataaacagaggacttttatttcttaaactgcctttcccccatcgtctttaagagtatgttgggctttcttttttttattaaattacaggtggagaaggtttaattaactctaaaatgattcttcagcaaactcagttg

SEQ ID NO: 606783 - DNA, 638 bp, Homo sapiens
ctgacagatacttcacatgaaaagggatatggatggtctgtaagtctgccctaccttacaaattgtaattaaaatgcaacttaaaatatattagggaagaggtcatttttatttctaaaattaaactataatttacaaaattatagttcttcatttataggcccaaacaaaagagttgaatacaaatagaatttttccctccttttacattaaattattagatggtgtcattttaattattgctttcatgagagataaaactattagtattttccttttaactcagtytgaaggcatatatccaagttgtatggattgacttaaaagttggatagaaagaaaaattgaaagaaattttaagtggagatgagaaagagaaaaagaaatgtagtgcaaaggaataaaggaatgaacagaagggaggaaaggagagactcagaaaagggaagatgcttcagttctgtatgatctaacatgccttctgcatgatcagcttttaggaggtaaaaaagatgagcattactacttgtcagcttctgagtgttggaggcctccagtagagtagttactttggaaacgcgtaaaatcagaggccaagacctagtttctgtcatagcgtagggtgttcccttggtgtg

SEQ ID NO: 606784 - DNA, 429 bp, Homo sapiens
atctggagtgagcagaatttgatctattctggaaaagctcagaaattgactggaggacttgggagggaggaagggcatttctcacaaaggaaattgcttgatcaaaagcacagagattgggaagcatgggctactttgagaacctgccagtggtagagcatgggaaagggtagggcaataaaggtggttgtagctgggctttgttgggaggctgaggacattggttttatgtactaccatcactcttcagtattaactacgtgcccagatgcccttgagcttatggaaatttagattctatttccggaaagtccaccaggagtctgttattcaaaataaaaataggtagtgtaatatgactttcaaagcgcattrtggtactgagatttttagcagttggaactaatgaagggaaggagaaagtattat

SEQ ID NO: 606785 - DNA, 607 bp, Homo sapiens
tctaaaatatttcttatctattcttattgcgttattactcgcttttcatcttggacacttatttctagccttcagtaccaattctatggcctctgttccagcattactataaaagtcaaaatgaaaagtataacattcaaaaattacattataattatatttcccaaggaaatgaattaaataaaattcaaatctgatttactagtcaaaaaacatgttgtaaaccacgtttacataaggattcaggataaaaagctaaaatgtgtgaatagctgtggttagtctaaccagacactagaggtcactgctgctccatagaaagacaatttactgcctgtctacttaggtagttcactcaccaaatcaagtaaaaaattgtttaaattctttgaaaagatgtaatgtcaacrtccttggaaaatacaaactcatttcaatgcaatatatcttgcataagtattgcttacaagactgtggcactgggactatttaactacatgctgtggtagcactatgtgtactggggttaataaaaatggaaaaaaactcacatgaagtttagagactaaatcccatttcttctctgttttggtaaagcaaagtattc

SEQ ID NO: 606786 - DNA, 612 bp, Homo sapiens
tatttactgatgctttatgaaaaatgtaaagttacaacttcagtaaaaaaatcacaataagctcagtcatccagtaagctgtgaggaagtatctgcattattaatccattggaaatatgtgactttttgtcatgaatacatgtatattcaacaattattcatgggtaaacattgtaactaagatgtttttctgaagtggcatctattgtaagatttaatcaatatcaaagtaccttgagaaatccactttaactatttctttttctttattgcttataaaagtatgattttaatratctggcatccttaaaattttattttatggtgacttgcctagatttttcctctcagcatatgaaaaacccccaaacaataaaaaaaaattagtaaaaatagccattcactttttctttgttgctgcagtgattctgttttcagagaagagggacatggttaaagatgtaggggttggcaagccaaattaaatgaaacagcctcaatgttgcagttcctgatatttgcttctataatagaactgttcattttggaggatgaaggagaatacagactaaatatatctttctaaaaaccttaattgactgtggttcaagt

SEQ ID NO: 606787 - DNA, 469 bp, Homo sapiens
aatggaacacaacagggcagcctgacaaattctgaacagaacaggacagagctaaggattctactaactacattagggtcttcgaaaaaactggaaagagaaattctggtaagctctcaaccacatgcctgtagcaagctgctytcccattcgcgaaccttatctgaaaactccctaactaatgtgaggtgtggtggagaaatctggcttctcaatgctgtttcatttatttatttatgaaacatacaggctagaagaaattggcagtgaaacctctagtctgattttacagagatgggtttcagagacaaggctgagtcgaaaactttacatttttgtcatctcctcacattttgcagttgtctgcttgcagtattttaacccttcatcactttgtccctgtgcttgccttactgtaattcagacacctctggaaactgctcagggtgctgctttaacctagcaccat

SEQ ID NO: 606788 - DNA, 463 bp, Homo sapiens
actttgtccctgtgcttgccttactgtaattcagacacctctggaaactgctcagggtgctgctttaacctagcaccatcttttgatagtttcctgcaattttcttttctaagtcaggcattggtttaaaggctctgcctgtctgtaaaatgttcccataactgagtcatctccaagaatcagctcaagctccgagcacctggaatcattcacctctttccttgatttgccagtgaggtgcaaaccttctataactgtagatttggtcccaccaggaggctaacagcgaatgtgggggattacttatgaaagaagttttatcttaaaacaaatgcgacattaatggaatcagtaaagggtcttatacaataggtattatattaaaccggagttcaagcttcacrttgattgtggtatttaaatttcaatgggttgattatgtatgagaggaaaatgaccagta

SEQ ID NO: 606789 - DNA, 596 bp, Homo sapiens
tgtcataatacttttcaatatttattttattttctctgtcacaagattagaataatctactaatttatgtaaagggttgagaaaataatcaatgcccttatacctttattaattataaagcctcctcattttcataatatatttttattgttatcacaactctgtgaagataggaattattaaccttggtttttaaatgatgaaacagagactcaaaggagttgcccaaggccatacagcatgtgtatggtcaacgtgggatttgaaactgtgtctcccgatatgtgtcaaatacsctttttttctaggaaaaaataaatacatacagtttatcaggtgtcagagggaaccatggtgccttgaatttcttacctcatgtcataggatcatgggcattgctctgttttcgggatgtcacatgtctactgaggctttatgggacttgctatgtaggaccataagtgttggtggcatatggaagctgtggaaattatatggctcttttataactccaaggagggtctgggcagttacatgcattttctttattgaaagttcttcttgcctcatataacttttttctcctcagaactagc

SEQ ID NO: 606790 - DNA, 582 bp, Homo sapiens
catagattttggcacctagattccaactcctggctacaatttaccagctatgtaaccttaagcgcgttacttaccttccctatgcctcagttttctcatctgcaaaacgggcataaaaacaaaaactcacttcatgttttgagaattaagtcattttaatatctgtatgttacttagaacagtgtgttgcatgcaataagcctgtgtaagatatttgaataatattaactttatttgtacttgctaggattacgtactgaatattgactatactgaccttcattaactcacaaagaacaactttagtgagcatttttaaatattgtacatggtggatttctgagatttactcagtcttgccttctttgatgagataacttcctttatgttcatcatctgaactttatctttaaaataaatcttctggttctgtggaycatgactaataatgttcgattcttttcatctccaaagtagaacataataacatctgccatgtagaggcattttatttaaaaataatggtattcttgaaaaagtttgccttgttgttttttgttaggtgaactgtctgtggaaaac

SEQ ID NO: 606791 - DNA, 582 bp, Homo sapiens
catagattttggcacctagattccaactcctggctacaatttaccagctatgtaaccttaagcgcgttacttaccttccctatgcctcagttttctcatctgcaaaacgggcataaaaacaaaaactcacttcatgttttgagaattaagtcattttaatatctgtatgttacttagaacagtgtgttgcatgcaataagcctgtgtaagatatttgaataatattaactttatttgtacttgctaggattacgtactgaatattgactatactgaccttcattaactcacaaagaacaactttagtgagcatttttaaatattgtacatggtggatttctgagatttactcagtcttgccttctttgatgagataacttcctttatgttcatcatctgaactttatctttaaaataaatcttctggttctgtggatcatractaataatgttcgattcttttcatctccaaagtagaacataataacatctgccatgtagaggcattttatttaaaaataatggtattcttgaaaaagtttgccttgttgttttttgttaggtgaactgtctgtggaaaac

SEQ ID NO: 606792 - DNA, 529 bp, Homo sapiens
ctgttgcttgaaaggctctgagttttcccctcactctcccacgtagtcattgagacatctgttttgcccaagagctgcagagagccactccaggaggctggaggacccattaactttgtgcttcttgctcatcatactttacttcccattgacagaagaacagaggaacccactgagaatgtgggctctcactttgcttttcctgggataaatcttcttgaattatttacggtgaatattattctctgctgtgttacacacattgctcttagttttcagacatttttcttttatcttggttcctgatcttatcttactgcatagttctgactttacacctaccctttggatcttatgattaatatttatttagtcttaatactaacaactgagggtataaaatattagartgagtaaataagacctagtattggctagcacaatggggtgactatagtcaataatgaattaattgtgcatttaaaaataactaaaagtataattggattgttttttatacaaagcgtaa

SEQ ID NO: 606793 - DNA, 550 bp, Homo sapiens
ggataccacacttacccttatgtgattattacacattgcatgcctatatcaaaacatctcatgtaccccataaacatgcacacttactatgtacccacaaaaataaaaaataaaataaaaataaaacaaaactatatgacaggaatgatgtgctacaacaaaaattgctttggtagcaatgtattgattgacaaggaaaaatgttcataatgaaataatattaaggaaaaaaatactgaccatcaatctctttctcaacagtaatcagtagccactcttggactgagtcagcctccaggaactgtgtatggcccctactttggcacgaccccttaagtcggcatcacaaccaggtctgatctggttcargataataaattgtttgaagagggaagattatccatgaggctagttgagaaatccaaaacaaaataatgtgattctaagccacactgaatacttgaggctgcagaagttactgcaaagacatagagtagtccctcaagagaaaaagaaaagactgtgttctaaaagattttagtaatttgcc

SEQ ID NO: 606794 - DNA, 550 bp, Homo sapiens
atttccattcaaatgaactagacagaggcaacatctttgcatatggccttggagggcagtagagccaaaagatttgatgaaaatctaaatgcgagattgcataaagactaggtaaggaaacatttggactcaacacatgtactgtttattgcatatgtcagttgacatttggaatttggaactgattctgtgcaaacttctttgggtctcagtttgctcatctgcaaaatgggacttataaaacctgacttataaacttttaaggatttttacttaggaaccattttcatgatttatgagtaagtacattgtacaatatttataaagtgttacagatakttctgcaatcagagtatctatgacaaaattaattttcccttgattctgtataggttctgtggccatgagcatatattaagggttatcaagggtcatgaacatgaccaaggacatgccagaatttactaatattataggaaacattcctcagtatttcttttctactaattttaataccacaaccatttattatacagaatacaccattgat

SEQ ID NO: 606795 - DNA, 545 bp, Homo sapiens
taaccagagtactggtgtatttttcaccatttggtctctatttgactaacaagtgttgcagatggatttttattgctctcttatttgcttccaatctgagtaattggttggaggaaatttcctgttctgaaggaaatttcatttgtgtccgaaggtagtgatttatttatttatttatttatttatttattttgagatggagttttggtcttgttgcccaggctggagtgtaatggtgcaatcttggctyaccacaacctccacctctgggttcaagcaattctcctgcatcaacctcctgagtagatgggattacaggcatgtgccaccatgccctgctaatttttgtatttttagtagagatggggtttctctgtgttggctggtctcgaactcccagcctcaggtgatccatctgccttggcctcctaaattgcagggaatacaggaatgagccaccgcgcccggctggtagtgatcttgtatttactcctgatttggggtgtttgtcaacatgtacaggggcaatttggggacaattcctt

SEQ ID NO: 606796 - DNA, 528 bp, Homo sapiens
tcagaaaaaaaaacaaaacgattaactctcagcatatgagagagctaaaaaaactgcaggaaattgctgctgatcttggctacctgggcactgaagttggtgattttcagaagcccacacaaacttcaggtctgacacctgccttccagctgttgttggaggaaaattaatttttctttctcatctgccttccaaatcttttgcaagtgtacctcattagcagaatcaaatttggaaccatgctggtaagaaattctgggagtgtagcttccagrcaatgcagggaaaagtgtataagggggcagagatgatgcagaattgatgagacaattcagaacatttgcaaagaagaatgttaggtaaatattgaggtcatccagatgtttccccacccaatttttatattttgtgttctaagtttgcctgccgtaatgccccatatctacacgcagacacacagacacacacacactttcaaccaaaaagaatggctagagaaatattgaaatacaatgaatgtacttaatt

SEQ ID NO: 606797 - DNA, 601 bp, Homo sapiens
ggctacctgggcactgaagttggtgattttcagaagcccacacaaacttcaggtctgacacctgccttccagctgttgttggaggaaaattaatttttctttctcatctgccttccaaatcttttgcaagtgtacctcattagcagaatcaaatttggaaccatgctggtaagaaattctgggagtgtagcttccaggcaatgcagggaaaagtgtataagggggcagagatgatgcagaattgatgagacaattcagaacatttgcaaagaagaatgttaggtaaatattgaggtcatccagatgtttccccacccaatttttatattttgtgttctaagtttgcctgccktaatgccccatatctacacgcagacacacagacacacacacactttcaaccaaaaagaatggctagagaaatattgaaatacaatgaatgtacttaatttttaaagtttatcacctgcatacttaagagataatgctaaagcatgagtcatcgctgacatttagcaccactaattttaaacctatgcagattattgctttgaggaatagcactgctggcatgtacagaagagaagacatttttagtaag

SEQ ID NO: 606798 - DNA, 595 bp, Homo sapiens
gggttagaacatgctcttttagctcagagaagtttgttattaccgactttctgaagcctacttctgtcaacttgtcaaagtcattctccgtccagctttcttccattgctggcgaggagctgtgatcctctgggggagaagaggcactctgtttttttgaaattttctgcttttctgttctggtttctccccatctttgtggttttatctacctttggtctttgacattggtgacctgcagatggggttttattrgggatgtcctttttgttgatgttgatgctattcctttctgtttgttagttttccttgtaacagtcaggcccctcagctgcaggtctgttggagtttgctggaggtccactccagccccttttgcctgggtttcaccagtggaggctgcagaacagcaagtattgcagaacagaaaatattactgcctgatccttcctctggaagctttgtcccagaggggcagccacttgcatgagttgtctgtcggcccctactgggaggtgcctcccagtcaggctacacagagtcagggatccacttgagggggccgtctgtttgttctcagagctcaaacactgtg

SEQ ID NO: 606799 - DNA, 601 bp, Homo sapiens
ggctacctgggcactgaagttggtgattttcagaagcccacacaaacttcaggtctgacacctgccttccagctgttgttggaggaaaattaatttttctttctcatctgccttccaaatcttttgcaagtgtacctcattagcagaatcaaatttggaaccatgctggtaagaaattctgggagtgtagcttccaggcaatgcagggaaaagtgtataagggggcagagatgatgcagaattgatgagacaattcagaacatttgcaaagaagaatgttaggtaaatattgaggtcatccagatgtttccccacccaatttttatattttgtgttctaagtttgcctgccgtaatgccccatatctacacgcagacacacagacacacacacactttcaaccaaaaagaatggctagagaaatattgaaatacaatgaatgtacttaatttttaaagtttatcacctgcatacttaagagataatgctaaagcatgagtcatcgctgacatttagcaccactaattttaaamctatgcagattattgctttgaggaatagcactgctggcatgtacagaagagaagacatttttagtaag

SEQ ID NO: 606800 - DNA, 574 bp, Homo sapiens
acatcctttctcttctgctaaaacattgctacaattcacaggtagccttcctattggcccttatattcattttttgatatgcmtgttaagggacaagggaagtgcagcctccactccagctaaagatgcagaacagagataagaagagccaaatggtatggagagaagcaggagagagaaaaataaaaacccaggacagggggagttaacaataaaggaactctgatatcacatctaaaaattactttgctgatgaaccaaacgtttctattttgtaaatagtgctgtcatcatgtagttcacatattggtgtagcaatatgcacctgatgtaacttcttagggaggcaaaggaaggacaataagctaatagttggggagaataaaggtaaaatgctttcattcagttcagcttctctgagtcttggtagttattaatatgccaggtatcatagaggaagcaaggtgataactctctcaaagctctgttatttttcactattctgctgttccccaaatcgttaatttttagccttagttttttttattgattgaatagaattaatgaattttta

SEQ ID NO: 606801 - DNA, 574 bp, Homo sapiens
acatcctttctcttctgctaaaacattgctacaattcacaggtagccttcctattggcccttatattcattttttgatatgcatgttaagggacaagggaagtgcagcctccactccagctaaagatgcagaacagagataagaagagccaaatggtatggagagaagcaggagagagaaaaataaaaacccaggacagggggagttaacaataaaggaactctgataycacatctaaaaattactttgctgatgaaccaaacgtttctattttgtaaatagtgctgtcatcatgtagttcacatattggtgtagcaatatgcacctgatgtaacttcttagggaggcaaaggaaggacaataagctaatagttggggagaataaaggtaaaatgctttcattcagttcagcttctctgagtcttggtagttattaatatgccaggtatcatagaggaagcaaggtgataactctctcaaagctctgttatttttcactattctgctgttccccaaatcgttaatttttagccttagttttttttattgattgaatagaattaatgaattttta

SEQ ID NO: 606802 - DNA, 579 bp, Homo sapiens
tgcatgttaagggacaagggaagtgcagcctccactccagctaaagatgcagaacagagataagaagagccaaatggtatggagagaagcaggagagagaaaaataaaaacccaggacagggggagttaacaataaaggaactctgatatcacatctaaaaattactttgctgatgaaccaaacgtttctattttgtaaatagtgctgtcatcatgtagttcacatattggtgtagcaatatgcacctgatgtaacttcttagggaggcaaaggaaggacaataagctaatagttggggagaataaaggtaaaatgctttcattcagttcagcttctctgagtcttggtagttattaatatgccaggtatcatagaggaagcaaggtgataactctctcaaagctctgttatttttcactattctgctrttccccaaatcgttaatttttagccttagttttttttattgattgaatagaattaatgaatttttatttcaagtgtattaaaataaaatttcattgagtcactaaggaaggttcccatgactctttgaggttattttgacaggtcacttc

SEQ ID NO: 606803 - DNA, 579 bp, Homo sapiens
tgcatgttaagggacaagggaagtgcagcctccactccagctaaagatgcagaacagagataagaagagccaaatggtatggagagaagcaggagagagaaaaataaaaacccaggacagggggagttaacaataaaggaactctgatatcacatctaaaaattactttgctgatgaaccaaacgtttctattttgtaaatagtgctgtcatcatgtagttcacatattggtgtagcaatatgcacctgatgtaacttcttagggaggcaaaggaaggacaataagctaatagttggggagaataaaggtaaaatgctttcattcagttcagcttctctgagtcttggtagttattaatatgccaggtatcatagaggaagcaaggtgataactctctcaaagctctgttatttttcactattctgctgttccccaaaycgttaatttttagccttagttttttttattgattgaatagaattaatgaatttttatttcaagtgtattaaaataaaatttcattgagtcactaaggaaggttcccatgactctttgaggttattttgacaggtcacttc

SEQ ID NO: 606804 - DNA, 600 bp, Homo sapiens
tcccatgactctttgaggttattttgacaggtcacttctggatgcctttttcttcattcacacagctttagtttgttctaccagtcaagataggctagtctatgctgcactgtcaaaaacaatttaaaaaaactagttaaagtcatagcttaaaacaaaaatgtattttttttcmtgtcatatatgtacacaaccatttgtactgggagacacacctagttttaaggaccatagtcactcaggaacctaggctgacagaggcaccacagttttctagctacatcatctggaatgatgcctagactcctcactggccgtggtagaagaagagagagagagagagacaggaacccatggtaaagaaagagaaactgccaacagcacatgagatttttgctaccttaacccagaagtgacacaaatcctttccactagtgcccatgaactagaatgtgttatctggtgctgcctaactgcaaagttactgggatatttagaaaactaactggaatatttgatgagcatggctatttctgccacaattggaaacatttacttttatgtacttgagtataaattaaaatttcatgaaagtgcttc

SEQ ID NO: 606805 - DNA, 600 bp, Homo sapiens
tcccatgactctttgaggttattttgacaggtcacttctggatgcctttttcttcattcacacagctttagtttgttctaccagtcaagataggctagtctatgctgcactgtcaaaaacaatttaaaaaaactagttaaagtcatagcttaaaacaaaaatgtattttttttcctgtcatatatgtacacaaccatttgtactgggagacacacctagttttaaggaccatagtcactcaggaacctaggctgacagaggcaccacagttttctagctacatcatctggaatgatgcctagactcctcactggccrtggtagaagaagagagagagagagagacaggaacccatggtaaagaaagagaaactgccaacagcacatgagatttttgctaccttaacccagaagtgacacaaatcctttccactagtgcccatgaactagaatgtgttatctggtgctgcctaactgcaaagttactgggatatttagaaaactaactggaatatttgatgagcatggctatttctgccacaattggaaacatttacttttatgtacttgagtataaattaaaatttcatgaaagtgcttc

SEQ ID NO: 606806 - DNA, 593 bp, Homo sapiens
caagccagagaaatattgcctcacccaaaccaaaggaattcccaaacatattttccttaaacacatcctagtgggtccacaggcactccagttcttgaattagaacttgtataccaaccatattttattaaagctcagttaatcaactcttatgtgatataaattccatgaatgggcgacagtatgtatttcaggctgtaggtagactacccttttattttctcagaggacataaaaacgtgacattgttctttccaatactttacaagcattcttcatctccacctcaacaatataatatacatatattacatgtggcaaaagaacataagaggtgaggcaagagtacagtattatgctcatgaggaaacacattatcatcagtgtaaataaaacctgaaaatattcctccttgaccagaattcccagtcaataactaaatctatattcatgatggattayacaacagccatttacagtggcaacttatcattagggatatggaggttgttggggaaatttaagacacccctgatatccttatggcttttaagaacctttgaggtacatctttcatcctctgcccactgtta

SEQ ID NO: 606807 - DNA, 593 bp, Homo sapiens
caagccagagaaatattgcctcacccaaaccaaaggaattcccaaacatattttccttaaacacatcctagtgggtccacaggcactccagttcttgaattagaacttgtataccaaccatattttattaaagctcagttaatcaactcttatgtgatataaattccatgaatgggcgacagtatgtatttcaggctgtaggtagactacccttttattttctcagaggacataaaaacgtgacattgttctttccaatactttacaagcattcttcatctccacctcaacaatataatatacatatattacatgtggcaaaagaacataagaggtgaggcaagagtacagtattatgctcatgaggaaacacattatcatcagtgtaaataaaacctgaaaatattcctccttgaccagaattcccagtcaataactaaatctatattcatgatggattacacaacagccatttacagtggcaacttatcattagggatatggaggttgttggggaaatttaagacacccctgatatcmttatggcttttaagaacctttgaggtacatctttcatcctctgcccactgtta

SEQ ID NO: 606808 - DNA, 593 bp, Homo sapiens
caagccagagaaatattgcctcacccaaaccaaaggaattcccaaacatattttccttaaacacatcctagtgggtccacaggcactccagttcttgaattagaacttgtataccaaccatattttattaaagctcagttaatcaactcttatgtgatataaattccatgaatgggcgacagtatgtatttcaggctgtaggtagactacccttttattttctcagaggacataaaaacgtgacattgttctttccaatactttacaagcattcttcatctccacctcaacaatataatatacatatattacatgtggcaaaagaacataagaggtgaggcaagagtacagtattatgctcatgaggaaacacattatcatcagtgtaaataaaacctgaaaatattcctccttgaccagaattcccagtcaataactaaatctatattcatgatggattacacaacagccatttacagtggcaacttatcattagggatatggaggttgttggggaaatttaagacacccctgatatccttatkgcttttaagaacctttgaggtacatctttcatcctctgcccactgtta

SEQ ID NO: 606809 - DNA, 522 bp, Homo sapiens
gtgaacagtttgggttactgagttggtaccattaagagagataagatctctccccaaagacrcctagaaaattgagaagtgttgtacttcgattgtatagaaacaagagtaagtggtgccagatctcattcttagtgcctctcccactttgtgacattgtttctgtctcccgccattggaaatactgcatcatattgaacctggaaggaagagtggtaagaaaggaatcatatgagcattgcccttttctattagggaaccaataaggcattaatagccaagcatttactttaaaaagtcgccattgttgaacccatattagtgtattttgggggaacttcatgctataatgaagcattaggccagagattgaagaagctcagattgacttggtggatcaatggtgtgatcctgctgtcctcattggtcacttagctttgtgtgacacaaaagcttacccttaaaggaacctataggtcacatctctgcttttgttacatttcagtacttttattctacatg

SEQ ID NO: 606810 - DNA, 597 bp, Homo sapiens
aaaacaaaagaatttatgctgtttgtgtgatagataatggaggaactatttttaatgctaactctatttcaagcttcttcaaatgatatgcatatagatactgactgatgggcagcctggcaaatataatctaaaattcttagtatttggttttgagtacattataaaaatgttcttcaagtctgccagaaaataagaattactagagatactcttaaaaaaattccaacttcttctatctcacctcagatcaatggaatcakatttttccagtaatgtcctgcaaatttgtatttgtatttgtatagtgttctaagattagcgtatttggaaaacactgcatcctagtgtgtaggtagccttattttctcatgcttgtactaaagttaattgtgtgaaggttgaccaaaccttaatattctaaaagatgattggttcccagaaaacagaatactatgataaagtaattatattaccattacaaagcagtattacaaagttcttcatgttttaggggatggtatagctctagcttttgtatgtgttatagactaaatttctatacctgctctttaatgttatttttctttacaactg

SEQ ID NO: 606811 - DNA, 533 bp, Homo sapiens
agagtgagactccatctcaaaaaaaaaaaaaattgtaggatagactacaatgtgtataacttcactcctcttgtataaagatgtgtgggcygagtgcagtggctcacgcctgtaatccctacactttgggaggctgaggtggacagatcatgaggtcaaaagatcaagaccatctcaggtcatgaggtcaaaagatcgagaccatctcctgattgaggcaggagaatcgcttgaacctggaaggcggaggttgcagtgagccgagattgcaccactgcactccagcctcggtgacagggtgagactccgtcaccaaaaaaaaaaaaagaaaaaagaaaaaagaaaaaagatgtgtaaggaaattagatagcatttcttggcttattagctgttaaaatgtccaagggaaaatagatcaattgaaatatcttttggtggctactaacttccctttccatagataagacatagagtacaattgtgaagacatttaaggttaggtgtaagagaattcatattaaattttaaggctg

SEQ ID NO: 606812 - DNA, 533 bp, Homo sapiens
agagtgagactccatctcaaaaaaaaaaaaaattgtaggatagactacaatgtgtataacttcactcctcttgtataaagatgtgtgggccgagtgcagtggctcacgcctgtaatccctacactttgggaggctgaggtggacagatcatgaggtcaaaagatcaagaccatctcaggtcatgaggtcaaaagatcgagaccatctcctgatygaggcaggagaatcgcttgaacctggaaggcggaggttgcagtgagccgagattgcaccactgcactccagcctcggtgacagggtgagactccgtcaccaaaaaaaaaaaaagaaaaaagaaaaaagaaaaaagatgtgtaaggaaattagatagcatttcttggcttattagctgttaaaatgtccaagggaaaatagatcaattgaaatatcttttggtggctactaacttccctttccatagataagacatagagtacaattgtgaagacatttaaggttaggtgtaagagaattcatattaaattttaaggctg

SEQ ID NO: 606813 - DNA, 533 bp, Homo sapiens
agagtgagactccatctcaaaaaaaaaaaaaattgtaggatagactacaatgtgtataacttcactcctcttgtataaagatgtgtgggccgagtgcagtggctcacgcctgtaatccctacactttgggaggctgaggtggacagatcatgaggtcaaaagatcaagaccatctcaggtcatgaggtcaaaagatcgagaccatctcctgattgaggcaggagaatcgcttgaacctggaaggcggaggttgcagtgagccgagattgcaccactgcactccagcctcggtgacagggtgagactccgtcmccaaaaaaaaaaaaagaaaaaagaaaaaagaaaaaagatgtgtaaggaaattagatagcatttcttggcttattagctgttaaaatgtccaagggaaaatagatcaattgaaatatcttttggtggctactaacttccctttccatagataagacatagagtacaattgtgaagacatttaaggttaggtgtaagagaattcatattaaattttaaggctg

SEQ ID NO: 606814 - DNA, 510 bp, Homo sapiens
atgtgatttgtgctgtcaccatggcaaataaagaatmatttgtgctacgtatgtaagtaatccaaacaaaactttgcataaatattttaagaaactgaaatatcagaatagatgagccattgaataaaaatcaacatcaatcacaacctacctcattttaaataagctacaaatcgaagtaaataatttgatgcgagtggtcatttctgctttcaatctgagaggaagtcagtaaattccttttgctgttacaaaagtagtttaaattccatgcaggacacgagtctgggcaatcacatcagcctcagcgtaccaaagagcctagagagacagcagaacaatgtctcccactcgagctacagagggaaggtggtcttaggttttgctgcagtaactggaagcttaaatttaattttcagtcagagcctgctgtttaagctccctgtctgttctgcaatctaagctgaatgggtactttttttttcttttctaatattcttaagtcatttg

SEQ ID NO: 606815 - DNA, 510 bp, Homo sapiens
atgtgatttgtgctgtcaccatggcaaataaagaatcatttgtgctacgtatgtaagtaatccaaacaaaactttgcataaatattttaagaaactgaaatatcagaatagatgagccattgaataaaaatcaacatcaatcacaacctacctcattttaaataagctacaaatcgaagtaaataatttgatgcgagtggtcatttctgctttcaatctgagaggaagtcagtaaattccttttgctgttacaaaagtagtttaaattccatgcaggacacgagtctgggcaatcacatcascctcagcgtaccaaagagcctagagagacagcagaacaatgtctcccactcgagctacagagggaaggtggtcttaggttttgctgcagtaactggaagcttaaatttaattttcagtcagagcctgctgtttaagctccctgtctgttctgcaatctaagctgaatgggtactttttttttcttttctaatattcttaagtcatttg

SEQ ID NO: 606816 - DNA, 551 bp, Homo sapiens
ttattttcatgccttatttatctttggtttgaatgtaatatgacagtgaaacctgttatttgtattcaatttttaaagaaacgcttttagattttaaaagtcaggcttctctatgtkctcaaatgaatctgacttactttataagaagaagggcttggcattctgatggagtcctggaaatagattcttggagacacagctatgtattggtcttcctacatttgtctctgtgattgtggattatgatgcaggtggactttgctcctttcccctgtgctatgcagcaaagtgaccttgaacaagctgccagccctactggatcatgattactcatattttgaggagaggactgaagtaacatgatctctgaagttcattttagccttaagatccagtgaaaagttagcattaatcctaggaaaatagttagagataaggatggtggagtgcagttattttaagtgctggaaaaattgtagctctctggaggaattgaatcttctgaaattattcactttgtaatacaggggagcttaaaaggtccaccctcc

SEQ ID NO: 606817 - DNA, 576 bp, Homo sapiens
ttagtatgaaaaacagaggatatgtcaattgattttatttcagtagagcatttttctaaaggtaagttgaacattgcttttgaaagtttctcttagtttatgttgtagtatttttattttccccgttacctaaatgtacaaattcagtcccctgtaccatgtttggttacctggaatttcattctatccaatattattttcatgccttatttatctttggtttgaatgtaatatgacagtgaaacctgttatttgtattcaatttttaaagaaacgcttttagattttaaaagtcaggcttctctatgttctcaaatgaatctgacttactttataagaagaagggcttggcattctgatggagtcctggaaatagrttcttggagacacagctatgtattggtcttcctacatttgtctctgtgattgtggattatgatgcaggtggactttgctcctttcccctgtgctatgcagcaaagtgaccttgaacaagctgccagccctactggatcatgattactcatattttgaggagaggactgaagtaacatgatctctgaagttcattttagc

SEQ ID NO: 606818 - DNA, 427 bp, Homo sapiens
ctcacatatttaatatatgtcaacttattccctaaaagtccacagaaacaagcattgtggcagaggaaaatttattgaaaaatattgttccaaaatcttgcttcttgattatatttgtaggtataacagaattagactactttaatagctgaattcatttttatttcattgtggaataaaatgagtgctgcagatgccacactatggtttgattgttatatatgtttggtcatgtgggattagcctgatacatgtatgaactcaaatatccatgttagctaacaaacaaaaggagtgggtaaagagatgtgtatatatatacatactgaaagaactttttctatatatgagtgaatagcttacctaacgtaacagtctttayataataagactacttatttaaattttaaaagaatttacctctaga

SEQ ID NO: 606819 - DNA, 588 bp, Homo sapiens
tccttctcttgctcagttgaatctgcttcatgaaccaagtcaggttctcttccatggcaaaagtaatgaggtggggccaatgtgtcccattgtctcccaatatccacagcagccactcaacactgtagtgctgtggccaggtgaagggactctgaaactgtagtactatcctttgaagctaccacagttcttctcctctatgctgaattaaccacatccttgtttccatttaaataagaaagatgcacagaggttcaacccacccattattgaacatattttgcatatggaatttctaatcaccatattattccagggatgtttgcagacggaacctatttagatttttttgtacatggatgcctagagaattatggaaaaaactagaaatcatctagttctagtctaatacccacatttagcattcaaggtaactgagaaataaagaggtcaaatgttgctcaagatgactcagcaagttaggagccagtgtggaccagatmagtgtccttttctctacaccatgtggataatggatgtttatagcaaagttaacattgaacctgttgagattcatgtagataatct

SEQ ID NO: 606820 - DNA, 586 bp, Homo sapiens
gtttccaattcctctgaggtgtcattgcttgaatgtcacagaaataatgcacaytccataatctcaaacataacccatgatttccatactctcctccttttgtatttctctctccgtgaatagaaccaccatccacccaggcctctatgacagaaccttgggtgtcactgaagacactttttcctctctgttacttctcatatcaaattggttaccaagtcctgggaattacacaggatctcatctttttccttttcttcatacccactgccatagccttggttcaagtcctcatcatctcttacatggcccatggtagcagtcagctagcaggaccccctgcttctagatgtacctcttttaatccattctccaaacattcaccaagtgatctttttaaaacacgaagcagataaagttacccatacctacctgtttaatacctttcaaaggttaccaatattcttgcaggataaattacaaatccttaacattattccctggctcttgtctacatctctatatttttttattaagttcaggttctttcctcatctgctacctatccatgccagacaactaagac

SEQ ID NO: 606821 - DNA, 586 bp, Homo sapiens
gtttccaattcctctgaggtgtcattgcttgaatgtcacagaaataatgcacattccataatctcaaacataacccatgatttccatactctcctccttttgtatttctctctccgtgaatagaaccaccatccacccaggcctctatgacagaaccttgggtgtcactgaagacactttttcctctctgttacttctcatatcaaattggttaccaagtcctgggaattacacaggatctcatctttttccttttcttcatacccactgccatagccttggttcaagtcctcatcatctcttacatggcccatggtagcagtsagctagcaggaccccctgcttctagatgtacctcttttaatccattctccaaacattcaccaagtgatctttttaaaacacgaagcagataaagttacccatacctacctgtttaatacctttcaaaggttaccaatattcttgcaggataaattacaaatccttaacattattccctggctcttgtctacatctctatatttttttattaagttcaggttctttcctcatctgctacctatccatgccagacaactaagac

SEQ ID NO: 606822 - DNA, 635 bp, Homo sapiens
catttagctgcctggatagcagttatagatctgtttatattaatactaacagagagtcaaacagttcccaaaacttttagatgtgatggcaagaataagagcagaagatgatctgcacatcaaacagctttttcgtctttgcttagtgtcaagcrtttggcaaaacaaccctttgtattatttcagcatttcagaggcctaattttccatagttgtgactcacatatcctattcataggcagaggtcttataaaaatgaatgtgactgatacaatctcttataaaaatgaatgtgactgatacaatctgagcaggaaatacttattaccaaatgaccacaaattctttcttgtttgtaaaaattaatttacctgtgttaaattgttttaatcagatttcattttaaaactagcactttaagcatgatttaatctaacaactgataaaacaataacatttcaaaggcatatctagaacagtttaaaccaaattcttgtctgttcataagctctggtaaaacttttagatccctgctatttagtaaatctcttaatatgtattcatgtaactaaatactcctatacactgttttcctaaattcagggttctggatgttcttcccctcattattagga

SEQ ID NO: 606823 - DNA, 492 bp, Homo sapiens
tatatcaaactgccctcgcctttgccaaagccctcagtggacaaataacttcaaataactactawttctcagagcagtgcaagtcatctaggatcattgtttacattctatacatattgaaaggctttctgtaaaagtgagaaatgttttaatttttaatgataggaaaagtaatgctttctacaaggttgaatctaaatccaagccatagataagagctactttaatttaactggtatttatggttgaggagcagaaaacaaaaagaaaaaaaattcctttgaaaatgtttatttatgacagtctaaattactcctttgacacaatgaacacaggtaaattatctcagagctgtgtttaatggctctaatggctagctgggtactgggccatgtatttcaggatgcctacttgtttataaaacttgtttccaaaaatcaggctaatatagtactaagttaccaagcagaattttttttttaattccagagt

SEQ ID NO: 606824 - DNA, 559 bp, Homo sapiens
atttgattatgaatgtcttcatataaataaaaaacaattttttaataaactagactaggaaaggataaaaacttagtatcattattattctaaacataccaaggctcaagttttcattacctaaaatatactcttcgtaagacttgtggctgccgaataaaatacattmatcagatgcagtattgctttcacggtaattatgatactatttataatgccatggttatgttcataggccactaacaaacatatgcagtcttttagctacaacactcaaacataattacaatgcccctttccattgaaataatctatgcatcccgccacagtgacttcattccttaccaggatgcctgctgaatcagactgccccaattattcaggcacagtgcctatgcttatgactaataatattggggaataaacgaaattaatgtccatgacttcctgaccattttggccaatctcctttctttggtgtcttctgctttaaccctaatactgagtaatcttgaactattcctggcataaaaagagcttcacatactgtacaaagtct

SEQ ID NO: 606825 - DNA, 559 bp, Homo sapiens
atttgattatgaatgtcttcatataaataaaaaacaattttttaataaactagactaggaaaggataaaaacttagtatcattattattctaaacataccaaggctcaagttttcattacctaaaatatactcttcgtaagacttgtggctgccgaataaaatacattcatcagatgcagtattgctttcacggtaattatgatactatttataatgccatggttatgttcataggccactaacaaacatatgcagtcttttagctacaacactcaaacataattacaatgcccctttccattgaaataatctatgcatcccgccacagtgacttcattccytaccaggatgcctgctgaatcagactgccccaattattcaggcacagtgcctatgcttatgactaataatattggggaataaacgaaattaatgtccatgacttcctgaccattttggccaatctcctttctttggtgtcttctgctttaaccctaatactgagtaatcttgaactattcctggcataaaaagagcttcacatactgtacaaagtct

SEQ ID NO: 606826 - DNA, 556 bp, Homo sapiens
catattactttttcaagtgagtcttattaacataaaactagtggcaaatatttgggtgtccctgtcttcatgcagaatttgactgcccaggtcctattcctctagagactagttagattctggccagttaactggagaaatcaatacaaattgagaggttaattttgttaatagattcatgtgttgtctctagcagagggtggttgattttaacatacatttgcaatgcatcagccaaagtgcagcataaaacggaagagaataaactgtgagactataccttgcacatgtttyttattgcatgagtaagttctatatcaggtctggaatttctgtactcaaaggacttatattctgaagcaacaattacaaatattgagtggaggtaatatttgtggacattgaatcaaaccagttttctcacctaacataaataacttacctgcattttgatgttaaaaaaaaaaagccacctgccaagatctggctgtggagccatggctgtgtatcagccatgtatttgagtagtgacaaatacttaattaacagggtcatt

SEQ ID NO: 606827 - DNA, 563 bp, Homo sapiens
aaatatttcctggtttggggaactctgcaagtttcttgtttctgatgctttgtttaaacatatacaactatgtatgttcagtctgacaaagccaccacttcctccagccaaaagggaaataactctagtagaacgcagtattttaagaacagattttgttgttaggctgtattacccccaaagaaaaggacaaaattagtaagactgaatttgttactatttactcgccaaaccctcaaggtagtttcatagagataatcacaraaacaggaaatagtacacaatgtgggattggtgtttttcctacaagctccttttcctatggattattttttttccaatggagagaaatgcttttttacctggataataaattaaaaagtggtttcttgacattttactgcttttatttattccatttaaagaaaatgatttccaaagccagacaatggtgctgttcaatagaaaatgatgacctttaattaaaactctgccccttactaattttcacatctttaccaacctcctcatcaatgtggaagaggcataattgaagggagaaa

SEQ ID NO: 606828 - DNA, 563 bp, Homo sapiens
aaatatttcctggtttggggaactctgcaagtttcttgtttctgatgctttgtttaaacatatacaactatgtatgttcagtctgacaaagccaccacttcctccagccaaaagggaaataactctagtagaacgcagtattttaagaacagattttgttgttaggctgtattacccccaaagaaaaggacaaaattagtaagactgaatttgttactatttactcgccaaaccctcaaggtagtttcatagagataatcacaaaaacaggaaatagtacacaatgtggkattggtgtttttcctacaagctccttttcctatggattattttttttccaatggagagaaatgcttttttacctggataataaattaaaaagtggtttcttgacattttactgcttttatttattccatttaaagaaaatgatttccaaagccagacaatggtgctgttcaatagaaaatgatgacctttaattaaaactctgccccttactaattttcacatctttaccaacctcctcatcaatgtggaagaggcataattgaagggagaaa

SEQ ID NO: 606829 - DNA, 578 bp, Homo sapiens
aatctatccccctccaccccttctctttctccctctttctgtgctatgtatatactactctacatcttgaaaagagtaattttatcttcatttgctttgtagtttattcaacttctatttccaaaaacttagctttttcctgggacaaatcccccagatgttttctattctcttataacttcaacctctacctgctaaagtagaagtctcaattatttaagagattcagaattatgtattataaagtttacaaattatgtaataaaaatttaaattcatttaaaacttgagtaattatgatgccatcagcacactataagatgtaaacattttaatggtgaaatatttaaaataaatatctttgaatgttcaaattctgtttgatayatttgttctctttatttcctcaaaattacagtcttaaatttttttttcttttgagatggagtctcactctgttgcccaggctggagtgcagtggcaaaatctcagctcactgacacctctacttcccgggttcaaggcatcctcctacctctgcctcccaagtagctgggattacagtcatgtgccaccac

SEQ ID NO: 606830 - DNA, 575 bp, Homo sapiens
gatttttttcatttctaaaataagagataaaatatttgacaagcaggactttcacactgtaggcagttcaactgccactgaaactttaattaggtcaaacttggaatctaaaatcttaaaatgatatccagtaaaagggaaaacctgaaaacataaggtaaaggcttttttctgaaacccttgccagtgtttccctgtaaatgttacagccttcaaagaccactcaacattwcccaccattttaaaatccataatttattacaaataagtatagtagaaaggttctattccatactgaatatattaataaaaatagtatttttaaaaaaaaagttcaaaaaattgtcaagtaactcaaaagttacacataacataaaaaccattcacctcaaaatagccattatttcagatattttgataaaaatatatacaaaggaagctacagaggaagaaaggccaacaggtaatgtggataggaactgaagatcagttttgttaaaatggactcaagctacccacactatattaaatatatgtaccatattaaatatagctatacttgaattaatcacagt

SEQ ID NO: 606831 - DNA, 585 bp, Homo sapiens
atattcagttttttagttggaatccctccatacctgaattgtttgtcttgattcacctcttagtaggctgaaattcactacagcttttttgtttgttttgttttgtttttacagggtggctattcaatttttttttacttataagaacaataatgtatttgttcataattgtgtgagttagcaaggcaattctcatcggggctggyctggctcatctctgaagtcatctgccagttttgaaggggattgatggtctaggatagccccattcatttgtctggctcttacaagcttgttggatttagaagccccagctaggatagcacatctctgctccatgtagtctttcatcctccagtaggctagctcaggcatattcacaagtggtagcctcaggattcaaaacagcaaaataagacagaaggccccagtgcataagaatctttttaagtctttgtttaccttattgtttttcagtgttttcttgttttaattttccttaatgagggtttatactatcttgtgtaacttcttatgggcttgaaaatgtttgtgcatttgaatttatatttaaaagataacttg

SEQ ID NO: 606832 - DNA, 539 bp, Homo sapiens
ttgggaaatttctcttgtgatttttttatacagctctttgttgtgttattatctctttagtctcctttctatttgatggttgtagattgagagaaaaaacaggagcagtttgcagtctcttgtttctcttgctagacttttttactccattcctctgtcaccaaatctcttatttccttttcccaggtcacacctctccatctggagtgagtggctaaaaacawatccttttgcatcagagactttctatgttatggtttgtacgtactgtctcttcttccttcttcactcctcttcatctctggcattctctggttctgaaacttggatctaagcaagaaccctgtcattctagtatagattcttcttcagctacctgtcctggaggctttagggattcaaacttgtccttccattactatatatctcttccttctgagtcagggctctttagaaccttcaagattgtgactcttgcttttggagaattatttatcatactctaactagtactatggcattacaagaaaaataaacac

SEQ ID NO: 606833 - DNA, 539 bp, Homo sapiens
ttgggaaatttctcttgtgatttttttatacagctctttgttgtgttattatctctttagtctcctttctatttgatggttgtagattgagagaaaaaacaggagcagtttgcagtctcttgtttctcttgctagacttttttactccattcctctgtcaccaaatctcttatttccttttcccaggtcacacctctccatctggagtgagtggctaaaaacatatccttttgcatcagagactttctatgttatggtttgtacrtactgtctcttcttccttcttcactcctcttcatctctggcattctctggttctgaaacttggatctaagcaagaaccctgtcattctagtatagattcttcttcagctacctgtcctggaggctttagggattcaaacttgtccttccattactatatatctcttccttctgagtcagggctctttagaaccttcaagattgtgactcttgcttttggagaattatttatcatactctaactagtactatggcattacaagaaaaataaacac

SEQ ID NO: 606834 - DNA, 599 bp, Homo sapiens
tgctttacagtgctgcattgtctttctggagttaaacttaaaactttactgtcaatatttatggaaactttcattctattccataacatgtacatgttggtgataatataaatgagtattttttccctaaaatttttagtagaatttcaccctaggctatgtgyaactttaataatgatgatgataatgatgacgatagcaaatatatagagtgcttacatgtaccaggtacttttctaagcactttatatgtatgaactaatttaatcctcataataaccctaggaggtaggtattatcatcaaccatacatacagaagagaaaatggaagcagaacttgaggaagtaatttgcccaaggacctacaggttgcatgtggcagaggtggaattcagtcccagatcatcaggccccagaacctggcttcataaacacctgcccttgaaacccactatggagccccaggagtacccatccatggttttgaccaacattacctcctctgtcatttcaagaactctataggcattatctttaggtttaatatatgaggaaacagaaacttaaagaaattatggtaacttgccaaaaatcacaa

SEQ ID NO: 606835 - DNA, 603 bp, Homo sapiens
taatcttaaatagatgaaaaaaagcaatatggttgaaggtaaaatactgttccaggtttcaaaatttagccaattaatggaaaatatgggagagtcaattttgtgtcartagagttttaaaaactaatcagagctattaaaatgtaatagctttgattttcaagtaggtcataggaccagtttttctgtacaaaccaaataaattagatatagttcctagagctgtggaagcaacaaggactaaaagaactaaaatttcagaagggaaaattattccaaggcatgcatgtatttatttccctgagggcatttgcttattctgagtgtggtctgaggactggactgggcctaggcggaaggtgtctttggggagtaagaaaagttagcaaaacttttagtgatactgcaaggctgggacaaactggagacttgagggatctaaaacacacatctttctccaagggatgtttgctgtgttttgaggctgcataggaagccaaaggctaggctaaaagcttctaaaaggcagagcttccaaaaggcagtagaattttagtaggaaataaacaaacaaaaggacttggcagcctggagacaccaaac

SEQ ID NO: 606836 - DNA, 335 bp, Homo sapiens
agccacctcaatctaagccaatctttaaaatatcatcctaacaaatgaagcaaataagtaaagaactattatgtgggaggggaagcaaggggttgacaagcgctcaaatatacagcctcatgttaaattatattattaagagcacaagggcttctttatattcataaccattcttaataatatgtcccttctgagcttttattatcttctcttatgaatggatggcagcagggatattgtaacttatctcaattgkaagttaagctatgtaggattcatctctgttcacttacagagtctaacaatttatcccctctataagtttcacaatagtc

SEQ ID NO: 606837 - DNA, 615 bp, Homo sapiens
tctgcaatgtcacaagatcataaaatcctgaatcaagaaggacagatcagaggtcattttgagcagcctcttttattgggmcacaaaacatgcttatccccatgcaataatggcattctaattccagtctttatcaatagtaacaataactttagcaattactttttaatctcagaattctagaaatctgagttctaacaaaaacacggtgtatataaaatggtttatggccatgcataatttgtctgccttcttttccagtaaaatgaggtaggtcatgtacatttcatattttagctcatgaaatcttcaccattttcccacaaggtttgtttccactttatatgtgagaacctgaggcctagaaaaaatatacaacttgcccatggacacacaactagcaactggttatcagccaagatttaagtcctctactttgactccagaactgacattttttatattgtgcttcattgctttttttttgtttgtttccagaacaagggttacctatgcagaggtaactgacatatgaaaactatccttagaaagaaatcaagtaaagtaaatttgcctactttcctcaatagcccatttcgcctccaataaaatcat

SEQ ID NO: 606838 - DNA, 672 bp, Homo sapiens
ttttggtactgcataatgacattttctatttaattttcagcacaccatggaatctgaagtgattcagaatggctggcttttgaaattcctttgaactaaataaagcaccttcatttttacttgaattattttacagtacttttaccaatgcctaaaggaacaaagataacagctatttttttccaggaggattttggaaactcgaaattcttaaaagaactattttaacaaaaataaattgaaggaaaccgactgattttaattttagagatyattgctttcaaatatatgatcttcaagtcctcttgaattttgagctattttgaaatcaagttctatttgtataaggctttctctctgaggcaaagtgttatgtgagggtgctttccagcattcaaaagcattatatctcaggtcttaaccatatttccacatgtgcacatcttccatcaaactgtggctcatagcacagttatgcaacacaaatctcgatgcttctctcccatcaatttttgaggaaatttttgaagagttccccaaatcagattattatctatgtatcaatacttggtcagaaaaaattcacctgaaaaccattactgtatactgtaccaatacacgatgtaaataaaagttgagtgcagtagacatagttcacttctactacttata

SEQ ID NO: 606839 - DNA, 635 bp, Homo sapiens
tagtactattattttccccattttaaagagaagaatactgaggtacagacagatcctaaatggtggaactcagattcaaacccaagtagcccacttctagaatctgcataagtaacttttactgtatagtgtttctttttgttttttttggacgaagtctcactctgtcgcccaggctggagtgcagtggtgcgatctcagctcaccgcaacctctgcctcccgggttcaagcaattctgcctcactcagcctccctaatagctgggattacaggcttgcgctaccacacctagctaatttttgtatttttaatagagaccaggtttccccatgttggccagsctggtctcaaatgccttacctcaagagatccgcctgcctcggccttccaacgtgctgagactacaggcgtgagccaccgcgcccggcctatactgcttcttaaaaggaaaaataagctgacacattgttagaactgcagccaaaccagtgcttttaattacctaactagtgccaatggactagtttcctatcctttaccatcctgtactatcctttgcctggttgccagggcaaccgggatcactttctttaaccacactggagcttattctgtgtaatcatttgccaagca

SEQ ID NO: 606840 - DNA, 553 bp, Homo sapiens
agcctccctaatagctgggattacaggcttgcgctaccacacctagctaatttttgtatttttaatagagaccaggtttccccatgttggccaggctggtctcaaatgccttacctcaagagatccgcctgcctcggccttccaacgtgctgagactacaggcgtgagccaccgcgcccggcctatactgcttcttaaaaggaaaaataagctgacacattgttagaactgcagccaaaccagtgcttttaattacctaactagtgccaatggactagtttcctatcctttaccatcctgtactatcctttgcctggttgccagggcaaccgggatcactttctttaaccacactggagcttattctgtgtaatcatttgccaagcaatcatttgccaagcaatmatttattcagtcattcaacaagcacaaatcaagtgccttttatgtgcctcacacttgtaagtgatgaggatacaatgcccaataaaatgttctggttgccctcaagaagctgatattccttcttgcaatacttctatgttggtttatg

SEQ ID NO: 606841 - DNA, 646 bp, Homo sapiens
tggaatgactttatatttatatgcgttatttaaagttaagttcctttgaagttgttgctcttgtagatgttggtatttttttttaattttgaagttggggatcagggagaaagtaaagaatataggagaaagtttacttgttttttaatgtgaatcagtaaattctaactcggagaactttttgacacacaattccaaaaaccctatcagaagctttgacaagagaagcagaaatataaggaaaatttaaaaagcccaagaaatgctatcagttcacctccctcagtactcaaaattcaatctttcaatcaaattaggcaatagacctgaaccacatcagctgagtacatcacagaaatgctttcactgtattgagctttaatgttattcttatagcttttatcaacatttgctttaaaaaaaaatccrtagctgaagcatgcgtctgcattttacaaagaaactgtccagtacattattctatattccctatttagtagccaacattagaattttaattcaagttatgctttcactttctcctttctgaaaactagaactagacaacttttcttgcttttcttttttgacaaaaacaatgctttaataaaacatggatacagaattagagcaattatgttaacag

SEQ ID NO: 606842 - DNA, 580 bp, Homo sapiens
agtagaaagttacaatccatttttagaatggagtattgacaggactttatgactaaataggtgtaggtggtgtgagaggaggaggaatcaagaataactcccaatttttaacttgaacaaatacatggatggtagttacagtcagtgagttcagcttaggacaatttgagatgtattggtaaattatgattagctgacagttgatattatggaaacccagagaggttgatagatttaaaagaaggtccaggacagaaacccaggaataccaacattcaaacaggaggcagagaaataattgttcattaaggggattaacatgaataaacagaaaaaaattcatgtaagccataggagacgagagattttacatctaataatattgttgactgtgtccacctgtagtggcaaacttgatgtgattatttatttcgatttaatagtactgtttatatgagtattgtagagcaagcatttcagagcaagttattatatttataaagattatctgaaattcagttggataatcctcctgaatwtaaaatatattgtattattttattgttgttgttgattagcc

SEQ ID NO: 606843 - DNA, 596 bp, Homo sapiens
atcgaaacaagcaagtagattgtttagatctacttgcttagtccactgcttcagaaatcagcactgctttgtttaaaagataattattgattgctatgttatataataatcttccaagacmgttacagattaatctgaatacctatgacctcaatctgaatttctatgtcttagaagttttggagatagccaacccaccaatctgtcataaagcatattagctgtctgggggttaccagttcctcaggaatgtcaccctgtcctgtcctctccatgtgctgatcatgaggagggttagtgacactccacacccattcatctctctcttttttttggtagtgtaatgagtacagcaatcattctagcagtatttgctatgacaacatcattcagccccaacttatgccaaaaatgtgcatgttaagtgaagggaaacaagctctaatggtgccctttaatgttctgaagacacaggtgttctctgtgaacttgacatttgctcggtctacatgtgatcctaagggttccagataagatgaattactgtgtgaaagtcctcaggcattttctcacagataaatagcatgaaattttgt

SEQ ID NO: 606844 - DNA, 596 bp, Homo sapiens
atcgaaacaagcaagtagattgtttagatctacttgcttagtccactgcttcagaaatcagcactgctttgtttaaaagataattattgattgctatgttatataataatcttccaagaccgttacagattaatctgaatacctatgacctcaatctgaatttctatgtcttagaagttttggagatagccaacccaccaatctgtcataaagcatattagctgtctgggggttaccagttcctcaggaatgtcaccctgtcctgtcctctccatgtgctgatcatgaggagggttagtgacactccacacccattcatctctctcttttttttggtagtgtaatgagtacagcaatcattctagcagtatttgctatgacaacatcattcagccccaacttatgccaaaaatgtgcatgttaagtgaagggaaacaagctctaatggtgccctttaatgttctgaagacacaggtgttctctgtgaacttgacatttgctcggtctacatstgatcctaagggttccagataagatgaattactgtgtgaaagtcctcaggcattttctcacagataaatagcatgaaattttgt

SEQ ID NO: 606845 - DNA, 519 bp, Homo sapiens
agaagaaagaaagaaaagaaaaagaaaaagcttgcattccccagaattaagctcattttaactgttccctacattgcttccttctgagccataaggccaccattcatcccctcaaaaaccacttaatgayattttctttgttccagtacccctcaaggcacaaggaacatagctctgagcaagatggacagagttcctgatttcagagggtttacagtctaatgggggaggcagggaagacgggcaaacaaagaagaaagtcaggtaggaaatgccatgaaataataatgttttctttcacaatcagactacagttctaatgcctagtgagcacttattttcagcaaggcactttgctaattatgaaacgaatagtcttgtatgcaagtatagctttctaaaaaaaaaaagttcatagggctctgatcctagcaagaaccttgtaaagtaaacaggataagcattattctgattattaagcccactttgcaaatgaggaaactgagacttattttagta

SEQ ID NO: 606846 - DNA, 519 bp, Homo sapiens
agaagaaagaaagaaaagaaaaagaaaaagcttgcattccccagaattaagctcattttaactgttccctacattgcttccttctgagccataaggccaccattcatcccctcaaaaaccacttaatgacattttctttgttccagtacccctcaaggcacaaggaacatagctctgagcaagatggacagagttcctgatttcagagggtttacagtctaatgggggaggcagggaagacgggcaaacaaagaagaaagtcaggtaggaaatgccatgaaataataatgttttctttcacaatcagactacagttctaatgcctagtgagcacttattttcmgcaaggcactttgctaattatgaaacgaatagtcttgtatgcaagtatagctttctaaaaaaaaaaagttcatagggctctgatcctagcaagaaccttgtaaagtaaacaggataagcattattctgattattaagcccactttgcaaatgaggaaactgagacttattttagta

SEQ ID NO: 606847 - DNA, 393 bp, Homo sapiens
agatgcttcagtcacatattttttaaatgtatttttcttgtcatcagactcatgcagaataaaaagctaacggtccctgtcaaagtgggacctaccaatgccattcgataactctcactgcatgggggccataatgggaaacactgcagacgtcctatttacataraagtcctcaaaggtgtgtgcagtcccagtcacccagtgtccctggcaggggaggatgccagagtgacaggtctcttggtttctcagtctatgttccagaggtggcatgaccctgaaagagacactcctgaccaagaaagactactcatgcaaagagagatgagcccagtatctgtccccacacagcctgttctaggacaaatgttcagcctccaaggttttaactat

SEQ ID NO: 606848 - DNA, 463 bp, Homo sapiens
atacagttccattctggagaaagtggctgaatacgtttgtggttgtgtctctgaactttctctcyggaccatttctatgccttctgcccctcctcgtctccctgggatcttcaggatcccaacttccactccgcaactaaacaacgaattctccagagcataaggttgagagcttgggctgtgaatcaggaagacctggtttaaagctgagccaccttctcgctggggtaacgacggatcaattactcaacctcactggacctcacatctcccatttgtaaatgggggtaataagaatgcctccgtcagcagcctattctgaggactaaatgaggcaatgcctgcacagcctttactgtaggtctggtacacggtatgtttgcaggaaaaattagttatgtttgtatgttgttgggttatttttttttctcttttttaaaaaattttttttctcttttgaaaa

SEQ ID NO: 606849 - DNA, 610 bp, Homo sapiens
cattctgccccagctctgcagaggagaaactcataaatgcaagcatgtggctctctcctcctccactgctggcctttgagagtgttgtttgatggtagctagcaaaagaatttactgcagtctggcaaaattgatacccatccacatgtattttgctcccactctgaagcctagagatcctgcaattaatggtgtcttcctcagttttacagatagctaagctaagctgaaaccccaccaatgggatagagtcgatgttcttctttaatgatggtcaacactgattcaggctgccagcatccttcttcagagttctggggacataagtctgcttaaatcaactggcattctcttctgacctaactcatttagctacaaaagctagttcacatgttgcaggagattaagaaggaccggaggaggaggaactggatgaaagagtcrttttaataatttatcagaacacaaatgcaggcatccaaaagccttgaacacaataatgtaccctcctgcagatgcaaaaaaaatcttctgacgcacagccagcaggatatacttcagtagttcttctcataatcttaatggattgttctaagcaagtggttcccaa

SEQ ID NO: 606850 - DNA, 518 bp, Homo sapiens
gtcctcaaagaaatgtaaaaccattttcaaacattaaatttcttgtacctcttggggagggtaaggttttgcaatctggggctttttcactgtttaagcatttcccattaaaatacagctgccgtttttctcctttacaacatgcagaagaaaccacacaggccaggggttcgccttgtgctccagtcatttccattcacttcccatcccctggggatttcatggttctagggaggggcaacacattggaaacctaattcacctagcaaagcttcaggcagatagagaaaaagcaaatacattagtaaaagtgcctcatttattttgctgtatttagccacttgatggtcctcatgtggctgtcaagttccccaggtcacagaaacaagcatctagtgccagagtgctgcctgcagctccagggggccttctacacatgcaagcacacargcacccctcatttatacaggctcattcgtgcggctggaaggtggcagctcgcttagaccactgcagca

SEQ ID NO: 606851 - DNA, 644 bp, Homo sapiens
ttcattgatgggaaatgttggcaaattctgaatgaggtctgtgaattggatggtcatgttgtatcagcatcttttctggatttggaaggtttgtgattgttatgtaggagaatgtccttgatgtggtgaagtatttaaaggtatggggtatcaggtccacaacttattctcgaaagttcagaaagagactaatgctaatgggttgatgtatatagagagagggaagacaatggaacaattggggtaaaatgttaacaactgaggaatctgaatacatggatatgggagttttttatacttttcttgcaatgtttctgtaagtttgaaagtgcttcaatataaatatttaaaatgtgtttataaaaycacaaagtgctggaattgctatccatgcccaccagactcttgataaagagcagggagctcttctcccctgtttgagcagagcctcctaaaaagttctagccattatccacttcagtgaaccaagcacatccccctcttctgctgactgctgcaaaacaccaaaccaaataaaacaaattttaaaatctctcacgagaataaatgagcacccgatactgctttggtaagagactataaagtaaccctttgtttacaatgttaaaagcaaacaactgatt

SEQ ID NO: 606852 - DNA, 398 bp, Homo sapiens
ttattgtttgttttgttttaactcccagattactaatgtggagatcactgtgccgattagaggattatgaaatgcttttatgttttacagcgacttgacattttaaaccaagatgtttaggaatctaggcttttcactgttattttccgagagttttttgtttgttctcagatccagaatatattttcctccagttcactcccagcagctggaaactctctgcgtagctgtccattaaggctgtggtmtcccctcttcacctccactcacttagggaccctcgttgtaggcagggatttccattctgtcccagatgacctagacgaaacacctgtaaatgggcaagttagggtagagctaacatatttctaaacagttgattctaaagtgagagagca

SEQ ID NO: 606853 - DNA, 567 bp, Homo sapiens
tgtggtatcccctcttcacctccactcacttagggaccctcgttgtaggcagggatttccattctgtcccagatgacctagacgaaacacctgtaaatgggcaagttagggtagagctaacatatttctaaacagttgattctaaagtgagagagcagcagaatatgtgggcagttctggctgactgagaagaaatggccctygtcttcttcttcccctgcaccttccagaggctgtgatgaagaaatgtaagccttaaggaactgaaagttctaatccagcttatccctatagtggggcctgggccctgaattggtgtttctttggctgctaagcatcaggaagcccagggcaggatgtgggctcattccagacaaggggcctggagcattaaactgtggacccactgccaaacaccagcaatacccgtgcagactagccttccctgcttacccttgcaacaatgattcagagtcaccccacactttgcacttggatatctgtgggatctggaacagagcctgtaccacctgagacatcttttttcccttttgagattataccagt

SEQ ID NO: 606854 - DNA, 563 bp, Homo sapiens
tattacacagacttggatagaatacagatcaaatcctgacccccaaaccacactacatccaggaaaagcctatatccctaacaacttgcctayaaaacccccagctctccttgtataaagggtcctggtattttctctggtcagtgatacagaagctagatcaaaactgctcaccatttcagcgtgtccctcagagggtaggatggagggcaaataaacttctcagcctcaaaatgtcttagggacaaggaactccaaatagggtatgggctgttggaagggcaagggaacaggatactattttccccattttctctctctatcccttacagtcctctctgttaacaacagtagaggaagagattggaacatacagccaggcatgactcctagagcagttgattgagcagaactcaacaagtattaactaaacagctatcatggacaaaaaggcactgagccgcatactattgaaaattgagaaatgaaaagtcagtagcagacaaaatgacccaagcacacagataaaataagcctgagagggacgctaaaagggagatgca

SEQ ID NO: 606855 - DNA, 563 bp, Homo sapiens
tattacacagacttggatagaatacagatcaaatcctgacccccaaaccacactacatccaggaaaagcctatatccctaacaacttgcctacaaaacccccagctctscttgtataaagggtcctggtattttctctggtcagtgatacagaagctagatcaaaactgctcaccatttcagcgtgtccctcagagggtaggatggagggcaaataaacttctcagcctcaaaatgtcttagggacaaggaactccaaatagggtatgggctgttggaagggcaagggaacaggatactattttccccattttctctctctatcccttacagtcctctctgttaacaacagtagaggaagagattggaacatacagccaggcatgactcctagagcagttgattgagcagaactcaacaagtattaactaaacagctatcatggacaaaaaggcactgagccgcatactattgaaaattgagaaatgaaaagtcagtagcagacaaaatgacccaagcacacagataaaataagcctgagagggacgctaaaagggagatgca

SEQ ID NO: 606856 - DNA, 563 bp, Homo sapiens
tattacacagacttggatagaatacagatcaaatcctgacccccaaaccacactacatccaggaaaagcctatatccctaacaacttgcctacaaaacccccagctctccttgtataaagggtcctggtattttctctggtcagtgatacagaagctagatcaaaactgctcaccatttcagcgtgtccctcagagggtaggatggagggcaaataaacttctcagcctcaaaatgtcttagggacaaggaactccaaatagggtatgggctgttggaagggcaagggaacaggayactattttccccattttctctctctatcccttacagtcctctctgttaacaacagtagaggaagagattggaacatacagccaggcatgactcctagagcagttgattgagcagaactcaacaagtattaactaaacagctatcatggacaaaaaggcactgagccgcatactattgaaaattgagaaatgaaaagtcagtagcagacaaaatgacccaagcacacagataaaataagcctgagagggacgctaaaagggagatgca

SEQ ID NO: 606857 - DNA, 609 bp, Homo sapiens
tacaacacacttatctctgggaattcactgctctattgggcatgggtctgattatctctctctaaagcagtctatcattcatagcacagaaggaacactaaacaaagacctctatatcaatttataacattctattctctttacagctcagatgatgtcacggcaatgttatcacactggaggttgggcaaggcccagaaacagtcatcactatgcaatgttgattttctgagggtgactcacaaccttatttccagctggtggcctgtttctggccttttctgctgacccataaaactaagcttccacctgggtgcatggctgtcaggaacagctggaacattatctggattctggtaccataggtcaaggataggtggcatttccctctatccagcataagatgagctgtttctcttttctaagtttgctatgtatgtagtcccccttctcagggtgaaagtggctggctatacagaaagrataaaagcaagatagatgaattgtgatcacaaatgcctactttatcacttactttgctgttttgctaaatggaaacatctgttaatattaaatatgaaaactcattttttgttttttttagggaca

SEQ ID NO: 606858 - DNA, 609 bp, Homo sapiens
tacaacacacttatctctgggaattcactgctctattgggcatgggtctgattatctctctctaaagcagtctatcattcatagcacagaaggaacactaaacaaagacctctatatcaatttataacattctattctctttacagctcagatgatgtcacggcaatgttatcacactggaggttgggcaaggcccagaaacagtcatcactatgcaatgttgattttctgagggtgactcacaaccttatttccagctggtggcctgtttctggccttttctgctgacccataaaactaagcttccacctgggtgcatggctgtcaggaacagctggaacattatctggattctggtaccataggtcaaggataggtggcatttccctctatccagcataagatgagctgtttctcttttctaagtttgctatgtatgtagtcccccttctcagggtgaaagtggctggctatacagaaaggataaaagcaagatagrtgaattgtgatcacaaatgcctactttatcacttactttgctgttttgctaaatggaaacatctgttaatattaaatatgaaaactcattttttgttttttttagggaca

SEQ ID NO: 606859 - DNA, 392 bp, Homo sapiens
tttttatgccttaaaactgtaaaaaataatgctgttccaccgtgcagagaactcacaacttacaaatggtttgggttgcactcatccatttgtaaatcaggtgtttaagatgtaggaacacacttcccccaaagaaacatgattataaatgagggttgtttgcaatgaaatataagaggtaacagtattattacagacacataatatttcagatatgtggtgggttcagtaggtttttgtgcgttatattaggaaggaaatccacctcaattcccagcacacagcaggtgctcagtaagagcttgcyggttgaataaatgaatgggcaaacgtggactgtgtgtgctgactcctgaggggcgggttgaggcctgaaggaatacaggggacag

SEQ ID NO: 606860 - DNA, 415 bp, Homo sapiens
tgataatatttggagaatgacagtttggatgatcatgttagtaacaattctaaggaatggaaataatccattccataattaaacagaaatcataagccgctataaaagtaaagtcataggaaaagaaagttgaaaatgtaaagcctcaaatggttttatttcatatatgaaaatccttgattgatttgttcatatgctgctgtggatcgactccacttacacatcccagttkagttgaaaggccactttagacagtgtccatttcattatcaacccacgttcgtgtttcatggggctgaccatgcttgtaggcttagggctgcattggtcatgactcatgactccaggtaggaagtgatttctggcccgtgtgtgtgtgtgtgtgtgtgtgtgtgtgtcatgtttactcagaaca

SEQ ID NO: 606861 - DNA, 465 bp, Homo sapiens
aaaattaattgtcaataaatataagcttggcagataaaaaattttgacacatgaagaccataagggaaaactataatcaggggtggggggtgcctaaagcaaaatccatctggccaaatatggctttcttacatcacttcctgtttaargcagagtaggctgccctggaaaatataattctttctctttctcttaatgcaaagaaaacctggtggggggatacggggcagggaatggtaagcaagtgcctccagccagaccttcattccagcccaggcctatcaggaactgatcaaggggagtacctagtacaaagagcttggagtggtcaggttacaacagatgctccttctgcttccttgatgagagaggagccaagccaattaatttatcatgataagacttttcaaagaatcactctgaggagagggggggcaggggccagttgtcttgtcagtagataca

SEQ ID NO: 606862 - DNA, 465 bp, Homo sapiens
aaaattaattgtcaataaatataagcttggcagataaaaaattttgacacatgaagaccataagggaaaactataatcaggggtggggggtgcctaaagcaaaatccatctggccaaatatggctttcttacatcacttcctgtttaaggcagagtargctgccctggaaaatataattctttctctttctcttaatgcaaagaaaacctggtggggggatacggggcagggaatggtaagcaagtgcctccagccagaccttcattccagcccaggcctatcaggaactgatcaaggggagtacctagtacaaagagcttggagtggtcaggttacaacagatgctccttctgcttccttgatgagagaggagccaagccaattaatttatcatgataagacttttcaaagaatcactctgaggagagggggggcaggggccagttgtcttgtcagtagataca

SEQ ID NO: 606863 - DNA, 465 bp, Homo sapiens
aaaattaattgtcaataaatataagcttggcagataaaaaattttgacacatgaagaccataagggaaaactataatcaggggtggggggtgcctaaagcaaaatccatctggccaaatatggctttcttacatcacttcctgtttaaggcagagtaggctgccctggaaaatataattctttctctttctcttaatgcaaagaaaacctggtggggggatacggggcagggaatggtaagcaagtgcctccagccagaccttcattccagcccaggcctatcaggaactgatcaaggggagtacctagtacaaagagcttggagtggtcaggttacaacagatgctccttctgcttccttgatgagagaggasccaagccaattaatttatcatgataagacttttcaaagaatcactctgaggagagggggggcaggggccagttgtcttgtcagtagataca

SEQ ID NO: 606864 - DNA, 608 bp, Homo sapiens
caagcttcagtccctggggcagtgcagggcggagatggggagaagtgactggactaagaggaggccctgcattcagggagcatttatcctcatcccatggcgtccttctagttgtccactgtgttcctgccacactggcctttttctgtttctcacacacgccaaactcattcctgccccagggcctttgcacgtgtttcttctgccagggaaagttctataaaatgggcacaacaagctgaagtgaggcccatgccagatgatatgcacagcacctaccatggcgcctgcaaaaagaagacttyttattgatgtcataggggccagggaaaatgtccccttcatcctctgaaggtctgctgaaaaaaaatcaactcacaaaggcagattaattggagaaaatgtacacacatttattaatgagtacacggagagaagcacagagtgattacctgccccccaatgagggctcagaaacttatatacctttttgaggttacagaaaaaatgggggcttggatcctggcaaaacaggttataggaggcgggagaagaggaatttttttttttttttttttttttttttgaggcagggtctcgctctgtca

SEQ ID NO: 606865 - DNA, 608 bp, Homo sapiens
caagcttcagtccctggggcagtgcagggcggagatggggagaagtgactggactaagaggaggccctgcattcagggagcatttatcctcatcccatggcgtccttctagttgtccactgtgttcctgccacactggcctttttctgtttctcacacacgccaaactcattcctgccccagggcctttgcacgtgtttcttctgccagggaaagttctataaaatgggcacaacaagctgaagtgaggcccatgccagatgatatgcacagcacctaccatggcgcctgcaaaaagaagacttcttattgatgtcataggggccagggaaaatgtccccttcatcctctgaaggtytgctgaaaaaaaatcaactcacaaaggcagattaattggagaaaatgtacacacatttattaatgagtacacggagagaagcacagagtgattacctgccccccaatgagggctcagaaacttatatacctttttgaggttacagaaaaaatgggggcttggatcctggcaaaacaggttataggaggcgggagaagaggaatttttttttttttttttttttttttttgaggcagggtctcgctctgtca

SEQ ID NO: 606866 - DNA, 548 bp, Homo sapiens
tatctattgtgaatccactcctgctccttaaagtgttccaacaggacccactacagctgtagtatacacctacatgttgacacttatagcataagtttgtcttgattctttaagacaaaaggcttctcactgagcctgaccttggagggtggaactgtgtcttattcacccctgtatccccagtccttaccacttagtaggtacaaaaagaagtatattggaatgaataatgacaagttagctcaggctaactacttcttgttatcaatcagaacgcttctaacccacacttaatttcagttcaatggaaacacaaaacaaatattagtcatgttaagataccttctggagaacgctcctcatcaaaaataattgactggagacaagccaagtcaggattctccctgggatcaatttctgatggcgctctcgwcataaatagggggaccttttcaaattcctgtaaatggttaagaatgaactacatgaataagcttttctactgagcagatccaattccatgactcattaccaaagtttttttactc

SEQ ID NO: 606867 - DNA, 583 bp, Homo sapiens
aattccttcaggtaaagcatcccaagaaaggttcccaacaagcttcacaggattagtggatttagcaggaccataaaaacctaaggtttaagaactcaccttgaatgggcctggagtaaagcctcattcggattcctctccttcttttctttcaagtggctttcctcacatccctctgttcaattcgctaaaaatgaaatttagatgcatcagctctagagacctggcttcctcttctattgcactagcctgctcctaaattattatctctggcctctatccaacccaagctcctgtgttaaggaataccagtggccagattcagttcaataamcatttacaaagtacatgcctagatgtcagacccagtggcagcagcagtttaaatttacttcctgtatgtacccaaggaactcacagtctactgaggggttgaggggtacagacaagtaaagagccagtataacaggtggattatgtactactctggtcgtgtgatccgagtgctacgaaacatagcctgggtgacagaaaccctgtctctatagattttttttaaaaagtataaccaccctagtgggta

SEQ ID NO: 606868 - DNA, 583 bp, Homo sapiens
aattccttcaggtaaagcatcccaagaaaggttcccaacaagcttcacaggattagtggatttagcaggaccataaaaacctaaggtttaagaactcaccttgaatgggcctggagtaaagcctcattcggattcctctccttcttttctttcaagtggctttcctcacatccctctgttcaattcgctaaaaatgaaatttagatgcatcagctctagagacctggcttcctcttctattgcactagcctgctcctaaattattatctctggcctctatccaacccaagctcctgtgttaaggaataccagtggccagattcagttcaataaacatttacaaagtacatgcctagatgtcagacccagtggcagcagcagtttaaatttacttcctgtatgtacccaaggaactcacagtctactgaggggttgaggggtacagacaagtaaagagccagtataacaggtggattatgtactactctggtcgtgtgatccgagtgctaygaaacatagcctgggtgacagaaaccctgtctctatagattttttttaaaaagtataaccaccctagtgggta

SEQ ID NO: 606869 - DNA, 583 bp, Homo sapiens
aattccttcaggtaaagcatcccaagaaaggttcccaacaagcttcacaggattagtggatttagcaggaccataaaaacctaaggtttaagaactcaccttgaatgggcctggagtaaagcctcattcggattcctctccttcttttctttcaagtggctttcctcacatccctctgttcaattcgctaaaaatgaaatttagatgcatcagctctagagacctggcttcctcttctattgcactagcctgctcctaaattattatctctggcctctatccaacccaagctcctgtgttaaggaataccagtggccagattcagttcaataaacatttacaaagtacatgcctagatgtcagacccagtggcagcagcagtttaaatttacttcctgtatgtacccaaggaactcacagtctactgaggggttgaggggtacagacaagtaaagagccagtataacaggtggattatgtactactctggtcgtgtgatccgagtgctacgaaacayagcctgggtgacagaaaccctgtctctatagattttttttaaaaagtataaccaccctagtgggta

SEQ ID NO: 606870 - DNA, 551 bp, Homo sapiens
gtgctttttggccatttgtgtgtctttggagaagtrtctattcacatcctttcctcatttaaaaaactgagttacctgtcttattgagatgataagagttgtttatatgttgtagataaaagtcccttatgacttaccaatattgtcttccattctgtgggctttttcacttttttttttttttttttttttgtagagatgaggtctcactttgttgcccaggttggtctcgaattcctggcctcaagtggtcctcctgccctggcctcccaaaatgctaggattacaggtgtgagccactgcatctggccccttttcacttttttcttcacatttatcttttcatttttttgatggtatcctttgaagcaaaaagtttttacttttgatgaagtgcaatcaatctacttttccttttgttgcttgtgctttgtgtcatatccaagttcatgaagattcatatctatgttttcttttaagagttgtatagtcttagctcttacatttgggtatttgatctactttgggtaacttttttatatagtatgagg

SEQ ID NO: 606871 - DNA, 551 bp, Homo sapiens
gtgctttttggccatttgtgtgtctttggagaagtgtctattcacatcctttcctcatttaaaaaactgagttacctgtcttattgagatgataagagttgtttatatgttgtagataaaagtcccttatgacttacmaatattgtcttccattctgtgggctttttcacttttttttttttttttttttttgtagagatgaggtctcactttgttgcccaggttggtctcgaattcctggcctcaagtggtcctcctgccctggcctcccaaaatgctaggattacaggtgtgagccactgcatctggccccttttcacttttttcttcacatttatcttttcatttttttgatggtatcctttgaagcaaaaagtttttacttttgatgaagtgcaatcaatctacttttccttttgttgcttgtgctttgtgtcatatccaagttcatgaagattcatatctatgttttcttttaagagttgtatagtcttagctcttacatttgggtatttgatctactttgggtaacttttttatatagtatgagg

SEQ ID NO: 606872 - DNA, 551 bp, Homo sapiens
gtgctttttggccatttgtgtgtctttggagaagtgtctattcacatcctttcctcatttaaaaaactgagttacctgtcttattgagatgataagagttgtttatatgttgtagataaaagtcccttatgacttaccaatattrtcttccattctgtgggctttttcacttttttttttttttttttttttgtagagatgaggtctcactttgttgcccaggttggtctcgaattcctggcctcaagtggtcctcctgccctggcctcccaaaatgctaggattacaggtgtgagccactgcatctggccccttttcacttttttcttcacatttatcttttcatttttttgatggtatcctttgaagcaaaaagtttttacttttgatgaagtgcaatcaatctacttttccttttgttgcttgtgctttgtgtcatatccaagttcatgaagattcatatctatgttttcttttaagagttgtatagtcttagctcttacatttgggtatttgatctactttgggtaacttttttatatagtatgagg

SEQ ID NO: 606873 - DNA, 581 bp, Homo sapiens
tcactagtgacttagatacatcccctccccctgctggggcctcagtttccccatctgtaacttgagaaaatagaactagatctgtaaagtctggaactagatctgtaacgtccttataggtgtcactagggggttccatgagaggtgtgtgacaggcagtctgattcctctcattctccatagtctgtttcctggaaagtcgatgtaattaactgatggcccaaaaactacctcaagagacctggccctgttaagacggcttaaccactgagatcccgttctattgatttaataaagtcaaactattggaatgggccttgcacattaatttgaaacaatgataacatctgccattttaacagtgcaacagctttctactccttttctttcctttttgactgttcccacacacccayccctaacataaaaaatcaggtggttaggaaaatgtggtttaaaccatttcttcccccaagtatcggggcagcaggcttcaactgccacggtgaccttatcgtaggtacagagttggatcctagagccaagatggggtgaatattaagagctggtctcttgtgtcc

SEQ ID NO: 606874 - DNA, 571 bp, Homo sapiens
caacataacccgggcatggtggcacacacctgtagtcccagctacttgggaggctgaggtgggaggatcgcttgagcccaggaggtggaggttgcagtgagctgagatggcaccactccactccagcctgggcgacagagccagaccctgcctcaaaaaataaagagaggcggagttcttgctrtgttgttcaggctggacttaacccctgggcttaagcaatccttcaaattcagcctcccaagtagtgtgccactttggctaaaaaatttttatttttattttttggccaaataattttttaactttaaatatatgccccataagcttgcttgtttatgggaggttagcctaatgtaagcacttttaaaaaccagattccaggaatagagagccagttaattttacttttgattaatgttcaaggcctagactgacttgaggatgatatagaatcctggagctttagagtttaggtaaacttgaagctggccttggctctcagctgggaagtgggcctggagcaggaatgaacctgccacatgtcatctgactcgcaagacacccgagg

SEQ ID NO: 606875 - DNA, 377 bp, Homo sapiens
tacccaattacctaggctcagaattctgttattgagccatgtgggtccatagagatctaccttttctaccatttcatatgaccagaatgacctctggtcattgctgatgatatatgacatttctggcacataacagctaaaatgatgattaaaaacagtaataataacagaataccatcactacccaaaataatatccaacatttaaatagcactactgtgtgtrtgctccaggtgttatttaaaaacattccttacgttaaaccatctaaactatataatagccctataaggtaggaaatattttaattctccttctactagtgaggtagctaaagcacaaagagatcagcaagttgtccaagtcacataactgtc

SEQ ID NO: 606876 - DNA, 474 bp, Homo sapiens
cagggttgcactagacagagttacccagtcatttattcatttagtttaaacagatacattgagtgtgaaccttgaaaacattacactacgtgaaagaagccagtcacaaaagactgcatattgtatgatgttatttatatgaaatgtgtagagtaggcaaatctctggaaatagaaaggggatgaggctttagccagttacagcctctcccaggctggacccctgaagagctgactcagggcatccgaggaacaagagcctggatgagattctgttccctgtatctccttttatgtttatgcctgtcctctgagaaatatcagtggcttccaggtgctttagcrggctgggagatattgagaagttactgccaatggatacaggttttctttgtgaagtaatgaaaatgttctaaaattatggtggtgattgtccaactctgtgaatatactgaaaaccattgaatttacactt

SEQ ID NO: 606877 - DNA, 255 bp, Homo sapiens
ctagtccagattgtcaattattttgtttggtgggatgaattttccagatmatttataactatgctttctaaatccctctcccataccaattccctgccaacattgtctgtgtacctctcttatatgcaatatctatgcacttacttcttaatcaaaaccaagactgaacccatcgtttttcatgacccagacagcactatttataggctatcatgggagaaaattatgttaattacatatgatcactacacacac

SEQ ID NO: 606878 - DNA, 255 bp, Homo sapiens
ctagtccagattgtcaattattttgtttggtgggatgaattttccagataatttataactatgctttctaaatccctctcccataccaattccctgccaacattgtctgtgtacctctcttatatgcaatatctatgcacttacttcttaatcaaaaccaagacwgaacccatcgtttttcatgacccagacagcactatttataggctatcatgggagaaaattatgttaattacatatgatcactacacacac

SEQ ID NO: 606879 - DNA, 606 bp, Homo sapiens
ccaaatctcaatccttcatgctgcccataactgctgatcagtaggcttttattttttcagtgttcaattctccagctatatctgagaattcccagaaaatacataattttggggaaccatcagtttttggtgatctcttcgtcatgtataatcaggggctctgtggaccatctcctctgttgtccactgttactttcatcatttcccgtgctggccttgccactgctgtccttctcttgacatctctttctctctcccagtctcccgtgccctcttctctctggccagtatatccacatgtccagttctttcagagaggactccctcagctctgccatgtgagctcttagatacaattctagcatttctaccactgccttaccctcccagagctcacaggtagcctgggaccaaagggggactgcatggaagggtagcaagtaccactgggcattatgcctggagctcctgctcctctgactccagaagctactgctcagttgacctgctctagatacrtttctttattcctggtcatctgctctcgggggaccagttgagagtccctagtgtcctgcatccttcagggttctccagttctttaga

SEQ ID NO: 606880 - DNA, 401 bp, Homo sapiens
agatctcgttttcactttggcctttgatcacgcccggagtgggtggcgggtgggccagggaggtgtggggctgtcaggggcattggggagagtgaattccaaggtgacaccctcccmactatgtacaagtatctgctgcctggagaaacactctgaggacaaaagaccagggtggcggcgagtgagtgatctaaggatagggcccccacccagcattgcccctgtctcacccattgggtcgtttccttttctgttttccaaatgaaaatagctttgttgggtttctcccctctgaggattaaagatgcatatgtttgttgtatagggttcagacaatacagagaaaaaggtccccaaatcttttttcctcgtcaccaacactgggcgaaggggtgacaggg

SEQ ID NO: 606881 - DNA, 400 bp, Homo sapiens
cacgcccggagtgggtggcgggtgggccagggaggtgtggggctgtcaggggcattggggagagtgaattccaaggtgacaccctccccactatgtacaagtatctgctgcctggagaaacactctgaggacaaaagaccagggtggcggcgagtgagtgatctaaggatagggcccccacccagcattgcccctgtctcacccattgggtcgtttccttttctgttttccaaatgaaaatagctttgttgggtttctcccctctgaggattaaagatgcatatgtttgttgtatagggttcagacaatacagagaaaaaggtccccaaatcttttttcctcgtcaccaacactgggcraaggggtgacagggtctgtgcatatatctgcacaaagatct

SEQ ID NO: 606882 - DNA, 596 bp, Homo sapiens
acccttcctgggagggctgactcttgagtccaccatggaggttatgaggggaagcacattccaggccaaggaaactgacagggcagggcacagaggcaaacacggcccatggggaattgcagtcatctgggccagagctcaggggtctcagcaggagtggtagggaaggaaagactttagratcccatcatccccgtgcctatcgccagcagcagtgctggccttcgattcagaaaccccagagagcagggatcttccacatgacaactggtccccaggggaaaataaacctataaggtcctttcgtactggtcatgtaggaggacaagatggtgttgttgaaggatgatgaaggtggtgatggtgatgactgagaaagatgaggagggagaataggagggtgatgacgatgatggtggatgatgatggaattgaagatggtagttgtctcgggtgagcagtgactatctgagaccggcatcacgagggcagtaagaagactttaccaagacaactgtaggtaaagaaaggcagacatattagagaaagtatgaaaagacgctgcaagagtgcaatgggcagaccaggaagagagg

SEQ ID NO: 606883 - DNA, 541 bp, Homo sapiens
caaccacctcggcctcccaaagtgctgggattacaggcatgagccaccgctcccagcccccgtggttttaattgttactctttaatgttaagtaaaatatcaaccaacattcacattggatctgcacttgtttgtcaattgcagccacagattggttccagttacatgagtttagcaaaattgaagcactctgtgagaatcagttggctatatgaagtttacttttttttttgaaacagtctcactctgtcacccaggctggagtgcagtggtaagatctcagctccctgcaaccttcgcctcctaggttcaagcarttctcctgccttagcctcccgagtagctggcattacaggtgtgcaccgctatgcctggccaatttttgtatttttagtagagacggggtttcatcatattggccaggctggtctcgagctcctgacctcaagcgatcctcctgccttggcctcccaaagtgctgggattacaggcatgagcagctgtacccaacctgaaatttacaatttatcatttgtaagtt

SEQ ID NO: 606884 - DNA, 628 bp, Homo sapiens
agcttaggtatcactcagtggttccccgccctcagcggcttggattcttatcttttatgcccccacgactccgcatgaagtccaaaggctgtgttgcatttattgtacttttctcctgctacacagagcagctggagctggtccagtttctcttttgggctttccttcttgagcacaaagcctttcacgcccttcagcatccaggctcattgtttgtccctggttgaaggtcctgacttactagtgttttttttgtttgttttgttttgtttagaaggcgtctcactctgcagtccaggctggagtgccatggcacaatcttggctcactgcaacctctacctcctgggttcaagcaattctcctgcctcagcctcctgagtagcacgtcaccacacctggctaatttttgtatttttagtagagatgggttttcgccatgttggccaggctggtctygaactcctgacctcaggtgatctgcccacctcagcctcccaaagtgttgggattacagacatgagccaccacggccagcctcccagataccttttattcagtttcttagttgtaatcctcccaattactatgtaaccagagaagcagtgtggttgggaagtgctttcttc

SEQ ID NO: 606885 - DNA, 628 bp, Homo sapiens
agcttaggtatcactcagtggttccccgccctcagcggcttggattcttatcttttatgcccccacgactccgcatgaagtccaaaggctgtgttgcatttattgtacttttctcctgctacacagagcagctggagctggtccagtttctcttttgggctttccttcttgagcacaaagcctttcacgcccttcagcatccaggctcattgtttgtccctggttgaaggtcctgacttactagtgttttttttgtttgttttgttttgtttagaaggcgtctcactctgcagtccaggctggagtgccatggcacaatcttggctcactgcaacctctacctcctgggttcaagcaattctcctgcctcagcctcctgagtagcacgtcaccacacctggctaatttttgtatttttagtagagatgggttttcgccatgttggccaggctggtctcgaactcctgacctcaggtgatctgcccacctcagcctcccaaagtgttgggattacagacatgagccaccacgsccagcctcccagataccttttattcagtttcttagttgtaatcctcccaattactatgtaaccagagaagcagtgtggttgggaagtgctttcttc

SEQ ID NO: 606886 - DNA, 599 bp, Homo sapiens
tagtcagttcactttctgagcctcagttttgctgtttggaaaccggagtgaatggcccagcaacctctgatccaggaggacacctgggccatcccatgcagatgggatgttcagaatctctcatgcagccwggggagaacctctctcttctgagggtccattatcactagcccagcccagccccggcccaccgcccaacacctctgctgctcacaggtctggtgtctggggctgggggctgccagagacattaagccaagccaggtgggaggacaagatgggacgatatggacagaagttcattcccatgcaggcagccagagcccacctgtaacctgctccacagatgacctcccacctgttcctggttcctttcccaacaaccaggctgagccgttccagatcccagatggaaaagccctcagaacagtggttctcaaagtagcgtcccggaacagcagcccttcccacccccccacccccacctcgtgcttgttagagaaatgcaaattatcgggccccactccagacctacagatccggaaattcagggggtggggctgggcaggctgcaggactgaagccatccagggggttct

SEQ ID NO: 606887 - DNA, 582 bp, Homo sapiens
cgtgctgatcttcctccacaccctgagccgtatcctccaaccacctgggctttcatttacttagtattttcccttaaatcgctgcccttctttcacttacgtagatagtacctaagcaaaaatgtccctgaaattgtgaatttgatgtgctagttacatctatctgctctaatacacaataaaacaaatctaaaactattaaggcatttaaaaaggtgaagatcatcacgccagcctcgcatgcttctggaaatcctgcctccatcccccttccctggcagagaagatgaaggtcaggaggtaaggtggcctgtccgaggccrtggggttggtgagagtcctacctgactggtctgcctccgaggccagcattggatctgccacgagtcatttccagggctggcttcttggctgcgcagtttcaggctttagaggagccgcctggggctctgtgagcacaccaaggagaggggctgaattccctggcagtgcgggtgggtggaaagaacacagacttggaatcagtcagacctgagatcagatcctggctgcactaactaagagtgtgatcgtgggcaagca

SEQ ID NO: 606888 - DNA, 568 bp, Homo sapiens
ctatggccacctgtggctcctgacaccggtctcccatgtctgaatgccctacaggtaaaaggtgcacaggactgctcagctttggtgcaatyaaaggaatgtgaaatatctcatgcatcattttacctctgactatgggctgacaggataatattttggagctattaatataatagctataatattttaaagctattaaacatggctttaaaaaaacatgttgttaaaattaatttcacttggtacttcttactctttttttttttttttttttttttttttgagacggagttttgctctgtctcccaggctggagtgcaatggcgcggtcttggctcactgcaacctctgcctcccggttcaagcgattctcctgcctcagcctcctgagtagctgggattataggcatgcgccaccacaaccagctaattttatattttttagtagagatggggtttctccatgttggtcaggctggtctcgaactcctgacctcagatgacccgcccgcctcagcctcccaaagtgctgggattacaggcgtgagccaccatgcctgctggtttt

SEQ ID NO: 606889 - DNA, 593 bp, Homo sapiens
cctaggcctctacccccaccaaagtggtatcagagaagactcaatggagagccaggactttcatacctgccaggtagtagtaccccctctctcaccccaatcctggagtcagtggaggccacattagaattgtggacttccacccctgcccattggtaatgaggcaccccctaccctccctactggtgtggtattagaggagactgagtggaaatcataaccttcctcatagtcatgaagccttctccagctccagtatcagtggagactatgtggggagcaatcatgaggtaccccttccctcccagctggggctgtgtcaatggagatctagtgaagagcctgaaatcccacctcttcccaacagtagcaagccatgtctctcayttggggtgtcaaatgaggatgagcggggaacctgagctctcatttgcctggcagtaatgagaagtcatttcccttcccccacgggcatggtgtcagatttaaacaagatgtagaatctcataacacccaaaatgttcaagatataactgaaaatcattcatcataccaaaaaccaggaagatctcaatttgaatgagaaaaaacaa

SEQ ID NO: 606890 - DNA, 620 bp, Homo sapiens
gacacagatgttggaattatctgacaaattttaaagcagtcatcattaaaaaaaaaatcattgaacaagcaattccaaaacatttgagacaagtgaaaaaatagaaagtctcaggaaacaaaagatataaagragagccaaatggaaaattttagaattgaaaaatataataaacaattttttaaaaatacaatgaatgggctcagcagcaaaatggagaataaagaagaaacaagcaatgaatttgaaggtagaacaatagaaattacctaatccaaagaagagagaagatagactgaaaacaaatgagcctcatggacctatgggactataccagaagatccaacattcaagtaatcagaatcctacaaaaggagaaagaggatggagctgaagaagtattcaaagaaataatgactgaaaatttcccaaatttggccaaagacataaacctatagattaaagaagccaagtaaaactcaaagaggataaacctaaagaaacccacattaagacacatcacaaccaaacttcaataagctaaaaacaatgaaaaaatattgacagcagtgagagaaacaacaccttatctatggggggaagaaatagcttgggcaaca

SEQ ID NO: 606891 - DNA, 596 bp, Homo sapiens
ttttagaattgaaaaatataataaacaattttttaaaaatacaatgaatgggctcagcagcaaaatggagaataaagaagaaacaagcaatgaatttgaaggtagaacaatagaaattacctaatccaaagaagagagaagatagactgaaaacaaatgagcctcatggacctatgggactataccagaagatccaacattcaagtaatcagaatcctacaaaaggagaaagargatggagctgaagaagtattcaaagaaataatgactgaaaatttcccaaatttggccaaagacataaacctatagattaaagaagccaagtaaaactcaaagaggataaacctaaagaaacccacattaagacacatcacaaccaaacttcaataagctaaaaacaatgaaaaaatattgacagcagtgagagaaacaacaccttatctatggggggaagaaatagcttgggcaacaatggtttatcagaaatcatggaggccagaagaaagcagcacaaaacttttcaagtattaaaaaaaatagtaattgtcaacccttaattctgtatctggtgagactatccttcaggaatcaaggaa

SEQ ID NO: 606892 - DNA, 610 bp, Homo sapiens
tcacttctctgtgtcttcatttccttatctggagaatgggactaaatgaggaccaacctcattggttgctgggaatattaaatgaaattctgactggcaggtgcctggcctaaaataatggctgaggagtcagcatccccatttagcagatgaaaaaactgaggctcggacaggtgacgtgactttaggagtacacttcatctaacagcagcaaagctatacataagacagcaaactcatcgtgcactgagcacatgctacacatacgtggactgagcttctccccaaaacagccctatggggaggtgctattattatccccatctgacagatgaagaactcattttaaagggrctaagtgactttcttaaggcacacacttgggaagcggccgagccaggatttgaacccaggcatctggcttcagagtctgagttctttgccacccctacaaaacaaccaggaccaatagactgagactgcagtaagcaggagttaagctagacgcgagtcaggaagtatgccccttcggcttgccaccattctttagaatcccagtcaccttccaccttacctctctttggctgccactgtgctgtgtgatcttggc

SEQ ID NO: 606893 - DNA, 625 bp, Homo sapiens
tacgcacctgtgatttgcaaggctgagatgggaggtttgcttaakcaaggtggaggctgcagtgagctgtgatgacgccactgcactccagcctgagcaacagagtgagaccctgtcttaaaaaaaaaaaaagaaagaaagaaaaaaaagcagatacagggaaaactctcggcaaactctcagccctccctctattggcctaaaagcagaacatagatttacaaagacaaaaggtatcctgacccccttctaccaggaagggcaaaggttaactgttgaagacaactatagatgcctatcacctggaggtgataccagagggatggggactaatgagctttactaaccttgatctgccagctgttaccttcccccaagttgctgcccctcaagactcaaagttcttttcctgtgtcttgtcacttctccagaaattgactgttctttattgaagatattctatgagctggaattcaaaccagctctccgagaactactcatcccctggctgtctcccatatggatatgaaatatccatgttaataaactttggtttgttttctcttgttaagctgtcttttgtaacagcagttctttccaagaacctataagggttgaagaaaag

SEQ ID NO: 606894 - DNA, 560 bp, Homo sapiens
aactccactgcagataggtgcagcccataacacggggctccttctccccttaactccaagttggaagcctacagtatcttctcaggaagaacaggacataagcatttctcatcctgtccaagcttactgttgcagatgctaagttttaggtgagtatagctgagagataggggatcccttcttcttcccagccctcaccagtgagatggccactctaacttgggtgtggcaagctgacaaatcctaggtccccaactactctcaccctggctcattcataaagcagaggttccacaccaggagaggcaagctgagaagaccagaggttacagccagccyccacttcagcaagcacccaactcctaaagtaagggtcttactgagagaaaagcatgccactgtccccatccctagctccagatatttcacccatggggagagacagaccatgaaacagagagttctgaagcttgtctaaaagaactgacttcatttgcaacagcatgtggggaagttaaagtctaagggcactctcaaaaacaatagaggttgtggtgaaa

SEQ ID NO: 606895 - DNA, 489 bp, Homo sapiens
aataaaaattagcaaacttgaaggtagattgacagagattatgtaatctaaagaacagaaacagaagaaaagaatgaaaaaaatgggcagagtctcaaagaagtgtggaacatcattaagtgcatcaacatatgcataatgggagtgccagaaagagaagagmcaaagaaaagcacgaggaaaggttcaaagaaataatgtcaaaaaaactttgtgacttgattttttaaaactttaatgtacagatttataaaactcaaaaaagctccaagtagaattaatgcaaagtagtaaaaatgctgaaaactaaaaagaagaaaagaatctcaaaagcggcaagagaaaaaaaaaaaaaaaaaacaagaatcatcacttgcaagggagccaaataagattaacagctgacttcttattagaaacagtggaggccagaggcagtgggataacatattcaaagtacttaaagataactcccaaccaagaatacta

SEQ ID NO: 606896 - DNA, 614 bp, Homo sapiens
aaacaacagcagcagtgtataaactatgagaggtatgactcacttttgtgtttttaaaacactttgagcactaaaccgagatccatgaggacagagcatttgtcctatctactgttgtaccttagcttctagaacaatgcctggcacatagtaggcactcaataaatatttgttgatatatttacccactcattcattctataaacattactgagcatctcctatgatccagacgctgtgagcacagacagaaatcaaggatggcagtgggagggaggtgccagaggcgaggctgagatgaaaggtggagacttctccaggaggcctggccccctcactgccccaggcttgattttaaccctgaagagctacttgaaatctctacgcaaaggaagaggcatttgaaagtcactgcctcccacattatgtagtcattcaaaaagtttttgttacccagcmctaaacccaacaaggatgccagagagcctgactaggtactctcttctttgggaacttttggcttttgagtacagcccattcagatcattccatctgctccctgcaccttagagttagcataaactgggttaataagtacctaatctaggtgtttt

SEQ ID NO: 606897 - DNA, 489 bp, Homo sapiens
accacgcccagctaatttttctatttttttagtagagatggggtttctccatgttggccaggctggtctcgaactcctgacctcaggtgatctgcctgcctcagcctcccaaagtgatgggattacaggcatgaaccaccatgcttggctgttttgggtttgtttgtttgtttgtttgtttgtttgttttgagatggcatctcactctgtctcccaggctggagtgcagtggtgggatctcagctcactgtaacctctgcctcccgggtttaggtgactctcgtgcctcascctcccaagtagctgagattacaggcatgcaccaccacacctggctaatttttgtgtatttagtagagacgggctttctccatgttggccaggcttgtcttaaactcccaacctctcaggtatgagccaccacacccagccctatttatttgttttgttagagtggcgtcttatcagactttaccctacggttcatat

SEQ ID NO: 606898 - DNA, 577 bp, Homo sapiens
atcgatatagccaaacttagctttggtttagggaaggatgcgttttattgtaaatgtaattacaagtattaagaggcttgggaaagaaaactkcagttatttatttttcttttatacatgtgtttatttgaaaattgttgtttttagtgaaacataacaatgaaaggtcttaagaaaaaccttgtctttatttgtaattttttgcaattccttaaaaatgtggatattttcccagcactttgggaggccgaagcgggtggatcacgaggtcaagagattgagaccatcctggccaacatggtgaaaccccgtctccactaaaaacaatacaaaaatttggtgggcgtggtggcgcactcctatagtcccagctacttgggagactgaggcaggagaatcgctggaactcgggaggtggaggttgcagtgagccgagattgtgccattgcactccctcctggtgacagagcgagactcaaaaaaaaatatttttacagcatgggagattaactttatttacagctcaaaagctgtataaagaaaaactctgggtcagctgtggtggctcatgcctgta

SEQ ID NO: 606899 - DNA, 577 bp, Homo sapiens
atcgatatagccaaacttagctttggtttagggaaggatgcgttttattgtaaatgtaattacaagtattaagaggcttgggaaagaaaacttcagttatttatttttcttttatacatgtgtttatttgaaaattgttgtttttagtgaaacataacaatgaaaggtcttaagaaaaaccttgtctttatttgtaattttttgcaattccttaaaaatgtggatattttcccagcactttgggaggccgaagcgggtggatcacgaggtcaagagattgagaccatcctggccaacatggtgaaaccccgtctcyactaaaaacaatacaaaaatttggtgggcgtggtggcgcactcctatagtcccagctacttgggagactgaggcaggagaatcgctggaactcgggaggtggaggttgcagtgagccgagattgtgccattgcactccctcctggtgacagagcgagactcaaaaaaaaatatttttacagcatgggagattaactttatttacagctcaaaagctgtataaagaaaaactctgggtcagctgtggtggctcatgcctgta

SEQ ID NO: 606900 - DNA, 577 bp, Homo sapiens
atcgatatagccaaacttagctttggtttagggaaggatgcgttttattgtaaatgtaattacaagtattaagaggcttgggaaagaaaacttcagttatttatttttcttttatacatgtgtttatttgaaaattgttgtttttagtgaaacataacaatgaaaggtcttaagaaaaaccttgtctttatttgtaattttttgcaattccttaaaaatgtggatattttcccagcactttgggaggccgaagcgggtggatcacgaggtcaagagattgagaccatcctggccaacatggtgaaaccccgtctccactaaaaacaatacaaaaatttggtgggcgtggtggcgcactcctatagtcccagctacttgggagactgaggcaggagaatcgctggaactcgggaggtggaggttgcagtgagccgagatygtgccattgcactccctcctggtgacagagcgagactcaaaaaaaaatatttttacagcatgggagattaactttatttacagctcaaaagctgtataaagaaaaactctgggtcagctgtggtggctcatgcctgta

SEQ ID NO: 606901 - DNA, 557 bp, Homo sapiens
ctttttggttcccttttttcttcaatcattattctctctctctccctttctctctctctctctctctctctctctctctgtctctctccttgtctgtctagtaagtcattcttattggcatatcatgttctagtacctcctatatttaaaaacaagcaaaagccttaacatcacattctttcttagctgataccttgattttctaaggttgtctacatatgtccatatttcttctccccatttgctcatttctccctattattttacattttaattgaacacacagaaaaactacataaccatcaccactattcaaggttcttacgggcatccctcagattctgtctccctacatcccctccaaaggtaaccactatcctaaattttgtttttttaatcactcgcttgatttttttcttaatcaratttgctatcagataacttacctgcagtaaattcacataatttaaaagtacatgctgggcatggtggcacatgcctgtagtcccagctacttgggaggctgaggcaggaggatttcttgagcccaggagttt

SEQ ID NO: 606902 - DNA, 632 bp, Homo sapiens
aattccatttgcactactggaaaacacctttaaattcctgatcctaataattacagttcagcagggccacattcatgtgtgaaatgtgatacagtctgcatatttttattttaaatatttctataaaaatcgacctattcacaattaccattattttgatgtgccttcagcttcaccatgttttaactcgttgcgggaaataatcgcattgaggaaaacccctctagggttgacatggatggcccttgaacagaaagcatgcctcaaaatgttaagagcatgactctcaattgagtgctaaagaatgtgtgttttctgaaaatcctgaaggcaaaggaccccaggacatccagcatctgccctgtagcccatctcccaggaatgagtatattctgaactaagggagaatgtcacaatcttttatcagcaatccgaagggcaggttaacacccacttccagttatgaagagtataagaacacaaagtgcyttatcactggagataaatataagggaatcttcagtttgtatggaaccgctcccctgcaaaaaagattcattacttgttgtatcataaaaccacacactattatctaccttttatgccattattcacattaatgaattgatgtt

SEQ ID NO: 606903 - DNA, 410 bp, Homo sapiens
ataaaatgctcttttttacttcatcaaatatttgctatcaaatatgacctggaaaatcccctttacccgtttaatctggccaaatcctactcattttttagcctcaaacctagaaattggtctatcagaaagtcatgttttgccaacagaggctgagatagggcctttctgtatcccagagaacagttacattatactgaaattgcctgtttaatctgtcacaatcactggttataagatcctatagagtaggaactgtttcttactcacatttctatcttcagcacctagactaaacctgacacatggtaggtgcataatgaataattggtgaatgaataaattagtcaagattgcttaacgacytgttttaaattttaagcttattattactcaggccctccaggcct

SEQ ID NO: 606904 - DNA, 441 bp, Homo sapiens
acctttggacttgaatggcaagtcttccctgggcctccagcctgccagccttccctgaagattttggacttgccaagtctccataatcatttgagctaattccttaaaataaatattaatctctcttcccccagggaacacacacctattgattstgtttttctgaagaactcttgactaatacagtttgtgataaggaagctgaggcatcagtgcatcagtgggaactaaaagggttacattaggaacttcctaatgcccctgaagtcacactccacaggcagccatggttggccagttcctttataggacatcaagtgtgggggaaaaaactaggtgccacgaggtacaggggagcctcatcctggcccagtgactatgatgtgaccttgggatagtcatcccacctctctgagccttgcagtcttttctggaaaacaa

SEQ ID NO: 606905 - DNA, 525 bp, Homo sapiens
taaagcacttaaaacagtatctgggccgggcgtggtggctcacgcctgtaatcccatcacttgaggtcaggagtttcagaacagactggccaacctggtgaaacgccatctctactaaaaatacaaaaattagctgggcatagtggcacgtgcctgtacttccagctgaaggaaggctgaagcaggagaatcgcttgaacctgggaggcagaggttacagtgagccaaattcacaccactgcactccagactgggtgatggagcaagactgtgtctcgaagaaaaagaaaagaactgtatctggcaygtagtaaacaccctataattattagttgttattggctgtggatggatgaatgagttttagatggatggatggatagatggaaggcatggagctgagcctggcgcctgttttcacactgcatgttactgggaatcagatcaaattcaactgattttcaaatgaaactcattaggcaagttttcacattagaataggttatattcaataaattgaggaag

SEQ ID NO: 606906 - DNA, 263 bp, Homo sapiens
cattattataagtttagttacatttacagatgtatacaaaaagtctagaaggatattcatgaaaatataacggtgattagctctggatgttgggattacaaattatatacttaatatattgtaattacatgtattttaattttttactataagcattttacttttataatcataaaaagaaagaaaakatttttttcataaaggacaacacatagtatttcctgaaagaaggagcagtagtatttagctacaaattaaagctt

SEQ ID NO: 606907 - DNA, 406 bp, Homo sapiens
cgcagcggcaagtcctccatccagaaggtgagcagggctgcgcccrgtcccccgccccctccccggttctcaggtggccggtagcggggacgcccgggagggcggcggccggggcccgcctgcgctccgtccctccgcactttctcttccactcttgcgagcgcacaggcgcggcccgcgcggggaccccgacctctgtgtccacgcccaagtcagctgaagccaagtggagcgctgaaggcgaaactggttgccgggaggcaggtgcccggtggcaccgcccaagacctccgccccctgggacccagctcctgtgtcatttacgaaactgagacgtactctccagttctcacttggagaacttcgtggactccctcccctggcccgttttgatttgttctcactt

SEQ ID NO: 606908 - DNA, 406 bp, Homo sapiens
cgcagcggcaagtcctccatccagaaggtgagcagggctgcgcccagtcccccgccccctccccggttctcaggtggccggtagcggggacgcccgggagggcggcggccggggcccgcctgcgctccgtccctccgcactttctcttccactcttgcgagcgcacaggcgcggcccgcgcggggaccccgacctctgtgtccacgcccaagtcagctgaagccaagtggagcgctgaaggcgaaactgsttgccgggaggcaggtgcccggtggcaccgcccaagacctccgccccctgggacccagctcctgtgtcatttacgaaactgagacgtactctccagttctcacttggagaacttcgtggactccctcccctggcccgttttgatttgttctcactt

SEQ ID NO: 606909 - DNA, 406 bp, Homo sapiens
cgcagcggcaagtcctccatccagaaggtgagcagggctgcgcccagtcccccgccccctccccggttctcaggtggccggtagcggggacgcccgggagggcggcggccggggcccgcctgcgctccgtccctccgcactttctcttccactcttgcgagcgcacaggcgcggcccgcgcggggaccccgacctctgtgtccacgcccaagtcagctgaagccaagtggagcgctgaaggcgaaactggttgccgggaggcaggtgcccggtggcaccgcccaagacctccgccmcctgggacccagctcctgtgtcatttacgaaactgagacgtactctccagttctcacttggagaacttcgtggactccctcccctggcccgttttgatttgttctcactt

SEQ ID NO: 606910 - DNA, 446 bp, Homo sapiens
catttcacgcaattactcaggcttcccattagatcytgacctgcctcgctggaccttgtctccttgctctggactctttgagttgtgctctgactttgatcccctctggcagttggtgtcttttgctttcccaggtgaacgaaccctagctctgtcttggcctccaaacctacccggttctagcccctccacaagtatctaccgcatcagccccaacgggcatgcagggagctagagaccatgaatgattaggctttatcataggagacacacagagtgtgaacagaaccatgttggagtcaaagacttagattcttccagacaatatctatgtcccctctccaagcctgtctctatctcccattagaaggctttgtgctggatgattgaaaaaagttctaggatacgaagacccccttctcactgcaggaattcctccctggaac

SEQ ID NO: 606911 - DNA, 446 bp, Homo sapiens
catttcacgcaattactcaggcttcccattagatcttgacctgcctcgctggaccttgtctccttgctctggactctttgagttgtgctctgactttgatcccctctggcagttggtgtcttttgctttcccaggtgaackaaccctagctctgtcttggcctccaaacctacccggttctagcccctccacaagtatctaccgcatcagccccaacgggcatgcagggagctagagaccatgaatgattaggctttatcataggagacacacagagtgtgaacagaaccatgttggagtcaaagacttagattcttccagacaatatctatgtcccctctccaagcctgtctctatctcccattagaaggctttgtgctggatgattgaaaaaagttctaggatacgaagacccccttctcactgcaggaattcctccctggaac

SEQ ID NO: 606912 - DNA, 633 bp, Homo sapiens
ggcacaatctcggctcactgcgacctccgcctcctaggttcaagctattctcctggctcagcctcccaagtagctgggattacaggtgcccgccaccatgcctggctaatttttgtatttttaatagagacggggtttcaccatggtggccaggctgatctccaactcgagacctcaagtgatccacccacctaggccccccaaagtgctaggattacaggtgagaagccaccacgcctgtccagtggtgaggattaaatgagataaaatgtgagtcacccagcttcatacctggtacatatcaaacccaataaatggtagctattattatttttattattattaccatgaattcatttgactctcacagtaaccccatgtggcrggtactcacttattcacatgtggacacttataatcataatagttaaaattgacagaagggaaggatgaggcttggcatggtttgttaggatctccctgaaacctgctcctgtatttctttctgcctttgcccagcaccactttgtcaagctccagacccatgaggctcctgcctttttcttttattgcacatgcccaggctcagcaatgctgggcctcatgcctgggtgacctccggctctcaggcca

SEQ ID NO: 606913 - DNA, 539 bp, Homo sapiens
gggtgttgttcctcaggatggctctccaggccttgtcttccccggtctgggccgtacaggtcaggtcagatgaaggcagttggggactggtggtgtgaacatcccttgatcccatcagtagccccctgggaaagccacgtagtacaaggatgtgagtggaattggtatctgccacatgtccctctgttaagatcacaatttccatgacagagtcgctctctaatggagcctgtcaactcggcttargccccagtggctcagagcacacttccacgagagaggcggtgtgggatctgaggcattaactgtgccttgtactgggaggaggcatagggcggcagaataccttttcgaagtccccttggaaaccagtacccggcacctatcatgcctgccatctaattacccggtaattattccacacagccatgcaattggccagggtcgcagggagcccaccaacagcccaagggggaaggtggctctctctaggggcctgcagctccagctctgggcgaacaagccgcctctgaagccgc

SEQ ID NO: 606914 - DNA, 539 bp, Homo sapiens
gggtgttgttcctcaggatggctctccaggccttgtcttccccggtctgggccgtacaggtcaggtcagatgaaggcagttggggactggtggtgtgaacatcccttgatcccatcagtagccccctgggaaagccacgtagtacaaggatgtgagtggaattggtatctgccacatgtccctctgttaagatcacaatttccatgacagagtcgctctctaatggagcctgtcaactcggcttaggccccagtggctcagagcacacttccacgagagaggcggtgtgggatctgaggcattaactgtgccttgtactgggaggaggcatarggcggcagaataccttttcgaagtccccttggaaaccagtacccggcacctatcatgcctgccatctaattacccggtaattattccacacagccatgcaattggccagggtcgcagggagcccaccaacagcccaagggggaaggtggctctctctaggggcctgcagctccagctctgggcgaacaagccgcctctgaagccgc

SEQ ID NO: 606915 - DNA, 588 bp, Homo sapiens
cagattcaaaaacagcaacaaacatagaatattaaacctcaaagttattctaggccatttaatcttttgctttacagataaggaactggtatcatcatgggtaaatgatgagtccatgaaggcaccagaacaaaaattctggtcacctgattcttactttgggggtaaatgtgaattctcaagcaaggagaagtatatggagaccttaacagttagcaaggaagatttctgctcatgctaccttgagtaacagggcttaataataaagctaaaacagtacctagaggctttgctgtcatgtccagcgatcctgtggcctctgctcacctgagcctgtctcctcctgtctctaggcaatgagactccaactgggtgcttgacttgggaagcctttggcacaaacatcatccatattggatcttattagttgtagccaaagtaagacagtttwggtcaatacataggactttgcaacctagagcaggcatatgcagggaaaacttcctaaggcttctgcagaagcaaagtgggccttcaggtaggtacaggccctttgagctttctggacctggtcagtatgggaaggaa

SEQ ID NO: 606916 - DNA, 581 bp, Homo sapiens
atagggcaatattttccatttaggagcaagagagaaaaagaaagtgtatytgaggtctgctatctgaaatctttataaaaacttgatccttttgaagggactttaacagaggcctgtaaaattcatgtttctagcagcattcttcaatggctgcgagtctgtattctatacatccagttcccaattattcctgttaatgggaggcagaccacaggggtaactgaaaacccacagtcaagagctgtaacatacccctccctcatgaaaatgttggaccaagtattaaataaatagaaagattggtttgcgatagagttgctaataaactgtgaaatgtccaaagtgcaggcaacttcagggcacgcaaaggacaccatctagctaatgactccctgaaaaatctcaaattgcacacattaagtggatacctttatgtgacaagagcttaatttgtacatttactccatgaattttggtatttaaaactctaacatttaatccatcagctaaaaaacctttactacttccatttcttcaatatgatatttcctctctcattaaaaaagttaaacaatttatgg

SEQ ID NO: 606917 - DNA, 534 bp, Homo sapiens
ctagtgcaatacaggaaaaacaattgcaaatcccaagtttaaacattctggaaagttaaaggcacaagacaacttttttgttacattgcaacaccttatcctaaatgartgtggcttcatgccttcatcaaaggatttggtggctaggaccgatgtgtctcaaggtgactcacataaagggggaggtggtttatgatgagatcatgtgtggcaatgtgaggtcttctggaactgggactgaggcatggaaatccatgaggaactatgcagatgggatcaactgtccactaaaacctcctgctcccttttttctcatataaagttgattctagaagacatacacccagctagatacatccagggatactcccggctccctatacatccagggatagctcatgtgactagctcttgtcaatggaatataagcagaagtgacatgtaccacttccagactgaggcttttaagaagtaattggcacttcttcgttttcttttttgtttcacctgcaagatacaccttacgagacacat

SEQ ID NO: 606918 - DNA, 534 bp, Homo sapiens
ctagtgcaatacaggaaaaacaattgcaaatcccaagtttaaacattctggaaagttaaaggcacaagacaacttttttgttacattgcaacaccttatcctaaatgagtgtggcttcatgccttcatcaaaggatttggtggctaggacygatgtgtctcaaggtgactcacataaagggggaggtggtttatgatgagatcatgtgtggcaatgtgaggtcttctggaactgggactgaggcatggaaatccatgaggaactatgcagatgggatcaactgtccactaaaacctcctgctcccttttttctcatataaagttgattctagaagacatacacccagctagatacatccagggatactcccggctccctatacatccagggatagctcatgtgactagctcttgtcaatggaatataagcagaagtgacatgtaccacttccagactgaggcttttaagaagtaattggcacttcttcgttttcttttttgtttcacctgcaagatacaccttacgagacacat

SEQ ID NO: 606919 - DNA, 553 bp, Homo sapiens
catagcctacttgagctaatatgcctggggtatgcagaacaggatgccagaaagatggcctgggctacagaaaatcaacgttagagacaggaaaaagtgaattttgtggaggcagggagtgggggaaatgttgattattacattgctttgcctgaagtctaggctacagtatcacagagctactacttggcacattcgccartatttctgttcatggtaacgtgaaatgatgcttccctttacagttatggagtggaaagtcttaattatttcttagtagtcgccagtagaaacacacctttctcccttaataagaattttagttggttaagtacatgatgccagtacatctaccagcctcttaatggaaatttcaagttgttacaaggttagtatcattatcttgttcaacaccccacttaatgtggagtgtgcattccacaacctgccaaaaagcatttagctgaatgaagttctttaatctacataattactatctactacatttactttatttttatttgatgtttcttttaaaggagtcactggaagt

SEQ ID NO: 606920 - DNA, 565 bp, Homo sapiens
gttttgttccttgtcttttcccctctatgccatctccccccaactcatcttcaaaccagattacagtgacrtttatctttgtctgttcatatgtgtataaatataaatatatgtgtatagacattcattcattcttgaaggggtgtcgtaacaaaaaccattggtttaatggggaaaaaagtgtaggactttggtcagatgccagtcgcaagtaccaggtccccaagtctgtccaacttggctacaatgttaggggttctcacaaccccctcctcagggtcagtaatttgctagaataactcacagaactcaggaaaatgctatacttactattacaaggtattataaaggatacaaatgaacagccagatgaagaagtacctagggtgagatctgaaagggttccaagcaccagagcctgtctctgtggagttgggatgtgccaccttcccagcacatggatgtgttttccaactcagaagctcttagactactgttgtttaggaggtcttgtggagtacatagccatgattgatcagatcattggccattggtgattgggttc

SEQ ID NO: 606921 - DNA, 605 bp, Homo sapiens
ggtgattgggttcaatctctgcccctttacctcctgcaagactggggggtggggctacaagttccatctctctaatcatggcatggtctttgtagtgaccagtccctgtcttaaagctatctagaagctcctcagcctaatgttatctcattaacatgaaaaagacacttacgtagatttcaagggttttaggagctttgtgctaagaacctaggacaaagaccagttattttttattataccrtacttgtatgcctgccagtggcacaaactgaattcaaagactggtcatgaatcttaacatcccttttgattgaatggttgcatcattgaattccaaattttcttgtataatctttcctagttcatgttggttcaaccaggaactaatcccaggttttaattgctctaatcaaaatcaccatgcaagagaatgttttcatttctagcagtccatagttctctgtcattgtcctctgaatcatctagctggtcaaaagattggagagtataaccatttcagatccataagaaatataagttcttctttatttgagggctgtttagaagaaagttaagaattcttctgtgtaggggtcaaaaga

SEQ ID NO: 606922 - DNA, 579 bp, Homo sapiens
ggggtgaagagaaccaggaagctaaactttaaaatggagaatcaaagaataagagagctgaacatactgacatactgattctttgaagagaaacttggggttcactatatttaacaggatcaaaggtaattttcttcttctttggtgggcctggactttagacagataaggaaacttcacagaacaacttcatactgtgttttgcgagaaagaggatcaagagatgggaagaaacaggggaaggtcggagagactctgaggctgcttcttcagcatgtcaaagtgccacagtttggggtatcagtttctgagccccagcacctgcaaaagtgagtctstggattgggattatatgtataatagtgacatgattaggcaaataaaaggctttaatttctgtgtttacatcgaagctgaataatcttggatataatgtaggcagcttgggtataatgtaggcagcttcatctcatgaccagctacaatgtcatttgttcatcattacatttaacaatgccaagagggtacagaaacatggattcccctcttccccagcatctctgtccctgcttggaactt

SEQ ID NO: 606923 - DNA, 611 bp, Homo sapiens
gggacataagttgaagaaaagaaagagaagacagaattagacaaccacaggtctagaactgtataatctgaaaggccctggagtgttagttagaaacrcaggtttccagtgcccaacctcaatgtactgaataagactttctagaggtgtgacctgagaatctgcatttaagtcaaattgtctaagtactctttataagactaagtttgagaaactctgctctaaggttatttcctccctgaagaataagtcctacctggagatactctccttatgtttattttctccttagatttctaggaaggtcttagggcccatattagggagtgagctagatgttagggaaaaaactcaatctgtgctttttaaaattttgccatctctcttacattttgtcacaatacagatttttaaaattatctcaacagattccaaatttccaatccaattgtttccttaacatgattattttctcagtagcttcatcatgagtttttcccttaagtttgtgaaagagaaagctagagaccatgtatttgcagttcatctgttatactgtaataactgagcatacatcttgtcttcttttgattttacttgtgttataactt

SEQ ID NO: 606924 - DNA, 399 bp, Homo sapiens
tgactgtcagtcatgatactggttatcatcttaaaatgctgcatgtaattggaatatctaaaatttcctcattatatggaacttttatgaaattttaaccgtggatattctaaatatttgtcatccatggttattgttttgaattattctctaaaagcatttgcaaccaatgacagwccaaacttgctttttatggaaaagactctagcaagtactcttgagcacagatttctgataactttaaaatcattggactgaaaacatatttccagaactctaataaagagattgatgggttcataaaactgctaatcaagatcaagcgaaacaaaaaattaattatgtaaaattaattaattaactgatcaaaataatgtttttatgatttatttaaaacac

SEQ ID NO: 606925 - DNA, 615 bp, Homo sapiens
ttataagactaagtttgagaaactctgctctaaggttatttcctccctgaagaataagtcctacctggagatactctccttatgtttattttctccttagatttctaggaaggtcttagggcccatattagggagtgagctagatgttagggaaaaaactcaatctgtgctttttaaaattttgccatctctcttacattttgtcacaatacagatttttaaaattatctcaacagattccaaatttccaatccaattgtttccttaacatgattattttctcagtagcttcatcatgagtttttcccttaagtttgtgaaagagaaagctagagaccatgtatttgcagttcatctgttatactgtaataactgagcatacatcttgtcttcttttgattttacttgtgttataactttgattatagacaattttgttgataaatcttagtctcctaaaatatttgaaagactattataaataaggtcctaaagtttagaaggcatctgatctctctgtagagtctagaatattttagataataatgatgataagtataaatcaatataygactgccaagtataaacagaattgaatctagttcaatgtgcatt

SEQ ID NO: 606926 - DNA, 555 bp, Homo sapiens
agacatggccatccatgctgatggacatttaccagatagtaatggtgctcagaatcaatttgctaatcaagtctccatagttttagggttgttatgtgcaagaggtaggaatgacctacattatcaggcaattctcttaaaaatcaatatctggatatatatgtctcccacccctsaacccccattttttctttctttctatagattaggtgtggtgtaaaccattatacttgaagtggaaatgagcttgctaacctgtgataccttaccttggatttacgggtacatttggctaacctcatatttccctttttgcattttttcactggaatcctaagataacataaactggtgaaacctggtttgggtatctaaaatacttaacttgggaaagtgaactgaaaatattaaaaatcattagctgccttaattgttcctttttcaactcagtgatactattatatcctctcttctcagcctttgaatgtacttcccagtctcttccatgagtaaacatttgaagattaaacatttgaagattctaccttgttaata

SEQ ID NO: 606927 - DNA, 561 bp, Homo sapiens
gtagattacattttcacttattttttagcttccaaatattgaaatattttctttattatgtcggggatacgtgatcacatacaaaagaatctccgttgctgtatgcactttattgtcacaaattatttgatggctgttcataatcttaaaaacaaaaactgtgagatcaagtggtgacgtctaggaggatgtgcaatgtgaaagctccctacttaggtaaataggtctggtgagtacctgtggcaaaattaaagtctcattcctttgaattttaatatttaaaaattgttgaaatttctcagtttctctacyttgcagtacccactcattcttaattggtctttaaagatttattttagagataaaaaaatttctctaagatacccataataggaagtatttcatttgtaagtcgaatcagtttttatataataatcagtgaaaactattaaagtctagctttgctgaaagacattttcccctaatagtgtccactgatagttttaaggctaattactgtaaattctttttttgtcagcagtatttgtaagcaggattaat

SEQ ID NO: 606928 - DNA, 528 bp, Homo sapiens
ttggccattgtaatagttgatttgttggagtatgatatttgctgacagcactatatactggactggccgactggttgattgtaactgttattgaccattgatcagtagtgatctggtggctgacagttgttttgaagggttgaattacagtcgtgtgtgtatgtgtatacatacgtacatgtgtttgtatatrtatgtgtgtgtgtgtgtgtgtgtgtatatatatgcaaggacctaggtttagatgttacagaggatataagatacaggagactctaataaaaaaatatgtttgtgtgtatatatacatatatacgatgtgtgtgtgtatacatacatgtatacggtgtgtgtgtgtgtatatatacatatatatgatgtgtgtgtgtatatatatatatataattttcttagttcatataagcagggcttctcaactgggcatagtactttccctacctccagttctctctttgatggcacttagaaatatgtgggatcaggtttttggatgttgctatgactagg

SEQ ID NO: 606929 - DNA, 526 bp, Homo sapiens
catattctggttcatcacccacatttatctccacagcctgccactgctcagctgacatctcaggtttagggatggacgtattaaaatatttttgtacaaaatagccagtctgactagaagacactttgttaactgtactataaccttttaccctggttcagggcagaaaataacaaaatctgcttcaatgttaagattaatgtgtccttgatcatcataaatatctcccagttcaccacaactttcatgttatatgcaatggggacacctaaaaggctctcagaatagtgcaggagcttcacattaagcttctctgcaatgccagtgtatttcctgttaaggtagcagagtgatgtgcttttggctgggccaccaggcaggaattcaccaacacccaagcagcaggataggtcggcagctctaggaaaggaaggacatgttcagcctgcggcaccacctctgaacaacctgcagccgtgtgrtttgtccaagaacattaatcttagtgttaataaaatactgttca

SEQ ID NO: 606930 - DNA, 543 bp, Homo sapiens
ttttcctgtcttctgttcatgtgtatatgaaactttgcctgttcaagttagggtgtggttcttttttgttttgttttttttttgagatgaagtctccctctgtagcctaggctggagtgcagtggcactgtctcgactcactgcaacctccgcctcctgggttcaagcaattctcctgcctcagcctcccaagtggctgggattacaggcacgcaccaccacacccagctaatttttttttatttttagtagagatggggtttcgccatgttggcccggctggtctcaaactcctgacctcaggtgatccgcccatctcggcctcccaaagtgctgagattacaggcgcccggcggttctcatttttttgattggatcctaccagatgcaatgggctaaagtgagttaaattacataytatccttgtgcttgaaaactgaagattagtaccagtgcttcctcctcacccactcatatacagggcatatttgggtcactgctagtccatggtaattagctttgttattaaaaaatatcatggtt

SEQ ID NO: 606931 - DNA, 621 bp, Homo sapiens
tctaatggaggaagaggaaaaacaagaacagaggaaataaactaaccaacctaaagggctcatcctttaggtggataactagggagaattggagcacgggaaattcagtgtggaaactttttcatgtcgtatgtctagaaaaggcacagctatcagaatgaatttagaacttctaagtaagtgtggaaaacagaataaaaacaaacttggtagcacaaatagggaaaagaaaggggagattaaatgataaatatagaaggaataaaattaaatgtgaataatttgagttcactcttagacataaaaatgctgtttacaagcactttttaatttaaagagtgaaaaatgaaatttaatatttatgtaaaattagaaaraaaagttcaaattaatgaagcagaaataaatagaattaaaaataaatgaattctttgaaaaagagtaaattcataagtaagtttaacttgcacatctgaccaagtgaaaaaagagagagcagaagtaggcaaaatcaggaataaggagacaaccatggatctaggggggaggaactaagtttgctgctctgtagcaccaaatttgaaaacaacaagaaatggtggatttccatttaaaatacaa

SEQ ID NO: 606932 - DNA, 613 bp, Homo sapiens
attaggatgtttctatttgtaaaaagcttatcaagaatactttcaatgatgcttgccttctaattgtataacttaagatatggaacaagcatctcttctgtgccttgccaaattgtcattttcttttctaaatttgtattagttttcaacattttatatagtactttgcatttccaaagtcatgaagtatttcagagacttcctttaatgtgatgtttttttcctctgggatatcttcatcttttggtcataaccagtttccaattccacttycagcattgccactttttgtttccttgctacactttcatttttgttggtcagtcccctcttttgactgtttacttttgtaaaatgtcaaatcagtgtatcactgggagacaggaaggcaacacagttacacactttgctgttcatgcatatactgaataacaaataggtgcccagtaaccagttgctgtcaaattttgggaaaagttatgtgattgcttactgatcatgatgcacatctcttatttacttagtgatttgtggaccaagcattcagaagctatgcacttactcaaagttgatatactgtggtaactaagtgttgaaccaggttgttggggac

SEQ ID NO: 606933 - DNA, 530 bp, Homo sapiens
gctccaagttcatgtatgacatttgttgtgattttcacaaataagggkgtctagtttgtttcagtccctgatgaaggcttggtgtcagaatattgggtcttttctttttgatttcccagaaaaagactcagctagggacctggaagttcaggcagtgagttggaaaaaaggggcttgctgtctatagggagtatgtaaagttgacttattgccctgaaaagtaagatacttttccttgactgtgtccaaacacctctttttaaacttctttactgaggaagagtggcagtacctcgcttgggttttctaggtgtggagagtgaggaggaaatcagggaggcttaactcctaaaatagacttttcaaccagttatctcatttttagccccactttcacccccccctccccattttcagaggcatctagtgctcccagttcctgagccctttggtgattatgcagagttagtgggttttgtttgtttgtttgttcttgttgttgtttttacctaaagcctatttaggagtca

SEQ ID NO: 606934 - DNA, 530 bp, Homo sapiens
gctccaagttcatgtatgacatttgttgtgattttcacaaataagggggtctagtttgtttcagtccctgatgaaggcttggtgtcagaatattgggtcttttctttttgatttcccagaaaaagactcagctagggacctggaagttcaggcagtgagttggaaaaaagggrcttgctgtctatagggagtatgtaaagttgacttattgccctgaaaagtaagatacttttccttgactgtgtccaaacacctctttttaaacttctttactgaggaagagtggcagtacctcgcttgggttttctaggtgtggagagtgaggaggaaatcagggaggcttaactcctaaaatagacttttcaaccagttatctcatttttagccccactttcacccccccctccccattttcagaggcatctagtgctcccagttcctgagccctttggtgattatgcagagttagtgggttttgtttgtttgtttgttcttgttgttgtttttacctaaagcctatttaggagtca

SEQ ID NO: 606935 - DNA, 565 bp, Homo sapiens
tgtactataccctagttccagacccttgatctgttggagcagatcctgtgattccccatatttgacctgaaactgattttatagagtagaaagggaccttagagttccttgagtccaaccactccctgtttcagataaagttgaggcccatgatggcacccatatctctgtactccatcatgacctgagggccctccatcactgcccgtattatattgttcagcattgctgtgggccattgtggtccttgatctccatgtgaagggctccatgaagccatggcctgcattttattaatcacaggacttgacacccagcaaatgctcagtgtttcaatgaatgaatcaatgaatggggtgacttgcccaaagatgcatagttgttgrtagtggcagatccaggacaccctgtgctagcattggctcagtgttcctgatagggccccacactatccaccaaggggtgaagcagaggcattaactacaccagcatccggtcccagactgctggagtttggatcttggttcattagctagctatgtggtggccacaaaggcaggcttct

SEQ ID NO: 606936 - DNA, 646 bp, Homo sapiens
cctgtgctgcttcattccgcccccacctcccacccccagggagctgctacccagagcttccttcctggggaaaaggaatgatctgcatacaagagggatgagcctggatttaccacccaacaggctctgacaatctgtcttgctaggatattcctgatctattagaaatgacacagaaatccattcctaaaaattcctagcagctgaggacrgtgagaaggctgctgggagaaaaagcagtgagtgggtgggtgtagctccccactggctgccccagatcttgacaggctgggctggtaagtctgtccctcctgagctgtgtggttggggaagcttaccttccctgaggaagcctggcttcctcagcaataagtgggaatcacaagaagccccactttatagatcagtatgcatgcatgtgaacagttcaagactgactgttaagttgaagaaagcaaattgcagcaaagcataatttcattttttaaaaatgtacaatcatatttgcaaacccatgggaaagtctagaaaaatacatatcaaactgttaagagtagttaccttggggagagagaggtgggattataagatacttttactttcaatattgtgaatattgtgaatttctatattgtttgatttttaa

SEQ ID NO: 606937 - DNA, 646 bp, Homo sapiens
cctgtgctgcttcattccgcccccacctcccacccccagggagctgctacccagagcttccttcctggggaaaaggaatgatctgcatacaagagggatgagcctggatttaccacccaacaggctctgacaatctgtcttgctaggatattcctgatctattagaaatgacacagaaatccattcctaaaaattcctagcagctgaggacagtgagaaggctgctgggagaaaaagcagtgagtgggtgggtgtagctccccactggctgccccagatcttgacaggctgggctggtaagtctgtccctcctgagctgtgtggttggggaagcttaccttccctgaggaagcctggcttcctcagcaataagtgggaatcacaagaarccccactttatagatcagtatgcatgcatgtgaacagttcaagactgactgttaagttgaagaaagcaaattgcagcaaagcataatttcattttttaaaaatgtacaatcatatttgcaaacccatgggaaagtctagaaaaatacatatcaaactgttaagagtagttaccttggggagagagaggtgggattataagatacttttactttcaatattgtgaatattgtgaatttctatattgtttgatttttaa

SEQ ID NO: 606938 - DNA, 535 bp, Homo sapiens
gaggctggtccttccctaaggatgttattagactsccagtcccctatgatcctgggtcccgttgggtttctcctcacctccccctggattgatgaggcttgtgttgaatttctacaagccttgccttgtatttcacccatcctgaatggatcatttttctaatctgtcaaggtttccctgaattctatttccgccctcttggactgggtgttttccttctggtgctccaggataaaccatgatctcattctaagatgttcttagctggtcctgggttattcattagttcactcacttgttcatttagtcaacaactatttactcagtttttcttttgtgccagctactgtgccaggcttggggatgcctccatggagattgcagccttaaactggacaagggccactcaggggcctgtggaagaatataagaggggtctcactctgtttctgggagaaatcattatagcatatagcaactgtgttttggtaataccaggctatgatgtgtttttattgttgttgttgttgtttgt

SEQ ID NO: 606939 - DNA, 578 bp, Homo sapiens
gattatctctaatcctcaggataaacctacatagccaacattattctctatcttcttacatgtgtggatgtgaaggctcagatgggttaagtagtctgtctaaggtcatgcagctggcaagtggcagagccagagttcaagctttgttctggctgactctaagtccatactggctccaaatgccaccaaggtcttttactggacaatggctttcaagcgtttttgactgcaatgcatggtaaaagatatactgtgcatttccctgtgccagaacttgtctctttgcctgttaggacatactgccttctgtcccaggagctgtaagacactgcacctgtggctgtcttaccttccagcttctggggagggtctagtaaaggtgagctccagcaggagatgaaaagaaaggaggagagaggccggggtattcrttcccctcacttgcttcttactcatttgaggtaggaggctatacctcaacacagccactgtttctcccaaggtgattgatatggtttggctgtgtacccacccaaatctcatcttgagctgtagctcctataattcccatatgttgt

SEQ ID NO: 606940 - DNA, 493 bp, Homo sapiens
ctaagcaaaggagaaataagatccttctcagataagcaaatgttgagggactttgttaccaccagacctactttacaagagatcttgaaagaagcactaaatatagaaagactgctaacaactaatacaaaaacacacttaaacacacagaccagtgtcactataaaggaaccacataaacaagccaacataataatgagctaacaacasaatgacgggatcaaatccacccatatcaatactaaccttgaatgtaaatgggctaaatgccctacttaaaaggcacagagtggcaagctggataaaaaagcaagacccaatggtatgttgtcttcaagagatgtatctcacacaaaatgacactcacaggctcagaataaaggggtggaggaaaatctaccaagcaaatggaaaacagaaaaaagcaggggttgcaatcctaatttcagacaaaacagattataaaccaacaaagataaaaaaagataatgag

SEQ ID NO: 606941 - DNA, 493 bp, Homo sapiens
ctaagcaaaggagaaataagatccttctcagataagcaaatgttgagggactttgttaccaccagacctactttacaagagatcttgaaagaagcactaaatatagaaagactgctaacaactaatacaaaaacacacttaaacacacagaccagtgtcactataaaggaaccacataaacaagccaacataataatgagctaacaacacaatgacgggatcaaatccacccatatcaatactaaccttgaatgtaaatgggctaaatgccctacttaaaaggcacagagtggcaagctggataaaaaagcaagacccaatggtatgttgtcttcaagagatgtatctcacacaaaatgacactcacaggctcagaataaagggrtggaggaaaatctaccaagcaaatggaaaacagaaaaaagcaggggttgcaatcctaatttcagacaaaacagattataaaccaacaaagataaaaaaagataatgag

SEQ ID NO: 606942 - DNA, 493 bp, Homo sapiens
ctaagcaaaggagaaataagatccttctcagataagcaaatgttgagggactttgttaccaccagacctactttacaagagatcttgaaagaagcactaaatatagaaagactgctaacaactaatacaaaaacacacttaaacacacagaccagtgtcactataaaggaaccacataaacaagccaacataataatgagctaacaacacaatgacgggatcaaatccacccatatcaatactaaccttgaatgtaaatgggctaaatgccctacttaaaaggcacagagtggcaagctggataaaaaagcaagacccaatggtatgttgtcttcaagagatgtatctcacacaaaatgacactcacaggctcagaataaaggggtggaggaaaatctaccaagcaaatggaaaacagaaaaaagcaggggttgcaatcctaatttcagacaaaacagattrtaaaccaacaaagataaaaaaagataatgag

SEQ ID NO: 606943 - DNA, 506 bp, Homo sapiens
acttttttaaatttttaataattttttatttttaacttttgtggctacacagtaaatgtatatatttatgggatacatgagatgttttgatacagtcatgcaatggataataatcacattatggaaaatggagcattaattttttgtgttatatgaaaaccagttatactcttttagttattttaaaatgtataattaaaktattattgactatagacatgctgttgtgctatcaaatactaggtcttattcattcatctaaattttttttgtacccattaaccatacccacttttcccacagactcctccactacactttccagtctctggtaaccattcttctattctctatctttatggattcaattgttttgatgtttagatcccacaaataagtgagaacatgagatgttttctttctgtgcctggtttatttcacttaacataatgacctccagttccatccacgttgttgcaaatgattgaatcttattctattttatg

SEQ ID NO: 606944 - DNA, 393 bp, Homo sapiens
tagaatgtctcctgaagtacttgcccaaggcccttgagaaggtgtcactcttcagaaatatgtctatgaygatttgcttggtttgtttcttttttttttccatcataaatttgtaagcagatagaacaccatggacatctttctctgtcttttcaaaatctttaatgagttcattgaggtttgcaagagcttatgataaacctttcactgtggattttcttgagggttctttttttttattttcctgcagtttccttttctgttgcctcttctgaagctatgcattgctgttccagttctaataactcctcattagtcagtttttcaggaaccactctaggagctcctcagagtcatcctcatcctcatcctcatcctcatccaagttaaagt

SEQ ID NO: 606945 - DNA, 527 bp, Homo sapiens
taatatcagcctcaaatgtgagatatgaaaataaagactttaaaatgtgagtctctcccttaagaagataattggtttttaaaggagacacatacagaaataatttgaacataaaaatgctttgtttattcaagtgttgtggagtatgtgtctttaacaggataaaaggagaagccagagaatacagaaaayttatctaggaaacaaacaagggacctatttgccaactaatcagtttaagataaaggtatgaagcaacccttaactatgctccattctttatcataagggatagacttctactgtttagtttttcttccatttaatgtaaagtgacaactactcccttgctgtcaaagattttcattgcagagcctgcctttaccatctaaatggtaaacttatgtgtataaatgtcaaagtagatattgcagaacctgaagagaactagagtaggggagagtaatatctgacaaattgaacttactgttaatcacttttgatgaaagtaaacttaaaataattta

SEQ ID NO: 606946 - DNA, 622 bp, Homo sapiens
ttggccaggctggtcttgaactcctgacctcaagtgatccacccacctcagccttccaaagtgctgggattacagatgtaagccacggagcccagtcccacctttttttttcaatccagtctacattgatggaaatttaggttgatttaatgtctttgatattgtgaatagtgctgcaataaacatacatatgcatgtgtctataygatagaacaatttctattttggggtgtatataccttataatggaattgctgagtcgagtagtatttctgtttttaggggaaagacaatcttaagtagccgatataaccgctctcatatccctgagcagtggctggtgtgacctgaagggagaatctctgcacttggcagagggagagcacaatgactggggcattctactttgaactcattgctgccatgtcacagtggagaataaagctgtgctgggctgagacagcttctgtgcacagagggagaatttatggaacccaaattctactaattttgggttcaacttactcttgcttttctagatctttaagatgtattgttagattttttatttaaagtgtttcccctcttttgatgtagatctcattttttatggatgaatagt

SEQ ID NO: 606947 - DNA, 643 bp, Homo sapiens
tatggtcaactgatatttgacaaggacaccaagaatattcaatagggaaaagttagtctcttcaataaatgatgcaggggaaacggggtgttcacagacaaaataacaaaattagacccttgtcttacattatatacaataatgaactcaaactggttgaaagacttaaatgtaagacttgaaaccataaaactactggaagaaaacaggaaaaatatctccttggcattggtcttgacaatgattttttcaatatragaccaaaagcccaagcaagaaaataaataaacaagtggcctgcaccaaactaaaaagcttctgcacagcaaagaaaacaatcaacaacatgaaaaggcaattcacagaatggaagaaaatagtttcaaaccatgtatcagatacgagttaatatccaaaatttataagaaactgtcacaactcaaagacaaaatgaaataataggtaactaaatttataaatttgaattgaatgagcaaagggcttgaataaacattttttccaaagaggatatacaaatggccaacagctatataaaaaggtgcacagtgtcactaatcatcatggaaatgtgactcaaaatcacaatgagatatcacctcacacctattaggtgtctattacc

SEQ ID NO: 606948 - DNA, 468 bp, Homo sapiens
cccattttctgaggagaaattcaagtaggctgcagaaatttgcataagtaatgaggagccaaatgctaatcgccaagacaatggtgaaaatatctccagggcatgtcagagaccttttcaatagcccctcccatcacaggcccaaaggtctgggagaaaaaaaaaaggttttgtgggcaggggaagaactctcctgttgtgtgcagcctagggacttgatgccttgagtcccagcaacttgaggccaagatgcaactcargttgtggcttcagagggtgcaagccccaaaccttggaagcttccacatggttttgagactgccagtgcacagaagtcaagaattgaggtttgggaacctttgcctagatttcagaggatgtatgaaattgcctggatgtccagacaggtgttttgtgcaggggtgggaccctcatggagaacatctgctagggcagtgcaaaggggaa

SEQ ID NO: 606949 - DNA, 533 bp, Homo sapiens
tttcctttataaattacccagtcttgggtatttcttcatagcagcatgagaacagactaatacaccagcccttttcagccttgtgagatttttgtagaagcagcaaagtggtgggctggctgctgggcatggggcaaggggagtctggctgtaccttcctctggctccctctgcctccagggtgggctccaggtctccttcaaggaatgtggctggaaactgccggacaaggccaagccctgattttacagatgggcatgatatgtgtctaaggtcctatggcctgtgagtgacagagcaaggactacagctcaggtctttagagcttttttattttccatgccagccaccccctgccttcagagatggagtcaggcagggagtgctaagagtcagagtggaaaggaggactcctgcgctgagaacacagagggttcaccacyggggatgctgccaccgtctcaggagtaatttgtatcaattcgataaatgtttatctggaaacacccaagagtcaggtatgtcagagtata

SEQ ID NO: 606950 - DNA, 587 bp, Homo sapiens
cctggagccttgtgaccaagcccctctccaggctccccaactgcccagaggatccaggggtgtggaaggcatgactggaatgagagcggggtggggtgggggctctagcctggcaaggtaaggttcagtcttctcatccaacctgttgcttccagtggcagagggcagccatccacatggttgtgacccctagtgacccagagaaaatttcctttattagcggagaagtctttcttctttttataagagaaaagaatgatcatgtcttacttaaagcctgtgtgtgtgtgtgtgtgtgtgtgtgtgtgtgacacagtgtcactgtctgtaggccttgtcctagattctcaacaaggccagtatgcacacagctagcaattctttaaaaacttcgagggcagtggagggaggaggaggaggaggaagggtaggaagggctatgtctgaaacaagtgagtacgttttctgttcctcctaycccatgctcattcatgcacccctaggagccacccagagcctgcaggctagttctgcccccttcataagacaataagcttgctagcagcaatgaatttcccatgagctca

SEQ ID NO: 606951 - DNA, 471 bp, Homo sapiens
tttttggcttttcagtgatatccattctgactggtgtgagatggtatttcatggtgattttgttaaataagtttaacaggcgaaataatggagaaagtggacaaaattacttgacaatacattttaatagaaaatcatcctggagtgtaaatgttagcaatacaaatactaaggatttgaaagattcatttttaatgagtattcttttagagatttacttggaaacaaaaatcaaattaaaaattcatggaakgttcatgcctgtaatcccagagctttgggaagccaaggtaggcagattgcttgaacccaggagtttgagaccagcctgggcaacatggtgaaaacctgtctctacaaaaatacaaaaaaaaagtagttgggcttggaagcttgtgcctgtcgtttcaattactcaggaggctgaggtgggaggatcacctgagcccaggaggtcaaggctgcagtgac

SEQ ID NO: 606952 - DNA, 390 bp, Homo sapiens
atccttaccatccctctttacttcatccttaataaaatccttttttaaataaaattttttatttcttcaaatttcatgatgatcattctgtttcatgttactgtctacctctaatcctcattttcaatcctccatatgccccatggaaaaaaggatatgttgtacctactgttctgttgctagtgtttaatgctagcaacagacagaacagtacatagaagagatattccaagcacacttcccagcacacaacaggtgcttaataaatgtgtgttacagacatgaacatcgtgcttctttaaggcagccacgttttctatgaaataactcaaaatcagagaaagctgatccatakaaaatgaaaaggatgaagatgtgcagaaggaaaga

SEQ ID NO: 606953 - DNA, 593 bp, Homo sapiens
tcattcattcattcattcattcattcattcatcatcattcatcaagctctgactatttgccagtcactgttttagatgcttgtttgtgtctgagaaattcaacctagagaagaacttactgtactctggactcagagatgggggtagtgggtggaagtggccaaactgacccagacttcagtcctgcctgggaaaacagtcctcwtaggagaatgttggaatcggataggtgtgggtctctgccattacttacctctctgtgtgacctagggcagattacttagcctttctgagtctctgctcctctgtaagatgtgaaaagcaatggtgatcccctgccagggtttctgtgaggactgaatctaaatcggggcagccccaagtgtctgagtttggactctataaatgatgcctgtaaagtggaggttaaggtcacaggaatcagatgagctgtgttgaatctcagctctgccacttgttggccaaggggactttggtaagtcacttggcctgccctgcctcagtttcctcttctgtcagatggggctcataggtattgtgaggattcaattgttaaaaatgtagatcatgta

SEQ ID NO: 606954 - DNA, 593 bp, Homo sapiens
tcattcattcattcattcattcattcattcatcatcattcatcaagctctgactatttgccagtcactgttttagatgcttgtttgtgtctgagaaattcaacctagagaagaacttactgtactctggactcagagatgggggtagtgggtggaagtggccaaactgacccagacttcagtcctgcctgggaaaacagtcctcataggagaatgttggaatcggataggygtgggtctctgccattacttacctctctgtgtgacctagggcagattacttagcctttctgagtctctgctcctctgtaagatgtgaaaagcaatggtgatcccctgccagggtttctgtgaggactgaatctaaatcggggcagccccaagtgtctgagtttggactctataaatgatgcctgtaaagtggaggttaaggtcacaggaatcagatgagctgtgttgaatctcagctctgccacttgttggccaaggggactttggtaagtcacttggcctgccctgcctcagtttcctcttctgtcagatggggctcataggtattgtgaggattcaattgttaaaaatgtagatcatgta

SEQ ID NO: 606955 - DNA, 593 bp, Homo sapiens
tcattcattcattcattcattcattcattcatcatcattcatcaagctctgactatttgccagtcactgttttagatgcttgtttgtgtctgagaaattcaacctagagaagaacttactgtactctggactcagagatgggggtagtgggtggaagtggccaaactgacccagacttcagtcctgcctgggaaaacagtcctcataggagaatgttggaatcggataggtgtgggtctctgccattacttacctctctgtgtgacctagggcagattacttagcctttctgagtctctgctcctctgtaagatgtgaaaagcaatggtgatcccctgccagggtttctgtgaggactgaatctaaatyggggcagccccaagtgtctgagtttggactctataaatgatgcctgtaaagtggaggttaaggtcacaggaatcagatgagctgtgttgaatctcagctctgccacttgttggccaaggggactttggtaagtcacttggcctgccctgcctcagtttcctcttctgtcagatggggctcataggtattgtgaggattcaattgttaaaaatgtagatcatgta

SEQ ID NO: 606956 - DNA, 546 bp, Homo sapiens
gaggtaataagcacatgcacatgaaattctgcctatgagtttagaatgtttatgggctccccagacatctatttgagaaccccagattaagggttcctgaattaggccaggtgcggtggctcacgcctgtaatcccagcactttgggaggccgaggaaggtggatcacttgaggtcaggagctcgagaccagcctgacmaacatggtgaaaccccatctccactaaaaatacaacaattagccaggtatggtggtgtatgcctgtaatcccaccaaatcaggaggctgaggtggtagaattgcttaaatcagggaagcggaagttgcagtgagctgagatcgtgccactgcactccagcctggatgacagagcaagactccttctcagaaaaagagttcctgaatcgtagtgggaaaattgctgagaaagccaagccaggaggctgtaggagtgcagatttggggaaatgtttcttagcctatgaattcgggaaagacttcttgaaggaagtcacatctattcattcaacaagcgattattgaggg

SEQ ID NO: 606957 - DNA, 546 bp, Homo sapiens
gaggtaataagcacatgcacatgaaattctgcctatgagtttagaatgtttatgggctccccagacatctatttgagaaccccagattaagggttcctgaattaggccaggtgcggtggctcacgcctgtaatcccagcactttgggaggccgaggaaggtggatcacttgaggtcaggagctcgagaccagcctgacaaacatggtgaaaccccatctccactaaaaatacaacaattagccaggtatggtggtgtatgcctgtaatcccaccaaatcaggaggctgaggtggtagaattgcttaaatcagggaagcggaagttgcagtgagctgagatcrtgccactgcactccagcctggatgacagagcaagactccttctcagaaaaagagttcctgaatcgtagtgggaaaattgctgagaaagccaagccaggaggctgtaggagtgcagatttggggaaatgtttcttagcctatgaattcgggaaagacttcttgaaggaagtcacatctattcattcaacaagcgattattgaggg

SEQ ID NO: 606958 - DNA, 559 bp, Homo sapiens
gagtccttgttttagaggagacaaacaaccaaagaaacaattacagctgggcttgcgaaaggcaccatggagctgctgactcccacagtagcccaggggggttcccagggaacagacacccagcctccctgtcccccgcccagacactgagggtggggaccctggaaggcatgagaccaagggctccctaaggacacgcagcaattgtctcttcagactgccctggaaataatggggacaggaattctgcaaaagcctccccaaggctgggaagatcggctttgcaagtgggttccttgagagctgggaccatgtctccttctcattagacaaatcgctgaacaaaamtgacgggtgcaaaaacactttgcaaactggaaagctttggatgaagttgggagcttggaagcagagatggtcgtcactagactgggagcctcctgaaggcaagggctgtgcctcctccgtctgactggaggcccctgttttaattctgtagtcccagaagcttctgcatctggggcatgcttagtgaaccctcttcctccagttacatgga

SEQ ID NO: 606959 - DNA, 605 bp, Homo sapiens
tgttgaaacatttacaacatggacgaacctcagaagcattatgctaggtgaaagaagccagacacaaragaccctatgttgtatgtgatatggtttggatgtttgtcccctccaaatctcatgttgaattgtaatccccaatgttggaggtggggcctggtggggggtgtttgaatgttcggggtggatccctcataaatggcttagtgccatccccttggtgatgagtaagttctcgctcagtgagttcacacgagatctggtagtttaagagtggcattaaccaccccccggccccgttacaccctctctcactcctgctgttaccatgtgactcacatcctccccctttgcctctgccatgatggaagcttcttgagaccctcaccagaagcagatgctggtaccgtgcttccgtacagcctgaagaaccatgagccaattaaacctcctttcttgataaattacacagttgcagatattcctctatgacatagcaaaaacagactaacacagtatgactccatgtatataaaatgtccagaatagatagatgtatggagacaggaaatagtgaaataagtgaaattggaaattaatgagtg

SEQ ID NO: 606960 - DNA, 605 bp, Homo sapiens
tgttgaaacatttacaacatggacgaacctcagaagcattatgctaggtgaaagaagccagacacaaaagaccctatgttgtatgtgatatggtttggatgtttgtcccctccaaatctcatgttgaattgtaatccccaatgttggaggtggggcctggtggggggtgtttgaatgttcggggtggatccctcataaatggcttagtgccatccccttggtgatgagtaagttctcgctcagtgagttcacacgagatctggtagtttaagagtggcattaaccaccccccggccccgttacaccctctctcactcctgctgttaccatgtgactcacatcctccccctttgcctctgccatgatggaagcttcttgagaccctcaccagaagcagatgcyggtaccgtgcttccgtacagcctgaagaaccatgagccaattaaacctcctttcttgataaattacacagttgcagatattcctctatgacatagcaaaaacagactaacacagtatgactccatgtatataaaatgtccagaatagatagatgtatggagacaggaaatagtgaaataagtgaaattggaaattaatgagtg

SEQ ID NO: 606961 - DNA, 557 bp, Homo sapiens
atcacctgaagtcaggagttcgagatcagcctggccaacatggagaaaaccccatctctactaaaactacaaaarttagccaggcatggtggcatacgcctgtaatcccagctgctcgggaggctggggaaggagagtcacttgaacctgggaggcagaggttgccgtgagccaagatcatgccactgcactccagcctgggtgactgagtgacagagcgagactccgtcttaaaaaacaaaaaagtctctcttactgtagtttcagtttttaactcctcatttttcctaatgaattaaaagacaactgcataaaacaatagttataaatctatgctgatggacacagaaggtgcagagatataatttgtgacaataacaacataaagggagtaaatctatgtaggaacaaagtttttatacactactgaaactaagttggtagtaatatagactggattattataaattaagacgataatggtaattccagggcaatcattttttaaaactcaacaatatatagtaaaagaaatgacaagggaattaaaatggtac

SEQ ID NO: 606962 - DNA, 557 bp, Homo sapiens
atcacctgaagtcaggagttcgagatcagcctggccaacatggagaaaaccccatctctactaaaactacaaaagttagccaggcatggtggcatacgcctgtaatcccagctgctcgggaggctggggaaggagagtcacttgaacctgggaggcagaggttgccgtgagccargatcatgccactgcactccagcctgggtgactgagtgacagagcgagactccgtcttaaaaaacaaaaaagtctctcttactgtagtttcagtttttaactcctcatttttcctaatgaattaaaagacaactgcataaaacaatagttataaatctatgctgatggacacagaaggtgcagagatataatttgtgacaataacaacataaagggagtaaatctatgtaggaacaaagtttttatacactactgaaactaagttggtagtaatatagactggattattataaattaagacgataatggtaattccagggcaatcattttttaaaactcaacaatatatagtaaaagaaatgacaagggaattaaaatggtac

SEQ ID NO: 606963 - DNA, 673 bp, Homo sapiens
ttgtccattcccaaacacacaccctcactggaaaaactgaaggtctagatcacagtagaaggatttgaccttacctggagctgagtcaatttagagagcctagcgaaacacaggggtagaggaagcagcgggaaaagccctgttggttctctgggtccccagcaaagccatttctgacttttctcacaggagtccttggggagggctgccagaggcactggcataggaccacagggagaaagaaacttccaggtgaactttgtaacaattacaactgracgcgaagtttcccagccagaatttgggggagggtgtgaatctggttgcagactcaacaggcaaggaggtgcaaaagccctgcttgctttctcagctgggaggctggtagcctggggcaagttctcagccctgctcactcactgcctggaaacagactcagtgctgtttgagggagacgatgggagtgagactggcctttctggttgtgtgggagctgggtgagacctttcccccacttctgtgacaacctgcatgacacagtagaggcagccataatcctcctgggaacataactccattgcctggaaaccacatccccatcccccgcagcagccacagcgagctctgcccaaggagaatctgagctcagacatgcctaacccttctgccactt

SEQ ID NO: 606964 - DNA, 597 bp, Homo sapiens
tggggaaaagttgaaagcattccctctgagaactggaamaagaaaaggatgcctaatctcaccacttctattcaacatagtactagaaatcctagccagcaggcatcacagcatgaaactaaagagtttttgatttgcaaagcctagggcttaagagaaaagttgtgttgttttaatttctaaaaagatttggtttggaccactaaaaccagaggctttaggacttagagcatagatagtataaaagataaatgttgaatagggcagaataagaaggtgatattagcccctctggaaaaataatacagaaaatagatggtaattaaaagtcagtgtatttaccgaggaatcactataggaggaggcaaggaaaccctgtaataaaagttacaggtagaagacctgaaacagggaaccagacgaaggattcaactaagcctcaaatcatcagccagcccatgacagccaaggtgatgcctggagtaatcacccagtcccacttattcccagacaccaaagaacaagctacatcctcagtgggagaagcaagtaaggaccagcattgtttttaaaagccagaagccccctgggcctcct

SEQ ID NO: 606965 - DNA, 597 bp, Homo sapiens
tggggaaaagttgaaagcattccctctgagaactggaaaaagaaaaggatgcctaatctcaccacttctattcaacatagtactagaaatcctagccagcaggcatcacagcatgaaactaaagagtttttgatttgcaaagcctagggcttaagagaaaagttgtgttgttttaatttctaaaaagatttggtttggaccactaaaaccagaggctttaggacttagagcatagatagtataaaagataaatgttgaatagggcagaataagaaggtgatattagcccctctggaaaaataatacagaaaatagatggtaattaaaagtcagtgtatttaccgaggaatcactataggaggaggcaaggaaaccctgtaataaaagttacaggtagaagacctgaaacagggaaccagaygaaggattcaactaagcctcaaatcatcagccagcccatgacagccaaggtgatgcctggagtaatcacccagtcccacttattcccagacaccaaagaacaagctacatcctcagtgggagaagcaagtaaggaccagcattgtttttaaaagccagaagccccctgggcctcct

SEQ ID NO: 606966 - DNA, 597 bp, Homo sapiens
tggggaaaagttgaaagcattccctctgagaactggaaaaagaaaaggatgcctaatctcaccacttctattcaacatagtactagaaatcctagccagcaggcatcacagcatgaaactaaagagtttttgatttgcaaagcctagggcttaagagaaaagttgtgttgttttaatttctaaaaagatttggtttggaccactaaaaccagaggctttaggacttagagcatagatagtataaaagataaatgttgaatagggcagaataagaaggtgatattagcccctctggaaaaataatacagaaaatagatggtaattaaaagtcagtgtatttaccgaggaatcactataggaggaggcaaggaaaccctgtaataaaagttacaggtagaagacctgaaacagggaaccagacgaaggattcaactaagcctcaaatcatcagccagcccatgasagccaaggtgatgcctggagtaatcacccagtcccacttattcccagacaccaaagaacaagctacatcctcagtgggagaagcaagtaaggaccagcattgtttttaaaagccagaagccccctgggcctcct

SEQ ID NO: 606967 - DNA, 627 bp, Homo sapiens
acatgtgaagcaggtagacagtgaatataatatcctaatttaggcatatttgtttaggcttagtaaattaaagcaaatcttcaactttatcattcattctttcatggtaaaatacatatcatttcatttattatgaatcattcttatccttgttcaaataattacatcttcccataccagtgaaagatcttcattttcaattttaatgaccatttaattatccattgtttggctatatcataatttatgtaatttcattattggatacttttaggttgttttcagttacaggtattattaataatggcttgacatacattcttcttcacaaatgtgcttcaacattttagacaattttatcakgattgattcctaagtggaattaacaaatcaaaagcataaacactttgtataatttagacttttgttatactttctaattgttttccagagtgttcccctttagtgatggtctagagagacaaacattataggccaccttcaaagaaggagactaataaattgctttgagtttgacttgagtaatttattctactcagttttgtaatttaataatattaaagtcagtgagttcttcttaaagtgatgatttatatatacaaaagt

SEQ ID NO: 606968 - DNA, 627 bp, Homo sapiens
acatgtgaagcaggtagacagtgaatataatatcctaatttaggcatatttgtttaggcttagtaaattaaagcaaatcttcaactttatcattcattctttcatggtaaaatacatatcatttcatttattatgaatcattcttatccttgttcaaataattacatcttcccataccagtgaaagatcttcattttcaattttaatgaccatttaattatccattgtttggctatatcataatttatgtaatttcattattggatacttttaggttgttttcagttacaggtattattaataatggcttgacatacattcttcttcacaaatgtgcttcaacattttagacaattttatcaggattgattcctaagtggaattaacaaatcaaaagcataaacactttgtataatttagacttttgttatactttctaattgttttccagagtgttcccctttagtgatggtctagagagacaaacattataggccaccttcaaagaagkagactaataaattgctttgagtttgacttgagtaatttattctactcagttttgtaatttaataatattaaagtcagtgagttcttcttaaagtgatgatttatatatacaaaagt

SEQ ID NO: 606969 - DNA, 446 bp, Homo sapiens
acagaacattttatgaactaggcctgtacatttgcttttttccatatggattttctaaacttgcatgattcttgtaccataacttaatttttctgggatttaatttaatttagtgggatttgaaaactgtgacaaattctgcctgattgtagaaattagtacaattgcagttttattattttaaattaaaaaacctctagagaactgtattcccctgatatagtagctcagcagtttagctcatgtgttccargctgtgtgtttgagattggagaatatgtaaattaaaagacactttaaaagctgctacctagcagccagttgtctcatggaggaaacatgtaaggaaacctgctcttatttcacgtgagttgtggcattttatgcaaggaaattttgaagtaattttctttattttaaaataaaaaatggaatctaagttcctt

SEQ ID NO: 606970 - DNA, 583 bp, Homo sapiens
ctaattcagccttaggaagtaggtattccaatttttatagatgaggaaactgaggctcatagaaaaggtaagcaactttcccaagttaatggagagtaagtaagcaaagctggaattctcactcaggactctcctgtgctttctgagtttctctggcataggagatgcatgttccagaagcttgaaatattttgccaatacttgtatttgctggacttccagtttctcctggaagtcaatctgtgaataacttcgrctatttctcccaagcctgccttttcagcttgtgtatatgaaggcagaggaagtgagaacagcgatcaataggtgtttaaagtcagagagcccaaggatataaaaattgatggactaagtacaggagggccatgagtttaacagcttgtgagacagtggttctcaactttggctgcacattagaatcatctgggaagcttttacaagtaccagtgcccaggaccaattaaaccaaaacccatggggttggcacccaggcatcagaatgctttaaagttccccaggtgattccaatatacatccaagtataagaaacatgctgaaagag

SEQ ID NO: 606971 - DNA, 596 bp, Homo sapiens
gtcaattttatattatgtaaattttatctcaattgataaaaaagaaaaacattaaaaaaagaaaaagcagaaaaaaagaacaaaaacaacagagtgagagagaggagagagagagaaaacaaacaaataacaaaaaaaagagctgcatatccaccctcttgtggatgggattatggttaaaaaacaagaaaacccccaaatctcaactttgttaaaaatgggattgtctggcctttggtgccctctgcaggaatggatgtcagtgcaccagtccctcttcccagttttctttttcttcttttcctcaacttttattttaaattcaggggtacatgtgcaggtttgttacatggatttattgcatgacrccactgaggtttgggatctgagtgatcctatcactcaggtagtgagcatagtacccaataagttagtttttcaaccctctccctctccctttctctctgctccagtagtccccagggtctcttgttctcatccttatgtccatgcgtgcccaacgtttagttcccacttataagtgagaacatgtagcatttggttttctgttcctgtattaattcacttaggataat

SEQ ID NO: 606972 - DNA, 596 bp, Homo sapiens
gtcaattttatattatgtaaattttatctcaattgataaaaaagaaaaacattaaaaaaagaaaaagcagaaaaaaagaacaaaaacaacagagtgagagagaggagagagagagaaaacaaacaaataacaaaaaaaagagctgcatatccaccctcttgtggatgggattatggttaaaaaacaagaaaacccccaaatctcaactttgttaaaaatgggattgtctggcctttggtgccctctgcaggaatggatgtcagtgcaccagtccctcttcccagttttctttttcttcttttcctcaacttttattttaaattcaggggtacatgtgcaggtttgttacatggatttattgcatgacaccactgaggtttgggatctgagtgatcctatcactcaggtagtgagcatagtacccaataagttagtttttcaaccctctccctctccctttctctctgctccagtagtccccagggtctcttgttctcatccttatgtccatgcgtgcccaacrtttagttcccacttataagtgagaacatgtagcatttggttttctgttcctgtattaattcacttaggataat

SEQ ID NO: 606973 - DNA, 514 bp, Homo sapiens
tcagtaatcctcagagatggcacaaagacaccaacagatgttcagaaacacacagcccaggctgccacggtcactactgcccttcttaccttccttagcaacaaccaccatctgtccactgtgtgttttacttgcatctcttgttccctgtttcctacaatgtcaccttcaagtggacagggttatttgttctgttttattcayggtagcccctactagaaggtctgttacacaggaggagattaatacttggtgaatcacttgggctgaaacatagacacacacacgtgcatgcgtgcgcttgcacacacacacacacacacacacacacacagattttaacaaacctcatcataggtccatagccacttgattttcataatgttctcaactgcatgtcacgtggcagagaggtgtctcctggatgataagccaataccaaaaggtgagtttacctaaatgaaaatgtagacccacacaaaaacctgtacagggatgtgtacagcaacattat

SEQ ID NO: 606974 - DNA, 535 bp, Homo sapiens
tgaaacatagacacacacacgtgcatgcgtgcgcttgcacacacacacacacacacacacacacacagattttaacaaacctcatcataggtccatagccacttgattttcataatgttctcaactgcatgycacgtggcagagaggtgtctcctggatgataagccaataccaaaaggtgagtttacctaaatgaaaatgtagacccacacaaaaacctgtacagggatgtgtacagcaacattattcatacttttcaaaacttggcagcaaccaagaggaagaggtataataaatttaacaaaagtacaaaacttatagtctgaaacccacaaaccttgttgaaaggcattgaagatttaaatgttagatctcaagagcatagataagtaggcttaatattaagaaggcaacactacccaaaacaatccacagatttcatacaattcctgtcagttaagtaccttgcagaatttaaaaagtcaatgctaaaactcatatgggaacaaaaaggcctcagaataccacaatgctc

SEQ ID NO: 606975 - DNA, 554 bp, Homo sapiens
ccacaaaccttgttgaaaggcattgaagatttaaatgttagatctcaagagcatagataagtaggcttaatattaagaaggcaacactacccaaaacaatccacagatttcatacaattcctgtcagttaagtaccttgcagaatttaaaaagtcaatgctaaaactcatatgggaacaaaaaggcctcagaataccacaatgctcttgaaaaagaccaaaaaaggaagactcacacttcagttttaaaacttgcctcaaagcaacagtaatytagattgtatactaatggcacaagaaaagtcctttatatcaatgaaagacaacagagtccaggaagagtgaggtgagtataatggcagaatgagcttctccaaacacctctccttgcagagaaacatggaaaaacaagcagaatggccaggaataactttgtcaaaattcttgaatactgtcaaaggttttttttttttttatactttaagttttagggtacatgtgcacaacgtgcaggttagttacatatgtatacatgtgccatgttggtgtgctgca

SEQ ID NO: 606976 - DNA, 398 bp, Homo sapiens
tgcctgtggtcagccagggttctctctcattagaatatttagggtcgctaaggtgtctctatcattagaatgcctggggtcggcccagagtctgtctccaatttgaatgcctgggatcacccgatgtctctattattagaatgcctggaattggccaggagtttttcttattagaatgtctagggtctcccaggtgtctccatcattataatgcctggagtyggctaggagtctctcaaattagaatgcatggggttgcccaggtgtctctatcattagaatgcctggaattgcccaggtgtctttttcattagaatgcctggggtcacccagttgtctctatcattagaatgcctggggtcagccaggagtctctcccattagaatgcctggagttg

SEQ ID NO: 606977 - DNA, 499 bp, Homo sapiens
gtgtctttatcattagaaaaactagggtcatctggaagtttctgtcattagtatgcctggaatgtccctggtttctttatcattacgatgccaggtgtcagcctagagtgtctttcattagaatgcttgggatcgcccagttgtctctatcattagaatgcctgtggtcggccaggagtctctcccattaaaatgcctggggtcgccaaggtgtctctatcattagaatgcctggggttggccaggagtctctcccattagaatgtctaaaatcacccaggtatctctatcattataatgcctgaggtctcccaggagtcttttccattgaaatgcctggtgttgcccagatgtctttatcattacaatgcctgsggtcagccaagattctctcccattagaatgcctggggtcgcccatgagtctctctcatgagaatgcctgaggttggccaggagtctttcccattacaatgcctggggttgcccagatttctcta

SEQ ID NO: 606978 - DNA, 578 bp, Homo sapiens
ctctcatgagaatgcctgaggttggccaggagtctttcccattacaatgcctggggttgcccagatttctctatcattacaatgcttggggtcagctaggaatctctcccattaaaatgcttgaggtcaccagatgtctctaacataaaaatgcctggggttaacaaggagtctctttcattagatttccttgggttgttcaggagtctctatcattagatattctggagtcacctaagggtctttatctttcaaatgcctggggtcaaccaggggtatctcccattagaatgcctgaggcctcccaggtgtctctgtaattagaatgcccggggtcgcttaggtgtctctatcataataatgcctggagtcccacaggtttcttaataattagaaagcctggggtcagccasgagtctctcccattagaatatctgtggtcacccaggtgtctattatttgaatgcctgcggtcagcaaggagtcactgccatgataatgcctggggtcgccaagctgtctctaccgttagaatgcctggaatcagccagaagtctatccaattagaaagcatgtga

SEQ ID NO: 606979 - DNA, 521 bp, Homo sapiens
agagggttatctccagttagaatgcctggggtggcccaggagtctctatcattacaatgcctggggcccgccgggagtctctcccattagaatgtctggggtcacaaaggtgtctttatcattacaatgcctggggtccaccaggaggagtctttcccattagaaagcctggtgtctcccaggtgtctctatcattacaatgcctggggttcaacaggtatctttatcattagaatggcttgggtggaccaggagtgtctcccattagaatgcctggggtcaccctggaatatctgtcattacaaggtttggaatctgactgcagtgtttcccattagaatgcctgaggtgcccaggtgtttggtcactagaatgcctggggtcagccagaagtctcttccattagaaatttggaattgcacaggtatgtctatcattagaaagtcagcggtygcccaggtgtttctataattacaatgcctggggtccaccaggaatctctcccattagaatgcctgtgg

SEQ ID NO: 606980 - DNA, 609 bp, Homo sapiens
ctgtggttggctagtagtctctcccgttaaaatgcctggggtcgcccaggtgtctgtgtcaatagaacgactgaggttggtcaggagtctctcccattagaatgcctggggtcgcccaggtgtctctattattagaatgcctggggtctgtcaggagtctcttttattacaatgcctggagtcrccaaaatgtctttatcattagaatgcctggagtcggacaggagtctctttacagaatgccgggtgtcgcctatgtgtttctatcatttgaatgcctgggtcggccaggagtccctcccactagaatgcctggcttgcccaggtgtatctatcattaaaatgtctaaattcgggtaaaagtctctcctattagaatgcctgaaattgcccgggtgtctctatcattagactgcctggggtcagccaggatgctctctcattagaatgcctgtggtcacccaggtgcctctatcattacattgcctaaaacctgccaggagtctctcccttttgaatgcctggagttgcccaggtgtctctatcattacaatccctggggttggctagaagtctcccgcaataaaatgcctcagtttgcccaggtgt

SEQ ID NO: 606981 - DNA, 609 bp, Homo sapiens
ctgtggttggctagtagtctctcccgttaaaatgcctggggtcgcccaggtgtctgtgtcaatagaacgactgaggttggtcaggagtctctcccattagaatgcctggggtcgcccaggtgtctctattattagaatgcctggggtctgtcaggagtctcttttattacaatgcctggagtcaccaaaatgtctttatcattagaatgcctggagtcggacaggagtctctttacagaatgccgggtgtcgcctatgtgtttctatcatttgaatgcctgggtcggccaggagtccctcccactagaatgcctggcttgcccaggtgtatctatcattaaaatgtctaaattcgggtaaaagtctctcctattagaatgcctgaaattgcccgggtgtctctatcattagactgcctggggtcagccaggatgctctctcattagaatgcctgtggtcacccaggtgcctctatcattacattgcctaaaacctgccaggagtctctccctyttgaatgcctggagttgcccaggtgtctctatcattacaatccctggggttggctagaagtctcccgcaataaaatgcctcagtttgcccaggtgt

SEQ ID NO: 606982 - DNA, 549 bp, Homo sapiens
caggagcaaatccactcccccacacacagacacacccgggcgcgctcgcacgcgcgcgcgcggacacacacacgcacacacgcacgcgcacacgcacgcacacacacgcggcttgaaggagagcaaggacgagatggatggagagatagaaaccgagggagggagagagacagcgatcgagagagacaggggagggcgagagggaaggagacagacagagaggctgagaaagagagaggcacagagaaagagagagagagagacagagagacagagggaaaacgacaraagtaccgcgaggtccagggggaaacccataagagagaggcggagggagctagagagcgagagcgatagagccttatagaggaagcgcccggctccgttaggcagcgccctcttgagcaagccgggatagggtggagggggcttgggctgcgcccagaacacgggggccaggcggtccgtgcgagaggaccaacggagcgctgaggcgggcgtcttcttggatgaattgcttgctttggaggtgggtttcgtaggctcctg

SEQ ID NO: 606983 - DNA, 549 bp, Homo sapiens
caggagcaaatccactcccccacacacagacacacccgggcgcgctcgcacgcgcgcgcgcggacacacacacgcacacacgcacgcgcacacgcacgcacacacacgcggcttgaaggagagcaaggacgagatggatggagagatagaaaccgagggagggagagagacagcgatcgagagagacaggggagggcgagagggaaggagacagacagagaggctgagaaagagagaggcacagagaaagagagagagagagacagagagacagagggaaaacgacagaagtascgcgaggtccagggggaaacccataagagagaggcggagggagctagagagcgagagcgatagagccttatagaggaagcgcccggctccgttaggcagcgccctcttgagcaagccgggatagggtggagggggcttgggctgcgcccagaacacgggggccaggcggtccgtgcgagaggaccaacggagcgctgaggcgggcgtcttcttggatgaattgcttgctttggaggtgggtttcgtaggctcctg

SEQ ID NO: 606984 - DNA, 597 bp, Homo sapiens
cgcctttggggtccggccccctgccctcccaggctggagccgggctcctggcggggcggcggcgaggcggaagcggtgggatgctgctgcccggccggcgtgcagtaggggcggacccccagcaggaggaccccggctgcggctgcrgcgggggtgtaggtgggcggtaaagggggagcagagtcaggggaggttgggaagcatggcgactgtggggggaagggaggcagcggggaagccacaaaagcctacagcaggccgggcgggcgcggtggctcgcgcctgtaatcccagcactctgggaggccgaggcgggtggatcacgaggtcaggagctccagaccatcccggctaacagggtgaaagcccgtctctaggaaaaatagaacaaagtagccgggcgtggtggcgggcgcctgtaggcccagctactcgggaggctgaggccggggaatggcgtgaacccgggaggcggagcttgcagtgagccgagatggcgccaccgcactccagcctgggcgacagggcgagactccgtctggaagaaaaggaaagaaacagcaaaaagccaaagaaaaagcctacagcacccggtat

SEQ ID NO: 606985 - DNA, 423 bp, Homo sapiens
ggagccgggctcctggcggggcggcggcgaggcggaagcggtgggatgctgctgcccggccggcgtgcagtaggggcggacccccagcaggaggaccccggctgcggctgcagcgggggtgtaggtgggcggtaaagggggagcagagtcaggggaggttgggaagcatggcgaytgtggggggaagggaggcagcggggaagccacaaaagcctacagcaggccgggcgggcgcggtggctcgcgcctgtaatcccagcactctgggaggccgaggcgggtggatcacgaggtcaggagctccagaccatcccggctaacagggtgaaagcccgtctctaggaaaaatagaacaaagtagccgggcgtggtggcgggcgcctgtaggcccagctactcgggaggctgaggccggggaatggc

SEQ ID NO: 606986 - DNA, 597 bp, Homo sapiens
cgcctttggggtccggccccctgccctcccaggctggagccgggctcctggcggggcggcggcgaggcggaagcggtgggatgctgctgcccggccggcgtgcagtaggggcggacccccagcaggaggaccccggctgcggctgcagcgggggtgtaggtgggcggtaaagggggagcagagtcaggggaggttgggaagcatggcgactgtrgggggaagggaggcagcggggaagccacaaaagcctacagcaggccgggcgggcgcggtggctcgcgcctgtaatcccagcactctgggaggccgaggcgggtggatcacgaggtcaggagctccagaccatcccggctaacagggtgaaagcccgtctctaggaaaaatagaacaaagtagccgggcgtggtggcgggcgcctgtaggcccagctactcgggaggctgaggccggggaatggcgtgaacccgggaggcggagcttgcagtgagccgagatggcgccaccgcactccagcctgggcgacagggcgagactccgtctggaagaaaaggaaagaaacagcaaaaagccaaagaaaaagcctacagcacccggtat

SEQ ID NO: 606987 - DNA, 597 bp, Homo sapiens
cgcctttggggtccggccccctgccctcccaggctggagccgggctcctggcggggcggcggcgaggcggaagcggtgggatgctgctgcccggccggcgtgcagtaggggcggacccccagcaggaggaccccggctgcggctgcagcgggggtgtaggtgggcggtaaagggggagcagagtcaggggaggttgggaagcatggcgactgtggggggaagggaggcagcggggaagccacaaaagcctacagcaggccgggcgrgcgcggtggctcgcgcctgtaatcccagcactctgggaggccgaggcgggtggatcacgaggtcaggagctccagaccatcccggctaacagggtgaaagcccgtctctaggaaaaatagaacaaagtagccgggcgtggtggcgggcgcctgtaggcccagctactcgggaggctgaggccggggaatggcgtgaacccgggaggcggagcttgcagtgagccgagatggcgccaccgcactccagcctgggcgacagggcgagactccgtctggaagaaaaggaaagaaacagcaaaaagccaaagaaaaagcctacagcacccggtat

SEQ ID NO: 606988 - DNA, 630 bp, Homo sapiens
gtcacctgcagggccagagacagcatgggtgggctgggctaccatccatacctcaacatccaggagccctggcctctctcactgcaaccctccacgcaggcagagataacgttcacaaaattaactgctacccttaaagatggcgaatattaagctaactgtattatccaatattatggatagcctttgcataatttttaaacctttcaacttaaaaactcatgtcaaaaccaattactcaatgtttcattttaaatgcaattgtaatggtaatcttttcaatatttcagatgtcaaaattgctcaaaaaattaggattctaaatatctaaatataccygtgaaaggaaaataaatcttggggccccaaagtcacttggctaaagagaaaagtcaagctgggaactgcttagggccaacctgcctcccattctatttaaagtcacccgtctgctcactgaaatagatgcatatctgattgcctcctttggaaaggcaaatcagaaactcaaaagaatgcaactgtttgtgtttcacctatttgtgaccaggaaggcccctccccactttgaatctttctgcctttgcttcaggttttcctgcctttccagactgaaccaatgtacttaca

SEQ ID NO: 606989 - DNA, 630 bp, Homo sapiens
gtcacctgcagggccagagacagcatgggtgggctgggctaccatccatacctcaacatccaggagccctggcctctctcactgcaaccctccacgcaggcagagataacgttcacaaaattaactgctacccttaaagatggcgaatattaagctaactgtattatccaatattatggatagcctttgcataatttttaaacctttcaacttaaaaactcatgtcaaaaccaattactcaatgtttcattttaaatgcaattgtaatggtaatcttttcaatatttcagatgtcaaaattgctcaaaaaattaggattctaaatatctaaatatacccgtgaaaggaaaataaatcttggggccccaaagtcacttggctaaagagaaaaktcaagctgggaactgcttagggccaacctgcctcccattctatttaaagtcacccgtctgctcactgaaatagatgcatatctgattgcctcctttggaaaggcaaatcagaaactcaaaagaatgcaactgtttgtgtttcacctatttgtgaccaggaaggcccctccccactttgaatctttctgcctttgcttcaggttttcctgcctttccagactgaaccaatgtacttaca

SEQ ID NO: 606990 - DNA, 601 bp, Homo sapiens
ccaacaggtagtttttcaacccttgtccttgtcctgctcctccctcctccctctagtagtccccagtgtctgttgttgccatatttatgtccctatgcacccattgtttagctcccacttacaaatgagagcatgccgtacttggttttctgttcctgcattaawttgcttaggataatggcctccagctgaatccacgttgctgcaaaggacaggatttcacttttttatggcttcatagtattctatggggtatatgtaccacattttctttatccaatcccccactgataggcacctaggttgattccgtgtctttgctttgtgaatagtgctgtgatgaacatatgttgtttttggtagaacataggtgcatcatatgttctgtatcatatgtgcatgtgtctttttggtagaataatttattttctttaggatatatatacccaggaatgagatttctgggttgaatagtagttctgttctaaagtgctttgagtaatctccaaactgatttccatggtggaaatctaatttatattcccactaacagtgtataagcattcccttttctccagagccttgtcagcatctgtttgtt

SEQ ID NO: 606991 - DNA, 622 bp, Homo sapiens
ggtgccccctgggaagaagcttccagaggaaggatcaggcagcaatatttgctgttctgcagcctccgctggtgatacccaggcaaacagggtctggagtggacttccagcaaactccagcagacctgcagcttagggatctgactgtttgaaggaaaactaacaaacggaaaggaatagcatcaacatcaamgaaaaggacatccacaacaaaaccccatctgtaggttaccaatatcaaagaccaaaagtagataaaagcacaaagatggggagaaaccagagcagaaaagctgaaaattccaaaaaacagaacacctcttctcctccaaaggattgcagctcctcgccagcaagggaacaaaactagacagagaatgagtttgacgagttgacagaagtcagcttcagaaggtcggtaataacaaacttctccaagctaaaggagcatgttctaacccatcacaagaaagctaaaaaccttgaaaaaaggttagatgaatggctagctagaataaacagtgtagagaagaccgtaaatgacctgatgaagctgaaaaccatggcacgagaacttcgtgacgcatgcacaagtttcagtagccaatttgatcaagtggaa

SEQ ID NO: 606992 - DNA, 622 bp, Homo sapiens
ggtgccccctgggaagaagcttccagaggaaggatcaggcagcaatatttgctgttctgcagcctccgctggtgatacccaggcaaacagggtctggagtggacttccagcaaactccagcagacctgcagcttagggatctgactgtttgaaggaaaactaacaaacggaaaggaatagcatcaacatcaaagaaaaggacatccacaacaaaaccccatctgtaggttaccaatatcaaagaccaaaagtagataaaascacaaagatggggagaaaccagagcagaaaagctgaaaattccaaaaaacagaacacctcttctcctccaaaggattgcagctcctcgccagcaagggaacaaaactagacagagaatgagtttgacgagttgacagaagtcagcttcagaaggtcggtaataacaaacttctccaagctaaaggagcatgttctaacccatcacaagaaagctaaaaaccttgaaaaaaggttagatgaatggctagctagaataaacagtgtagagaagaccgtaaatgacctgatgaagctgaaaaccatggcacgagaacttcgtgacgcatgcacaagtttcagtagccaatttgatcaagtggaa

SEQ ID NO: 606993 - DNA, 622 bp, Homo sapiens
ggtgccccctgggaagaagcttccagaggaaggatcaggcagcaatatttgctgttctgcagcctccgctggtgatacccaggcaaacagggtctggagtggacttccagcaaactccagcagacctgcagcttagggatctgactgtttgaaggaaaactaacaaacggaaaggaatagcatcaacatcaaagaaaaggacatccacaacaaaaccccatctgtaggttaccaatatcaaagaccaaaagtagataaaagcacaaagatggggagaaaccagagcagaaaagctgaaaattccaraaaacagaacacctcttctcctccaaaggattgcagctcctcgccagcaagggaacaaaactagacagagaatgagtttgacgagttgacagaagtcagcttcagaaggtcggtaataacaaacttctccaagctaaaggagcatgttctaacccatcacaagaaagctaaaaaccttgaaaaaaggttagatgaatggctagctagaataaacagtgtagagaagaccgtaaatgacctgatgaagctgaaaaccatggcacgagaacttcgtgacgcatgcacaagtttcagtagccaatttgatcaagtggaa

SEQ ID NO: 606994 - DNA, 186 bp, Homo sapiens
aattctaccagaggtacaaagaggagctgggaccattccttctgaaactatttcaatcaatagaaaaagagggaatcctcccgaactcatcttatgaggctagcrtcatcctgataccaaagactggtagagacaccacaaaataaagagaattttcagccaatatccatgaggaacatcgatgca

SEQ ID NO: 606995 - DNA, 529 bp, Homo sapiens
gctcttcataacgtaggtgggcctcatccaaccagatgacggcctgaatagatcaaagaatgacctcccctgagcaggagggagttctgccagcagactgctttcagacttgaacggtaacccttccctgrgtctccagcctgccaggctactctgcagatcttggacttgtcagcctccataatcaagtgatccaattccttaaaataaatctgtctctctaggtgaataacagttgacccttgaacatcatggggttaggagcaccaactccccatgcagtctaaaatccaagtatagcttttaactcccccaaaacttaactactaataacctactgttgactggaagatgtaccaataacataaatagtcaatgaacacatattttatatgtattaggcactgtattcttacaataaagcaaactacagaaaataaaattttacttaaaaatcatgacgaagagaaatatatctactaattaagtgtaagtgggtcatcataaaggtcttcatcctcatctttgc

SEQ ID NO: 606996 - DNA, 529 bp, Homo sapiens
gctcttcataacgtaggtgggcctcatccaaccagatgacggcctgaatagatcaaagaatgacctcccctgagcaggagggagttctgccagcagactgctttcagacttgaacggtaacccttccctgagtctccagcctgccaggctactctgcagatcttggacttgtcagcctccataatcaagtgatccaattccttaaaataaatctgtctctctaggtraataacagttgacccttgaacatcatggggttaggagcaccaactccccatgcagtctaaaatccaagtatagcttttaactcccccaaaacttaactactaataacctactgttgactggaagatgtaccaataacataaatagtcaatgaacacatattttatatgtattaggcactgtattcttacaataaagcaaactacagaaaataaaattttacttaaaaatcatgacgaagagaaatatatctactaattaagtgtaagtgggtcatcataaaggtcttcatcctcatctttgc

SEQ ID NO: 606997 - DNA, 529 bp, Homo sapiens
gctcttcataacgtaggtgggcctcatccaaccagatgacggcctgaatagatcaaagaatgacctcccctgagcaggagggagttctgccagcagactgctttcagacttgaacggtaacccttccctgagtctccagcctgccaggctactctgcagatcttggacttgtcagcctccataatcaagtgatccaattccttaaaataaatctgtctctctaggtgaataacagttgacccttgaacawcatggggttaggagcaccaactccccatgcagtctaaaatccaagtatagcttttaactcccccaaaacttaactactaataacctactgttgactggaagatgtaccaataacataaatagtcaatgaacacatattttatatgtattaggcactgtattcttacaataaagcaaactacagaaaataaaattttacttaaaaatcatgacgaagagaaatatatctactaattaagtgtaagtgggtcatcataaaggtcttcatcctcatctttgc

SEQ ID NO: 606998 - DNA, 457 bp, Homo sapiens
cacctgaaactgtgtcattttcaaaaatgagacttctaaaatttataacatgtaaatatccamctctgtgaccacaccctcacatccttccacttcccttgatcaagcattctgtaacaggctgaataatgacacccaaagacagcaagtcctaagtcctgtaaatgttgccttgtatggcaaagactttgaatattcaattaaattctggatcttgagatggggagagtatccttggattatcccagtgggccctagatcaaatcacaagtgtccttatatgagatatacagagagagatttaacacggacagaagacaggaagtcaatgtgaaggcagaggcaaagatcggaatgatgcaaccacaagccaaagcatgctagtagcaaaatacgttgactaattaattaaatttaaaaattttttaaagaatgctggtagccaccagaagttgga

SEQ ID NO: 606999 - DNA, 519 bp, Homo sapiens
ccacctgccttggcctcccaaagtgctgggattacaggcgtgagccactgcccccggcctccactgcttttcatagatctcggtaaagactttgtaatgaaaaatatgtcacctgccttaaaaacagtgtgttgtcagtaaattatcagcccacttccagagtccaatcaaatatatcagtataactggagactctactatgtgttccatgaaaacatagcatctgaatgatgaatggtctttgccttcaagagatttatatcctggtggtaacaagaacatattgaaaataagagtaataataatttcctttaaattatctttattaattgaattgtttaaactatttaggtacacaacaggggcagctgctttaatttgaacttctccagcgggaaacctgaaacacaaagtagataggtgacctgyttcagtctccttgtgggatcagccatagattcactgctgctgaggcctcctgctttctggcaagctgggcagtaaagctgatacctatgt

SEQ ID NO: 607000 - DNA, 587 bp, Homo sapiens
tttctttttaatgggtatatttaaaaggcctttatgtttttctcttcataaatcttgtttttctggaagaggtttttttctgtcaactgaattactttctccactgttgcttgccactcttggtacatgcatgaaaggccacagaatgacttctggtggcctaggactccttgggaaaacagaaaagacaccacaaatcccattttggaaaaaatctggtttcttcatggaacccctggaattagaggtgaakaaggacctctcaaaatctgtctttgtcttctgggtatgcttgtctgctaggccctggaaattgtattcctagctcttttcttaaagggtctcaccaggaggccaataatccaattgagaaattagtaaataaaaaatcttataagaactggatcttcttctgttggtctgtgtggttatatatgtgctatgagtgtaatgtctatttaaaaagagctctaattaattgggctaagaacgtaagtgcttaaatcaaatatttttaagggaaaagtaaaagctgtggtacctttcagttcacgtaactttaatctttaaaaataaaaatagtttta

SEQ ID NO: 607001 - DNA, 568 bp, Homo sapiens
gatccaatgactgattctgctatgcctttggttttcccggaaggggaacttgtagactgtcaggggagcctgatgataccctggggccagactgtgacagccagttgtgctcaggccccttggctgcctgagggacccttctctggatattcacttaattgrggatagacaggtactgcagttttctgtcagtttgtctttattgtattgataaggtacttggggaggcggcagtgcatgctaatgactaagcagtaaggttgtcagagagattatgaactgtttgagaagaggaatgatcacttctacttcctttgttttccttcttcatagcccctgagcacacattagtcctcaataactgtcatctgagtaataattacagggtatctagatcagttttttgttgtgtttcgttttcttttagattttgtttcatgctgagagagaataagagatcatttagttaaggtggaaaatgtatagacaggtagatactaatccagagatttttaagtatattttttatcactcaacagtagttgcactcttttacagtattgagatt

SEQ ID NO: 607002 - DNA, 473 bp, Homo sapiens
ctctccttgtttcctctcccaagttcaacacctctttcgcctctctcattgcactgctacttcctttggagtgctatcagctagcactctttttccttttgctttccctctgacacccccatgggacaatttgatgccacccttttgaaaagttgctcaccctccaatccaggctcttgagacactcctgccttgcctcacattctggatgtccccagtccactgggcttggctctgacttggayggggacagtgagaacttttgtggaactgtatttgccaactgccacatgagtagtggcctattcctggtgagccccagaggaagctgttattgacgtaggtgatgcgtgatctgaggctaggcatagagaggaagctcggtgaaccaaactgctgggatagctgagtgacaacagaacggggcctttgaccaatgtcacatcagctaatccccaaatctgccaacaagg

SEQ ID NO: 607003 - DNA, 620 bp, Homo sapiens
acatacccgcttcctagggaagagggaagtggggaacataggcaattttggaggaagagtaaatagtctccaggggataagataggcctgaaaaacaaataatagcctggaacaaagttcttctgggcttgcggggaggtggtgacaagttgtgggaaggtgaggggcagaactgcactgggaacaaaggttgtcttacaatgaagataaagcctctcaggtaatatccttcaaaagaatagatgaaaagtctgtctgggtggggatgtggtgatgacctttgttttcatctttggtgattaattcttcctggttaataagatttcagacagggattaaagacaattatatttcttttggagaaacttccctcagtcaaataagaaaacttcacagaaagagagagagagagagaccttccctacccttgggggaaaaacaagataagagagaccytaattctgaagcagcttctaagaccttccaattttctttaattcagagtgcttggcatgccaaagcaccatatattgttttctgagccccaatgctataaatgaccgaatattttctgattgaactagctaaagtcgattttgttgtttgtaactaaaaacctt

SEQ ID NO: 607004 - DNA, 432 bp, Homo sapiens
ccatgagggaggttgcctgtaggattyagaaagaaggaggaggaagaagagagggttgctgggatgttactgaatctccagctcaaatttaaccctgttcatgcaaagccctaaaccaagaagtgttgtcccaattatttgccctaaaccagtcattcccctcccagaggcatcagacactcagtaggggagtgacatgtggggcaaaagttgagctcaacctcagagtcatcattttcatgacatgcatctatgagggttgggacacatttactgaaagaggaccagagacacatggccaactgctcagtggcctcagtggccaactgctcagctcatgcaggacaaaacaggcaaaataatggattgcaggtggcagtgaactagagaaggccttgcaagctggcatagggccaggaatactgtaagaaa

SEQ ID NO: 607005 - DNA, 592 bp, Homo sapiens
gctgtcttatgttcctgtcgcctgatctcaaatgacactagccaattctggatgccccaggaactgcacaaaaattcttcttctaaaaaataaacttaagaggcatcacaacaaatgaaatgcatggatcttgtttggatcagacagatgctgggagaaattttattctgctctgggtattagatgatattcaggaccttcagttaatttggacaggtgtgatgataacatggtgattatataaaaaatcgaaacaaaatgcctttcagtggtacctactgaaacatttataggtgatgtatagaatttgctttttttaaaacaacaacaacaaaaaacttgactgaaaaaaaaatgttggggaaataaagattagccatcagttgacctgtggaagctacataatgaaggtgtaggggcttatttatttatttatttattttttgagagrgagtgtcattctgtcacccaggctggagtgcagtggcatgatctgggctcactgcaagctctgcctcccaggttcatgccattctcctgcctcagcctcccaagtagctgggactacaggtgcccgctgccacgcccagct

SEQ ID NO: 607006 - DNA, 655 bp, Homo sapiens
actcaatatataaaaggaaatcacactaaaagctcttatcacaaatagcttgactttattayaacttggttagctggtacattgaaggtcagcactccgggttctatcgaaccagaagctcaacatttcaactgcaggttttgaccgcacatttccagctaccacgaggtgggaatgttagacagagtggaaggggcccacacaaacatggagagaccccttttctgctctcagcacagacctctgcaaacaatgatttccttgttctaagggtcctcctgtccctggctaaaagatgccctagagtaaactccagaaacccatccagtcacataaccattaagagataaaccacaggccaggcgtggtggctcacgcctgtaatctcagcactttgggaggctgatgcgggcagatcacgaggtcaggagtttgagaccagcttgaccaacatggtgaaaccccgtctctactaaaaatacaaaaattagccaggtgtggtggcaagcacctgtaatcccagctactcaggaagctgaggcaggagaatcgcttgaacccaggaggcggaggttgcagtgagccgagatcatgccactgcactccagcctgggagacaggagtgaaactccatctcaaaaaaaaaaaaaaagaa

SEQ ID NO: 607007 - DNA, 655 bp, Homo sapiens
actcaatatataaaaggaaatcacactaaaagctcttatcacaaatagcttgactttattacaacttggttagctggtacattgaaggtcagcactccgggttctatcgaaccagaagctcaacatttcaactgcaggttttgaccgcacatttccagctaccacgaggtgggaatgttagacagagtggaaggggcccacacaaacatggagagaccccttttctgctctcagcacagacctctgcaaacaatgatttccttgttctaagggtcctcctgtccctggctaaaagatgccctagagtaaactccagaaacccatccagtcacataaccattaagagataaaccacaggccaggcgtggtggctcacgcctgtaatctcagcactttgggaggctgakgcgggcagatcacgaggtcaggagtttgagaccagcttgaccaacatggtgaaaccccgtctctactaaaaatacaaaaattagccaggtgtggtggcaagcacctgtaatcccagctactcaggaagctgaggcaggagaatcgcttgaacccaggaggcggaggttgcagtgagccgagatcatgccactgcactccagcctgggagacaggagtgaaactccatctcaaaaaaaaaaaaaaagaa

SEQ ID NO: 607008 - DNA, 655 bp, Homo sapiens
actcaatatataaaaggaaatcacactaaaagctcttatcacaaatagcttgactttattacaacttggttagctggtacattgaaggtcagcactccgggttctatcgaaccagaagctcaacatttcaactgcaggttttgaccgcacatttccagctaccacgaggtgggaatgttagacagagtggaaggggcccacacaaacatggagagaccccttttctgctctcagcacagacctctgcaaacaatgatttccttgttctaagggtcctcctgtccctggctaaaagatgccctagagtaaactccagaaacccatccagtcacataaccattaagagataaaccacaggccaggcgtggtggctcacgcctgtaatctcagcactttgggaggctgatgcgggcagatcacgaggtcaggagtttgagaccagcttgaccaacatggtgaaaccccgtctctactaaaaatacaaaaattagccaggtgtggtggcaagcacctgtaatcccagctactcaggaagctgaggcaggagaatcgcttgaacccaggaggcggaggttgcagtgagccgagatcaygccactgcactccagcctgggagacaggagtgaaactccatctcaaaaaaaaaaaaaaagaa

SEQ ID NO: 607009 - DNA, 632 bp, Homo sapiens
tttaaagcacctataaactgccctcaggattcaatcatttttccattccttccggcattatatactttgatgttttaatgttattagcccacaatacacaccagtttcagaaactcagtttttgtcctctaagggcttttagtcctcccaaaaaaagaatagggcaaaagcaaggaagatcatgaatctggttttctaaaagcattattacaagactgctttataaaattgtaatccccagctgcagagttccgcagatggcttgaaagtgtcttacatgcaaataaataaaaacaaaaggccacttatgcgagcagaacacagcgtgctcgatagtcatcttaaaccgagcaggtaggtactttatcagaggcagacaagggaaacgtcacttatttagagttcaccgcacgcctggataaaagtcctcactaacaaaatccctgcctttgtggattctgtgtcggaaagggaaacgataaagaatacggtttgtgacagcactactctcaggagacgaaggagagatgctaagatcttggaaaggagagagaataggaagagtcggaggggagatctcctctcagtaaaacggcacccacarcagtcagacttcagctacgagcaaaatc

SEQ ID NO: 607010 - DNA, 569 bp, Homo sapiens
ctctagtggttctctctgcttccccacacccacccgtaagccacaacaatctttccaaaacacgaacttgatggtttcattgtcacaccccagcttaaaacactttcctggcttcccctggttcttaggataaagaccaaaatacttaatgcwgcacagtccagtcccaacccactctccagcttcatcttaatcacacccctctttgctcctagtgtcctaccacattgcctgacttactgtttcttggtaaatgctattcttacttcctgaagattatttccatctcctcacccgacacccttcagttagcttccactcaaccttcagaatttagttcaggtgacccttcctcaagagaagattttcctgaaccattaggaaaggcttctcttgtttctcagtctcatagcatcatctgtctcttttttgtgacttgaatataattaatattttatattttgtccttgttgcttgtttggttaatagatttccaccactagactgctcaatacgttagtagggcacctgacacatagttgcagctcttatttattgaatgaatgaat

SEQ ID NO: 607011 - DNA, 569 bp, Homo sapiens
ctctagtggttctctctgcttccccacacccacccgtaagccacaacaatctttccaaaacacgaacttgatggtttcattgtcacaccccagcttaaaacactttcctggcttcccctggttcttaggataaagaccaaaatacttaatgctgcacagtccagtcccaacccactctccagcttcatcttaatcacacccctctttgctcctagtgtcctaccacattgcctgacttactgtttcttggtaaatgctattcttacttcctgaagattatttccatctcctcacccgacacccttcagttagcttccactcaaccttcagaatttagttcaggtgacccttcctcaagagaagattttcctgaaccattaggaaaggcttctcttgtttctcagtctcatagcatcatctgtctcttttttgtgacttgaatataattaatattttatattttgtccttgttgctwgtttggttaatagatttccaccactagactgctcaatacgttagtagggcacctgacacatagttgcagctcttatttattgaatgaatgaat

SEQ ID NO: 607012 - DNA, 544 bp, Homo sapiens
gggaaccacctaaacacacaacaatataaactgggccaggtgcagtggctcaggcctataatcccagcacttcgggaggccgagtagagtggatcacctgaggtcaggagttcaagaccagcctagccaacatggtgaaaccccgtctccactaaaaaaawatatatatataaattagccaggtgtgctgacaggtgtctgtaatcccagctacttgggaggctgaggcagggagattcccagctactcgggaagccgaggcagggagaatcacttgaaaccgggaggcaaagtttgcagtgagctgagatggtgccactgcactccagtctgggcgacagagtgagtctccgtctcaaaaacaaaaaacaaacaaaaaccaaaagaaagggaatattttacaaccactaaaatttaaaacttaattcagccttaaaaaggaagaaaattctgtcacatgctacaaacatatatgaaccttgcacacattacactaggtgaaataagccagacacaaaaggacaaatactatatgatttcagct

SEQ ID NO: 607013 - DNA, 602 bp, Homo sapiens
agagaaaaataagtgaaagataacacgagatggtgtgattaaagaatactgggggagggggaccacaaagaggaagggctcacagtttcgctcagtggggcacttcacctatttttttccctttgtatgctgtgggaaacatttttctctttaatttaactggtataacatgtaaatagattgggcaacaaagaaaactaaaataagtgtcagaagatatttgaggatacaagataaaagaggatagaaaacattctagatggtctatgttaacaaaaggataccagctagaaaagccagattaaaaggtagaggagagtaactgggagaaaaagcaataaaaaggccagtgtaagcaataagtgatatttagtgtatatcctcaaatagtaggatcatgtacaaaatagttcaaggacttgtgctgtattgccaaggagcatacaatctaacaggcacaaataagacaaaaggcacaaataagaaacatatttttcaagcaataattcataagggcaaattaaaataatgcagaagatragtaccatcaaggcaaaggaataaaaacagcaagatcctaggggactggggtccaattttga

SEQ ID NO: 607014 - DNA, 458 bp, Homo sapiens
tttcagggacaagaaataggcaaaaattaagcagggtattaaggctttaaacaagcaggctgaagcccagcacaagcctgcgacagagctagggaaatggagcaaaaatgaagcaagctcggtcacactgccacaccagcaacgtggtgggatgctgagagaacctactcctaagggggtgagagagcctgggcctaccacaggatccccagctacagacagcaaggcccactcctgcactgctgattggtgggtctgagtctgtcttctcagggacaaactgaaggtctgcacatggttaaggtttcctgttaaacgtcctcagagcctgccatggaagggaacagtccaaaagcytcaaggaaagcagagaccgcaagcagaggctcaagccataagtcaggacttggggaaaaaagcgaagaacccaattatcagaagtgagcaccaagctcagc

SEQ ID NO: 607015 - DNA, 486 bp, Homo sapiens
tcctaaaattgtactactggatacaaaaagaaaataaatgttaaacacttctgtaaattgttaagcatgttgcaaatataaaatgttctcactagttcttaccagaaaaatcagaaatgtatcattttacaagatgatgatgaaaaatgtgtaaatgcaaagccaggtgtggtagctcatgccttcccagcacttggggaggccaaagcaggtgggtcacctgaggtcaggagtttgagaccagcctggccaacatgctgraaccccgtctctactaaaatacaaaaattagctggatgtggtggcacgtgcctgtaatcccagctattcaggaggctgaggcaggaaaattacttgaacccgggaggcggaggttgcagtgagctgagatcatgccactggactccagcctgggtgacaaagcgagactccatctcaaaaagaagaaaaaaatatgcaaatgcaggggccatgcaaaggaaggtt

SEQ ID NO: 607016 - DNA, 562 bp, Homo sapiens
  misc_feature 68, 69, 70, 71, 72, 73, 74, 75, 76, 77, 78, 79, 80, 81, 82,83, 84, 85, 86, 87, 88, 89, 90, 91, 92, 93, 94, 95, 96,97, 98, 99, 100, 101, 102, 103, 104, 105, 106, 107, 108,109, 110, 111, 112, 113, 114, 115, 116, 117, 118, 119, 120: n = A,T,C or G
  misc_feature 121, 122, 123, 124, 125, 126, 127, 128, 129, 130, 131, 132,133, 134, 135, 136, 137, 138, 139, 140, 141, 142, 143, 144,145, 146, 147, 148, 149, 150, 151, 152, 153, 154, 155, 156,157, 158, 159, 160, 161, 162, 163, 164, 165, 166, 167: n = A,T,C or G
gataacaggttggatagaagtatactagatggtaaagagaaatgtgtcttacgttttcaattttgctnnnnnnnnnnnnnnnnnnnnnnnnnnnnnnnnnnnnnnnnnnnnnnnnnnnnnnnnnnnnnnnnnnnnnnnnnnnnnnnnnnnnnnnnnnnnnnnnnnnnataaatatatagttctgttaaagaaacagctgaatttctctaattcagcttgcctggttcaactgaagttttcctccttcaagttcccttttctgtaaaatatttttgttctttacaaaataaattgagtagtgactgcaactaacaaagatgtattaacagttgtttgttaatttttattcatgacttcagaaatcataacttagctagagaactaccttttatgtctcttacccaaacgtgattgagttacatgacagttttacatatgcattttccctgagttatatttaaaaatctatacatttttcctgaatacgcaggamgtagctggcataaacttcaagttcagtaagaaaacttaaagccctttcttgggttggagctaatgggct

SEQ ID NO: 607017 - DNA, 572 bp, Homo sapiens
gctccaaaattgaagtgacgtaacccaccaagtgtctatttcttgcaaatactttacgattaatgcaggtcatggaggggtagaggggttgtgggattactgtgattcacaagatctctgagacaggctgacagagactgcaaatttaatttcttcacatttatttagcaataaaatggaaaaaagaatgtctacttttgcaagtctgtcatgaagattaaatatggaaaacactgtttggatatcccaaagataacattccttctctcttttccactgagcacctgtaagaaacaaatttcacctcccatttggactatagttatgtttttgcctgctaaatgttaagtgcttgaggacaaagcatatgtcttttttattcttgtatctgcttaattgtccagatgttgccagtagacttttggtaatacttgtcgaatgtagagaactcataattctccaattctggaatggctttctaagtgttctttgcaatccttgctctgtatttaatctgaatagaaatagaaataaaaatraaatattgagtgttttagttttaaagagtcata

SEQ ID NO: 607018 - DNA, 591 bp, Homo sapiens
  misc_feature 82: n = A,T,C or G
catgtttgagtcataagatctgagttttaaagtttctagacaggtttgggtatactttcaggtgggaagataattaaatccnttgtcttataaagataaacctgaaggaatgaagagaaatagtggatctcaaagataagtaaacttaaatttgaagtcgattcaatggtggttccaaggagtagcctggacttttatagctctccctgctgctcaacactaatgtctataacattcctcaaaacctgtaacacaaagagtttatttcgtttgctatacaaatgtagctcaatgtgcacatgcaacttcaaaatcagcatgttcttcaaaacatagcactttaaacaactcctgtataggtttcttttattacaatgaagttgtattayccagttgcataagactgcttatgttcatattcgtttcttaccttcacacactggtactcaagttattattattattttttacatcctaaattataatttctggcctttgtatatgtcttataatcaatgccaagagaaatgtgccagatgacaatcagattcaaagtttgaggttcaccatcaattttactatctacccagg

SEQ ID NO: 607019 - DNA, 527 bp, Homo sapiens
gcagatcacctgaggtcaggagtttgagaccagcctggccaacatggcaaaaccctgtctctactaaaaatacaaaaattagccgggcatggtggtgggtgcctgtaatcccagctactcaggaagctgaggcaggagaattgcttgaaccagagaggcggaggttgcagtgagccaagatcgcactattgcactctagcctggtgacagagcgagactctgtctcaagaaaaaaaaaaaaatgctcctgtgaaaacaaaagtcttccttcttcacaaatgaagaaacagaaagttaggatgaggaatcatagagacaaggtagtggcaatctccctaagtattcctgttaccatagctgcaaaacaaactatactacaactcagggacttaacacaacatttgttttsctcatgaatctgctaccgaggaggaacatcagagaatttatagacatgttttaaagacatcagagtagccaaagtctggtgtttctaaaagacatgaatggagagaagttaagatgga

SEQ ID NO: 607020 - DNA, 392 bp, Homo sapiens
ccctcacttattttaatccagaaaaattctccatctttttcaaagtccagtggaaggctcatcctcttcttgagggtctctttggccattttattcaaaactcatcatttgatgagtaccaatagctccttttttwaaaaaaaatcacattcatgtgttttatctctgtactatcttgaaatagggccatttattgtgatttctctgctactaaagtcaaactgataagtagggatggaattgtttcttaacgtttgtatcccccaatttgttcctctttagggatattaacgtttaatgcaatgaaagaacatgaccttatttcctacagcctttgcacatctcttcatgggtttctggttgtgggtgtctgtgtctgagatgcaaaaagc

SEQ ID NO: 607021 - DNA, 558 bp, Homo sapiens
gtttaaaacagtaaaaaccaaaccacacaacaaggaccatcactaccaaaaatgcaaacaatggcggcagagagacagaatacaaatcacttatgtgtgaattagctttatttatatttgaatgttcgtgggttgggggatgtctttctactttttactgttcaaatttttcattttttaaaaaaaggaacaagaagatattcgttttttgatgtcacttttctaaaattaaaataggtgcacaacttattaaaaagcagaaacaaagcatgaaaggaggaaggaagggaggaaaggaggagaagcgactagaagaggagagaaagtttgggagcctgtcctggcccttctaatgattttctgtgactttggagtagtcacatgccctctttctagctccaagttgctcatctgtgaaatgggcaggaagagataatggttgggacaattaaaggagatacagattgtgaaatagacaatatgtaycctatgccatcagactatgttccctaactttcgctgggacaagacacgtgcagaaaatgattctgttctttt

SEQ ID NO: 607022 - DNA, 519 bp, Homo sapiens
aacttgcaaactcctgacaccatcctggactctgtggtatgtgcaaatgagctcttttgcctgggtgtctgaagagtccagtcttcacattgaggatggcctctacgtgacctgggaaattatgcttggaagaaatccctgagcagtcaaaacccgaaagtccctttgctcctggtcttacmagccttcccaatgactaagtggggcaatttcaggtcataaaagatgcccttcctctctgattctatgcctccctgatcccccattgaaatctagaatgcttgctgcttctgtagtctgtcatgtgaaaacacagaccctctagccaaggcagctgcccttgattctttagggaggtcagcagcgggaggaagagccctgctggctaggcaggtaggagggaggagaaaaggctgtcacatggggcattaacagcataggctccttccataaataagctcccctggaacatcctctggctagcttttaattaagtggggactgcccaattctctcatg

SEQ ID NO: 607023 - DNA, 519 bp, Homo sapiens
aacttgcaaactcctgacaccatcctggactctgtggtatgtgcaaatgagctcttttgcctgggtgtctgaagagtccagtcttcacattgaggatggcctctacgtgacctgggaaattatgcttggaagaaatccctgagcagtcaaaacccgaaagtccctttgctcctggtcttacaagccttcccartgactaagtggggcaatttcaggtcataaaagatgcccttcctctctgattctatgcctccctgatcccccattgaaatctagaatgcttgctgcttctgtagtctgtcatgtgaaaacacagaccctctagccaaggcagctgcccttgattctttagggaggtcagcagcgggaggaagagccctgctggctaggcaggtaggagggaggagaaaaggctgtcacatggggcattaacagcataggctccttccataaataagctcccctggaacatcctctggctagcttttaattaagtggggactgcccaattctctcatg

SEQ ID NO: 607024 - DNA, 519 bp, Homo sapiens
aacttgcaaactcctgacaccatcctggactctgtggtatgtgcaaatgagctcttttgcctgggtgtctgaagagtccagtcttcacattgaggatggcctctacgtgacctgggaaattatgcttggaagaaatccctgagcagtcaaaacccgaaagtccctttgctcctggtcttacaagccttcccaatgactaagtggggcratttcaggtcataaaagatgcccttcctctctgattctatgcctccctgatcccccattgaaatctagaatgcttgctgcttctgtagtctgtcatgtgaaaacacagaccctctagccaaggcagctgcccttgattctttagggaggtcagcagcgggaggaagagccctgctggctaggcaggtaggagggaggagaaaaggctgtcacatggggcattaacagcataggctccttccataaataagctcccctggaacatcctctggctagcttttaattaagtggggactgcccaattctctcatg

SEQ ID NO: 607025 - DNA, 502 bp, Homo sapiens
gggtacaggtggtatttggctacacgagtaagttcttcagtggtgatttgcaagattttggtgcacccatcacccgagcagtatacactgcaccctatttgtagttttttaataacttcaagattgaaaacatggaagttactgagtacccagtatgtattaggagtagcctggcgctgtggaggatattttatatctggtcttaagtttaggatagtttagaaatttagtatatggtaaggactaggaaatctggggagactgatcaggctggcaagagcctgactgggctgggtagaaactgggtgaataggactaggcaatggtgagtgtagataaatcttgtgtttttkttttgttttgttttgttttgaaatggagtctttgttgcccaggctggagttcagtggtgtgatctcggctcactgcaacctctgcctcccaggttcatgcaattcttgtgcctcagcctcctaaatagctaggactacaggtgcctgcc

SEQ ID NO: 607026 - DNA, 502 bp, Homo sapiens
gggtacaggtggtatttggctacacgagtaagttcttcagtggtgatttgcaagattttggtgcacccatcacccgagcagtatacactgcaccctatttgtagttttttaataacttcaagattgaaaacatggaagttactgagtacccagtatgtattaggagtagcctggcgctgtggaggatattttatatctggtcttaagtttaggatagtttagaaatttagtatatggtaaggactaggaaatctggggagactgatcaggctggcaagagcctgactgggctgggtagaaactgggtgaataggactaggcaatggtgagtgtagataaatcttgtgtttttgttttgttttgttttgttttgaaatggagtctttgttgyccaggctggagttcagtggtgtgatctcggctcactgcaacctctgcctcccaggttcatgcaattcttgtgcctcagcctcctaaatagctaggactacaggtgcctgcc

SEQ ID NO: 607027 - DNA, 365 bp, Homo sapiens
cgataaaaaagtatcaacactttttgaatttggtagaaaataatctaagccaaatgttttcatatgagcctctactcctaagccttagaatagyattacattccctcaggccaaatacttagaggttatttttccaggggcaggagatgaggcaacagagcatatacactcttctagtacttattttattttttctcaggaaagatcaataattataccaaaatcaggtattaaacagaaaccagacaggtgaagatgttgtagaaatgcttatctcatgaatactcaacccatttctcaacctgtcaaataaagatgcttctcttactccaggttccagggatgtagtaagaattaatgcatac

SEQ ID NO: 607028 - DNA, 382 bp, Homo sapiens
cctcacctccatttctttatcaaacatttccttctggaccatctgtaaatatattatttctcctccagaagtccctgaaacaaaactttcaagccacccatgaccagcactgtccaacaaacctttctgcaatgatggaaatgttcgytgtctgcactgtctgatagcgtagccactagccaaatggaaccattgaactgtgactggtaagactgagaaactgagtttttcattgtgtgaaattttaattggttttaatttaaatagccacatgtagctagtggctactgtactagacagcacagctttcaacaaatcaaatggtttattcctagttctcaatgtgccttaatgctgtatcatttggtgccgttattgttct

SEQ ID NO: 607029 - DNA, 382 bp, Homo sapiens
cctcacctccatttctttatcaaacatttccttctggaccatctgtaaatatattatttctcctccagaagtccctgaaacaaaactttcaagccacccatgaccagcactgtccaacaaacctttctgcaatgatggaaatgttcgttgtctgcactgtctgatagcgtagccactagccaaatggaaccattgaactgtgactggtaagactgagaaactgagtttttcattgtgtgaaattttaattggttttaatttaaatagccacatgtagctagtggctactgtactagacagcacagctttcaacaaatcaaayggtttattcctagttctcaatgtgccttaatgctgtatcatttggtgccgttattgttct

SEQ ID NO: 607030 - DNA, 609 bp, Homo sapiens
attgcctaatccaaaatcatgaataatttacatcaatgttgtctaaaaatgactacagagagactcatggcttaaaaccaaaaggattcagcagaatgctgactaaaaaaacaccaaaggaaagcttaagaagtagtagaacttagtaagttcagacttactttgggaacttagtaaatgcagattcctggactccactccagaactaccgactcataatttcccagggcagggcccagaaacatgtgtttgtttgtttgttttctgagacagagtctcactctgtctcccaggctggagtgcagtggtgtgatctcagcttaccgcaccctccgcctcccgagttcaagcaattctcgggcctcagcctcctgagtagctaagattacaggggtgtaccactacacttagctaatttttttgtatttttagtagagacaggcttgtcactgtgttggccaggcttgtctcgaactcctgaccttgtgatctgcccatcttggcytcccaaagtgctgcgattacaggtgtgagccactgcacctggccgaaacaagtgttttaatactttctaggcaactgttacacagggaagaatctaagggcctg

SEQ ID NO: 607031 - DNA, 609 bp, Homo sapiens
attgcctaatccaaaatcatgaataatttacatcaatgttgtctaaaaatgactacagagagactcatggcttaaaaccaaaaggattcagcagaatgctgactaaaaaaacaccaaaggaaagcttaagaagtagtagaacttagtaagttcagacttactttgggaacttagtaaatgcagattcctggactccactccagaactaccgactcataatttcccagggcagggcccagaaacatgtgtttgtttgtttgttttctgagacagagtctcactctgtctcccaggctggagtgcagtggtgtgatctcagcttaccgcaccctccgcctcccgagttcaagcaattctcgggcctcagcctcctgagtagctaagattacaggggtgtaccactacacttagctaatttttttgtatttttagtagagacaggcttgtcactgtgttggccaggcttgtctcgaactcctgaccttgtgatctgcccatcttggcttcccaaagtgctgcgattacaggtgtgagccactgcacctggccgaaacawgtgttttaatactttctaggcaactgttacacagggaagaatctaagggcctg

SEQ ID NO: 607032 - DNA, 437 bp, Homo sapiens
tggaattcttgttaagaaatttctacagatgcaaacaggataattagagtagccacccctttttctccctatcattcttaatcttaacacctttgtagtacaacatttttggcagtggaaaccttttctctaataaaatcttttttttttttttttgagacaagatctcactctgtcacccaggctggagtgcagkggtgccatcttagctctagtacaacctccacctcccaggctcaagtgatcctcccacctcagcctcctgagaagctgggactacaggcaagcaccaccacacctggctaattttagtatgtatactttgagtagagatgaggttttgtcatattgcccaggctggtcttgaactcctgggcttcaagtaatctgcccaccttggcctcccaaagtgttggaattacaggcatgagccacgg

SEQ ID NO: 607033 - DNA, 432 bp, Homo sapiens
gataattagagtagccacccctttttctccctatcattcttaatcttaacacctttgtagtacaacatttttggcagtggaaaccttttctctaataaaatcttttttttttttttttgagacaagatctcactctgtcacccaggctggagtgcagtggtgccatcttagctctagtacaacctccacctcccaggctcaagtsatcctcccacctcagcctcctgagaagctgggactacaggcaagcaccaccacacctggctaattttagtatgtatactttgagtagagatgaggttttgtcatattgcccaggctggtcttgaactcctgggcttcaagtaatctgcccaccttggcctcccaaagtgttggaattacaggcatgagccacggtacctggttcaaatacaatcttacacagaattc

SEQ ID NO: 607034 - DNA, 447 bp, Homo sapiens
gaattcttgttaagaaatttctacagatgcaaacaggataattagagtagccacccctttttctccctatcattcttaatcttaacacctttgtagtacaacatttttggcagtggaaaccttttctctaataaaatcttttttttttttttttgagacaagatctcactctgtcacccaggctggagtgcagtggtgccatcttagctctagtacaacctccacctcccaggctcaagtgatcctcccacctcagcctcctgagaagctgggactacaggcamgcaccaccacacctggctaattttagtatgtatactttgagtagagatgaggttttgtcatattgcccaggctggtcttgaactcctgggcttcaagtaatctgcccaccttggcctcccaaagtgttggaattacaggcatgagccacggtacctggttcaa

SEQ ID NO: 607035 - DNA, 449 bp, Homo sapiens
tggaattcttgttaagaaatttctacagatgcaaacaggataattagagtagccacccctttttctccctatcattcttaatcttaacacctttgtagtacaacatttttggcagtggaaaccttttctctaataaaatcttttttttttttttttgagacaagatctcactctgtcacccaggctggagtgcagtggtgccatcttagctctagtacaacctccacctcccaggctcaagtgatcctcccacctcagcctcctgagaagctgggactacaggcaagcaccaccacacctggctaattttagtatgtatactttgagtagagatgaggttttgtcatattgcccaggctggtcttgaactcctgggcttcaagtaatctgcccaccttggcctcccaaagtgttggaattasaggcatgagccacggtacctggttcaa

SEQ ID NO: 607036 - DNA, 473 bp, Homo sapiens
aaacctggaggaccataccastcatattcaaatgctaattcagggaacaaactccatgagttcctctacttgtgtgcaataataagtacctaaggaatgtctactacactttataaagctcacgtctctcgaagctgaatggggcagagcagggctgcctaaaaacaggatggcatatatgaggggaaatctccactcctgttagcctgaatcatgactcccaacttcagccatatattttcttgaagacaaaaaccaggtgaagaggcagctctcaggatggaagccagaaggctgcttctgccttagaatctgccaaatgcctgttccccaatgaaggtaagacccagacatttaattcatcattcttatgttaccagtcattcttttccttaccaaaggaaccctgccaactagcaaagattctgtttcattatacagcgccttcacattgatggctatttcagtggcag

SEQ ID NO: 607037 - DNA, 453 bp, Homo sapiens
accagtcatattcaaatgctaattcagggaacaaactccatgagttcctctacttgtgtgcaataataagtacctaaggaatgtctactacactttataaagctcacgtctctcgaagctgaatggggcagagcagggctscctaaaaacaggatggcatatatgaggggaaatctccactcctgttagcctgaatcatgactcccaacttcagccatatattttcttgaagacaaaaaccaggtgaagaggcagctctcaggatggaagccagaaggctgcttctgccttagaatctgccaaatgcctgttccccaatgaaggtaagacccagacatttaattcatcattcttatgttaccagtcattcttttccttaccaaaggaaccctgccaactagcaaagattctgtttcattatacagcgccttcacattgatggctatttcagtg

SEQ ID NO: 607038 - DNA, 418 bp, Homo sapiens
gaattcatataagagcataatgctayagtgcgcttccaagacaaaaacagcttacagaaccaaaattttacatccatccatagcctcaattgcttgaaactagtattctcgtgagttacctttgagtcctttgcatagtaaagggtgcggcctcgaagtttgaagtatcgctttttccacctttggaaagaactggtttgcttcaatagctgtccctctttaatactggtctagagagaagcagaagcacaatgacacgattaaaatgaaattcaaaaccaaatgaaattcagagccaatggtgcattttcattaacattttgaataatatttctcatgtcttacaaattacaggagaatattttactctcaccacagctttgcatatgtgcaaagccccaaagagcaaaagtgaatg

SEQ ID NO: 607039 - DNA, 430 bp, Homo sapiens
gaattcatataagagcataatgctacagtgcgcttccaagacaaaaacagcttacagaaccaaaattttacatccatccatagcctcaawtgcttgaaactagtattctcgtgagttacctttgagtcctttgcatagtaaagggtgcggcctcgaagtttgaagtatcgctttttccacctttggaaagaactggtttgcttcaatagctgtccctctttaatactggtctagagagaagcagaagcacaatgacacgattaaaatgaaattcaaaaccaaatgaaattcagagccaatggtgcattttcattaacattttgaataatatttctcatgtcttacaaattacaggagaatattttactctcaccacagctttgcatatgtgcaaagccccaaagagcaaaagtgaatgtgacatggttct

SEQ ID NO: 607040 - DNA, 417 bp, Homo sapiens
gaattcatataagagcataatgctacagtgcgcttccaagacaaaaacagcttacagaaccaaaattttacatccatccatagcctcaattgcttgaaactagtattctcgygagttacctttgagtcctttgcatagtaaagggtgcggcctcgaagtttgaagtatcgctttttccacctttggaaagaactggtttgcttcaatagctgtccctctttaatactggtctagagagaagcagaagcacaatgacacgattaaaatgaaattcaaaaccaaatgaaattcagagccaatggtgcattttcattaacattttgaataatatttctcatgtcttacaaattacaggagaatattttactctcaccacagctttgcatatgtgcaaagccccaaagagcaaaagtgaat

SEQ ID NO: 607041 - DNA, 605 bp, Homo sapiens
gagttttgctctctcacccaggctggagtgctgtggtgacatcttggctcactgcaacctctgcctcctgggattcaagcaattctcctgcctcagcctcttgaggagctgcaattacaagtgcccgccactacacctgactactttttgtatttttagtagaggcagggtttcactgtgttgaccaggctggtctcaaacttttggcctcaagtgatttgccggccttggccttccaaagtgttgagattacaggcgtaagccactgtgcctggccctttttattttgatagtatatattagggatagctttttagaagtggaatttgtgggttaaagggtaaataattatacattttttctagatactgcaaattttctgcccttggaattataccattttccattcccaccagtactctatgaaaagactaatttctcggcaaccttgacaacaaagtatgctatccaatctaatttagtatgtctttcacttattatgagtaaagtcagggtatttggggtatccatcactttgagtatttatcatttctatgtgttggtttcargttatctcttctagctactttgaaatatacaataca

SEQ ID NO: 607042 - DNA, 610 bp, Homo sapiens
ccaggagactcttttgagctgaaatacctggagctctctcaagctatttgggccttgcaatttgaaacccaggcttggacgattctaagccctgtggcagagagtaatcattttctctccaccctcagggtgaggactcatcctcagggttgggagtgactgctgtctctccagcccccaccaagtctaccaatgttctggttgttaaaatccagcatatgcatgaaatgtaataaaagtatctttgcagcagtaagtagagagttcctygttgtgagcagaccattcctcttcctccttggaaaaaattctgtatccactttctacattttcacgtttgtctcttcctctacacacacctcagctgctgctttatttacacttgtctcatgtaaggatcttcttttatgtggtaaccttggcttttcccactgttcttgctttccacgagttggatgcaggcaatataggagcccgactgcaaaagcgtaggtgatattgtccagaaagaaacccaattttcagaggcttgctgatgtggaagaaagccaagatattagactcatagagcttcactctgctaggtaggttgaaatctggacaccctgaa

SEQ ID NO: 607043 - DNA, 610 bp, Homo sapiens
ccaggagactcttttgagctgaaatacctggagctctctcaagctatttgggccttgcaatttgaaacccaggcttggacgattctaagccctgtggcagagagtaatcattttctctccaccctcagggtgaggactcatcctcagggttgggagtgactgctgtctctccagcccccaccaagtctaccaatgttctggttgttaaaatccagcatatgcatgaaatgtaataaaagtatctttgcagcagtaagtagagagttccttgttgtgagcagaccattcctcttcctccttggaaaaaattctgtatccactttctacattttcacgtttgtctcttcctctacacacacctcagctgctgctttatttacacttgtctcatgtaaggatcttcttttatgtggtaaccttggcttttcccactgttcttgctttccacgagttggatgcaggcaatataggagcccgactgcaaaagcgtaggtgatattgtccagaaagaaacccrattttcagaggcttgctgatgtggaagaaagccaagatattagactcatagagcttcactctgctaggtaggttgaaatctggacaccctgaa

SEQ ID NO: 607044 - DNA, 610 bp, Homo sapiens
ccaggagactcttttgagctgaaatacctggagctctctcaagctatttgggccttgcaatttgaaacccaggcttggacgattctaagccctgtggcagagagtaatcattttctctccaccctcagggtgaggactcatcctcagggttgggagtgactgctgtctctccagcccccaccaagtctaccaatgttctggttgttaaaatccagcatatgcatgaaatgtaataaaagtatctttgcagcagtaagtagagagttccttgttgtgagcagaccattcctcttcctccttggaaaaaattctgtatccactttctacattttcacgtttgtctcttcctctacacacacctcagctgctgctttatttacacttgtctcatgtaaggatcttcttttatgtggtaaccttggcttttcccactgttcttgctttccacgagttggatgcaggcaatataggagcccgactgcaaaagcgtaggtgatattgtccagaaagaaacccaawtttcagaggcttgctgatgtggaagaaagccaagatattagactcatagagcttcactctgctaggtaggttgaaatctggacaccctgaa

SEQ ID NO: 607045 - DNA, 462 bp, Homo sapiens
aaacgccaggaagagtttctttagggtgaagttggctttcgattggctttattctagggagatatatagggagcaaagaaacgggacttttttctcatcttttgcattttaagcaaaaactaataaaattagatgtttccaccgtcatgctcagtctcttagctgccggcagatcccgcttctaactctcaacacrggcacttaggaagccaggcaatccctgaagctccctcagaagctacggtatcagcggttcctgaggcgcaaaccaaaacccaacatcactccaaagagctcagcccgtctgtcgagcgacggaaatagcggagaggcgctcttgaagccgtgacagcctgggcgaaacgaaccaggtctccttcctggtccagcctacctccctagggacacctctcttccctcacggccagaggaagcgacggagagatgtggcgcttagattca

SEQ ID NO: 607046 - DNA, 594 bp, Homo sapiens
aggctaatcctgggcgaaattccaaagtaaactaaattttcatattccttctttaggttaaatcacatgaaattgacatttttgtaggtccaaagagttgaatatcagcaatatcatatgattcaaccttaatacatcctartgctgtctctctcccaacccctaggttgcctttctgttgcccacatcctcaaaacctcagttgtatcacatcacactggtctgctttcaaatcccccatactccaaaatatgttttcacctgcctcaagtgaattcttaagtagaagaagtttagatgaagtagagttaaggaatttaattcatgaaggcgatattcagaaatagatggcccttgcaagatgacttaaatcaaactacataagcagtcaaattcttcatcccatgtatttataaaaaaaaaaatattatttccctgcaactggcagcaagcctgcacattaatgttattcaagcatatacctatagagattactcctcttccaactgaagtctagaacgattttgacaattaaaatatttattcaactcaagagttctctgagtgatttcttttcctttcagacctatttct

SEQ ID NO: 607047 - DNA, 469 bp, Homo sapiens
tatgtataacctatccatgtacagcctatgcatctagttaatattattttgagcactaaacttatgtaataattttgtagaagcaggaaaattgggaagatcttccaaccaattatcaaaattactttatagaaacaaatgactcgggggatgatttactttgaacttaacaatgtagaaaaatggaatttttattaattatttacctttgatctcyataacaattaaccaaatggtataaacacacttttcttaggacatgagaacaaacagttttcagtgacaggtggctaaaagagttttataaactattagcctttagagctttagtttccatttgctaagttgtttgttagttcagtcttttggtaaacattaattgtttgcctactcatgtttgacaatacactaagtacattaggttcatgatgggagaggcaaggaaggatagagagatataaagatgcag

SEQ ID NO: 607048 - DNA, 575 bp, Homo sapiens
gatcatgaatccatagaccctattaggtggaaagtaaagctgcaaccgtgtgaatttgatcaatgtcagtaacatgggtaatttgggcaccaggaacacttgtctgtccacagtatgtaggaggatagagtgaataagggcagtaatttatctgaaaaatatcaggtttttacttctagattttcaggaacggtaaaaatgagaatcaaacatatcaaatatcaaacacactgtgaaggagaccagtattccccattttgattctctcttcacctaccccttggggaaggcgcttaaggtagtagttgcatgcatgtcgaaattacatatacacatatatacatgtgaacacatgcatacaatatatagactaatatgtatatactatgtatctttgtatggtgtatctatagtgtaagatatatgtgtgtatatatgtgtgtacaagtttcatttgtgtatggcagtaaaacaaaacctttgatrtacatacggaaatgtattatatatatgtatatatacacacacatacacacacacacacattcacacacaacacataaacagacattcct

SEQ ID NO: 607049 - DNA, 594 bp, Homo sapiens
gtgaacatccaggaattcagggcggacatgacaggaaactcggctctgtctgacatgcccaggttatatcctaatgattttctgataatcgtttattttctttatgtctttctcctaccgagctatgtgaagagtcagggtaataagcttcttgttaactcaagctgtactctgtagtgatgccctaatgtcccataagagttaatgctcctggctgggcacagtggctcaagcctgtaatcccagcactttgggaagccgagaggggtggatcacgaggtcaggagatcgagaccatcctggctaacayggcaaaaccccgtctctactaaaaatacaaaaaaaaattagccgggcgtggtggcggggtcccagctgcttgggaggctgaggcaggagaatggcgtgaacctaggaggtggagcttgcagtgagccgagatcgcaccactgcactccagtctgggcgacagagaaagactctatctcaaaaaaaaaaaaaaaaaaaaaaaaaaaaagttaatgctcctaatccctctccttgctgcgttttcttggaactgtgcactgtgagaaaacgttttctgcaagcaca

SEQ ID NO: 607050 - DNA, 590 bp, Homo sapiens
tgacgtgacccaaatgaaacgatttcacttaatgaatttggacaagccatgtttcctcaaagcattccattaaccatgttttgtcccatcgcttatgtaaaaatatcgtattatataagtgcctacgtttagacatgtagataattaaaatagaggtttaatgtccatttggttttacaaagttatgacatttcctatacaaagtcaggggcttatttcctccctaattcatttggtaacttgccttgatggtaatatgagttgtgtgttttaagatattatttgtttagcctaggggtaatgtaaattctaaaatttaactctaacgatctgaataataacacactatatttatacatggccaacttactgccatttatattttgttttctctatacttttgactagagtattgggggraaaatgccccaagaagagacctccaacgaacaattttatgtgcacaatgactactactggcttcctacaagttttttctctgcataccactggatacattctgtatacccaacatttgaaagtagttttctattttacattttcttaattctaattaaacaaatcttaat

SEQ ID NO: 607051 - DNA, 558 bp, Homo sapiens
tgttttggaagtaaagtacagattataaacaaataaatataagaacagagttcaaccaggccagctgcagtggctcataataccagcactttgggaggctgaggcaggcagattgcttgagcccggaagtctgagaccagcctgaacaccacagcaagaccccatctctacaaaaaatgcaaaatttagccaggcatggtagcgtgtgccgtagtcccagctactcaggagactgaggtgggaggatcacttgagcttgggagatggaggttgcagtgagctgagatcatgccactgcaactccagcctgtaaaaaaacaaacaaacaaaaacacctcaaccaaagtgaagatagatgggtgcaagcaagacttttggggtgttcccaarattctgccacacgaaatgctgtgaactgcagcttgcttcagactgcccctctctcggaccctcccagcagctctgatgttacgtgtctgcgtaacctctaactccatgccacagagaaagtggaaatattgctaattagcactggttgacccctaaatggagtcacgg

SEQ ID NO: 607052 - DNA, 619 bp, Homo sapiens
ccactggtgaaactggacaatttaaagccaatctatcatgacggtagtttatagagagtcagatatgatccagggaaagttagcacatcacaaaacacccttgtcagagagcaattacttattttccccaaaaatattttcaaatatctgatgtgaacttgttatctttgataatggaatgttagaaaatggagctcactgtatgatgaatatcagactaatcttgacagatctagtatctggtcacatgaagtttatgggttaatataaaagtgcaggactctacattattcaytggattttgggcaaatatgtgtcacatacatattatgtgtgagacactaagtgctgaatatacagcaaccaatgaataagatgcatagaattccttccctcatagagtttccattatattttcttttcttgataccataagcagagtagggcttagctattaggaatgggccttttgttcatggaaacaccctagaaggtggcagaaatatagaggagactgatcttttaccagtcacatttggcccattgcatctcatttatatcatgtgaatacacagggttccagggtaacaaaacataacttatagaaaatctaggagaa

SEQ ID NO: 607053 - DNA, 619 bp, Homo sapiens
ccactggtgaaactggacaatttaaagccaatctatcatgacggtagtttatagagagtcagatatgatccagggaaagttagcacatcacaaaacacccttgtcagagagcaattacttattttccccaaaaatattttcaaatatctgatgtgaacttgttatctttgataatggaatgttagaaaatggagctcactgtatgatgaatatcagactaatcttgacagatctagtatctggtcacatgaagtttatgggttaatataaaagtgcaggactctacattattcattggattttgggcaaatatgtgtcacatacatattatgtgtgagacactaagtgctgaatatacagcaaccaatgaataagatgcatagaattccttccctcatagagtttccattatattttcttttcttgataccataagcagagtagggcttagctattaggaatgggccttttgttcatggaaacaccctagaaggtggcagaaatatagaggagactgatcttttaccagtcacatttggcccattgcatmtcatttatatcatgtgaatacacagggttccagggtaacaaaacataacttatagaaaatctaggagaa

SEQ ID NO: 607054 - DNA, 615 bp, Homo sapiens
cataaatccttacctattttgagagaaaaagaaatctaaaggccaggtatggtggtttaccccctgtaatcccagcactttaagaggccgagacaggtggattgcttgagcccgggagtttgagaccagcctgggcaacatggtgaaactccatctcaactaaaaaaataataataataagcaaaaaattagctaggtgtagtggtgcacatctgtagtcacagctactcgggaggctgaagtgggacaatcacccgagcccaggaagttgaggcagcagggagccgtgatcatgccactgcactccaacctgggtaaatggagtgagatcctgtctcaaaataaatctaaaaactgtttccaatatatataaaatgcaccttgtagttaagaaggaacttcagaaagaagagggaaaaaacactgaggaagaaaygaggggaaataatgaaagcagaagagatgaaaaagcgggaagacaattagaaggaagtggaggaaataaaaaacaatcgcgaaggagctcattagaaacgagactcagtagaaaggtggaagccacagctggcaagagggccaggccccacctcccgcagcacacaccagcacagagct

SEQ ID NO: 607055 - DNA, 566 bp, Homo sapiens
tgtgaatgcagcctgcaatgggatggtgtcttgtccagggctgggtcctaccttgtgccctgagctgctgggacaagactccagcyaccttccaccctaaactggaataagtgggattattttttcttatttagccaatatttctcatttttaataatttttcttaaacatatgtatagcctacatttatttcaatgcttaaaattgtaagtgttttggtctttatttagatgtttggtgatgtatttgtgactagaaatatgccataggaacttaactcttgtttctatcaattagcctatggtaaattaatttttatacgttatttcacttaaagtcgcagtttccaagaacctattgacaacataagtgaggacttactctactcccaataatgacaacacacattcttcttttgccccagtccatgcagaggtaggtggcttcctattctggttcctgccctctctggctcctgaacttccataagaacccatgaaacaaccataccctaagacttagttgagtagtaaacaaatgtgactgccccaatcagaaataaagaa

SEQ ID NO: 607056 - DNA, 617 bp, Homo sapiens
taaaattgcaactattcactttgggaggctgaggagggtgtattacctgatgtcaggagttcaagaccagcctggccaacatggcgaaactccatctctactaaaaatacaaaaatcagccrggcatcatggtgcatgcctgtagtcccaggtacccgggaggctgaggcgagagaatggcttgaacctgggaggtggaggctgcagtcagccgagttagtgccactgcactccagcctgggcgacagagcaagacgcaaaaaaataaaaaaaaagactcaaaaaaataaaataaaaataaaagtggaactattgaattccagctaaaatggtggccaaatgaagtttgaaatttacatggaatttaattgatatagtgaaacttcatattctagtagccaaaaaaaaagtccttttgaaatttttatgtaatatttaagcagaggtaggtacaatttggtaatctgaccaactgcttagacactgactgcatcattaatggaaaactgaagtctttcccagtttttttttttaactacgtagcgatgtttatattaagaaagtcattggacccctaaaaaatcacctatatgatctccagttttaccattctatga

SEQ ID NO: 607057 - DNA, 589 bp, Homo sapiens
cctacattggcctctatgtgttcaagtgaaagaaagagtcatacatctctcactttattcaaaagctagaaatgattaaacttagtgaggaaggcatgttgaaaggtgagacagacggaaagctaagagtcttgcacccacccaaccaccacattgcaaatgcaaaggaaaagctcttcacagaaattaaaagtgctactccagtgagcacattaattataagaaagcaaaatagctttgctaatatggagaaagttctagtggtgtggatagaagatggaatcagccacaatattcccttaaaccaaagcctaatccagagcaagaccctaactttcttcaattctgtgaagactgagagaggtgagaaaactgcagaagaaaaaaatgaagctrgcagaggttggctcgtgaggtttaaagaaagaagccatttccataacagaaaagtgcaaggtgaagcagcaagtgctgatgcagaagctacagcaagttatccagaatatctagctaagatcattgatgaaggtggctatgcgaaacaatagattttccatgtggatgaaatagccttctgttggaagaagat

SEQ ID NO: 607058 - DNA, 553 bp, Homo sapiens
gaatattacataaacttcgctggcaaagcarctgcagagtttcagaggattgactccaattttgaaagttctactgtgggtgaaaggctatccaacagcatcgcatgctacggagaaatcttttgtgaaaggaagaataaattgctgtggcaaacttcattgttgtattattttaagatttttccacagccactccaacttcagcaaccaccactgaccagtcagcagccatcaacatctagctttgctccaccagcaaagattatgactcactgaaggctcagaggattgttgcaatttttagcagcaaagtatttttttaattagggtgcatacgtatttttgaacataatgctattgcatactttataggctacaataaagtgtaaacataacttttatatgcactgggaaaccaatacatttacatgactcactgttttgtgatactcatgttattgtagtggtctagaactagatccgcaatatctccaaggtatgcctgtagttgccctcaatgcaactctgctgacataatatatttcataaacat

SEQ ID NO: 607059 - DNA, 553 bp, Homo sapiens
gaatattacataaacttcgctggcaaagcagctgcagagtttcagaggattgactccaattttgaaagttctactgtgggtgaaaggctatccaacagcatcgcatgctacggagaaatcttttgtgaaaggaagaataaattgctgtggcaaacttcattgttgtattattttaagatttttccacagccactccaacttcagcaaccaccactgaccagtcagcagccatcaacatctagctttgctccaccagcaaagattatgactcactgaaggctcagaggattgttgcaatttttagcagcaaagtatttttttaattagggtgcatacgtatttttgaacataatgctattgcayactttataggctacaataaagtgtaaacataacttttatatgcactgggaaaccaatacatttacatgactcactgttttgtgatactcatgttattgtagtggtctagaactagatccgcaatatctccaaggtatgcctgtagttgccctcaatgcaactctgctgacataatatatttcataaacat

SEQ ID NO: 607060 - DNA, 553 bp, Homo sapiens
gaatattacataaacttcgctggcaaagcagctgcagagtttcagaggattgactccaattttgaaagttctactgtgggtgaaaggctatccaacagcatcgcatgctacggagaaatcttttgtgaaaggaagaataaattgctgtggcaaacttcattgttgtattattttaagatttttccacagccactccaacttcagcaaccaccactgaccagtcagcagccatcaacatctagctttgctccaccagcaaagattatgactcactgaaggctcagaggattgttgcaatttttagcagcaaagtatttttttaattagggtgcatacgtatttttgaacataatgctattgcatactttataggctacartaaagtgtaaacataacttttatatgcactgggaaaccaatacatttacatgactcactgttttgtgatactcatgttattgtagtggtctagaactagatccgcaatatctccaaggtatgcctgtagttgccctcaatgcaactctgctgacataatatatttcataaacat

SEQ ID NO: 607061 - DNA, 553 bp, Homo sapiens
gaatattacataaacttcgctggcaaagcagctgcagagtttcagaggattgactccaattttgaaagttctactgtgggtgaaaggctatccaacagcatcgcatgctacggagaaatcttttgtgaaaggaagaataaattgctgtggcaaacttcattgttgtattattttaagatttttccacagccactccaacttcagcaaccaccactgaccagtcagcagccatcaacatctagctttgctccaccagcaaagattatgactcactgaaggctcagaggattgttgcaatttttagcagcaaagtatttttttaattagggtgcatacgtatttttgaacataatgctattgcatactttataggctacaataaagtgtaaacataacttttatatgcactgggaaaccaatacatttacatgactcactgttttgtgatactcatgttattgtrgtggtctagaactagatccgcaatatctccaaggtatgcctgtagttgccctcaatgcaactctgctgacataatatatttcataaacat

SEQ ID NO: 607062 - DNA, 605 bp, Homo sapiens
agtgagactctgtttctataaaaaatacatataaaacataaaaaatagaactcaggtattaactctaattttagtaccaccatattatatattcggaatagtaaaggttctctttccccccacccaggttaggaaccaaaacaaactctccccgtgaagttctaagcagttgtggcttctctacacatctcttttcaactatgataattctggatgtgctgttatcatctagcaaatcatcttcaggcagggtgtagcaggcagtgagcactgaggatgaggtgagacagttccatcagggaagcagtgtgcacacaacaaacaccgggtctgggcaagatggagcagaggacatgcagcccagcaaaggacacagacagacacctctgaaaagaaggcatacatgcagccaaaaggcataggaaaaaatctcaatatcactgatcattagagaaacgcaaatcaaaaccacaatgagataccatctcacaccagtcagaaaggctattactaaaaagtcaaaaaaaaaaaaataacagatgctggcgagtttgtrgagaaaagggaatacttatgcactgttggtgggagggtaaattagttca

SEQ ID NO: 607063 - DNA, 417 bp, Homo sapiens
ataatagtatgcctatacagcacttgaaatggggctaactcacattgaggtttgctgtcagtgtaatgattcacactgtgttttaaagattttgtacaaaaaagggaaaatatttcagttttacattggttttaagttgaaatgataatattttagagatattggcttaaataaaatatagaattagaaatatagaatatagaaaaaattagaattaattgagctttttaaaaaatcttgttacagtagctatcagaaattgtatttattttttttttttactttaragatggggtcttgctctgtagcttaggctggagtgcagtgacatgatcatagctcactgcagcctctgacttcctgggcttaagtgatcctcccacctcatcctactgagtagctggaattacaggtaca

SEQ ID NO: 607064 - DNA, 437 bp, Homo sapiens
cacaagtctgccccctacttcagacaccagttacaagtagtaggtccccaggtyacccacagctcctgtccaacttggctgcaagttggagcctctcatgacctccccctcaagtggaatcatttgctataacggctaacagaactcagggggacactttgcttgctattactggtttaagataagggatacaggtgaacagccagatgcagaggtacacaacgcgaggtccagaagagtcccaagcacaggagcttctgtctccatggagtttggatgcaccacgctccttgcacatggatccatccatcaacccagaaaccttcctgggtttagtggttttatggaggggtttaggggttttatggaggttcataacctcattgtttaggggttttatggaggttccattatgtagacgtgattagttaaatcat

SEQ ID NO: 607065 - DNA, 533 bp, Homo sapiens
tgcagctaccatgcaacgcattaaagagtgatggccacattgtgcctctccgaatcatccaggtggctggattaaaagggggtgcaccacttagcaaactctttcaccagctgtttctatgtgtgaattttgaagctgccaaaccatacacgaatggcacgttggcctctacagtcgcacaagcgcagtaagccactatcacagatgtgctatgttcacacaatattcacggtagctagacggcagctaacttcctcagaggacactgggtgcaccagctgctggtgacagcaatagaatcagataggttctgccctgtagtttttaaatgctgcctgctttaaaaagcagagcctccaaataatgcaggagctaacaagtttgcaaaggaaatgcacttgcaatatgcaaaccagagcagctgggtatcccaactgtgtaaagaaacacggagagctcttctttccctcaaactgatattactcacaygggttttatagagtcgaaagcatatgcttaagtataattactca

SEQ ID NO: 607066 - DNA, 542 bp, Homo sapiens
cttctcattataacctctgtgtctcttacactcgattttctattgtcagtcacctttttctataagctatattctggtttacttcttcacatttgtcttcctatttactagttctttctttagccgtgtctacttactgctaaactattcatgattttattgcaataaacgcattttttcattttaaggatgttgtctttttagaagacgaattagtccaaaactaaaaattaagagaggtatgtacctattttccaagttcagcaagttgactgttgactctggtctaaaagaaagctttccaggcatggcttgctgaggaatggggccaggtggtggctaatctttttattctcagttcaaccaattagccaggacagtgttaattatctcatgctgatgacaggtctattgtctcagtctatatcaatgaatgaaatggaaaaggagagccttttgcatgktgttagtgtgatccatggtactttcatttctgctttcacttttgggcaagtaacagtataggattgcttaaaaggaaa

SEQ ID NO: 607067 - DNA, 508 bp, Homo sapiens
tttgttaaatccataagtgtgtcttttttgttttcttagaaaaatgtgttgtcaaactctgtaagtattcacaagtataagaagaatagtattgtgaatttcaatatggattcattaagtatgcttcatctgctctttttttcctgaaatgcttaaaacagtcttgtcattttatccctacatctaaaaataggaatttaaaaaatgtagccacmccgttatcacacctgataaaattaacaattattccttgatgatatactaccaggccatatacagattttatcaattgtcttaaaagaatcttttagcataggtttgtttgaatcaggagccacacatgtgattgaggtaatttggttgttgttgagctgatttttaaatcctgattacccatgtctgataaggatagaatcttattttaaaaacaagcaaacaaaaaacacttctcctgcccccttgaaagacaaagtgagatgttctgtgatggcagttacaaagaaagtac

SEQ ID NO: 607068 - DNA, 573 bp, Homo sapiens
aaataaacatttactaaatgactagtatatatacccagtgaaaagcattatctatccaactcatcaactcagaaacctggaatgtgttcttcacagttctgttctccccayatatcacaaaatcctttgaatgcaataccaatttttcaagagcggcctagctggtctgtttccctttcttaacaactttcctttcccttctctctgtgacaaacagagggactggcttaaatgaaaatgtgatcatatcactctcttgcataaaatccttcaatggagtcccattgcatctggaatagagcccaagttcttgccatgacctccaagatttgtatgaattagtcccaccttacctccctactctcttctcctagcccctcttctccctatgttgcagctacattaaccttttttcatttactgaaatacactaagctgaagagagaaatgaaggaaaggttaaaaaaattactctcaactttttctagactaaaacactagaagagtgatggttctagcgacagaatgaaaatgctgaaaaagacaaccattctggggatgacagaaagaata

SEQ ID NO: 607069 - DNA, 575 bp, Homo sapiens
tttgttttttctttgatatgggatcttgccaggtttcccaggccagagtgcagtggttattcacagcatgatcatagcacactgcagccttggcctcaagcaattctcctgccttagcctaccaagtagctggaactacaggcatgcaccaccacgcctggccacattccacaatttatcttttctgctcttgctggacatctgggttccttccactttggggctcttacaaaagatgctttgagcatctttatacagtgtcttttcatgagtatgtttatgaatgtcagttgagtcataggatatgtatatatattaaatatttaaaatggaaatcaagaccattaagccgcttaactcatmgtgagaaattagatcgcattagtttcttttagcctgatatttcccgtttctgttttctctttggcccttttagggttctgaatgagtttattatgaaaaaccctagtttggaaaataaaaaagaccaaagagaccttcaggtaaggcagtctaagagctgttgccaaaactgtttctcagtgccctcaatttgaaaatgagagagtcaaata

SEQ ID NO: 607070 - DNA, 604 bp, Homo sapiens
gaggctgaaccttgctaaggatctttgagcagagtctgagagaatctgtgagttcagataagtgcaatgtctggagatggcttgtcaaggcagaaatcattctgagcagcaactggggcaagtgttctgtctggatttcaatgtaagtctcctgaaaataaaagtgaaatgaaaaaagtttaaacaatgtggaamccaaaagttacattttttaatctatataaataggcaatgattttactcatccataatgttttatatgcatcatgctcttaattaacactgtatattttattactgatgccttataaaatttctattcccaaattctcaatttaaatacttcaaagcatatattataaaataaccccagttttatctgctacattactaaaattataatataacaaaagtaaatagaatcatttaaaaacaaaacaggctgaatgtcatacctgacacagcaccctcatacttctagtaggcttcaaaatgagaaagcaaagaagtgaggagagaaaacagaagggaaaagatttccaaaagtcttcatttaatagaaataatattaatataaatgcagcattagaccactatacactaa

SEQ ID NO: 607071 - DNA, 594 bp, Homo sapiens
gatggctgggtctcagtcttggcttactcagagttagcaatagagaacctcttgctttttatatgttacaacttttttcaaaagtatgaaataatctacttcaatgaccatattcttatcaaatcagtgaagcttttatctttagttttttttcacaacaaattccactccttaagaaggaacttattttccatgcgcttactgatttatacaagaagaattcaacacacatgcctttaaaaaataactacacattatcaatctacagttttccaagaatgccttataataacatcggcgttaatattttacctgactcatgtggaatggaaaacagaagagtatgaggtccagtgtgcttctctgtacaagtacacttgagtcctgcactgaagtacttactgcttctacctgaaataacagcatctttaacatctattgtctattatgctgagacatttttgccaygaaaatgtgacaactctttattttctcgaaagtatgcttctgaggatctaatcaataattaaagatatttacattattttgaatagtatatatataatgatggtttaaaaattaagaagtacgtaa

SEQ ID NO: 607072 - DNA, 595 bp, Homo sapiens
aaattgttagtgcatggactaatcttccattcttatcactaatctaaatgtcctgttatattattttaaattatgggtcacaattttcttgagtgacttatatgtgcttggctaaggactaagtgatttgttattagaataacacagataaataggtattatgtttgttttaaagatgaggaaactaaataaagttcagacactaagaaaacttccctaagctcagtgtctgtataggcaagatttcaactcagtacatccacctccgaagtctatgcttttatcactagctatattttcagtatgatacayagactagataaactataataatgtttcattgctatagaaatattcatgtgatatactgaactgtctagaataattcatttgtgatgttaaaacatatttgacctaaatatgcttgctgacaaatccatgacttcaattacataactgcaccaaatatgatcttacctctcatagtactctgatccttcttctaagccaggaagaataccagtaagcaatccctgtagaccaggtttcagtgttttacccaaaggcagataatatatctcatacaaactgagca

SEQ ID NO: 607073 - DNA, 551 bp, Homo sapiens
ccagtaagcaatccctgtagaccaggtttcagtgttttacccaaaggcagataatatatctcatacaaactgagcaatgttggtttcacagacatggcagcatttgcaagaagaggaaataatccagaactattaaaaaaataaagacaaaggagaaggaagcaaaataactatacaatattaattcatatgcaattatatgtataaatatttctttctgatgaaaaagttatactgattggcttaaaaatgatacctgtatatgaatgactacatccattaaaccagaccagttctctcacctgggttttatacttataaacccaatagctacctagctgtttcacaaagtcctcatatttcacaattccaaaaacagaattctcccccaatgtgccccagcaaaacatgtgccttccctgtaataactgtcaatttcaaaatatggyatcactatctatctggctgaccaaaagctataaatctaggactgatccttgactcatgcaatcttcctgcctcagcctcatgagtagctttaaaaatcttct

SEQ ID NO: 607074 - DNA, 562 bp, Homo sapiens
accattttacatctctaccaacagtgcccaagaagtttctaatttccctacatccttgccaaaactattttttttttaatagtagccatcataatgggtgtaaggttaggtatctctttgtggttttgatttgtatttatctaatgattagtgatcttcaacatttttttttcttttgagatggagtctgctctgcctccaggcgggagtgcagtggtgcgatcttggctcaacctcccaggtccaagcgattcccttgcctcagcctcctgaatagctgggactacaggtgtgcaccaccacgcccagctaattttttgtattttagtagagaccgggtttcaccatgttggccaggatggtctcaatctcctgacctcatcatccacccacctcggcctcccaaagtgctgggattacaggcctgagccaccacacccggcctcaatatcttttcatatgtttgctggccatttatatatcatctttggaaaaatgtctatttaagtccttggcccattttaaaattcagttaytttgttgttattgaactgtaagagta

SEQ ID NO: 607075 - DNA, 566 bp, Homo sapiens
tttcattatttttacgtatacgtccaccttctgtttatggcaagtgccacctgctttttactcaaagttattccaagtttcctttaaaatattactttaataatcacattgatataaagaaatattaataactaaacaggaagtatgccaaacaggaagatatggccaaaattttgaagatgatatcacaaagactgaagttgaggaaatattacattaatccatttggtcaacaaataagtgcctgctatatgtttgccactgggttagccaccacaaagaacrgagaagaatgatgaaaaaaaaaaatgtgaaaaggaaagtcagaagaggaggaaattaattcaaaatgaggtaatcaaaaaaaggttcacagggtggcatttgagctaggtcttaaaggtataatttagacactcagaaacagaagaacattctcagagagtaaaagtataactatatgtgcctgagtggtggcatcttccaaatcttgattgtggtggtagctacacgggtgcatatatatctactaaaacttattgaaatgtacacttaaatgaatgtac

SEQ ID NO: 607076 - DNA, 566 bp, Homo sapiens
tttcattatttttacgtatacgtccaccttctgtttatggcaagtgccacctgctttttactcaaagttattccaagtttcctttaaaatattactttaataatcacattgatataaagaaatattaataactaaacaggaagtatgccaaacaggaagatatggccaaaattttgaagatgatatcacaaagactgaagttgaggaaatattacattaatccatttggtcaacaaataagtgcctgctatatgtttgccactgggttagccaccacaaagaacagagaagaatgatgaaaaaaaaaaatgtgaaaaggaaagtcagaagaggaggaaattaattcaaaatgaggtaatcaaaaaaaggttcacagggtggcatttgagctaggtcttaaaggtataatttagacactcagaaacagaagaacattctcagagagtaaaagtataastatatgtgcctgagtggtggcatcttccaaatcttgattgtggtggtagctacacgggtgcatatatatctactaaaacttattgaaatgtacacttaaatgaatgtac

SEQ ID NO: 607077 - DNA, 449 bp, Homo sapiens
ttcttcatataagattatgattttcatgttagttttctccacttgcttcccatgatatttaccctcatctctgctcagttttgtgaaatattcgacttgatctcatttctcaggactagcaacctataaaatgttgtaaattattatctttttaatttgaamattgagttttagtgttagaatgtatttcttttatctttcagtaacaatgccttgaaggttttccttattttaaattaatatttttatcagcctcaagcactacttccgtggtccgtcagcatgctgcttgatttttcatatgattaatttgttttaagtatgttatgacttaattctttttgttttcatagttctggatcagtgaattgatttcctaagacaagggtaaataagcaaataggacaggtatctgttttgggagtacaacatttcacaggctgggaaat

SEQ ID NO: 607078 - DNA, 379 bp, Homo sapiens
caagactccattaaaaaaaaaaaaaaagtgagatgtcagcaacctcagggatgatttatcaaacacatgggaagtcacattttaaaccctttttatttgcatcagttcatctttttccacctcaagttcctttgaaaatacgtattttctatactagttttattattttctcatttgttgaggatcaactacattattctagacaactgaaaaattcttttttatggtacaaaagacatgtgacaacgtatttagttcagatattttgtctggaaaacaaataatgaaaatttacyttcacatattttgatgttgagaagtttatatcagagtgaaacaaaaaaaactccacaaaactgcgttttattaaccataacct

SEQ ID NO: 607079 - DNA, 572 bp, Homo sapiens
taggcttttaccctacacataacctgaatagtgcacattgcactcaataggtagtatatcatctctcaccccctcccacactcccaactcytgggatgtccaatgtctattatttcactctgcatgttcatgagtacccattgtttaactgccacttataagtgagaacatgtgttttttgatcttctgagttatttcactaaagataatggttttcagttccattcctgttttttctttttaacggctgagtagaattccgtgtgtgtctttgtgtgtgtacatatataaacacttttggaatctaatcatctgttgatagccacaggttgattccatgacttttttattgtgaatattgctggaaaaaacaaaaagtgaagatgtttttggtaaaacgatttcttttcttttggatatatacacaaatgatttgttttcttttgagattaatggattgaaggttagttccacttttggttatttgagaaatctccataccgtttttcatagagattgtactaattcacatacccaacatcagtgcttatattgtttcttttcctgcattc

SEQ ID NO: 607080 - DNA, 588 bp, Homo sapiens
tagtccatttatgttatgtatgtttaaaattagtatcaataagagagtttttgttcctgtcataatgttaattattacctagatgctttgtagtcttgattatgcaattgttttataagatttgtgagttttatactttcacatgttttatgatgataactgttgccttttgttttcatgtttagaactcctttgaggatttcctgtatgtctagcttagtggtgacaaattcatttggtatgtccttgtctaggaaagactttatttctcaatcatttttaaagcttagtttatyaggatacaaaattcttggctggcattttctttttcataaaaagacggtcaagaaaaccctaatcttttctgccttaaaaagtttcttctgggaattccactgttaggctgatgagatttccattataagtgattagacacttctctcttgctgcttttaggtcatttttcttcatgtagactttgaatatcctgataatcatatgccttggtgaagctcatcttgaattatgtgtccaggagttatctgagcttcttgtatctggatgtctagacctctagcaagaccaagg

SEQ ID NO: 607081 - DNA, 546 bp, Homo sapiens
ttcaaaagacatgtcctctagctttgaaattctttcttcttttttctctaggctattgtgaaggctttcatcggtattgtgtaattccatcaataaattttttattttcagaagttttgtatttttaaaacatagtatctacctcttttmtattcttatttttctatttttttgttagttttcagcattctattggatcccattaagcttctttaaaatcaatatgtttcatgttttatctggtattttgaatattttattttgtttagaatcttttgctggagagctagagtgatcccttgagggtgtcataccactgtttttcatacttctaaaattgtttctctgacttatttgcatctggatgagctttcttttcctaattctaaatttactttcatttggatgagaattttttccccctagagtgtgattataatatgtattgtgtagagtcctttggctttgattctggatgctttcaatggcatgtttcttgggtataaaatgcctttgtatggtggttttctcaaatgctggttttag

SEQ ID NO: 607082 - DNA, 568 bp, Homo sapiens
cctgggcatggagtggagagggtcccattttaccaagatttctgcacagggagtcataacataatttttgaatgtaattaattttattactctgctattaattgattgcttaactaggaataaacttgctgtggtcaatggctatgyaaaataatagaggccatggttataactctacccagtaagggccctgcagacaagaggtaaaccttcacaataacattttgttagctagacagtgtgaatgctatatgaacaaagaaaagttgagtgccttctgctcactttgctgccttatgtgatactaaccaacccatcagattcctgtaagacctagcatgcttgcctgtttcactatagagtccaaagtgccagtgattaaaaaaaatgtgttatgttcttttatatctttctatagaacacatttaccacagggaatgtatgcatgtattttcattgtaaattttaggagcctgactaatgactattcagtttaaagatacaagtatttatagtcagttacggaaatatgtacatttagtgtggctttagaatagacatctccttt

SEQ ID NO: 607083 - DNA, 568 bp, Homo sapiens
cctgggcatggagtggagagggtcccattttaccaagatttctgcacagggagtcataacataatttttgaatgtaattaattttattactctgctattaattgattgcttaactaggaataaacttgctgtggtcaatggctatgcaaaataatagaggccatggttataactctacccagtaagggccctgcagacaagaggtaaaccttcayaataacattttgttagctagacagtgtgaatgctatatgaacaaagaaaagttgagtgccttctgctcactttgctgccttatgtgatactaaccaacccatcagattcctgtaagacctagcatgcttgcctgtttcactatagagtccaaagtgccagtgattaaaaaaaatgtgttatgttcttttatatctttctatagaacacatttaccacagggaatgtatgcatgtattttcattgtaaattttaggagcctgactaatgactattcagtttaaagatacaagtatttatagtcagttacggaaatatgtacatttagtgtggctttagaatagacatctccttt

SEQ ID NO: 607084 - DNA, 326 bp, Homo sapiens
tacaacttcattcttatagtcttttaatgctaattccatatttctatattagatctgacatgagataagyggcaatagatcattttttttctctaatgccttctcaaacacttccttatttgtggagcctatgtgagaatcctttagacaactattaatatctgaaaatttgtgtttccttttctaactttcctccaagatttcaatacttgtaatgacttcacaatcttgctgctcaataccacctaacttttataacacccacgttattcacatgaaactatcagtcttgcctttcaaaatgatgggtgtcccactgcattctt

SEQ ID NO: 607085 - DNA, 497 bp, Homo sapiens
tccaaattctagaggacctaggcagagagaaacaarcatgctcaaaattttaataacaggagtacaacttagttgttaatcatcaaaaatagctcaaaataagtttccttgactctgaaaaacaaaacaaggatcagcaatattccaagaaaaagtcaaaaaagattgccttatttttttgagtgcagtccatttagttaactcttgttttgcttgacatttgtgaatatttcagtttttcatgagtcccatacgttatttttctattccaatgttacaatcttcaaagctattaaaaacctgcatttgagaacacctataaaagtccttaatatagcttgattataacccatctttggagaaggaacaaagcaagacaacgattgtctgcgaatgacaacatttccagggtatttacagttaagaacatgactggtagaaaaaattagttatctccatggcttgcaataacattactcttaattatgattgatagc

SEQ ID NO: 607086 - DNA, 497 bp, Homo sapiens
tccaaattctagaggacctaggcagagagaaacaaacatgctcaaaattttaataacaggrgtacaacttagttgttaatcatcaaaaatagctcaaaataagtttccttgactctgaaaaacaaaacaaggatcagcaatattccaagaaaaagtcaaaaaagattgccttatttttttgagtgcagtccatttagttaactcttgttttgcttgacatttgtgaatatttcagtttttcatgagtcccatacgttatttttctattccaatgttacaatcttcaaagctattaaaaacctgcatttgagaacacctataaaagtccttaatatagcttgattataacccatctttggagaaggaacaaagcaagacaacgattgtctgcgaatgacaacatttccagggtatttacagttaagaacatgactggtagaaaaaattagttatctccatggcttgcaataacattactcttaattatgattgatagc

SEQ ID NO: 607087 - DNA, 497 bp, Homo sapiens
tccaaattctagaggacctaggcagagagaaacaaacatgctcaaaattttaataacaggagtacaacttagttgttaatcatcaaaaatagctcaaaataagtttccttgactctgaaaaacaaaacaaggatcagcaatattccaagaaaaagtyaaaaaagattgccttatttttttgagtgcagtccatttagttaactcttgttttgcttgacatttgtgaatatttcagtttttcatgagtcccatacgttatttttctattccaatgttacaatcttcaaagctattaaaaacctgcatttgagaacacctataaaagtccttaatatagcttgattataacccatctttggagaaggaacaaagcaagacaacgattgtctgcgaatgacaacatttccagggtatttacagttaagaacatgactggtagaaaaaattagttatctccatggcttgcaataacattactcttaattatgattgatagc

SEQ ID NO: 607088 - DNA, 386 bp, Homo sapiens
acactaataatagctaatgaactaaaaagaacaaaacaaaatgcaaaaaacaattataatgttttaagaaagttcacaaatttgtgttgagctgcatttaaagccaccgtcctgggtcacatgcagccttcaggcctcgagttggacaagcctggcctatcactgtgtgatgttaataattcagccaatgcttattgaatacacattcaccaagccaagtgctagctttgtgaatcaggagacacagatgccacactgataaaacaaagcctgaagcaatacttacagtgtaccattaaaataatttctaaccttaatgygaatactgattgctttcaggaagaaaagaataatactgtgctacaaattaccattattctgaatac

SEQ ID NO: 607089 - DNA, 608 bp, Homo sapiens
caacttacctgcataaattttgagtaaggaattagaaattttaatgttatttgacagagtatgttacctctgtcacatccaataacatgggttatacttttgtatctttgcttttatttcatttttatttatatcagtatataactgtttgaaaaatattttttataaaatctgacctttctttcagatagattgtgaaacaatgtaatacagctttgctactcaaagtgcagcattaggagaaacagttttgacataacctgagagattattagaaatttagaaactcaggtcccagtgcagaccaactgagttagaatctatactttcacaatatccctatgtaattagtattgtgcaccccaaaaatctaagacaggtctcattaaatttagaatgtttattttgtcaagattaaggataggcctgtgacacagcctcaggaggtccagatgacatgtgcccaaggtggttggggcacagcttggctttatrcattttaaggaaacatgagatatcaattgacatatgtaagatgttcactggttttgtctggaaaggcgagacaattcgaagcagggagggggcttccaggtcgtaggtagata

SEQ ID NO: 607090 - DNA, 566 bp, Homo sapiens
tataattcacctaaaaaggagcaataagaataatattatttcaatttttcttatatctatattttataaaaaagtgtctaaattattattgtgggattatgaacaaagatgctttcaatttccaagcactatactattacacagaacttacattgagagtttgatttacatgcattttagtaggctgtcattaattttatgcattagttttctaatagtaagtattacagtataattatagaattcagaatgcctaaattcttaggtctgtatgtttttaataggctatgaggttaagctagtatttagatgtaaggtctgaatattttccagattgactcttgaaatattccataaccagtgaataaacsaccttgaattaggaatgaaaaaacatctcttcagatcaaccaatttgctactaaaatgtattctgtgataagagtaaatcatccttaagataataaccatagttaagaagcatgcttgagaaaataaagagctatcccattttttcctttcaaagtttgaatcaaagctaaatgtcttctgaaatgtgaggcatt

SEQ ID NO: 607091 - DNA, 596 bp, Homo sapiens
agtctctttgcccttcataaacagaaacaaaaatttttattacccttactrtatttcttatttttctataagttgcaaactcaggagacaaattatttgttggatactttttttaagttcttgtctgattatatacctcacttctgtgtcttctactttatcgcatatactgctttttcacctggtgcagtgctgtatagagtgggcccttaagcaacattgttaaatatctcacttactaaagcaaatgccaggaagactccagggtaaaaattactccaaaagctctaagcaggaaatacatggacagtaaatcactgccacattaaaaagaacatactatgtttctgaatattagattattatacacaatagtagatatatacaataatctctattatcaatgtgatgatctcaatagagattctcattttaaaagatgaagttcttactcctttgagtttctcactttatattttttaacttagtgattgatctgattatctccaggatagtcctatttatggttagggttttatgcttgcctaaaatttgctatttagattaaaattccacattgctctcactattaaatc

SEQ ID NO: 607092 - DNA, 617 bp, Homo sapiens
gggtaggtcagaaatatgtgtgtgcttttctcctgttactctatcttgttgtagggtctccagccaatgaacaaaagatgggtaggagagaaaggcaattttttcttccctactctccacttaatacagaactaaaaaaacttagattatcttttaaatttcagacawgtataaaaaccagtacacatagcatttgttactcttccattgaagggcacaggtgagaatgactacagtgatgaacatttgaaacacaattttgaaaatgcaattattaaaaagctaacattttagtaacaatttgctttaaaattatagttacatcaagagttacctagagcaggaagaaaacaaataaaaaactgatgatgcatgcagtcatcacattaaaatgtatttcttttattctttacagacattttcaaatatatttaataatagatcatggggctttaagaaaattgatttccaatataatcttccttaatgaaaaaatatactgggctctttcttgacgaatttgccagaaaaatgagatgtaagagtattagactattcaaaaatagcaatgtttttatctaactgaattcactttaaattaatgtacaatcagcata

SEQ ID NO: 607093 - DNA, 617 bp, Homo sapiens
gggtaggtcagaaatatgtgtgtgcttttctcctgttactctatcttgttgtagggtctccagccaatgaacaaaagatgggtaggagagaaaggcaattttttcttccctactctccacttaatacagaactaaaaaaacttagattatcttttaaatttcagacaagtataaaaaccagtacacatagcatttgttactcttccattgaagggcacaggtgagaatgactacagtgatgaacatttgaaacacaattttgaaaatgcaattattaaaaagctaacattttagtaacaatttgctttaaaattatagttacatcaagagttacctagagcaggaagaaaacaaataaaaaactgatgatgcatgcagtcatcacattaaaatgtatttcttttattctttacagacattttcaaatatatttaataatagatcatggggctttaagaaaattgatttccaatataatcttccttaatgaaaaaatatactgggctctttcttgamgaatttgccagaaaaatgagatgtaagagtattagactattcaaaaatagcaatgtttttatctaactgaattcactttaaattaatgtacaatcagcata

SEQ ID NO: 607094 - DNA, 585 bp, Homo sapiens
agcttaaatttatatgataaatgaattgataggtccttaagcatcatgagttgaagatgtccacatttaattaaacctggactgggaaatgtacctaggatgaaaaggtgaggacagtaattatgaagcagcattttatgaagcataaatccatagaatgcaattcttcagatatacacccccacctctgccagtattaagtagtcaaatacatttaggaattgctgcaaataaaaattcttctgagatggtcacaaccataagcatattaatgattctggaaatcttcataggttttaacaataattttgtttaactttattcaaattaaaattatttgactatggaactttaatcatattcttaaataattaataatattcagtgtaaagaccctttctgaagggttgctgtgraatatatacttcttaatgattattaatagtaataatcatttctataattaataaacattatctatgtttaaaggtaatatgttgaatacattaaagggagtattttatacaattgagatagaaatctggagaagtagattattgctactcctattttcaagggaaaaga

SEQ ID NO: 607095 - DNA, 669 bp, Homo sapiens
gtttttctgcctgctttatatgcttgccacactggcagctgattagatgatgcccacccagattaagtgaggatctgccttttccagcccactgactcaaatgttaatctcctttggaaaccccttcacagatatacccaggatcaatactttttttttcttttttcaagatggagtcttgctctgtcacccaggctggagtgcaatggaataatctcagctcactgcaacctctgcctcctgggttcaagccattctcctgcctcagcctccccagtagctgggattacaggcacgcaccatcacacccagctaatttttgtatttttagtagagacagggtttcaccaggttggccaggctggtctccaactcctgacttcgtgatccacctgcctcggactcccagagtgctgggattacaggcttgggccaccttgcccggccaggatcaatactttggattcttcagtccaatcaatttgacacmcagtaataaccatcacaactactaatgtaatatattgaaatatacctgtttgtaacacataattatttttctgatcaactttagccattcctgagcaagtgctgtgaaaaatgaatcaaatatttccaaattttcatcagtgttcagggaaataatagtaatcatatcaagataaattt

SEQ ID NO: 607096 - DNA, 649 bp, Homo sapiens
tttgttccaagtaagatattctcatgtaaaattttgaatgtctatactggaagaagcagggtgtaacaagagcagtggagaagagtggtgggcactaagcacaccatgtgagctttcaaccttcccctgtgcaacgagcactgcttttttggtcagaagcccttcactacagttggcctgatttcaagttagttccttctcaaacaccaaacttgaatcacagagtgagcccccggttgaacattttaaatagaaaaatcaaccagaatgcttttactaagttgccttttaaggagccagaaagtcaagtaatactaaaacctatggaaaaagaagcataacaaaaaatgactaagaaaactcatataaatgaacaataaatccggatagaaaatcatcttctcttccccaaatatgtttcttgtccattttcttgaatgtgttaaaaaawtttttcctataataaacgtttaactcaatgtgcaccaaaaaggtagatcatgtactcaagttagctgcacaaatagccccagacaagtaaaattcatgccaggcaggtattacttaattaattagtgcaagcaactagaaagtctctttttctattatcaacttttcatcttattttgaaaaagaaagctgaacatgc

SEQ ID NO: 607097 - DNA, 657 bp, Homo sapiens
aaacaatcttatgccatttttaaacagcaagacatcttaaagtctttatatactaatatgtttagaggttttccaaaaaggataatataaagctcaatgttttgtgaarttatctgataaacgaagcctctcagaacacctatgaacaactcatgggacactgtgctactgagaacagtttaggaaatattggttcagactttctattgctcactacattaaagcatgtgatgaatgatgtaaaatgtgaaatgatttgtattcttgtctcacagagcacttgtaagtcatctatgagaaacaaaacaccacttattgataatcaagtctgtattttgccttttgcatcacttaactgaattttaaatatttgtatgctactattcagttatatatttttaaaaactggcaagtaaatattaagagaaacattttttaaatgtttatctgccctatttcagacaaaaataggtaggtaagacaactccacatagaatactgttgctcaaatatttacattgcaattgctctacaaacagagaagattcaacttttctcttcatgaaaagttacaggctttgcctaaggacatccatttcaagctcaaagatttagctgaacctggaacactagttccaaatttcattttaatttgga

SEQ ID NO: 607098 - DNA, 620 bp, Homo sapiens
tgctattttacatttagtgatttgtgctrtacccttgagaaaatatttgctaaaaaattgaatggaacttgtaatctagtcttaataatgtaaacaaaaaattatctaattcatctgaatttttagcaaatgctctaaagtattttctctctttttcaagaaaaattaggagcttttagtcaataaagtacagcacattcatctatgaatctgctccaaaaacacatgaaggatagaaaactttaaaaagacaaaatagaaaatatatctgggttcagaaaaaaataaagacaagcatccatatggccttgtcgaagcaaaaattgtacctgataaagttaagcaggcaagaaagactttctgcaaaacactggcaagagagtctagaatacagtctgaactaaatttcattaaaacaaagggctagagagtttttaaaagcttgcagggctggaggcagaggagaaatcctgtactgtcttggtttgctaattggcctcatcctttggaaaagtaattttcttgcttcttcataagacgaggtagtctgttattggagcaaagaccccacagagttaggctgtcactcacccacagagactgggagacagatgtttgta

SEQ ID NO: 607099 - DNA, 469 bp, Homo sapiens
aatcgcttgaacctgagaagcagaggctgcggtgagccgagagcacttcactgcactccaacctttgtggcagagccagactttctcaaaaaaataaaaataaaaataaatgaatacttaaataaataaaaaataaaataaaggmaagatcttaagatcttgatttatactttcatgactcaatgttaaagacttttcaattaactgcctaatacagcaatagatgggattgtttgtaatgtgtggtcatggttttatagaagttatgaataaccaagatatcttattaattgaaatgtattatcaaattctgctttacaaactaaacagattcaacaccccatatattttcattatgaatagaagtaaatctcaaaatctagatcatgactcacacaaatataaaataagcacacattaaagattttgaaacatagttaatgaggaaactatttcaaaaacctcaaag

SEQ ID NO: 607100 - DNA, 593 bp, Homo sapiens
ggattgagaaactctctcatttatagagcaatactgaatggctatcatgagatcagaagagaaatttaattgctaaatacgataatttagacgccttggatatatttctggtcaagatattctaacaacaaaataacctagcccattattgattagtttgagatattacaaagttttctttataaagaattaaraattattttcttgtgactttaattcatttgataacattagattgtctggtgaaatgtctcccttaaacaagaaagaacctgagaccctgagagactaggagcatctctaagaacatagactggatggtgatgacattaattaaaatggacaataagtgtgtccggccacacatagattatctgaataggttctactatatatgtgtgtgtatatatatacatatatatacacacacacacgtgtaatgtatatatgtattatgtatgtgatatcaaaacatgtctaattctgtttataatacttgtaagtgaatctaaaattataataacgatacccaattagttgaacacttcaaactgttttttctttttctaaattctgtttgaatataaaataac

SEQ ID NO: 607101 - DNA, 516 bp, Homo sapiens
gatctatgcattctgtccaggttttttagttagcttcaatggaaaagacatggtggggtgtgcttattttatcttactcttacatgaacaagcacaaataatttaggtctccagtttttttcctattaatagtgattgttatgttctaactgttacattgtgcygaagtccatgatagatgcattttattggccatatattcctctaattagtaaccagtgcacaaaggtatttctaggtttctaagaatctgtgagattcttaatcatcccatggctatcattaaaccatctgtcaggttacttatatactgatgtgttttcccagttttctgttaaattaggggtgaatagatgttttttttcctgtaaattattcgatggctcacaaacattgtcatatttctatgtctatcaagtgtgtttgagtttcctaattcataattgaataccacattatcaaggcagagtgtatcatatcgtaatttcttttgtaggactggttacactatctatt

SEQ ID NO: 607102 - DNA, 516 bp, Homo sapiens
gatctatgcattctgtccaggttttttagttagcttcaatggaaaagacatggtggggtgtgcttattttatcttactcttacatgaacaagcacaaataatttaggtctccagtttttttcctattaatagtgattgttatgttctaactgttacattgtgccgaagtccatgatagatgcattttattggccatatattcctctaattagtaaccagtgcacaaaggtatttctaggtttctaagaatctgtgagattcttaatcatcccwtggctatcattaaaccatctgtcaggttacttatatactgatgtgttttcccagttttctgttaaattaggggtgaatagatgttttttttcctgtaaattattcgatggctcacaaacattgtcatatttctatgtctatcaagtgtgtttgagtttcctaattcataattgaataccacattatcaaggcagagtgtatcatatcgtaatttcttttgtaggactggttacactatctatt

SEQ ID NO: 607103 - DNA, 629 bp, Homo sapiens
atagcattatgtctgagaatgtacataccttaattaaaaatattttttggtaaaaagtgctaatgattttctgagccttgtgatttataatctctttgctggtgaagggccttgcctcaatgttgatggtgctgactgatcagcttggtggttgtggaagattagggtgattgtcacaatttcttaaagtaagacaacaatgaaattgacccttctttccatgaaagatttttttgtagcatgtgatgctgtttgatagcattttccccacagtagaagttctttcaaaattgaagccagtccttttaaacctttccactgctttctcaatttaatttatgtaatattctaaatcctttgttgtcatttcaacaatgttcagagcatccttaccaggagtagattccatatcaagaaaccaattttttttgctcattcataagaagcaactcctcatctgttgaatatttatcatgaggttgcagcaattcagtcccattttcaggcttcacttctaattctagttgtcttgatatttccaccacatctagagttatttccaccacatctagagttgcttcctccactgatgtcttgagccyttcaaaatcatccatgagtgttggaat

SEQ ID NO: 607104 - DNA, 570 bp, Homo sapiens
tgttatcagactctcatcatcaggtcagcagttcccagtgcttggagaagaatagttaaagagtgaaaagaaggagtagaaatgttctctttaacactacccaaatgaaagtggagtaggggtccccagttcatggaaacataagaagtagggaacgatcatctycacctcaaaatactagaacaccagaaaacacgggagctcagaggcacacattcattcctcaattttacaaaaaaaactaatatttactgagtgccaggtactgacataggaaaagatgatacagtaatgatggcaagacacagtcattgccctcaagactgatcctcaaggagatcagtctccttacactggagtaagagtctgacgatttgggttttggtcgtgtctaccaaaagaactctgtacatttgcatgtctctgattcttccaagcctccatttcttaaccattaaatgagaggagagtgtaatatgcctgcctcacagagagttaatgggattcagatacagcggtgttctccatggtccctttgtgtacatctccccatttagtgggtccttcctt

SEQ ID NO: 607105 - DNA, 641 bp, Homo sapiens
ggaaaacagcaatgtggcagagaaaacctatttttttaaagcatttattagttcattcatagactcrgtaaacttatccaaaaagaattgttaggatactctgcctcataagagagaaacgggtttctttcctttgaggacctccaccgttggtgaagacagaatttgtacagtactgactggaccacatttgtcacagaaatcatctcaatcatcacattagaagacagtgtcactacccactacagtacagaaaatgaaagaagtataacaattcacagcaggtaaatgttcatctctctgccatcttccttaactgtagttaagagatgatcacaggggttatcatctacttctccccaaaacctcagtctgcttttgagcttaacaagtttatctacaaaacatcttagcactagattcaaaagtatttgtttagtgcccactatccgcatgacactgctaggtgctgaggggcaaatcaaaggcacaggctttggtttcaaggcattttcattgctatatgatactccaaatggaatcctatgcagacatcatctgagtaaaagttaaagtaatgagatgattgacctggagtagaaggaacataccatgctactatctccagtattcgaagtatg

SEQ ID NO: 607106 - DNA, 641 bp, Homo sapiens
ggaaaacagcaatgtggcagagaaaacctatttttttaaagcatttattagttcattcatagactcagtaaacttatccaaaaagaattgttaggatactctgcctcataagagagaaacgggtttctttcctttgaggacctccaccgttggtgaagacagaatttgtacagtactgactggaccacatttgtcacagaaatcatctcaatcatcacattagaagacagtgtcactacccactacagtacagaaaatgaaagaagtataacaattcacagcaggtaaatgttcatctctctgccatcttccttaactgtagttaagagatgatcacaggggttatcatctacttctccccaaaacctcagtctgcttttgagcttaacaagtttatctacaaaacatcttagcactagattcaaaagtatttgtttagtgcccactatccgcatgacactgctaggtgctgaggggcaaatcaaaggcacaggctttggtttcaaggcattttcattgctatatgatactcyaaatggaatcctatgcagacatcatctgagtaaaagttaaagtaatgagatgattgacctggagtagaaggaacataccatgctactatctccagtattcgaagtatg

SEQ ID NO: 607107 - DNA, 516 bp, Homo sapiens
cagcctcagccccccaaagtgctgggattacaggtgtgagccacagtgaacggcccatattcattttcgaaaacttgaaaagcatggaaggtacagagaaaaaaattgaaaacttcctgatagtggctatttagcagggaaagagagagagcaggaaagcaagccatcctgtgtgtgctggctctgcagtggtgcttcatcttttggmagcaccaaggccctgcagcaaggaaagctgaaaagagagctccgggaatccccccccttacaaagccaactcagctggggcagtaaagacatcagtaaccaagctgcattcagaagttggcattccaagtccaacaatttggaacgttctccatgacagtcgtcctgcagttggcagcactgtgcttttccattcaatgtagcacttactgtgttccaagcacatgtactaacttatctaaaacgcctaacaatcccatgaggtacatctcactgtcacccttttttacagatgaggaaacagatacg

SEQ ID NO: 607108 - DNA, 572 bp, Homo sapiens
tggttatttctgtggcatgtaatgtttaaaacagtaaccggaattatgattgatagtattataccagcacatatcaagtttgtaggaatttcatagaacttctggaacacatattaataacatgtagtcatacaaacatcatataaagaagatttaacattattcttatttgacagtgcttcccatataatttattataacaaataactgaattatttttaatatctcattttacagagtgaaagagcaaatcctttgagattttctgggggccacctgagaaatctcaaagttagtttgaggtaaaaaagaacttcatttagaatttaatttttggaaagtttatcaaaaatgtcaaaagccttaaatatttgattaggtragttgtcagattactatgaacaatatttgggttatcttaaataatcaagaacatgataaaggttgacacaaagcaagggaaattattttgctaagacacaaaatctttgatttataggaagattatttaaagggtaaagaaagccctttaatttcttattaagaacagaccaaaaaaatccaaaaatact

SEQ ID NO: 607109 - DNA, 431 bp, Homo sapiens
gaattctcagattaatgtgtaataaatcttagcaatggagaaaatggttctatggttactgtttagtacaagaagttgccccatgtttggaaaatgtcagcaaaccccactcatgattataaccaatcctataacattgtggtgatattttaaagtgatcttgcaagtgactgaatatcatagctcaattatacgcaagggtagctgataaagtatttagagtttttgaaaaagaagacataattatcaacaatttctgggttaggcgatgtggtrtagaagaaaacatagtagtggtggctcaggaactctagattttagtctatctccaaatttatggatggattggaaaagttcctcaattccctggacctcagttttctattggtataaatcagagcaatggacaaaataatttctaaactcccttt

SEQ ID NO: 607110 - DNA, 431 bp, Homo sapiens
gaattcaatttttaaatcctttgagcttctgagttgaaaagagaaagatggaagatatttttattactattttaatggattcaggaaaaaataaagcaaataagttaaaacaaacaaatataccctccgaaatactaccagctaagaatatctaacagcaagaagatatctgttgcctcttgctactgaaatatgcattcacttctttcttctttattacttatttgattctttagttgatgtgggagagaggatgtagacgatattgaaaaaatacctgcagcattagttaaaacaaygctcttacaaatatcttgatgataaagattactgtttcactctatcaacttgtagttgtcatcacttcaatcaaattgcatcagtataacatcccatttggcagtcctaaaaacaagtacagggtaaatgtc

SEQ ID NO: 607111 - DNA, 444 bp, Homo sapiens
tcttgtttaattccttgcaatgccaacactaacacacactgtgcattagggaaatactatagataggctttctcccaaacagctgtctcttgtcttgttttgaaagcataaccttatgtaaatcaataggaaaatccctctgcctgtctcctggagcaaagagtagccytgtaacctcctttccatgaagtggaactgaagtcattgcaggtgcgctgtaggaccctgctgtgggccctcagggagccatctgttcgttagaggatgagatggcctttgcttagggagacacagatgggtgggcatttggcttttaggccaggtcaggtcactaagcttgtttcctctatgactgtaatcaaataactcatgcctgactctggttaaagaactttttatttagaaaatatttgctatcatgggaagatgctgtgtagcttgcat

SEQ ID NO: 607112 - DNA, 646 bp, Homo sapiens
ctttcataataatcttatagtgcttttaaattattaacatttaatttccaagaaaacttttggraattatctggagtctctcaggccattcaatttatatttaagtttatataggttgtgattctgtgttttgtgaaggaaaccttctttactgtaatttcctttttttatttttatttttttttttttttgagatggagtcttgctctgtcaccaggctagactgcagtggcacgatctcggctcactgcaacctctgcctcccaggttcaagcgattctcctgcctcagtctctcgagtagctgggactacaggtgcacgccaccaagcctcgctaatttttgtatttttagtagagacggggtttcaccatgttggccaggatggtctcaatctcttgaccttgtgatctgcctgcttcagcctcccaaagtgctgggattacatgagtcactgtgcccggctgctgtaatttccttaatcaaataatagttatatggcgatccagtgtcttctccgtgattttattgtttttttcctaaaagtcacttaacataacctttgaacttgaaattcttaagacatccactgaagtcatatgaattcattgttcctgttttgaaaagtatacttttcgaaatgagg

SEQ ID NO: 607113 - DNA, 391 bp, Homo sapiens
gtctttgtccccttcccttagaatccaggcagattctgtgacttgcttgtaatcaatagaacgcaatggaggtggcacttttaacttctgaggtttggtcttaagaggaagtgcagctttatcttatctactgggacatttgcttttggarttctgagctgccatgtggaaaatgtgaccacccagtagcctccatgttgtaaggaagcccaagccactcggggaggccttggctgttggtccgatcaacatccccagctgcggcccaatagaccacccgcttcaacccccttggggtgaccaaagacagacaccccacttgtttctaacctccagccatccagtcatccccagtgcttgaatcttcacagttgaggccacaggcatcttg

SEQ ID NO: 607114 - DNA, 391 bp, Homo sapiens
gtctttgtccccttcccttagaatccaggcagattctgtgacttgcttgtaatcaatagaacgcaatggaggtggcacttttaacttctgaggtttggtcttaagaggaagtgcagctttatcttatctactgggacatttgcttttggagttctgagctgccatgtggaaaatgtgaccacccagtagcctccatgttgtaaggaagcccaagccactcggggaggccttggctgttggtccgatcaacatccccagctgcggcccaatagaccacccgcttcaacccccttggggtgaccaaagacagacaccccacttgwttctaacctccagccatccagtcatccccagtgcttgaatcttcacagttgaggccacaggcatcttg

SEQ ID NO: 607115 - DNA, 369 bp, Homo sapiens
atcccgttaaccagcaatgcttcaggtcaaggaaactcactctgaaggcaactgcaaagctgctggtttccatggcacctgaagagtttggggggtggggagagatgggagcagccctggccaagaaagccactgctcttatccaaaagttagtagtattcacaaataaatgcttttcaatrtcctgtacatctttgattaaatttcagaatgtgggggttggagggtgttgccagttttgcccagtttcatagttgcttttgggggtaaggatttgttgacctgtcactctgtcatgatggacatcagatgcctgtctctggcttcatgtttaccactttcccctcattcactgttctctggtcccac

SEQ ID NO: 607116 - DNA, 524 bp, Homo sapiens
tgtcaatggcccactggagggggtcctgatgtgttcttcttggtggaagaaggtgggctaggagcaagacaggtgcttccaagaaagtcgagcctggtgtgaattctggaggattggctgggggttagctaggtttgatggggagcaaggggtaggatactccaggcagaatgagtaggcagcaaacagcaaggaagaaacwatcccctacataattgcttttcaacattggtcttcagaattatgtttgtttagttcaatgcgattggtatcttagctctgagcacccagctgctgaacatgagagaacaaggcccccagacaggctacatggtgaaggaagtcagcctaagtttaaaatgtccacaggtaatattctgaaaggacagttcacagagatatttgaatgatgcttgcattgacattttattatgaaatctgtattacactcacatttgcggagatgattactctaccatttcctacaggaaggacatatacaaagtttttgttttgttttgttt

SEQ ID NO: 607117 - DNA, 584 bp, Homo sapiens
gcaaaacaaccagaaaacaacaacaaaaaaggcagcaataagttcctgtttatcataataacaatgaatgtaaatggactaacctctccaatcaaaagacacagagtagctgaatggacaaaaaartaagatccaatgatctgttgcctatgagaaatacatttcacctttgaagatacacatagactgaaaataaagggatggaaaaagatattccatgccaatggaaaccaaaaaagttcagtagtggctatactaagatagacaaaacagatttcaaggcaaaaactgtaagaagagacaaagaaggtcatcatgtaatgacaaaggagtcaattcagcaagaggatataacaaatgtaaacacatatatacataacactggagcacccaggtgtataaagcacatattattagagctaaagagagagataggccctgatacaataataactggagacttcaacaccccactttcagcattcgacagatctcccagacagaaaatcaacaaagaaacattgggcttaatctgcactgtagaacaaatggacctaatagatatttacagaatgttttatcca

SEQ ID NO: 607118 - DNA, 572 bp, Homo sapiens
tattagaactgaaaaacactcagtagagttgcagtatacaaaatcaacattgaaaaaccagtagcatttctatatgccaacagtgaacaatgtgaaaaatttaaaaagtaatcccatttacactacccacaatacaattaagtatctaggaattaacaaatgaagtgaaagatctctacaatgaaaactacawaacaccaatgaaaaaaattgaaaaggacacaaaaaatggaaagatattccatgtacatgaattggaagaatgaatattgttaaaatgtgcatactacccaaagcaatctacagattcaatgtgattcctctcaatatacctatgacattcttcatagaaataggaaaaacaatcctaaaatttatttggaaccacaaaagacccagaatagccaaagctatcctgagcaaaaagaacaaaactcaaagaatcacaattacctgactttgaattatgctacagagctacagtaaccaaaacagcatagtattgacataaaaacagacacacagaccaatggaacagaatagagaacccagaaacaaatccatacacctac

SEQ ID NO: 607119 - DNA, 572 bp, Homo sapiens
tattagaactgaaaaacactcagtagagttgcagtatacaaaatcaacattgaaaaaccagtagcatttctatatgccaacagtgaacaatgtgaaaaatttaaaaagtaatcccatttacactacccacaatacaattaagtatctaggaattaacaaatgaagtgaaagatctctacaatgaaaactacaaaacaccaatgaaaaaaattgaaaaggacacaaaaaatggaaagatattccatgtacatgaattggaagaatgaatattgttaaaatgtgcatactacccaaagcaatctacagattcaatgtgattcctctcaatatacctatgacattcttcatagaaataggaaaaacaatcctaaaatttatttggaaccrcaaaagacccagaatagccaaagctatcctgagcaaaaagaacaaaactcaaagaatcacaattacctgactttgaattatgctacagagctacagtaaccaaaacagcatagtattgacataaaaacagacacacagaccaatggaacagaatagagaacccagaaacaaatccatacacctac

SEQ ID NO: 607120 - DNA, 540 bp, Homo sapiens
ggtgatcatgttaagtaaaataaaccaggtaccgaaagacaaacatgacatgttcccacttayttgtgggatctaaaagcaaaacagttgaactcacggagatagagaatagagggatggttaccagaggctgggaagggtaatgcagggttggggatgaggtggggatggttaatgggtacaaaaaatatctagttagaaagaatgaataagacctggtatttgatagcacaatgggggagatatagtcaatgataattgtacatttaaaaataactaagagtgctgggttgtttgtaacacaaagcataaatgcttggggggttagataacccattttccatggtgtgattattacacttatatgcttgtaccaaaatatcttatgcaccccatagatacatacacctactatgtacccacaaaaattaaaaaaaagaaaggcatgctaatgatgtaatgtgattttttaaatgctgattgtaaatggatcactgtgtggatgtcagaattgtggggtctccaatagacagccactta

SEQ ID NO: 607121 - DNA, 608 bp, Homo sapiens
aggcagaaaggtaggatctgctatgacctcagatgatgacaagggccaggatgaagccaccttagaaggagatgtaggagagtgcttgggaaggaacaaggcagcaagctaggaatgagaggccagggagtggaaatggtcctgacatggacattagaatgcatggctccaaatcttggatctggggccagtgagccctctgggaagctgcttgatctcttaggatgacaacttcctcatctgtccaatggaggtttaatcaaatatctgtggggtcccttccagcttcaattttaccaatctgtsattagatatgaaaaggacaaagaagaggtggcggtagttgttttttcagtgtgtgagaggatgccatttccatcttatactatttatacatgtaggctttgggggtatatgtgggaaatgacatagaatatgacaaaaaaaatcttttttaggttcaaaaatcttttttttttgagatggagtcttgctgtattgccaggctggagtgcagtgacgtgacctcggctcactgcaacctccgtctcccgggttcaagcgattcccctgccttagcctcccaagtagctagggctacaggcacc

SEQ ID NO: 607122 - DNA, 604 bp, Homo sapiens
cccggtctttacttccagccgtgaggcagagataaggggcaggttagcatgagatgaaggacctatgtcttaactctttggacagtgtgagttttatgagattggccaccttcaacttgagatgtcaacaagcaacytaggctatggggcagtctaggatggcgattaagagcacaggttttggagtcaagacagatctgggttcaagttaattcctgagctgacctcctcatctacaaagtgcggttaatggtgtccccctccgacggtattgtgaggatttgcactacaactgccaaatggttaacaactcaacaaaagggcttactattatttttcctatcttgatggaaattcaggagtcaatgatgagaatgagaagcactgggggtagagtggcagctggattcaagatgatcatcactttgattagaagttccctttgtcattttgcattcttgccctttgctctgcattcagaagttaaactgctttctctgatctggtctatgatttatccacaatgctaaaacttgcaatgcttggatcctatgttgatgtatatactaggcacacagaccaatggaacggaatatataaccca

SEQ ID NO: 607123 - DNA, 595 bp, Homo sapiens
tcatctcaaaaacaacaacaacaaaaaaacttctgtcttttcctatacgaaatcttaggcttggtacataccattggatttaatgtaatttaattaaacaaatacattttgaaggcctactagggtaaatctttgaggacaaataacatgacatccctgttcttaagtcgtctggaggactggtgatgtggatttagatttccctttaggcccacccaaacccctacttcattggtaattggcagrattcttgcttaaacaaagtttaaagagtttagaatgctatacacaggatcactaagctctccaggttttactttgccttttataggtgcaaaatcttcctctttcttttatcccctattactcttgtgatggcataaaacacttgaacagctaagaccaggtattacttgtctcttggctaggtttctaactggaattccgctcacgtgattctctataaaacagaatatttaacagttgcctggcttcatgttttgatgaataatcattgagatatatatatatttccctgaaatggaaagtatcatttatactttctactggaattggctggtagtttccatagctg

SEQ ID NO: 607124 - DNA, 595 bp, Homo sapiens
tcatctcaaaaacaacaacaacaaaaaaacttctgtcttttcctatacgaaatcttaggcttggtacataccattggatttaatgtaatttaattaaacaaatacattttgaaggcctactagggtaaatctttgaggacaaataacatgacatccctgttcttaagtcgtctggaggactggtgatgtggatttagatttccctttaggcccacccaaacccctacttcattggtaattggcagaattcttgcttaaacaaagtttaaagagtttagaatgctatacacaggatcactaagctctccaggttttactttgycttttataggtgcaaaatcttcctctttcttttatcccctattactcttgtgatggcataaaacacttgaacagctaagaccaggtattacttgtctcttggctaggtttctaactggaattccgctcacgtgattctctataaaacagaatatttaacagttgcctggcttcatgttttgatgaataatcattgagatatatatatatttccctgaaatggaaagtatcatttatactttctactggaattggctggtagtttccatagctg

SEQ ID NO: 607125 - DNA, 528 bp, Homo sapiens
agtataaagcagtaaaaagtcatgaattgcccaagtttaccagctacacttctgttttccccagtgggattttgaatacttattttattcttcataattcagctcagtcattattactttctataattccttttctgaccaatttgcttagtttttctttgtgctctctctccaaacatgttttttttttttaaatcaaaatttgaatatatttgcttttgtgtaggtttttcacaacctgaagaattttggataaagtcttcaggaatttctagacaacytaaggcatgcactaaaaaacctcactgagctttccacttggggatcaggtagaaaaaaatgctccttagtgtctatattacttatttagggagaatgcttatctcatataggaggaactactgtctgctcttttatctgagggaggaagtgacttatttaatcagtgagactggaaaaaggaactaagtaggaataacttaactctttccctttgcctctggcttacctgcccaaaagtgtattggt

SEQ ID NO: 607126 - DNA, 578 bp, Homo sapiens
acattctggcaggaatttatcttatcgaagtgaagaattgtgttaatcaaagcagccaataataagtaaccataacaatgaattttcaaagtaagatttataatacacagaggtcatagttcaaatgagaccaaaacatgtccaaatttgattttcatatacatatttacaaacatgtttgtagtaaatgttttggattttaatggtcagttgaagaaaagcatatactgtatttgcttctactcctgggaacttttctgggactaagataaaatatcagtcagttttaacagtgtgagccagctaacattattgaaattattattttaatctctatttctttagttacattctcattttccccctgcactcatatgtgggaagaaatgtttcattaaatatactcaaagtcagaacaatgtaaaaggaagcaaaataaatttctatgtttctattgaaaaaagacatcagactcaagaggcattataatcccctattarggtcaacacaaaggaacaacataataaaagggacacataataaaactgctaaagaaaacagaaagccagtaagaaagc

SEQ ID NO: 607127 - DNA, 652 bp, Homo sapiens
atatcaactacttagaatctatcatttaaaaccttccaacaggccaggcgtggtggctcacgccagtaatcccagcactttgggaggccgagattggcgggtcacgaggtcgggagatccagaacatcctggctaacacggtgaaaccccatctctactaaaaatacaaaaatattagcggggcgtggtggcagcacctgcggtcccagctacttgggaggctgaggcaggagaatggcatgaacccgggaggtggagcttgtagtgagccaagatcrcgccactgcactccagcctgggtgacagagtgagactccatctcaaataaaaaaaaaaaaaaaacttccaacatagaaaaatatataccatatggttttactaataaattattccaaacatttaagaaaaaggcaataccaatcttaaacaaactctaccagaggacaaaaaagggaatgtttttcaagtttttaaatgagtttggtataactttaatacaaagtctgacaagtacattagaagaaaagacaattgtaggcctatacttttcatgaacagagaagcaaaaatccaaaacaatattacagcaaatttagtccaattatataaagaaggataatgaatcttgaccaagtgaggtttattcctagaa

SEQ ID NO: 607128 - DNA, 571 bp, Homo sapiens
aggcattttcctgcctgaaataattgtgttgatatgagtcaaagagggatcttgttccaaatgtacattacattagatacaaaagtaattataaaacagtatggttttgtaagttaagtcacagagttttcaggtgagaagaaactgagtcattgttttggttgctgtccctatcagttgcactgctcacttgtatcaaagctatttttattgaagtaagtagaatcagacgtttcattttcactaaaaaatgcaatgagaagttgcaarttgttatgtgtcataagggtaagcattttctttttaagtttttttaatttttaatttttgtgggtacatagtcggtgtatcggtgtgtttgtgtgtgtgtgtgtatatatatatggtaaatatatcaaacatgagatgttgtaacacaggcatgcaatgtgaaataagcacatcagagagaatgaggtatccatcccctggagcatttatccttcgataaaccattcaattacaaaccattcaattgaaccttacaaaccattcaattacattattaaagttattttaaaatgtacaatta

SEQ ID NO: 607129 - DNA, 539 bp, Homo sapiens
ggaaaattccagggcctcacattatttggctgaacttggatttgggatatggcataaatatttggctggagtctgcagggcttaggtgtaaagatatagacttcatgctgatcccagagccttttcgatctgatcaaggaagagccctgaaggaggaactaaatcttctattccacaaggaaaatgtatcctcatagaatgtttatgtactccaaaatttattcttttcaatttgatgatctctaaggtcaaccataaccaccatcatcacctcaccacagtttactcaatactttcagtaagccagatgttacatccagggatttccaatctctgcaagattgacattttgttgtaaaatgttgttctatgcatgtaggatgatgagcatcatccctcgcctgtattcactagaagccagtagcatcctcctccttttgtgaaaacccaaaatgccctcagacactgctgagtatcccctgagaaggatgggcaagatttccccwtgtgagaatcctttatgtgcattatctagttca

SEQ ID NO: 607130 - DNA, 477 bp, Homo sapiens
ttgagaccttgggcaagttaactaactygtctcatggtccctgtctagtcctgccatccacctttgtcactggataattgcctaatgcttcttgctggactgaaagctccctgacagcaagaatcaagccttcttcttctgggtctttcacagttcccagagatctcttaatagggccctagaaatgcccctgccattaagtgtctcaatctttgtgtgtgtgtgtgtgtgtgtgtgtgtgtgtgtgtgtgtgtgtgagacagagtgtcactctgttgcccaggctggagtacaatggcacaatctcggctcactgcaacctctgcctcccaagttcaagtgattctcctgcctcagcctcctgagtagctgggattacaggcatgcaccaccacaccccgctaattttttttttttgtatttttagtagagatggggttttggcatgttggccaggctggtctcgaactcctgatc

SEQ ID NO: 607131 - DNA, 477 bp, Homo sapiens
ttgagaccttgggcaagttaactaactcgtctcatggtccctgtctagtcctgccatccacctttgtcactggataattgcctaatgcttcttgctggamtgaaagctccctgacagcaagaatcaagccttcttcttctgggtctttcacagttcccagagatctcttaatagggccctagaaatgcccctgccattaagtgtctcaatctttgtgtgtgtgtgtgtgtgtgtgtgtgtgtgtgtgtgtgtgtgtgagacagagtgtcactctgttgcccaggctggagtacaatggcacaatctcggctcactgcaacctctgcctcccaagttcaagtgattctcctgcctcagcctcctgagtagctgggattacaggcatgcaccaccacaccccgctaattttttttttttgtatttttagtagagatggggttttggcatgttggccaggctggtctcgaactcctgatc

SEQ ID NO: 607132 - DNA, 582 bp, Homo sapiens
acaggcatgcaccaccacaccccgctaattttttttttttgtatttttagtagagatggggttttggcatgttggccaggctggtctcgaactcctgatctcagatgatctaccggcctcggcttcccaaagtgctgggattacaggtgtgagccaccatgcccggcctcaattcttkaaatctataattctcaaagcagagtccctggcccagtgatagaaactaagggtttctaaaagaataaaaaatgcatctcaaatatgtgtattctcttcaattcttacaagcaagtgtattacatgggaattcatttttataaggaactaggaacataatatgtgagttattgagggttaataagccttggcattaataaacaaaaattagtgtgttagaagagtttactgagaatattcattttctattctgtaaagaaaggtgaccaccatccatcactaaacaatacagcgaaactcctgtgtatgcacccagcctaagaggtggaattccaattctcaggaagggcgttttggtattagtgcagaagacatttgttgtgtgcttttcttcagctacccagc

SEQ ID NO: 607133 - DNA, 535 bp, Homo sapiens
agctcctggctccaccacttgatatctcgggtaccctagagcaagtgtttaacctcttagagcttcactttgctcaccaatacaacgggaatgataacagtcataccttattgagtagtgggtaaagatgaaacaactgctatattcaaaggtcttggcacggtgtctggcacaagttcgataaaaggtagcaaaaaaaaacacaaccactactctaataaatattgctccagtagacgctcctgtttcctggcttcctcctcaaaatcaccatggggccagtcctccacatcctccctcctcctcctttgcataccctccatttcagaacccacttcaaagctacttcttcaccagcttcatctccttcctaggattctagtttgcactggatcaagggattcatcagttagtytacacaaactccttaacctctcgggatcatcattgcgcgctaggtggttgttccagtagattgctttgcatgggattaaccaagcaatcagctcaggggctggtgggtttgtgggctgat

SEQ ID NO: 607134 - DNA, 557 bp, Homo sapiens
  misc_feature 349: n = A,T,C or G
tgttaaggtataattttttattaaaatgcagatatgttgagataagtagatccaacaarctgcttatattttaatgtgaattaggtcctcaactttattctctctttaattatcatttactatgtgtctaacacatataggcagaaagagttctaagcactaggtagcagccagctgcatatgaggggttgcatccaaggcaagagtcttcatttatttatttttaagtccaattttaattttatttttagacagtgtctcgctttgttgccaggttgcagtgcagtggcttgatgacggctcactgcagcctcaacctcttgagctcaatcaatcctcctgcctcagntgctgagtagctgggacaacagacatgagccaccacatccagctattttttgtagagatgaggtctcactacattgtccatgctgggtctcaaactcctgggctcaagtgatccacccccctcagcctcgtaaaagttctgggattacaggcgtgagccaccgtacctggccccatttatttatttattcattattttttatttttta

SEQ ID NO: 607135 - DNA, 599 bp, Homo sapiens
agcatgtaattggatcttgctttaaaatttattctgccaatctctgtctttttattggaaagtttaatccatttacagttaaagttaatttccttttttttttttttttttgagatggagtcttgctctgtcgcccaggctggagtgcagtggcgtgatctccactcactgcaagctccgcctcccaggttcatgccattctcctgcctcaacttcccaagtaggtgggactacaggcgcctgtcaccattcccggctaatttttttgtatttttaatagagacggggtttcaccgtgttagccaggatggtctcgatctcctgacctcatgatccgcccgtctcagccttccaaagtkctgggattacaggcatgagccaccacgcccagcctgaagtaatttactattaagaagaaacatgtcattctgttatttgctttctatacaccttatagctcttttgttctgcgttaccaggattattgtcttcttttgtgtttaattgattttttggtgaaacatttaaattcctttgtcatttccttttgtgtaaattctgtagctattttccttgcagttatcatgaagattacattt

SEQ ID NO: 607136 - DNA, 611 bp, Homo sapiens
ttagtacatttttatttgatttttgtatatggtgagagataggtgtctggkttcattctgctgcatatggacattcagttttcctatcaccatttattgaagagacggtcctttcccccattgcgcattcttgccacctgtgtcaaaagtgtgttggctgcaaaggcatggatttatatctgaattgtctattctgttccacaggtctatgtgtctgtttttatgccagcaccatgctgatttcgttactatagctttgtagtatcttttgaggtcagctagagtgatgcctccagctttgttctttttggtcaggattgctttgactattcagggtcttttgtggttccgtgtaaattttaggatttttttttctatttctgtgaagaatgccattggtattttgatagggattgcactgaatctataaatttctttggttagtgtagacattttaataatattatgttttccaatccatgagcatggaatatacttcaattgtgtgtgtcttcttcaattttttcatcagtattttccttgtatatatttttcagttctttgtttaagttaattcctaggtattttatgctttttgtagctattgtcag

SEQ ID NO: 607137 - DNA, 611 bp, Homo sapiens
ttagtacatttttatttgatttttgtatatggtgagagataggtgtctggtttcattctgctgcatatggacattcagttttcctatcaccatttattgaagagacggtcctttccccyattgcgcattcttgccacctgtgtcaaaagtgtgttggctgcaaaggcatggatttatatctgaattgtctattctgttccacaggtctatgtgtctgtttttatgccagcaccatgctgatttcgttactatagctttgtagtatcttttgaggtcagctagagtgatgcctccagctttgttctttttggtcaggattgctttgactattcagggtcttttgtggttccgtgtaaattttaggatttttttttctatttctgtgaagaatgccattggtattttgatagggattgcactgaatctataaatttctttggttagtgtagacattttaataatattatgttttccaatccatgagcatggaatatacttcaattgtgtgtgtcttcttcaattttttcatcagtattttccttgtatatatttttcagttctttgtttaagttaattcctaggtattttatgctttttgtagctattgtcag

SEQ ID NO: 607138 - DNA, 611 bp, Homo sapiens
ttagtacatttttatttgatttttgtatatggtgagagataggtgtctggtttcattctgctgcatatggacattcagttttcctatcaccatttattgaagagacggtcctttcccccattgcgcattcttgccacctgtgtcaaaagtgtgttggctgcaaaggcatggatttatatctgaattgtctattctgtyccacaggtctatgtgtctgtttttatgccagcaccatgctgatttcgttactatagctttgtagtatcttttgaggtcagctagagtgatgcctccagctttgttctttttggtcaggattgctttgactattcagggtcttttgtggttccgtgtaaattttaggatttttttttctatttctgtgaagaatgccattggtattttgatagggattgcactgaatctataaatttctttggttagtgtagacattttaataatattatgttttccaatccatgagcatggaatatacttcaattgtgtgtgtcttcttcaattttttcatcagtattttccttgtatatatttttcagttctttgtttaagttaattcctaggtattttatgctttttgtagctattgtcag

SEQ ID NO: 607139 - DNA, 611 bp, Homo sapiens
ttagtacatttttatttgatttttgtatatggtgagagataggtgtctggtttcattctgctgcatatggacattcagttttcctatcaccatttattgaagagacggtcctttcccccattgcgcattcttgccacctgtgtcaaaagtgtgttggctgcaaaggcatggatttatatctgaattgtctattctgttccacaggtctatgtgtctgtttttatgccagcaccatgctgatttcgttactatagctttgtagtatcttttgaggtcagctagagtgatgcctccagctttgttctttttggtcaggattgctttgactattcagggtcttttgtggttccgtgtaaattttaggatttttttttctatttctgtgaagaatgccattggtattttgatagggattgcactgratctataaatttctttggttagtgtagacattttaataatattatgttttccaatccatgagcatggaatatacttcaattgtgtgtgtcttcttcaattttttcatcagtattttccttgtatatatttttcagttctttgtttaagttaattcctaggtattttatgctttttgtagctattgtcag

SEQ ID NO: 607140 - DNA, 587 bp, Homo sapiens
tgttcatgatatatatgtacataaaagtgtaaaaatgaatttcaagatagaaataagcccagatataaggagaaacttcaatattatctgtaattkttattttacatatgtattaaaaagtataaattttaattgatgaatatctgagtgcttaaattatattttatgcttttcaatttttcaagttgaaaaatcagatgttctcaactcctgcaaataaatagtgagaataagacagcatactaaattaagaagattttttctggaagaattattatgaattgacaagaacagcaggccacactccaaccctgtggagttctcagtacttgctctagactttacaattgtgttttttccatggggaatccagacagccaggaaacagcagcaaaatcaataggctgaggtctgttttgcaatgtctacatcctatcagatctgcttaccttgcatttgcttgtagccgagggtcctcggactgtcaccaggcaggtgaagtgtatgcgggtagaaagctcacgctatgccactgttatcgccaactgtgaggacagtagctgctgtgccacctttggagatggaac

SEQ ID NO: 607141 - DNA, 587 bp, Homo sapiens
tgttcatgatatatatgtacataaaagtgtaaaaatgaatttcaagatagaaataagcccagatataaggagaaacttcaatattatctgtaatttttattttacatatgtattaaamagtataaattttaattgatgaatatctgagtgcttaaattatattttatgcttttcaatttttcaagttgaaaaatcagatgttctcaactcctgcaaataaatagtgagaataagacagcatactaaattaagaagattttttctggaagaattattatgaattgacaagaacagcaggccacactccaaccctgtggagttctcagtacttgctctagactttacaattgtgttttttccatggggaatccagacagccaggaaacagcagcaaaatcaataggctgaggtctgttttgcaatgtctacatcctatcagatctgcttaccttgcatttgcttgtagccgagggtcctcggactgtcaccaggcaggtgaagtgtatgcgggtagaaagctcacgctatgccactgttatcgccaactgtgaggacagtagctgctgtgccacctttggagatggaac

SEQ ID NO: 607142 - DNA, 587 bp, Homo sapiens
tgttcatgatatatatgtacataaaagtgtaaaaatgaatttcaagatagaaataagcccagatataaggagaaacttcaatattatctgtaatttttattttacatatgtattaaaaagtataaattttaattgatgaatatctgagtgcttaaattatattttatgcttttcaatttttcaagttgaaaaatcagatgttctcaactcctgcaaataaatagtgagaataagacagcatactaaattaagaagattttttctggaagaattattatgaattgacaagaacagcaggccacactccaaccctgtggagttctcagtacttgctctagactttacaattgtrttttttccatggggaatccagacagccaggaaacagcagcaaaatcaataggctgaggtctgttttgcaatgtctacatcctatcagatctgcttaccttgcatttgcttgtagccgagggtcctcggactgtcaccaggcaggtgaagtgtatgcgggtagaaagctcacgctatgccactgttatcgccaactgtgaggacagtagctgctgtgccacctttggagatggaac

SEQ ID NO: 607143 - DNA, 526 bp, Homo sapiens
atttcttttgaccttccttctagcttattcattttctctttagctgatttaaactgctgtcaagccaatccattgagctcttttatttacgatagtgttattccaagtgtggtcttcaggcmagcagcactagtatcatctgagagcttgttagaaatgaaaattcttagaactgacctcagaacaactaaacaggagtagggcccataggaatctatgttttgacaagctatccagttaatttttatgcatgctaatctagaagaagcaatgatttacagtattatatttctaaatttataaattgaatttgattctttttaagatatgctttgtaatctcttgttttctgttttctagaatatctttgtcttctttaggcatatttgttttctgtttcaatatttgaaatcttagaggacctgtttctgctttatctaatttctgaatatctcatgcatgatgacatgtttccttttgtacttaatggttttttttttttttcaattgaaaaatgctaaagcta

SEQ ID NO: 607144 - DNA, 411 bp, Homo sapiens
ctaaatgtgtaatttttaaaatatttttaatttcaaaaataaataaattagaaagtaacaccttgatttctttctctcaggactagaaagacagttctgtgttgttattgcagttctttcttttgccttaatcattgattcatctttaatttatcaggcagcattttcccaagggatctaagacactttatttttagtgtaagagatttgtaatttttttctctctgttttaaaaaatatgcaattatccacacataaactaataagaaatgtcatactggtacacatctcagctttactggctagagaattctgtccctataaacagtataaacaaatggtttgtgggagggcatgtttgccctccattatgttaacwgtagaatgtcaagacattttctccagagcttg

SEQ ID NO: 607145 - DNA, 472 bp, Homo sapiens
gccaatatcaaaaatcagttgtatttctatatattaacaatgaatatttcaaatattaattttaaaaatcagcatcatacccatgttcatagcagctttattttcaatagccaaaaggtagaagcaacccaagtctccatcaatggatggatggataaataaaatgtgatacatgcatacaatgtctgtatattcagcgttaaagaggaaggaaattctgacttatggttcaacttggatgaaccttgaagacattatgcttaaagtaaaacaagattgtcacgaaaggacaaatactattattaytccacttatatgagttccctagtcagattcatagagacggaaagcattatggggtttccaagggataggggaagggacactaaagagttcatgtttaacagggacaggtttagttttacatcatggaaaagagttctgtggttggatggtggtgatggtagcacac

SEQ ID NO: 607146 - DNA, 569 bp, Homo sapiens
tacgggcatgcaatgtgtaataatcatgtcatggacattgaggtatccatcccctcaagcatttatcctttcttttatgaacaatctgattacacttttttacttattttaaaatgaacaattaagttattattgactataatcaccttattgccaatgtttgtcattctgtgcctggcttatttcacttgatagaatgttcrccagttccatccatgttgctgcaaatgtcaggatctcattctcttttaagactgaatagtgctccattgtgtatatgtagcacattttctttatccattcatgtgttgatggacacaggttgcttccaaatcttagctattgtgaacagggctgcaacaaacatgagagtgcagaaatctcttgcatatactgatttcctttgttttgggtgtatacccaacagtgggattgctggaccatatggtagctctatttttagttttttgaggaactttcaaactgttctccattgtggttgtactaatttatattccaactaacagtgtaggagtgttccctttcctccacatcctcgccagcatttg

SEQ ID NO: 607147 - DNA, 567 bp, Homo sapiens
gggttatgaatttgacacactgaatggtgactggcaatattttttaaaaaacaaaataaaaggtataaatcagagagttactacagctaaaaagctatgtgaaatgttaaccaattaaagtagaaagatgtgtcactaatgatcattctggcttcagaataattgatctgaagccctttataaccataattaaacagcagagactacttctcaaagagcttggctataaccctcagatgttctcatgtctgcattgctgtatagtttatacagtgctgctttgcttccaaagatggatgaacatggtctcattttttgggtgggtatctgagtccatttgtgctgctataacaaaatatcataaactagtagcttattaacaacaaaaatttatttctcacaattctagaggctgggaagtacaagactaaggtgctggtasatttggtctctggtgaggggcccacttcctggttcatagaatgacaccttcttactgcttcctcacatagtgaaagggacaaggcagctctttgggatctcttttataagggactaatcccattg

SEQ ID NO: 607148 - DNA, 617 bp, Homo sapiens
aaattttagttaacatgtacaagagaaartgaatttaaaggcaattaacaaaactcatgtccatttcattatgcattattggaaggtttattttttaattttctgcacaatatacactttgctgaatgaatgcttaagagtaaaaaccagtcaaaattatagctagtaactagcttatgtttacagttgaagttctgggacagtaaagcaagctaaaaataacatacaaataccaaaaaattaaattgaagacagaaaataaacatacaacctaaaagtctgcttagtttctttcctaaagcccagtaatacaggtccagttaacgtaggggtgaagggagaaatagttccacattaggtctgtgaatacttaagagcatcatttcactcagtaaacagtgaagtgaagatgaactccttcatttgaccatattcctgcctttgtgaattcctcctcacaagtacaatgaggctacacacttctgtatgctgatcatgtattttgttaaataattgctgctatgctaaagtattggtttgttgaccaccaggtaggtcattctcgggtgaacaggggctgattttatattttcatacacacacacacacacacacac

SEQ ID NO: 607149 - DNA, 546 bp, Homo sapiens
gtccccagggcttccccgaattccttagaacacattctggcttagatctcgcaggtgaggtctctgagtaagttatgccggtgaacacttacacagatggagctctttcagtcaggaactatctccgttttwtactgaaataattacatggtggacactgacattttccactgggccattccatgtattaatatatcgatcaattccgggtttatttaccttaggccatctagacagaccaggtgtaccctgctaaaaagcatttcatagacaaggactccccattctctttccaccagaatataccttgcatgtttacaaggagatttgatttggtcatttccacctggccatctcaggataggaataattggctaaaaaccagctgctgtcacttaacttctaacttttctcccctgtctttttttcttaccagatccttctaaaaaaaataattctctaaaactagtgaataattgtggctgaggtctttaaatgaaaattaccatcataccattatagaagagaacaatattttgaaatcat

SEQ ID NO: 607150 - DNA, 597 bp, Homo sapiens
cacgaaatctggttgtttgaaaatgtgtagcacttccccattcactctctcttctgctctgccatgtgaagaaggcrcttgcttccccttcgcccttccaccatggttgtaagtttcctgaggcctccccaaacatgtttcctacacagcttgcgggactgtgattcaattaaacttcttttcttcataaattatccagtctcaggtagttctttatagcagtgtgaaaacaaactaatacaatattccaaagtggttatataaatgtatactcctactagcaatgtatgagaatcccctattcctccacatccttgacaacacttggaatcatcaatcttcaaaatttgtggctgtatcttgtaattttaatttgcattctgctgatgagtaatggtgttgagtctctcttcacatgtcctttggccatttggatatcccattctgtgaggtgcctaataccgtgacttcctttaaagactcaaatttgagtcatcaacaaaaggaggatactaacttccagagttaagccagtaagaaaaacaatattttgaggtagtaccaattatatatacctaatttggatgattagagaga

SEQ ID NO: 607151 - DNA, 597 bp, Homo sapiens
cacgaaatctggttgtttgaaaatgtgtagcacttccccattcactctctcttctgctctgccatgtgaagaaggcacttgcttccccttcgcccttccaccatggttgtaagtttcctgaggcctccccaaacatgtttcctacacagcttgcgggactgtgattcaattaaacttcttttcttcataaattatccagtctcaggtagttctttatagcagtgtgaaaacaaactaatacaatattccraagtggttatataaatgtatactcctactagcaatgtatgagaatcccctattcctccacatccttgacaacacttggaatcatcaatcttcaaaatttgtggctgtatcttgtaattttaatttgcattctgctgatgagtaatggtgttgagtctctcttcacatgtcctttggccatttggatatcccattctgtgaggtgcctaataccgtgacttcctttaaagactcaaatttgagtcatcaacaaaaggaggatactaacttccagagttaagccagtaagaaaaacaatattttgaggtagtaccaattatatatacctaatttggatgattagagaga

SEQ ID NO: 607152 - DNA, 597 bp, Homo sapiens
cacgaaatctggttgtttgaaaatgtgtagcacttccccattcactctctcttctgctctgccatgtgaagaaggcacttgcttccccttcgcccttccaccatggttgtaagtttcctgaggcctccccaaacatgtttcctacacagcttgcgggactgtgattcaattaaacttcttttcttcataaattatccagtctcaggtagttctttatagcagtgtgaaaacaaactaatacaatattccaaagtggttatataaatgtatactcctactagcaatgtatgagaatcccctattcctccacmtccttgacaacacttggaatcatcaatcttcaaaatttgtggctgtatcttgtaattttaatttgcattctgctgatgagtaatggtgttgagtctctcttcacatgtcctttggccatttggatatcccattctgtgaggtgcctaataccgtgacttcctttaaagactcaaatttgagtcatcaacaaaaggaggatactaacttccagagttaagccagtaagaaaaacaatattttgaggtagtaccaattatatatacctaatttggatgattagagaga

SEQ ID NO: 607153 - DNA, 612 bp, Homo sapiens
ttgatattttgtaatacatttagatatcttaaattttttaatatatattgttttactgatggttttgctttatgaattctgaactttccaatgaaagaaaacaactactgaagtcaayacatatttgagtatcaaagaccctaaactgtcatttttgctgtggttattgcaacaaataattggatttttttttctttttctttgagacagggtcttactctgttgcccacgctggagtgcagtggctcattgcagcctcaacctcctggcctggctcaagtgatcctcccacctcagccttctgagtactaggctacaggcacgtgtcaccacaactggttaatttttgtattttttgtagagatggggttttgccatgttgctcaggctggtctggaactcctgggctcaagcaattcacccgcctcaccctcccaaagtgacagggggtgtgagccaccatgtccagccagtaattgcattttctttatgacaaaattattttcagagcttagaactggataaaactttttctctacttgtatattccttctacaaaggaaagcagtcattgcttctttgcactgactggtagaaagcttaaaactaaaa

SEQ ID NO: 607154 - DNA, 545 bp, Homo sapiens
gttggaaaaattctcatagacattggcctaggcaaagaattcatgactaagatgcaaaaagcaaatgcaacaaaaacaaaaataaatacataagacctaattaaactaaaaagcttctgcacagcaaaagacataataatcacagcaagcacacaacccacagaacgggaggaattatttgcaaaccacacatctgataaagaatctagaatctacaaggaactcaaacaaatcagcaagaaataaacaatctcatcaaaaagtgggcaaaggacatgaatagatatttctcaaatgaagatatacaaatggccaacaaacatggaaaaatgctcaacatcactaatcctcagrgaaatgtaaactaaaaccacaaagatgctaccttacttctgcaagaatggctattaaaaagtcaaaaaaaaatagatgttggcatggatgtggggaaaagggaatgcttatacactgctgatgggaatgtaaattagtacaacctctatagaaaacagtacggagattccttaaacagctaaaagtagatc

SEQ ID NO: 607155 - DNA, 517 bp, Homo sapiens
gttggaaaaattctcatagacattggcctaggcaaagaattcatgactaagatgcaaaaagcaaatgcaacaaaaacaaaaataaatacataagacctaattaaactaaaaagcttctgcacagcaaaagacataataatcacagcaagcacacaacccacagaacgggaggaattatttgcaaaccacacatctgataaagaatctagaatctacaaggaactcaaacaaatcagcaagaaataaacaatctcatcaaaaagtgggcaaaggacatgaatagatatttctcaaatgaagatatacaaatggccaacaaacatggaaaaatgctcaacatcactaatcctcagggaaatgtaaactaaaaccacaaagatgctaccttacttctgcaagaatggctattaaaaagtcaaaaaaaaatagatgttkgcatggatgtggggaaaagggaatgcttatacactgctgatgggaatgtaaattagtacaacctctatagaaaacagtacgg

SEQ ID NO: 607156 - DNA, 545 bp, Homo sapiens
gttggaaaaattctcatagacattggcctaggcaaagaattcatgactaagatgcaaaaagcaaatgcaacaaaaacaaaaataaatacataagacctaattaaactaaaaagcttctgcacagcaaaagacataataatcacagcaagcacacaacccacagaacgggaggaattatttgcaaaccacacatctgataaagaatctagaatctacaaggaactcaaacaaatcagcaagaaataaacaatctcatcaaaaagtgggcaaaggacatgaatagatatttctcaaatgaagatatacaaatggccaacaaacatggaaaaatgctcaacatcactaatcctcagggaaatgtaaactaaaaccacaaagatgctaccttacttctgcaagaatggctattaaaaagtcaaaaaaaaatagatgttggcatggatgtggggaaaagggaatgcttatacactgctgatgggaatgtaaattagtacaacctctatagaaaacagtayggagattccttaaacagctaaaagtagatc

SEQ ID NO: 607157 - DNA, 607 bp, Homo sapiens
attgcctcctaacactttaaatgtcagcattccccagggtttcaacctcaattctatttttcagactgcatatttttcctgagcaatcccttgtagtttcatgactkcatgtgacacttatgacttggtgatctctgttttcagagaagcaactttccataatccaaaactattttcagttgcttccaaaccactatcacctgtgtaatacacacaaacaaaactaaacttaccatttcctaacatcctaatttcaatttctattatcctgttcattgtaatccatgaagttattcaagccaaaactctcaattgtcattaaattctcttgcagtcttacccaatatctaagtattcatgaaatcctcattcctaaatagatctttaatctgtctcctctgctccatccccatataatactgcccaagctaaaaaaaaacccaccttcccttacctagactacgacaaaagcatcctagctggtttctctgattcaattctaacccaccctgaggaatcctttcttcatggtggttggggtgggggtgggaggatctttcaacctctatataaaatatttcaatagcttcttatcatatacaaaaaa

SEQ ID NO: 607158 - DNA, 556 bp, Homo sapiens
ctggattcctgaaggcattatacagccactgcaccacccctggactgcaaacctcatactttctgtcacrtgaggaaaaaaaagaaaagagaaaaaaaaaactttacttgtttaaacctttctcttacattctgccaaatgcaacccttgatacatcatgctaaaataaaattttaataaattaccccactgaaagacacttagaagataatataacgtatcttaccttcagaggagaaaagtgaacctcaagaaaaaaaaaagttggaggcaccaacctattatcagaacaaagactaaagcttcactctcacttatgtgaataattttttctaaaatattaaaatcacactgaactttacatttcaaaatggctgaaacaggcggggtgtggtgacttatacctgtcatcccagcactttgggaggcgaggcaggtggattgcttgagctcaggagttcgagaccagcctgggacacacggtgaaacctcgtctctactaaaaatacaataattagccaggcatggtggcatgagcctgtagtcccagctattc

SEQ ID NO: 607159 - DNA, 560 bp, Homo sapiens
aaagttaatcactgcaaggttatagaatctttttacagcttccagtcaagtcatrgactccagtgtcaccacctccagccccttaaaaaaaaggtccttatcaggtgttattaactaatccttgtgctatgaagttacagggctttgactcctgggtacacatatctcatctaaagaaggcagtgactcctgccagtatctgacagcaaatctaagttaaccgaagccccatttttagatctgggcaaagatgacaatcatagtaaactactttcatgagacacagggacacgcctgtaccacaaaaaaattaagattctcttaataattttgcctctatctaaaataatataatttattctgtgcctaaataaatagatactaaataatttaaatgtttaaatttagtgcctaaattgacactaaataatttaaatgtttagctacctataagtttcctttcctgtaactgtcagaactaggcagggcttattacctttttgtttgaaacactgctaatactttacatttttttttacctccagaatttgaaactattg

SEQ ID NO: 607160 - DNA, 577 bp, Homo sapiens
gccattatgagaagtggagggttggacatgccacactatacctycccccaatttggagtttaggcacaaatgaccagcattaacattaaaatagagatcacataagactgacaagacagactctgtagcaataagatacacactgttatgtttcacttactaacaaagtctctcagaagctcagcaaacatgtgttaatgctgcaaagctttcccaaatttattttattctagagtttcctgtatgaaatctcttatgttaaataagtaagaatttggactaaacagttatgcctttatagttatagtcttctgttatctcttcatacaggtcctcatatttctggtcaggaatattgtcagatcttttatggtttcggttggaattgtgggtgggatcatttaaaaaccctattttctaactggttattgctggcatttgtttttttaaataaatatttatttcatgattgtatccaactattttctaattctttattaatatactaatctttataactgtatcacttcctctctaatagctataactcatttctatttcatattttattgcttaa

SEQ ID NO: 607161 - DNA, 577 bp, Homo sapiens
gccattatgagaagtggagggttggacatgccacactataccttcccccaatttggagtttaggcacaaatgaccagcattaacattaaaatagagatcacataagactgacaagacagactctgtagcaataagatacacactgttatgtttcacttactaacaaagtctctcagaagctcagcaaacatgtgttaatgctgcaaagctttcccaaattyattttattctagagtttcctgtatgaaatctcttatgttaaataagtaagaatttggactaaacagttatgcctttatagttatagtcttctgttatctcttcatacaggtcctcatatttctggtcaggaatattgtcagatcttttatggtttcggttggaattgtgggtgggatcatttaaaaaccctattttctaactggttattgctggcatttgtttttttaaataaatatttatttcatgattgtatccaactattttctaattctttattaatatactaatctttataactgtatcacttcctctctaatagctataactcatttctatttcatattttattgcttaa

SEQ ID NO: 607162 - DNA, 599 bp, Homo sapiens
ttagtcagttctaggactcaaatatgcactaaagctcaaagacccccaggcaaccattagaaatcttttatttatttttatttatttttttgagacagaatctcgctctgtcgcccaggctggagtgcagtggtgcaaactcggctcactgcaacctccgcctcccgggttcaagcaattctcctgcctcagcctcctgaatagctgggattacaggcatgcgccaccaagccctgctaatttttttgtatttttagaagagacrgggtttcaccatattggccaggctggtctcgaactcctaaccttgtgatccgcccagcctcggcctcccaaagtgctgggattacaggcgtgagccaccaggcccggcccttggaaatcctttatttttaacttaaatatcatcctaaagaagttagttacctggtttttcagaaccaagcaaattaggcactgcacattattacagaaaggcatacctagggcaatacataacagctgacaaactgaaacaaagagaaaaaaacaaacactaatttaaaaggttagctatttagggcatcagtaaatagaacattatcatatgacagggccat

SEQ ID NO: 607163 - DNA, 421 bp, Homo sapiens
ttttgctagggcctagaagcacaaaatggtagcaaaaaatgcataatcttggagaaaycttagggaggcatcatagttgcctccgttctgctcactctcaaccctaggatgatatgttggaataggtaggcagaaagtgatcattccgtctcactccatgtcaactgtttgcctagcattccagagtccatctgtaaattaaattgggaaagactagggagttgagaggggacattcaaatacccttgatgatgttttgctatctcacaaccactaaagtgtttcagaatggttgaaggtagattgctccaaaggtgggctccatcagtttattgtcagcaaccctctacctccttccaaattagcttactaggctctactcgattgatactgcatagccgctgccttcttaaagtgttaa

SEQ ID NO: 607164 - DNA, 613 bp, Homo sapiens
tgaaatggggaatttgcctctttctccttgaaacttctcattaaagaaaactaaactttcagaaatttaaacagaaattcaaagcatcccattttgtcagtgtatgtcgatgtaataatattgtttatactctctcttctagaaaacatggagtctgtaacatgtttgagccgtggttcctagtttctttttccttgtctgtgcctgggttcagttttacatttgggttggttttgatgtcagaaagtagaaggatatgagggaaataagcccgaaccataattcagaaagatgctttcaataccaaaggatgtgtatcatcagctaacagtaaagtttttccctttctctgcatctgactttgtctgggaagcacttctggtctcaagggaaaaaacaaaataaaataaaatataagccaccattaggaatataaaaaagaytgtagatagctgaaaaacggattatgcaacgcaacaggatgaaataacccacagcaccaaaacccagggctgccagggatcaatgaccactgagcccataatgatcctcttacatcaaaagccctttcaagacatagcaacatacctgccctgcaaagactcttgaacca

SEQ ID NO: 607165 - DNA, 573 bp, Homo sapiens
gtctccatcggacgccttaacatcaccgggagctgcgcgcaccccgcgcctcccccatcccattcccgagggcccgggagttgcagggcctggcacggrgtatccccgccgaagtcgccctttccccggggacggcagcagcctcgctcctcccgggtctccaggattcaattcgttgcccgctcctagcttccctctgctctgcgacggcccccactttttgtagcccccaaaagcacgcaggaccccacatccccaggagaggccctgcggtgttagggcgaggacagaagggggagctagggacggcgcctacgtcctgcggggaactggggtggaggggaggatgggggaaacggggcctgcagagtcgcccctgcctctgtgcagcgtggaggcgccaaaagccgagaaggaaatgctctctgccttcgcccccaaacttctactggcccggcttgcagtggcgaacccctgcaggtagccgagcgtgtggagaacgccctggccgggacccctcggaggctgcgggtgggcgggactgcggcgaaggggaccccggcccgaccccag

SEQ ID NO: 607166 - DNA, 659 bp, Homo sapiens
gcaggtagtgcataataatcaaaatggaaacaaactgatgatgaatggataaacaaaatgtgacatattcataaaatggaatattattcaacaattaaaagaagtactgatacatgctacaatattaatgaatctcaagaacattatgctaagtgaaagaagcaagataaaaaagactacgtgcacattttaggactacttttatatgaaatgccccaaaaagaaaaatccacagagacaaaatgcaggttagcagttgcatggggtttggggaatgggagaaggagttgactgcaaacagacccaagggacctttttggagtaatataaatrtgttctacaactggattatggtgacatttgcacaactctgaaaatttaccaaaaatcactcattgtacacttagaatgggttaattgtatgatatgtaagttatacctgcttctaaaaatgactattgcaataatatttcatcttctctattttgctcacaatttgcttcactgttcatggaatcactcactatctaaaataagatatccccagaaattggacacaattttatgctttgagagtgaagacagaagaatctgcttgtgatgggcttgtccaaggagcatgagagacagtcaaatgtaaggacataactcagaggcat

SEQ ID NO: 607167 - DNA, 572 bp, Homo sapiens
gcaaattactcatctatggctctgtcttttaagttgtttaggagaataatgaacttttagatagagtataggtaggaaatactgaaagccctgaaaatattgacttttcaccataatttaaatattcaagttctggacttactaatgacacttaaaaatcaaaatgacctgrcagttctcaaacgtttgctgtatctgtatattcatttaagcacatagttactatctgctgtgtgccaggcactgtgcctggcatgagtgatagagcaatcagtaactcagatgtgtctccatgcaggctttatgaagctcattatctattcattatgtccactctgcagaaatggtcacttctctctttgcatcatgggtggctttattttttagtttttactgccacaattgtccccaaggctacagggaagcaaagtcttcaaaacttaacaacaacaacaaaaaaatctggcctctcgaggtgaaaaaattgatggaagtatttgcactgttgtcactgggtccaacagagccaccatttcttgaggaaacccttttgggatttgtttccttaatgc

SEQ ID NO: 607168 - DNA, 572 bp, Homo sapiens
gcaaattactcatctatggctctgtcttttaagttgtttaggagaataatgaacttttagatagagtataggtaggaaatactgaaagccctgaaaatattgacttttcaccataatttaaatattcaagttctggacttactaatgacacttaaaaatcaaaatgacctggcagttctcaaacgtttgctgtatctgtatattcatttaagcacatagttactatctgctgtgtgccaggcactgtgcctggcatgagtgatagagcaatcagtaactcagatgtgtctccatgcaggctttatgaarctcattatctattcattatgtccactctgcagaaatggtcacttctctctttgcatcatgggtggctttattttttagtttttactgccacaattgtccccaaggctacagggaagcaaagtcttcaaaacttaacaacaacaacaaaaaaatctggcctctcgaggtgaaaaaattgatggaagtatttgcactgttgtcactgggtccaacagagccaccatttcttgaggaaacccttttgggatttgtttccttaatgc

SEQ ID NO: 607169 - DNA, 572 bp, Homo sapiens
gcaaattactcatctatggctctgtcttttaagttgtttaggagaataatgaacttttagatagagtataggtaggaaatactgaaagccctgaaaatattgacttttcaccataatttaaatattcaagttctggacttactaatgacacttaaaaatcaaaatgacctggcagttctcaaacgtttgctgtatctgtatattcatttaagcacatagttactatctgctgtgtgccaggcactgtgcctggcatgagtgatagagcaatcagtaactcagatgtgtctccatgcaggctttatgaagctcattatctattcattatgtccactctgcagaaatggtcacttctctctttgcatcatgggtggctttattttttagtttttactgccacaattgtccccaaggctacagggaagcaaagwcttcaaaacttaacaacaacaacaaaaaaatctggcctctcgaggtgaaaaaattgatggaagtatttgcactgttgtcactgggtccaacagagccaccatttcttgaggaaacccttttgggatttgtttccttaatgc

SEQ ID NO: 607170 - DNA, 603 bp, Homo sapiens
tgcttcttttctcctttttggagaaggccagctcactatttttaaaaggtgatggaccatgtcaggatttagaaagtgaaaggaaagagattggtttggattttctcagtctttgtctgctctaaagctcaataaacttcgaatggtgactgcaggtataagggtagaggaaggcttttatatccttagaaaacctacgtttcagttrgattacagaggtagtcagaagatagggaaaaagttccaatagcattttgactactttccatgtcaaaggatatatatcagccgtattccattgctatgagaatcagcatgtttaagtattgataaaaaaattttagggaacacaatacaagttatcaaacaattggatgagtttttttgtaataaagacaggactgtatgtagtttatattcaagtttatggattcttctgaatactgagtaaattgtcaaaatggtactgaaactctatgtgaaaggctcagcctaaattctgttaatctggctgatacatctttctgtgattttaaaaaaagattcgggagtggggagggatagctttaggagatatacctaatgctaaatgacgagttaagg

SEQ ID NO: 607171 - DNA, 409 bp, Homo sapiens
taggggaaatggaagaattgctgttcatcaggtatagggttttagttatgcaagctggaaaacttctagagagctgctgtacaattatgagctcatagttaacaatattgtactgcactctacactgaaaattttggtaaagcctagagctcatgttatgtattctttaccacaataaaaaagcaagcaagcaagcacaatcaattcctgtctttaagggccacataggcccttgatgcctgtattctctcaacaccaccacattcacacatacagataatyagtctggattactttagtctagcctgggcacagtggctgatgcctgtaatcccagcattttgggaggccaaggcaggaggatcacttgagttcacgagttcaagaccagcctaggcaacacagcaaa

SEQ ID NO: 607172 - DNA, 645 bp, Homo sapiens
gagccatgtttagcttacactttttaggggaaacagatgaagaggaatttggagtggttgccaagtaatctctacagtctctttcaactcttaagagtctgcatcacagaacacccaacacgggctactcaaagtcatattcaactttaaaggatgaaagacagcaacctgagtctatcatgtgaatacctgtrtacagcaaagcgtgcatgtaattctgagctttttaggaatattaatgaatttcctacctcccctctttttttgtttaaatatgtttaagtgggggttttgacagtgaaagagtcatactacatggcttgatgttatgattatctggcaaacatgtagatagtactttccatatgccataatcctacctcctgctttgaaactctgtgtgtctctgatccctccatccatccatgacatccaactgatggctttctggaggctgggaacacggaggcttgctctccaattgcttccttttgggacccccaaaggaagatcttcctgccttacattttcttctttatttgaacaccgccagtgagccaataacgtttccctcatggaggctgtgaaatcccctagggcaaagaccacatttttcaaatagtcattgctccctggaagcaatgt

SEQ ID NO: 607173 - DNA, 645 bp, Homo sapiens
gagccatgtttagcttacactttttaggggaaacagatgaagaggaatttggagtggttgccaagtaatctctacagtctctttcaactcttaagagtctgcatcacagaacacccaacacgggctactcaaagtcatattcaactttaaaggatgaaagacagcaacctgagtctatcatgtgaatacctgtatacagcaaagygtgcatgtaattctgagctttttaggaatattaatgaatttcctacctcccctctttttttgtttaaatatgtttaagtgggggttttgacagtgaaagagtcatactacatggcttgatgttatgattatctggcaaacatgtagatagtactttccatatgccataatcctacctcctgctttgaaactctgtgtgtctctgatccctccatccatccatgacatccaactgatggctttctggaggctgggaacacggaggcttgctctccaattgcttccttttgggacccccaaaggaagatcttcctgccttacattttcttctttatttgaacaccgccagtgagccaataacgtttccctcatggaggctgtgaaatcccctagggcaaagaccacatttttcaaatagtcattgctccctggaagcaatgt

SEQ ID NO: 607174 - DNA, 645 bp, Homo sapiens
gagccatgtttagcttacactttttaggggaaacagatgaagaggaatttggagtggttgccaagtaatctctacagtctctttcaactcttaagagtctgcatcacagaacacccaacacgggctactcaaagtcatattcaactttaaaggatgaaagacagcaacctgagtctatcatgtgaatacctgtatacagcaaagcgtgcatgtaattctgagctttttaggaatattaatgaatttcctacctcccctctttttttgtttaaatatgtttaagtgggggttttgacagtgaaagagtcatactacatggcttgatgttatgattatctggcaaacatgtrgatagtactttccatatgccataatcctacctcctgctttgaaactctgtgtgtctctgatccctccatccatccatgacatccaactgatggctttctggaggctgggaacacggaggcttgctctccaattgcttccttttgggacccccaaaggaagatcttcctgccttacattttcttctttatttgaacaccgccagtgagccaataacgtttccctcatggaggctgtgaaatcccctagggcaaagaccacatttttcaaatagtcattgctccctggaagcaatgt

SEQ ID NO: 607175 - DNA, 562 bp, Homo sapiens
ggttttgacagtgaaagagtcatactacatggcttgatgttatgattatctggcaaacatgtagatagtactttccatatgccataatcctacctcctgctttgaaactctgtgtgtctctgatccctccatccatccatgacatccaactgatggcttyctggaggctgggaacacggaggcttgctctccaattgcttccttttgggacccccaaaggaagatcttcctgccttacattttcttctttatttgaacaccgccagtgagccaataacgtttccctcatggaggctgtgaaatcccctagggcaaagaccacatttttcaaatagtcattgctccctggaagcaatgtatttcaccaaaatgggtgtcaatagctgttggctgacactctcaaaagtcaaataaagtggaaaaaatatccatagtttgtgatcaattaaggctgtaactgtactaatattcccggttgatcagcaacttctgggcattagaaagtctggtgtcctaatggtcactcggaatccttcatagacatctgaatcagtgataaata

SEQ ID NO: 607176 - DNA, 541 bp, Homo sapiens
tgcattctggaagtttaaaaatctcagtgacagagaagcaaacagcaccataggaagctggaaaaactgggtttgattactgatttcacccccaactggcactagactttgaraggatatttctttaagcctggattacatgaaaaataggaataatgacacagggtttttatgaggaaatcagatagtcaactaccatgtctagcatcatacctagttcttagcaagcgtagtaggttgaaaatgaccctccaaaagatatccgtgtcaaattcctggaatctgtgaatgttaccttatctggaaaaagggtctttgcagatgtgattaaagatcttgagaaaacgaggtaatcctggattatatggtagaccctaaatccaatgactcttataagtgtccttataagagaggcagagagagatttgacacagacacacagaagaagcctctgagaagacagaggcaagattggagtgatgtatccacaagccatggaacaccagaatctagaaaaggcatggcagattctcctccagaa

SEQ ID NO: 607177 - DNA, 591 bp, Homo sapiens
ccatggaacaccagaatctagaaaaggcatggcagattctcctccagaaggaaccaaccctactgaccccttgatctcatacttttgaaatccagaaatgtgagagaatacatttccattgtttcaagccatcagattcatgatcaattgttacagcagccttaggaaactcaaagtgttccatgactgctagcgtgcttcatgatcaagacagaagaggaagcccagaaaggaagcttagggatcattttcaggcagaagcagagcccttttgtggtgggtctaaagatgtgtctgcagcggaatgaacactcaaacacagagaagagcaaaccgtccactcaagaagttggagtgggggtgctagaaggcttcctctgggctttctgttatagagagactgggatgggatgtagaagtgtgatccacaataaaatatccataggtacccccccagagtggctaaagactgaatatacccagtgayggcagggatgtggagcaaccggaactctcaaccactgctgtgcctatgtaaaatggaaaacagtttggtatttagttaaaaagttaaacatacacctaacaggt

SEQ ID NO: 607178 - DNA, 591 bp, Homo sapiens
ccatggaacaccagaatctagaaaaggcatggcagattctcctccagaaggaaccaaccctactgaccccttgatctcatacttttgaaatccagaaatgtgagagaatacatttccattgtttcaagccatcagattcatgatcaattgttacagcagccttaggaaactcaaagtgttccatgactgctagcgtgcttcatgatcaagacagaagaggaagcccagaaaggaagcttagggatcattttcaggcagaagcagagcccttttgtggtgggtctaaagatgtgtctgcagcggaatgaacactcaaacacagagaagagcaaaccgtccactcaagaagttggagtgggggtgctagaaggcttcctctgggctttctgttatagagagactgggatgggatgtagaagtgtgatccacaataaaatatccataggtacccccccagagtggctaaagactgaatatacccagtgatggcagggatgtggagcaaccggaactctcaaccactsctgtgcctatgtaaaatggaaaacagtttggtatttagttaaaaagttaaacatacacctaacaggt

SEQ ID NO: 607179 - DNA, 591 bp, Homo sapiens
ccatggaacaccagaatctagaaaaggcatggcagattctcctccagaaggaaccaaccctactgaccccttgatctcatacttttgaaatccagaaatgtgagagaatacatttccattgtttcaagccatcagattcatgatcaattgttacagcagccttaggaaactcaaagtgttccatgactgctagcgtgcttcatgatcaagacagaagaggaagcccagaaaggaagcttagggatcattttcaggcagaagcagagcccttttgtggtgggtctaaagatgtgtctgcagcggaatgaacactcaaacacagagaagagcaaaccgtccactcaagaagttggagtgggggtgctagaaggcttcctctgggctttctgttatagagagactgggatgggatgtagaagtgtgatccacaataaaatatccataggtacccccccagagtggctaaagactgaatatacccagtgatggcagggatgtggagcaaccggaactctcaaccactgctgtgmctatgtaaaatggaaaacagtttggtatttagttaaaaagttaaacatacacctaacaggt

SEQ ID NO: 607180 - DNA, 594 bp, Homo sapiens
ttctgagttaaagaaaccagacatagaatacatactatgtaattccacttgtatacatatttagaaaatgaaaaagaatctatagtgacagaaagcagatgaatggttgcctgggggtggtggaagggtttagacagagttgaagggaaagggcacaaggaaactkggaatgacgaaaatgttggtatcttaatagtggctgtggtttcatgggtgtataaacaaatcaaaacttcaaaatgcatgtttcaaaatgcatattttaaatatgtgcagtttatttcatttatgcctcaacatagttgttaaggtagattctagtgggaatatgctgtatttactgaaaggggtgatccaggaaaggtgttctagatcagcatttgcagagaaatagagttcatacatatttcataatagtgatttaaatgagtagctgagtggtgcagtgaagcatagggtttccccattttaattaggctctttcatttcttagggtcaggagccttcttgtactgtgcacgcacaagtgagcttgttgctcaagtctgctccctggtgctgggagaggatctttgttggttggtgttagggaga

SEQ ID NO: 607181 - DNA, 581 bp, Homo sapiens
cataatagtgatttaaatgagtagctgagtggtgcagtgaagcatagggtttccccattttaattaggctctttcatttcttagggtcaggagccttcttgtactgtgcacgcacaagtgagcttgttgctcaagtctgctccctggtgctgggagaggatctttgttggttggtgttagggagagcttctctctgttgtgccttttaatcactcttcttttccatggctcagactgaacactgggtggagaaagccctcctgcctccaatgacccgactacttcataccctcccagtctccctgcaaaagaaagctcaggagagcaccactcgtgccctcactccaactcctccagtggatggtttgctygtctctggttttgagtgtttattctgctctagaaacatcttcagacccacagcaaaagggctttggcttaactatctttgaatatggcagaagagttgttttcacttttccaccttaaaagtgtgtatatctctaaaggttttaaaatattggagagtaggaataggggaaacaatttttgctagcctcaccattcaaatataagtgcaa

SEQ ID NO: 607182 - DNA, 581 bp, Homo sapiens
cataatagtgatttaaatgagtagctgagtggtgcagtgaagcatagggtttccccattttaattaggctctttcatttcttagggtcaggagccttcttgtactgtgcacgcacaagtgagcttgttgctcaagtctgctccctggtgctgggagaggatctttgttggttggtgttagggagagcttctctctgttgtgccttttaatcactcttcttttccatggctcagactgaacactgggtggagaaagccctcctgcctccaatgacccgactacttcataccctcccagtctccctgcaaaagaaagctcaggagagcaccactcgtgccctcactccaactcctccagtggatggtttgcttgtctctgkttttgagtgtttattctgctctagaaacatcttcagacccacagcaaaagggctttggcttaactatctttgaatatggcagaagagttgttttcacttttccaccttaaaagtgtgtatatctctaaaggttttaaaatattggagagtaggaataggggaaacaatttttgctagcctcaccattcaaatataagtgcaa

SEQ ID NO: 607183 - DNA, 581 bp, Homo sapiens
cataatagtgatttaaatgagtagctgagtggtgcagtgaagcatagggtttccccattttaattaggctctttcatttcttagggtcaggagccttcttgtactgtgcacgcacaagtgagcttgttgctcaagtctgctccctggtgctgggagaggatctttgttggttggtgttagggagagcttctctctgttgtgccttttaatcactcttcttttccatggctcagactgaacactgggtggagaaagccctcctgcctccaatgacccgactacttcataccctcccagtctccctgcaaaagaaagctcaggagagcaccactcgtgccctcactccaactcctccagtggatggtttgcttgtctctggttttgagtgtttattctgctctagaaacatcttcagacccayagcaaaagggctttggcttaactatctttgaatatggcagaagagttgttttcacttttccaccttaaaagtgtgtatatctctaaaggttttaaaatattggagagtaggaataggggaaacaatttttgctagcctcaccattcaaatataagtgcaa

SEQ ID NO: 607184 - DNA, 548 bp, Homo sapiens
gcttaactatctttgaatatggcagaagagttgttttcacttttccaccttaaaagtgtgtatatctctaaaggttttaaaatattggagagtaggaataggggaaacaatttttgctagcctcaccattcaaatataagtgcaaataactttctaatttttttccactttttgtttctatgtaaaggcttttaatagcattgccattaagctatacatgcagctttatttcctgcttcttcccgtattrttactccctggccactcttctatgttattacacaagcttcataaatattatctttaatggctgcgtaatactccattgagtggatatgtcattgttaatcatggccctattagcagagagtttaaaacacagttagaagggtgacttcacacaagacagattttactcaagatataaaaggaggactgacctatggaaagatccctggacttggtgtgggcctgagattttggttcaagctgacttactagctgttgacttttaacatgtgtcattgcttaactatggcctctgctta

SEQ ID NO: 607185 - DNA, 475 bp, Homo sapiens
catccgttatgggaaacagtatggatgttcctaaggaaatgaaaaacagaactgccataccacccagtgagccttctgggcacataccgaatggagaggaaatcaccacctcataaacatatctgcatttccatgctcattgcagcgtgtttcataatagccaagacatggaaacaacttaaatattcatggaagtatgagtggatactctttgtattctcttttatttctctttaattatctctttaacttacatttgcttcatcttgccaggttatactttctgcttcatctgagctttttatttattttttaaacagcagtttctatttgatatttattaaatagtgttattagagaataagggtaatctctatataagaacaaatccaatcttagtagcrtaatcactacttacagaaatttaagatccagggtaaataatgcttcaaaagcaaaaacattagtgttagga

SEQ ID NO: 607186 - DNA, 589 bp, Homo sapiens
aaaatacattttttcccaattgttttatcattttagtaaagcattttagtaaactgaaatggaattaaatttagtgtaaaaatacaacaatctcattctcttttagtttttagtttactctttatgaaagatagaagctttggaaaattgaacttattaaatcactatgaaagtcaacacattctttcaatctaggaaaagatttttaagttagcagaatcttaagaagacctccatttatactttatataagttcactaactttaaaccggatcccttttaactttgccaaatgagttcaaatttataaagaaaattacatttgagttgmtttaaatggccagaaacaatataaacctattgatttttcaagatgttgaaaaaaaagtcaaatattcctgctgttctatggacttggaaatgtctctatttgccacaaaaatgcatggcatgtctcctcattcaattactgaagttaccttacggtagaaattcattcactcaggagagctatcaatcaataagaaagcagggaagcccattcattcagtctatccattcaacacatttatagagtgcttcctatgtg

SEQ ID NO: 607187 - DNA, 594 bp, Homo sapiens
ttgatttttcaagatgttgaaaaaaaagkcaaatattcctgctgttctatggacttggaaatgtctctatttgccacaaaaatgcatggcatgtctcctcattcaattactgaagttaccttacggtagaaattcattcactcaggagagctatcaatcaataagaaagcagggaagcccattcattcagtctatccattcaacacatttatagagtgcttcctatgtgccaagtacacaagagaaaaatacttaattatgaattgttagagcaccgtcataaaagtcaccataaagccttctttgatatacccccaactaattttaattctcagaaataattctagcaattgctttcatacatgtaacatatccctccatatatatcatcagtaattgtgtacaaaaagctgtggatgagtcttagaaaatgaagataaaatccctaccattaaagagttcaccacttggtgggaaagagacaatgcccacaaacaataatagtaacagggttagaacgtgttgggtgtgtcagactgcctgccaaagctcagggaagaaagaaattacttcttggggcctgaattagaatta

SEQ ID NO: 607188 - DNA, 594 bp, Homo sapiens
ttgatttttcaagatgttgaaaaaaaagtcaaatattcctgctgttctatggacttggaaatgtctctatttgccacaaaaatgcatggcatgtctcctcattcaattactgaagttaccttacggtagaaattcattcactcaggagagctatcaatcaataagaaagcagggaagcccattcattcagtctatccattcaacayatttatagagtgcttcctatgtgccaagtacacaagagaaaaatacttaattatgaattgttagagcaccgtcataaaagtcaccataaagccttctttgatatacccccaactaattttaattctcagaaataattctagcaattgctttcatacatgtaacatatccctccatatatatcatcagtaattgtgtacaaaaagctgtggatgagtcttagaaaatgaagataaaatccctaccattaaagagttcaccacttggtgggaaagagacaatgcccacaaacaataatagtaacagggttagaacgtgttgggtgtgtcagactgcctgccaaagctcagggaagaaagaaattacttcttggggcctgaattagaatta

SEQ ID NO: 607189 - DNA, 594 bp, Homo sapiens
ttgatttttcaagatgttgaaaaaaaagtcaaatattcctgctgttctatggacttggaaatgtctctatttgccacaaaaatgcatggcatgtctcctcattcaattactgaagttaccttacggtagaaattcattcactcaggagagctatcaatcaataagaaagcagggaagcccattcattcagtctatccattcaacacatttatagagtgcttcctatgtgccaagtacacaagagaaaaatacttaattatgaattgttagagcaccgtcataaaagtcaccataaagccttctttgatatacccccaactaattttaattctcagaaataattctagcaattgctttcatacatgtaacatatccctccatatatatcatcagtaattgtgtacaaaaagctgtggatgagtcttagaaaaygaagataaaatccctaccattaaagagttcaccacttggtgggaaagagacaatgcccacaaacaataatagtaacagggttagaacgtgttgggtgtgtcagactgcctgccaaagctcagggaagaaagaaattacttcttggggcctgaattagaatta

SEQ ID NO: 607190 - DNA, 593 bp, Homo sapiens
gatgaattcattataaatttgaattgggtacaataagctgcgtattaagaaaacacgtagaagtggacaaaatctcacgtgaattttttttaatcctagggtcttagcttttggacacagggttagtttgctattaaaaagaaatcttagtgacaaaatactccctaacaagagaagccattagaaaaggtccaaacgaggaacagatttacttctagcaccttatggggaaatattcctctaaatcagtagtttgacttcagtgtgaaccagaatcacacagaggctgtggagccccaatcccaggggctctgtagtctgtagatccaggatgggacatgcatyttgcatttctaacgtggttctgatgctgctggtttgagcaccacactttgagaaccagtttgttttaaatcttttgcaaggaggacttaacaattgtgcactaaataaatggctctggacttcaaacccaggttgtatctgttcctagtcaccccactggctgtggtagtgtccactcagcattacttgtgcatttagtttttgcaaaggtgatgagattggaaggatggcaatgctgattgcttgtg

SEQ ID NO: 607191 - DNA, 595 bp, Homo sapiens
tataaatttgaattgggtacaataagctgcgtattaagaaaacacgtagaagtggacaaaatctcacgtgaattttttttaatcctagggtcttagcttttggacacagggttagtttgctattaaaaagaaatcttagtgacaaaatactccctaacaagagaagccattagaaaaggtccaaacgaggaacagatttacttctagcaccttatggggaaatattcctctaaatcagtagtttgacttcagtgtgaaccagaatcacacagaggctgtggagccccaatcccaggggctctgtagtctgtagatccaggatgggacatgcatcttgcatttctaacgtggttctgatgctgctrgtttgagcaccacactttgagaaccagtttgttttaaatcttttgcaaggaggacttaacaattgtgcactaaataaatggctctggacttcaaacccaggttgtatctgttcctagtcaccccactggctgtggtagtgtccactcagcattacttgtgcatttagtttttgcaaaggtgatgagattggaaggatggcaatgctgattgcttgtgaatcgtgtcaaat

SEQ ID NO: 607192 - DNA, 625 bp, Homo sapiens
aaatcagtcactcagatacctaaacaagaaaaactaacctctaaattgctaattaagtcattatgcacagaggaatcttccgtcttgcttataagctggtttccttttactataaacaaacaaatagcactacttagtaatttttattaatagagtttctatatatacaataccacttttaagtttgatctcatattactcaagtgccttgtaaagtatggaataaacgcccaaattataaggaatgtagagatgccagagcagccttgcaaatggctatgaaaataaattagaccatagaaagttttaatcactctgccacccaccaggacattcacatgtaataaaatagtgaaaacaatattgttttcaacctgcctggcctaagttattactctccaagggcttagtgggcacatgttcagaagccgagcaagagtacctcaccacaaattattttttagggagaaactcaagagatgagcatatctcattcttcacccagagccattctggatattaactgycctattaaccaagccaataaattccttctctaggctgtaagagaaacccgctgtcaaggaggatatttcaatcgaatcctgaaaaatattcagggcaa

SEQ ID NO: 607193 - DNA, 615 bp, Homo sapiens
agccaataaattccttctctaggctgtaagagaaacccgctgtcaaggaggatatttcaatcgaatcctgaaaaatattcagggcaaggttccaaactccgtacatgcttgggctttttcgagtcttgcttattggtgaaggttcttaggagcagtccttacaccttctgtttttgctctgatcatccrtgtgtaattagaataaccataaacacacacactccttcagttgaggcatatatttgggttagacaaaacttttacccttagtttaagggaatcacagtacatgattaatgcaagtgcttcttttcacgaaaattctgtgagattcttagcactggtgccctcaacaacactttcagtccactgacttctttcctcagatcttcctccagtatccaccgtctctaacagtcttacatatttgtcttgaactaccgagtcttggcacaccttacttttagccgcataactctacaagtcttataaaaagtttggcagtcatatcctacttctcagcaagacttaacaatgatcttcagtaaggtctcatcatactaggtcatcattatttagataatatatgctattaagaactatcacaaacagtta

SEQ ID NO: 607194 - DNA, 615 bp, Homo sapiens
agccaataaattccttctctaggctgtaagagaaacccgctgtcaaggaggatatttcaatcgaatcctgaaaaatattcagggcaaggttccaaactccgtacatgcttgggctttttcgagtcttgcttattggtgaaggttcttaggagcagtccttacaccttctgtttttgctctgatcatccgtgtgtaattagaataaccataaacacacacactccttcagttgaggcatatatttgggttagacaaaacttttacccttagtttaagggaatcacagtacatgattaatgcaagtgcttcttttcacgaaaattctgtgagattcttagcactggtgccctcaacaacactttcagtccactgacttctttcctcasatcttcctccagtatccaccgtctctaacagtcttacatatttgtcttgaactaccgagtcttggcacaccttacttttagccgcataactctacaagtcttataaaaagtttggcagtcatatcctacttctcagcaagacttaacaatgatcttcagtaaggtctcatcatactaggtcatcattatttagataatatatgctattaagaactatcacaaacagtta

SEQ ID NO: 607195 - DNA, 615 bp, Homo sapiens
agccaataaattccttctctaggctgtaagagaaacccgctgtcaaggaggatatttcaatcgaatcctgaaaaatattcagggcaaggttccaaactccgtacatgcttgggctttttcgagtcttgcttattggtgaaggttcttaggagcagtccttacaccttctgtttttgctctgatcatccgtgtgtaattagaataaccataaacacacacactccttcagttgaggcatatatttgggttagacaaaacttttacccttagtttaagggaatcacagtacatgattaatgcaagtgcttcttttcacgaaaattctgtgagattcttagcactggtgccctcaacaacactttcagtccactgacttctttcctcagatcttcctccagtatccaccgtctctaacagtcttacatatttgtcttgaactacygagtcttggcacaccttacttttagccgcataactctacaagtcttataaaaagtttggcagtcatatcctacttctcagcaagacttaacaatgatcttcagtaaggtctcatcatactaggtcatcattatttagataatatatgctattaagaactatcacaaacagtta

SEQ ID NO: 607196 - DNA, 572 bp, Homo sapiens
tattgtagtgtggccctccagaatgattcaccaagacaccggttgaattaggcaagggtcaaatgagtataatgagaaacagcagtcaagcacagtttcacttgcctgttgtgagtggttttggcttgttgaagtttggtttttatttgctaatacctaaatacactattgtgacattttaaatagatgtcatcttaataatctgtacctatatgcctaatattcttgctaagagacattatcygatttcctgagaataacagaattaaagtcaatttcagtagtacaagaaggtaagatgagtaatcatgagaaaagaaaacagattactggactatactccaaggagcatcgaaacactgtcatggaatgtccggtttcaccaataatattggtcattcccaccattcatcgagtgctacccaagtgctgttttgttgttgggaaaaaaggggtgtagaatacatgacttgtctgaggtcaccatggtggagctgtgatttgaacacaggtagggctgaatctggaaacttgttgctcaccaatagcattgtaccttccctcagtaagaa

SEQ ID NO: 607197 - DNA, 594 bp, Homo sapiens
cacggcttcttcaggcactgattgtatattacgctatctggccagaaataaaagatgacttgaagaactaaaggtcactttaaaaggtctcaggggaaatggagagttgaacttttctctttctgttagtaaagcttgataatgccaccatttatatgttcgggcagatcttggaacttttaaatggaaatgttgacagctcaatgtagaactgcaactgatttccttgcagaggtagggtggttagtggagagatgactggaattgggaggagatgtactggctccagcactccctagctgtcttactacraaatagtcatggcatctctctgaattttaggtgctttctgtctccacttgcaaatggaagaaaacaccagcagcccttcaaacttcgtagtaggtatagtaaggaccaaaacaagagaatgtttgtggatgtgctttgtaaattgcaacacactgtacaaactaaaggctttcatgagaacatattgttgggttgacagaaaactcctagcttcagatggctgttggaaaggattaatgtggttttggaagcagactgacttgttagactaaggctcaacta

SEQ ID NO: 607198 - DNA, 533 bp, Homo sapiens
aactcctgggttcaaatggactttgaaaagaaatgtgataatatttttgctttcaaaacattgaattaaaaaaaaactctgctaaaaaaaggcttattatattattatcttttatgcttaggagataaagaatcctaaatgccatgtctgcctaggaatttaagaatttcactccccagcttttcttgacatatatttagtgttaatttctcaataamcttcatttctatgtttactgatatttttgcattatcctcaaacttgctaaacacattaaaccgcctaagcatcccttgcttcacttttagaaaaattagtaacttttaaatataactgagaagctggatctttttctatgctgtgatgaggaatgatttttctgttttatatcacatgttcgggcagtacaaattttcaagcaagctctgctttctcaaaggtgcattactgaaactttggcctctagttttaaatttcctgcagatatcacagtccattccacagagatagcattaatctcctgtactgagaca

SEQ ID NO: 607199 - DNA, 571 bp, Homo sapiens
gaaaaccgcctactcaagcctcagtaatggtggatgcccctccccccaccaagctcgagcttccgaggtcaacttcagactgctgtgctggcagcaagaatttcaagccatggatcttagcttgctggcctccatgggggtggtaaccactgagcaagaccacttggctccctagctttagccccctttccaggggagtaaatggttctgtctcgctggcgttccaggcaccactgggatatgaaaagaaactcctgcagctagctttgtttctgcccaaatgccccccagttttgtgtttgaaaccagggccctwgtggtgtaagcacctgagggaatctcctggtctgagggttgcaaagaccatgggaaaagtgtagtatcagagctggatagcgcagtccctcatggcacggtttctcatggcttcccttggctaggggaaggagttccctgacccctcacacttcctgggtgaggtgacgccccacccttcttctgctcaccgtttgtgggctgcacccactgtctaaccagtcccaatgagatgaaccaggtacctcagttggaa

SEQ ID NO: 607200 - DNA, 486 bp, Homo sapiens
gaattctgtctgtaatgatctccctgatctccctgagacagagcccctagcgggagagactgccacsgtctctgcagtgcagcggacttagtctttccttcctgctgtctctgaagagtccaggcagtgtggacgaggggtattccacccagcgcagtgcacccgctaggccaagaggcagccagactgcttcattaagcaggtccctgatcccatgcctcctgattggatgagagctcccaacaggggttgccagacaccttatacaggagtgttccctctggcatcagggggatggaactcccacaggaaggagcaggctgccatctttgctgttctgcagcatctgctggtgatacctctgaaactaaacaattgaaaaggagagactcctcactaactcattttatgaggccagcatcatccataccaaaacgtagcagagatacaacaaaaaaagaaaacttcaggccaatatccctgatg

SEQ ID NO: 607201 - DNA, 451 bp, Homo sapiens
ctgagaagcatgtttttctggcagtcacagtatatcacctgaattccttgcccccccgattcttcccatcatttgtgtttagaaatagcaaaggattgtgaggagtgaggatgtgtgacacgaggatgaaagaaagcagcagggtcaggagagtggcaaatggggctttgtgaaggttgctgcagggcattagatggagaattagtcctggttcagcaacagatcaaagagaaagaggcagggtgggggcaggaacaactgggagaggagtgagtaaaaaatttggagcaggagtgaatagactgctggttagaccttagcagagamagattaaagtgtgggtgttacttgctcataagaaatagacgcatattttcacctaagggtggctacctcgccccatccagcaaggcacattcagctttaatatgaagaaacacacgtgatttct

SEQ ID NO: 607202 - DNA, 622 bp, Homo sapiens
tggcaggcacttagatatcctgcataatcactggaagttttttgttttgaacatatgtcctgtcattctttttcctgaaggttcaaacagccaagaggtcacggtattgttgatttccatacaagaatccaaaggagcaaaggctttcctttgatttcaatcatctcacgcattggattggaaagcgggatatcaactcattaaaatgtcatgcaatgtttatgggtctaaactcggctccatgacacttggcagagagtgatgaggagttatttttatttacttatttatctatatttttatatatatgtaataggtgtacatattttcaggatacatgtgataaattgacacattcatataatcaaatcagggtaattgggayatccatcaacttaaatatttatcttttctttatgctaggagcattttaattgttctcttctagctattctgaaatgtgtgatagcttaatgttaactatagtcactctatggatctattcaaataccaagtcttatttcttctatttacctctgtatttgtatccattaatcaacagaagtttttttaaataccccaatttttttcagatagactcttcatagaccacagtttttgt

SEQ ID NO: 607203 - DNA, 627 bp, Homo sapiens
agttcccacgtgacgcggcgaggccggctgcaaagctctgctctgggtctttgttttgcagtttggagtagaagcatcaacaacgcagttaagcaccaattcaatgaccccctatttagtacctggcatattttgtactgggcatgggacttggttattgcgccccacgtaattacagggtacagtccgggctgagagccacttccccagggatatacacrtccagcccctgcctaggaggtgttcctggtggatctacctcttccttcaagtttactgttaaggggagggatgatttttatagagaagggagagtttcgaaaatgccaagtctcttagctcagtgtccgtgccagaccctgccctgctccaacagccctagggcccctctttcctgttcccttcagcctctgttcttgcttttttgctgaatcagcagagcataaaagtgtcgtcagatcaactagcatctgctccatgctatggccatgtaggtaggcagtggcttctgtcccaccagccacatggccacagtcgtccagttgcccaggaggggaaggtgagtgtagtatgccgtcaccaccctcagcagcctctcgcgccacgtcctgtgactcgacccgcata

SEQ ID NO: 607204 - DNA, 627 bp, Homo sapiens
agttcccacgtgacgcggcgaggccggctgcaaagctctgctctgggtctttgttttgcagtttggagtagaagcatcaacaacgcagttaagcaccaattcaatgaccccctatttagtacctggcatattttgtactgggcatgggacttggttattgcgccccacgtaattacagggtacagtccgggctgagagccacttccccagggatatacacgtccagcccctgcctaggaggtgttcctggtggatctacctcttccttcaagtttactgttaaggggagggatgatttttatagagaarggagagtttcgaaaatgccaagtctcttagctcagtgtccgtgccagaccctgccctgctccaacagccctagggcccctctttcctgttcccttcagcctctgttcttgcttttttgctgaatcagcagagcataaaagtgtcgtcagatcaactagcatctgctccatgctatggccatgtaggtaggcagtggcttctgtcccaccagccacatggccacagtcgtccagttgcccaggaggggaaggtgagtgtagtatgccgtcaccaccctcagcagcctctcgcgccacgtcctgtgactcgacccgcata

SEQ ID NO: 607205 - DNA, 627 bp, Homo sapiens
agttcccacgtgacgcggcgaggccggctgcaaagctctgctctgggtctttgttttgcagtttggagtagaagcatcaacaacgcagttaagcaccaattcaatgaccccctatttagtacctggcatattttgtactgggcatgggacttggttattgcgccccacgtaattacagggtacagtccgggctgagagccacttccccagggatatacacgtccagcccctgcctaggaggtgttcctggtggatctacctcttccttcaagtttactgttaaggggagggatgatttttatagagaagggagagtttcgaaaatgccaagtctcttagctcagtgtccgtgccagaccctgccctgctccaacagccctagggcccctctttcctgttcccttcagcctctgttcttgcttttttgctgaatcagcagagcataaaagtgtcgtcagatcaactagcatctgctccatgctatggccatgtaggtaggcagtggcttctgtcccaccagccacatggccacagtcgtccagttgcccaggaggggaaggtgagtgtagtatgcygtcaccaccctcagcagcctctcgcgccacgtcctgtgactcgacccgcata

SEQ ID NO: 607206 - DNA, 551 bp, Homo sapiens
gccagcccccaccctggtgtttcattttcccccacggcactgggtgaaggttaggtgtgtctgtgaagacagcagtgaagggatactgtctcactgcccagagagcccctaacaaaaggtttctgccattctatggccctggagtcaggggaagagagagagggaggcagctgagagtggaaaagtgctgaatrcaaagtcagagtgggaaaaatgtcttccaggccccctgaaaaggaggctttggcagaggtacctaagacaggcctcagccaagggacccatgtggtctcggaagggaggtgcctgggttgggcacaggggatacccagggcacccaggtccttccccgcaacagccttcagacacggcagtgcactggccacacaccatgaggcagccaggtggggcctttgtcatcacccgtggtcagacctgaaagatcccacagggcatttgggctgcagccagccaactttccaggcagcatgttgcattccaactctgtttcaataaaactagtttcgaaaaagaaagaaacatttcaaaat

SEQ ID NO: 607207 - DNA, 536 bp, Homo sapiens
aaacagacacatgaaaacatgctgagaaaaggatttaaaatatgagaaagaatatgaaatacataggggacagagtgaaaaagcataacattcatataattggaatccagaaggaggggagagagaaaatgtgtcagagacaataactgaagagaacatggccagtgacactcccaatatggcaaaagacatcaaggcaatgataaaagtgccacaaaccacagccacacttgcctaaggaaagccatgccgaggcaaatgtaagcaaaatcctcggagagcaaaaacagagacagtcttaatagccagaggaaaaaagaggttatcgtcaaaggcgcaccaattaacctgatagttgatatttcagcagaaagaaaacatagaggccagatgaagatggaattatatttccaagtgcagaaagaaaacaactgccaatctagaattctatactcagcctaaatayattttacaaagaaagagaaacaaaggcttttttagaagaacggaaatgaaaaagatttaccaccagcaga

SEQ ID NO: 607208 - DNA, 574 bp, Homo sapiens
ttggaatctgccatgccatttaccctacacatcatactttatatgattgcagcacatctatctaagactcactgactcaagagttcaccaaaactctgtaccactggagctggccaatgcacgacagacagccttttgtgggtgaatttcttttaaattcaactccactgggtaggcattcctcctcctaatcccatctatggcccacttcctggatctctccgtcaagtctttcctttcacccatcatgctagtctttcctgtccatgggacacaggcaagtagctgtgggcctaaggaacggctgcatccaatgaggtggtgtgcttgtgtttatgttttagcaccaacctcatatgttgacagagctctggagtgtgagggacaagtccatgttccattagctctgttcttttctgcccagggcttcactgctccttgtcagctgctatctcctccatgttgcaaayaggattttctcctcctttctgtcaatctggtaggctctcaaactcaggaaatctgagtcctttaagaagctgcttactaggaactaacagtgacaaatacacta

SEQ ID NO: 607209 - DNA, 552 bp, Homo sapiens
tgtaccactggagctggccaatgcacgacagacagccttttgtgggtgaatttcttttaaattcaactccactgggtaggcattcctcctcctaatcccatctatggcccacttcctggatctctccgtcaagtctttcctttcacccatcatgctagtctttcctgtccatgggacacaggcaagtagctgtgggcctaaggaacggctgcatccaatgaggtggtgtgcttgtgtttatgttttagcaccaacctcatatgttgacagagctctggagtgtgagggacaagtccatgttccattagctctgttcttttctgcccagggcttcactgctccttgtcagctgctatctcctccatgttgcaaataggattttctcctcctttctgtcaatctggtaggctctcaaactcaggaaatctgagtcctttaagmagctgcttactaggaactaacagtgacaaatacactaacataggaagcagcagctctcttatgacctgctcctttttatatcactccgttagaaaaggaagcaatgttacc

SEQ ID NO: 607210 - DNA, 552 bp, Homo sapiens
tgtaccactggagctggccaatgcacgacagacagccttttgtgggtgaatttcttttaaattcaactccactgggtaggcattcctcctcctaatcccatctatggcccacttcctggatctctccgtcaagtctttcctttcacccatcatgctagtctttcctgtccatgggacacaggcaagtagctgtgggcctaaggaacggctgcatccaatgaggtggtgtgcttgtgtttatgttttagcaccaacctcatatgttgacagagctctggagtgtgagggacaagtccatgttccattagctctgttcttttctgcccagggcttcactgctccttgtcagctgctatctcctccatgttgcaaataggattttctcctcctttctgtcaatctggtaggctctcaaactcaggaaatctgagtcctttaagawgctgcttactaggaactaacagtgacaaatacactaacataggaagcagcagctctcttatgacctgctcctttttatatcactccgttagaaaaggaagcaatgttacc

SEQ ID NO: 607211 - DNA, 499 bp, Homo sapiens
gttggacacacatgtaattctaaacttactttttgaatcaaacagctacagttactctacaatgtactatctggttgacatttaaatattcatgtgtatatcactaatttgaactaggtgtatccttttttttaggcggagtctcactctcaccgaggctggagtgcagtggagccatcttggctcactgcaacctccacctcccaggttcaagcaattctccttcctcagcctcctgagtagatgggattacaggcatgcaccaccacacctggctamtttttgtatttttagtagagacagggttttgccatgttggtcaggctggtctcaaattcctggcctcaagtgatctagctgtcttggcctcccaaagtgctgggattacagatatgagccaccatgcctggccagtggcatttatttctaatgtaactgcagtctgtaaggaaacatgcctcttaccccatctaaattcttgattcctaagtccttctgt

SEQ ID NO: 607212 - DNA, 522 bp, Homo sapiens
atgtagctgtaggcctgagtcaggaactccctacaaaatgattgtgggtttgggtttggggcaccagcctcacatggtggtagaacgctagaaggtgaggaacccattacggtttcatgaactctgttctttttgctgagtgcttcactcctccgtcacctgttacctccccattgctccaaataggattctctctccctttggcccactctagtagtaggagagtctcataaatggaaaacctcagaggttcctaagggattggatactactaacttagagtgacaaatatactaagaggaagaarcatccctttcatgacttcatcctcttttatccaatttggtctgaaaaaaaaaatagaaggttatctatagatcctacagtgagaagatttagacatagtgtcaaagatattctgtatttccaaggatatgcctgacagtgaattttacaaatatcaacttctctttctctttcattgttttatgtttctgtgtgtgtatgtgtatgcatgcgtgt

SEQ ID NO: 607213 - DNA, 534 bp, Homo sapiens
ggcaaaacaataatacatagtttacagaacacatataaatgtatatactgtgtattaaacatattaaaattgttgcatatgtgcatatatctgtatatgtcaatatgtatatctgtactctcatctagatattaaaaaggcctacaagtagcaatgagccaatggcaatcagcataccaaatgcaaaatattgattggtttctaaagggcatgaggttctttgggtaaatggctgattccagggctggggaaatgctcaaaaagtgatgggaacatgtcaagtcaaaaggacacaggggctagcttttagggagtcccactggccaaatatgrgaccatttaaagatcaaaataaataatgacagaaaggattgtaattcattgaaataatgtaagaatttataagttcatagtaatagtgaacaaataggggtaggaatagctctccttataatagaatgatacttattaaacacagaaaaactactttttttaaaaaaaaaatcaccattttgtaatgatcacagttacaac

SEQ ID NO: 607214 - DNA, 620 bp, Homo sapiens
atcttcctatatcccacttttaaacatttttggcattgaaacttatccttcaaatgaacttttagatatcacacatgcttagtaaacttcaaatctgcaagtggtgaacagataatctgcacaggaaacactttttttttttttttttttgagacagagttttgctctgtcatcgaggctgcagtgcagcagtgctgtctcagctcactgcaacttctgcttcccggattcaagtgatccttctgcctcagcctcccgagtagctgggactgcaggcatgcaccaccaygcccagctaatttttgtatttttagtagagacacggttttaccatatggccaggctggtcttgaactcctgacctcgtggtccacctgcctcagcctcccaaagtgctgggattacaggcttgagccaccatgcccagccagaaaacacttttgacaaacacaccagcatttccttttgtagaatccttgggccatattaagggtattgttaagctgccatctcataaagtatacagaataaaacactaatttggggagacgttaaaagggaatagtaacaacagcagcagcacttgttttatttaaatgtggaaaattaattcaaaatat

SEQ ID NO: 607215 - DNA, 620 bp, Homo sapiens
atcttcctatatcccacttttaaacatttttggcattgaaacttatccttcaaatgaacttttagatatcacacatgcttagtaaacttcaaatctgcaagtggtgaacagataatctgcacaggaaacactttttttttttttttttttgagacagagttttgctctgtcatcgaggctgcagtgcagcagtgctgtctcagctcactgcaacttctgcttcccggattcaagtgatccttctgcctcagcctcccgagtagctgggactgcaggcatgcaccaccatgcccagctaatttttgtatttttagtagagacrcggttttaccatatggccaggctggtcttgaactcctgacctcgtggtccacctgcctcagcctcccaaagtgctgggattacaggcttgagccaccatgcccagccagaaaacacttttgacaaacacaccagcatttccttttgtagaatccttgggccatattaagggtattgttaagctgccatctcataaagtatacagaataaaacactaatttggggagacgttaaaagggaatagtaacaacagcagcagcacttgttttatttaaatgtggaaaattaattcaaaatat

SEQ ID NO: 607216 - DNA, 620 bp, Homo sapiens
atcttcctatatcccacttttaaacatttttggcattgaaacttatccttcaaatgaacttttagatatcacacatgcttagtaaacttcaaatctgcaagtggtgaacagataatctgcacaggaaacactttttttttttttttttttgagacagagttttgctctgtcatcgaggctgcagtgcagcagtgctgtctcagctcactgcaacttctgcttcccggattcaagtgatccttctgcctcagcctcccgagtagctgggactgcaggcatgcaccaccatgcccagctaatttttgtatttttagtagagacacggttttaccatatggccaggctggtcttgaactcctgacctcgtggtccacctgcctcagcctcccaaagtgctgggattacaggcttgagccaccatgcccagccagaaaacacttttgacaaacacaccagyatttccttttgtagaatccttgggccatattaagggtattgttaagctgccatctcataaagtatacagaataaaacactaatttggggagacgttaaaagggaatagtaacaacagcagcagcacttgttttatttaaatgtggaaaattaattcaaaatat

SEQ ID NO: 607217 - DNA, 560 bp, Homo sapiens
cacagacaacagcaaattccataccttcagagttataccagctcatctgcagtaggagtagaaatatcaaagctctcagtctaccaccttgtgctccagagatgtggcccaagcacatctttggacgtgaaccagggcaacccaaggcagagctggatttctgggagtttctccctataagccctggacatgcttacctatacaccagactgcttccagagccactgccggkcagaagagcctggggtgtgttcagctgctagaataacacaagtctgaggtcttgtgtcgtcggtccaacattctctaagagggagaaatttaatcaagatcctgttagcagttttctctcttgttgcctttcaagattatggcttttccttttttcatttttttagttcccaaaaccaagcttgttaaatcaaatcttgacccaattcctggcaagtaacaaggttattgctatttggccttacacccacgggttgtcccccagtaccgtgagggtaaggggactctgtaaggtccctgggaggggaaaggaatgtcaattagtggtc

SEQ ID NO: 607218 - DNA, 564 bp, Homo sapiens
agtttagttctttaatttatgtgcacatatttttgtttagacagttcttaatcctgaatatttaattttaattgaagtcttcagtattgtatttttctttaattaacmaagtgttgatgatattgaaatgtctacctcaggcactatacctggtctgtatggtttcctttttctctttttgacaccatctgttccttccactcccttagtttcatcattcacagcttcccgctcaggactagattctgattttccatcacaatccataagttctccttctggaaaaaagtaaatgtatacacaaaactggaaaaacctatcaaatatataatccctacatcatggggaataaaaagtagggttgttgctgagccattttaattgtacatccctgttggtagggaaagtatgaaaggagatagaagcagccccaaatggttctagaaattgtgctgcttagtgcagtgttcccatgaaataaaacataatcagagaaggggaacacagaactcagagttctgttaagtgcaacccatttgcacttaacaaattcacttgctttta

SEQ ID NO: 607219 - DNA, 620 bp, Homo sapiens
gtgctgcttagtgcagtgttcccatgaaataaaacataatcagagaaggggaacacagaactcagagttctgttaagtgcaacccatttgcacttaacaaattcacttgcttttaattatgtcttcaggtccaggtctctagactagaactctcttctgagcttcaaccacagctataattgaatattacctagttactgaaaactgtgtatccaaaatgaactactaatttaaaataaactttctcctttttcccatgttacctatcatcattaaaaggcatggaaatgtaacctggagaagacagaggcctggaagaccaccttaatcattcctaatctctttcctcctacaaccaagactcctcaatacctctgaaatgcattttatcactctctactaccatcttagtccaacctcagatgactcactattaatacaatatgctcctatctagttgcccacctcaaagcttacctctctccaatcaattctttaarttactgcataaatgatctttctataaatatgtatcaattttctgcttaaaatcctttcatgtcttcccaatgccctcaaaataaacttcaaattacaaggcccattacaacagtctcttg

SEQ ID NO: 607220 - DNA, 421 bp, Homo sapiens
tgaggtttgaaaagactgttgtggggaacctgatcagttcaagaagaacatctaaagatactgaaaccagagggttcaccaaatggtcagcacaaatcaccccactaaacttacaaatcgacaagcaccrccacatactcaaagctttctaatcaactacttaattccttttttaaaaataaaaatactatctatccagtctccatctttagttcttcacttttaatcatgcatgtaccataaagattatctgacaatggtctataacaagcttgtccaacctgcagccaagatgctttaaatgcagcccaacacaaattcataaactttcataaaacattatgagactttttatgaggttttttttttttttttttaaaaaaaagctcaccagctatcattagtgtattttacatgtggc

SEQ ID NO: 607221 - DNA, 421 bp, Homo sapiens
tgaggtttgaaaagactgttgtggggaacctgatcagttcaagaagaacatctaaagatactgaaaccagagggttcaccaaatggtcagcacaaatcaccccactaaacttacaaatcgacaagcaccgccacatacwcaaagctttctaatcaactacttaattccttttttaaaaataaaaatactatctatccagtctccatctttagttcttcacttttaatcatgcatgtaccataaagattatctgacaatggtctataacaagcttgtccaacctgcagccaagatgctttaaatgcagcccaacacaaattcataaactttcataaaacattatgagactttttatgaggttttttttttttttttttaaaaaaaagctcaccagctatcattagtgtattttacatgtggc

SEQ ID NO: 607222 - DNA, 421 bp, Homo sapiens
tgaggtttgaaaagactgttgtggggaacctgatcagttcaagaagaacatctaaagatactgaaaccagagggttcaccaaatggtcagcacaaatcaccccactaaacttacaaatcgacaagcaccgccacatactsaaagctttctaatcaactacttaattccttttttaaaaataaaaatactatctatccagtctccatctttagttcttcacttttaatcatgcatgtaccataaagattatctgacaatggtctataacaagcttgtccaacctgcagccaagatgctttaaatgcagcccaacacaaattcataaactttcataaaacattatgagactttttatgaggttttttttttttttttttaaaaaaaagctcaccagctatcattagtgtattttacatgtggc

SEQ ID NO: 607223 - DNA, 421 bp, Homo sapiens
tgaggtttgaaaagactgttgtggggaacctgatcagttcaagaagaacatctaaagatactgaaaccagagggttcaccaaatggtcagcacaaatcaccccactaaacttacaaatcgacaagcaccgccacatactcaaagctttctaatcaactacttaattccttttttaaaaataaaaatactatctatccagtctccatctttagttcttcacttttaatcatgcatgtaccataaagattatctgacwatggtctataacaagcttgtccaacctgcagccaagatgctttaaatgcagcccaacacaaattcataaactttcataaaacattatgagactttttatgaggttttttttttttttttttaaaaaaaagctcaccagctatcattagtgtattttacatgtggc

SEQ ID NO: 607224 - DNA, 426 bp, Homo sapiens
aaagactgttgtggggaacctgatcagttcaagaagaacatctaaagatactgaaaccagagggttcaccaaatggtcagcacaaatcaccccactaaacttacaaatcgacaagcaccgccacatactcaaagctttctaatcaactacttaattccttttttaaaaataaaaatactatctatccagtctccatctttagttcttcacttttaatcatgcatgtaccataaagattatctgacaatggtctataacaagcttgtccaacctgcagccaagatgctttaaatgcagcccaacacaaattcataaactttcataaaacattatgagactttttatgaggttttttttttttttttttaaaaaaaagctcaccagctatcattmgtgtattttacatgtggcccaagacaatgcttc

SEQ ID NO: 607225 - DNA, 426 bp, Homo sapiens
aaagactgttgtggggaacctgatcagttcaagaagaacatctaaagatactgaaaccagagggttcaccaaatggtcagcacaaatcaccccactaaacttacaaatcgacaagcaccgccacatactcaaagctttctaatcaactacttaattccttttttaaaaataaaaatactatctatccagtctccatctttagttcttcacttttaatcatgcatgtaccataaagattatctgacaatggtctataacaagcttgtccaacctgcagccaagatgctttaaatgcagcccaacacaaattcataaactttcataaaacattatgagactttttatgaggttttttttttttttttttaaaaaaaagctcaccagctatcattagtgtattttacrtgtggcccaagacaatgcttc

SEQ ID NO: 607226 - DNA, 504 bp, Homo sapiens
caaaatatatatacacacacacacayaaaatatatatatatatacacacacatttccttgtacatgcataaaatacatctggaaggttacacgagaaacctctgaggtttctggagatgtaaactgggggcatgaaggcaggggaaagggagagacttcactgtttacctttttattattttccaattttaaatcatttgaatgtataacttgtctaaaaatcaaattttaaaagttgagggaattaacattacagaaagtaacaaacctcaaggaagcagccaccttcaccagatggacagtctacctcactcttcccatgctccagtagttactgaatgccagtcccctccctccattcagtctgccccacctgctggccttctagagcctcagtgcagtcctattcctacacctccaaacacatccatacactgtgatggtcgatctgcgaccaccagttgagaggaaatgtgttgtgtttccacacttcagacaaacaga

SEQ ID NO: 607227 - DNA, 585 bp, Homo sapiens
catggtgaaaccccgtctcactaaaaatacaaaaaaattagccgggcgtggtggcgggcgcctgtagtcccagctactcgggaggctgaggcaggagaatggcgtgaacccaggaggcggagcttgcagtgagcgaagatcgtgccactgcactccagactgggcgacagagcgagactctgtctcaaaaaaaaaaaaaaaaaattgaaagaaacccaaaggtctatcaacaggggaaagaacaggtaaattaaattgcttatatttccatacaaaggaatatttgcagccataaaaaaatgaaggacagtaaaaagtagtaagacaaaaggaacaaaatatatatacacacacacacataaaatatatatatatatacacacacatttccttgtacatgcataaaatacatctggaaggttacacgaraaacctctgaggtttctggagatgtaaactgggggcatgaaggcaggggaaagggagagacttcactgtttacctttttattattttccaattttaaatcatttgaatgtataacttgtctaaaaatcaaattttaaaagttgagggaattaacat

SEQ ID NO: 607228 - DNA, 504 bp, Homo sapiens
caaaatatatatacacacacacacataaaatatatatatatatacacacacatttccttgtacatgcataaaatacatctggaaggttacacgagaaacctctgaggtttctggagatgtaaactgggggcatgaaggcaggggaaagggagagacttcactgtttacctttttattattttccaattttaaatcatttgaatgtataacttgtctaaaaatcaaattttaaaagttgagggaattaacattacagaaagtaacaaacctcaaggaagcagccaccttcaccagatggacagtctacctcactcttcccaygctccagtagttactgaatgccagtcccctccctccattcagtctgccccacctgctggccttctagagcctcagtgcagtcctattcctacacctccaaacacatccatacactgtgatggtcgatctgcgaccaccagttgagaggaaatgtgttgtgtttccacacttcagacaaacaga

SEQ ID NO: 607229 - DNA, 577 bp, Homo sapiens
ataattgtggcagacaattccctcctcctgaaagttcagttaccccaacacaggcataatttcttactgtctcaaaaggaactgaattcacatayaaagacaaacgtgggattttgttgagttctgttggacacagaacacaattgctcaagcactggttgggcacttgtattctaatagctcacggttactgagcactccatgtctgggaagagccagtgctgggtgcctggcatgcatccttgcacctcatcagcacaactatcctatgggctcatcctggttcacctattttataaatgagaacactaacatcagagaagttaaaaaatttgcctaaaaacatccagagtaggtttcatcgttgcccactactttataatgctttcccaagggtactgagacgttatcaaaacatgttagtgaaacagtctaaaacatcacaaattttaggtttaatacaaaatacccagaaaatggcagcattattagaaatctcagcataatgtaataataagaacttatgatgattgtattcttttcctattttttctcccgtacaggcatatgaaaaacc

SEQ ID NO: 607230 - DNA, 590 bp, Homo sapiens
tataatgaaacagcaagtaatgagggtacagaataaaaattcagatcatgaggtacatgaaagcctaaaagctaccagagaagaaaataaaagagttaaattcaaaggaacacccatcagaatggcacaaaacttcccaactccagatgctagaagagtataagtttccaattctacaggaaaatacttttcaaagtacaattctcaacctagctacacaagcaactatgtgtgaagacagaatacrttgtagacacaggaagattcaaaattcagctccttcattctccttctaataaagttacttagagatatgcggaacagaatgaagatgtattacaaagaaaaggaagacttgggatctataaatcaacagatccaacaaaggacatcaggccagggaagtttaaggatgagaacaacacacccagaagccactggcacatatcagagcaggagaagggaatgtctagaaggagggtaggacttctcccagaaaaaaacagtactttaaaaaataatcttatatgatagttctatagtaggcaaaaacaaagaacgaatggagagtcactattactttcttgtta

SEQ ID NO: 607231 - DNA, 543 bp, Homo sapiens
ccatatacagctagtatttactacattgaacaatgcaaatacgaggaaaaaattaataaccatctctaataccacatgccaaaatcctcatcaatttgttctagctaaaggagtttatcagaagcagcagttgaaagcaccaactaaaccagctggggttagttcactgtcattctctcagaaccatctcttctctgaacaaaacaagtacaagagttcatcgtgaatctgcattctccttgcctattttaaggttttgwtgttgacactaatttgtgaaatccctcctgtggtgtgatatttcgttttccttgctttctgttaggacaagaatgcttcagctcttaatttaaaattatgtttctccctcctaggttgagtgaacttagaatgcattctctgacatatccaagtttttgttcatatgaatttggggaaaaaagcatacttaattagctaagacttcttattctaggcttgaccctgtgttcaacatctattgaatttgtagttgcatgggctgctctctgacactgcttagtg

SEQ ID NO: 607232 - DNA, 531 bp, Homo sapiens
gcctcagatgatcatttataattttatgctcttttctttaacaccttcaacacagttggaagcagccagagttgttgtgtttttkaaaccaaatgcatggttcagtggtagaaaactgggctgatccaagctgttttcagtgaacacttcatttcaggtgacctatttcatattaaataatctctagatcctgtcttcgaaactaactagatcagataacctaccctggattttctccttttagggtctgtgagctgcagtcacttttgtgaaaatgattgcaatgacaagatagagttgtagatggagaaaatgttttgactaatttacgcatagtggtatttcatatgagaatttaagttacacacatttgaaaattataatggagtctcttggctgagctttaaaaaaaaatagcctttaggctaaaaagggaattgttcctctcctaaaatcagaaagatgttacagtaattctccattctctagaattatcaggaagcacctttgtgatgatttacttctgttctt

SEQ ID NO: 607233 - DNA, 531 bp, Homo sapiens
gcctcagatgatcatttataattttatgctcttttctttaacaccttcaacacagttggaagcagccagagttgttgtgtttttgaaaccaaatgcatggttcagtggtagaaaactgggctgatccaagctgttttcagtgaacacttcatttcaggtgacctatttcatattaaataatctctagatcctgtcttcgaaactaactagatcagataacctaccctggattttctccttttagggtctgtgagctgcagtcacttttgtgaaaatgattgcaatgacragatagagttgtagatggagaaaatgttttgactaatttacgcatagtggtatttcatatgagaatttaagttacacacatttgaaaattataatggagtctcttggctgagctttaaaaaaaaatagcctttaggctaaaaagggaattgttcctctcctaaaatcagaaagatgttacagtaattctccattctctagaattatcaggaagcacctttgtgatgatttacttctgttctt

SEQ ID NO: 607234 - DNA, 531 bp, Homo sapiens
gcctcagatgatcatttataattttatgctcttttctttaacaccttcaacacagttggaagcagccagagttgttgtgtttttgaaaccaaatgcatggttcagtggtagaaaactgggctgatccaagctgttttcagtgaacacttcatttcaggtgacctatttcatattaaataatctctagatcctgtcttcgaaactaactagatcagataacctaccctggattttctccttttagggtctgtgagctgcagtcacttttgtgaaaatgattgcaatgacaagatagagttgtagatggrgaaaatgttttgactaatttacgcatagtggtatttcatatgagaatttaagttacacacatttgaaaattataatggagtctcttggctgagctttaaaaaaaaatagcctttaggctaaaaagggaattgttcctctcctaaaatcagaaagatgttacagtaattctccattctctagaattatcaggaagcacctttgtgatgatttacttctgttctt

SEQ ID NO: 607235 - DNA, 531 bp, Homo sapiens
gcctcagatgatcatttataattttatgctcttttctttaacaccttcaacacagttggaagcagccagagttgttgtgtttttgaaaccaaatgcatggttcagtggtagaaaactgggctgatccaagctgttttcagtgaacacttcatttcaggtgacctatttcatattaaataatctctagatcctgtcttcgaaactaactagatcagataacctaccctggattttctccttttagggtctgtgagctgcagtcacttttgtgaaaatgattgcaatgacaagatagagttgtagatggagaaaatgttttgactaatttamgcatagtggtatttcatatgagaatttaagttacacacatttgaaaattataatggagtctcttggctgagctttaaaaaaaaatagcctttaggctaaaaagggaattgttcctctcctaaaatcagaaagatgttacagtaattctccattctctagaattatcaggaagcacctttgtgatgatttacttctgttctt

SEQ ID NO: 607236 - DNA, 596 bp, Homo sapiens
cattttgctgatgctcctcttttgtcaatttttgcttcatgttattgtgctttgttattagttcatgtattagtttcctagggctgccataaccaactaacacaaactgggtgccttgaacaacatacatttatagtcttatagtcctggaagctaaaagtctgagattgaggtgtcagcagggatggtcccttcaagggctatgagagaaagtctcttctgtgccttgtttctcgcttctggtggyttagtggcagtctttggccttccttggctattctctgccctcataatcacatggtactctccctatgtgtatgtctccctctactcaaattttttctttttataaggacatcagtcatattgaattcaggctcatctgattttatcttaacttaatcacctgcaaagaacctattttctaatgaggtcatattcagtggttaagatttcagcatctatatagaggaaacaatttagctcatatctgtgcatacatgactgtaatagctatgaccaaaaagcgggaaaagctatgaccaaaagcgttgacctccttattactacaatataaatgtttaaaatcctattca

SEQ ID NO: 607237 - DNA, 537 bp, Homo sapiens
gtttcctaacctgacaacaatgaaagaaccaaactaacttcaaagtcatsactttatttttatagcaaccaggttgccaagaactgagtcaaaatgtgagggaaaacaagcacctgcaaggagaaagaggacagatgcacttacataggacagatgcaaatagacaccattatgacaagtaaagctggaataatcaataaattcctaaagacaaagtggggctggtgagattgggagaccgctgacagctgcagaagttgggaaagatccatcatcttgaaaactttttccccacaaacccactgcgatctctcaagcaattggtgaggaatccaagagagtctgtatatgacacagatcagggagagcagaacacttgggaggtgaccaggtcttgggggccgagcccttatgaatgggattagtgcctttataaaagaagctcaatggagttattgtgtgccttccactgtgtgaggacatagaaagaaggcaccatctatgaaccatgaaatgggctctcatcaacactgaatt

SEQ ID NO: 607238 - DNA, 544 bp, Homo sapiens
aataggtttcctaacctgacaacaatgaaagaaccaaactaacttcaaagtcatgactttatttttakagcaaccaggttgccaagaactgagtcaaaatgtgagggaaaacaagcacctgcaaggagaaagaggacagatgcacttacataggacagatgcaaatagacaccattatgacaagtaaagctggaataatcaataaattcctaaagacaaagtggggctggtgagattgggagaccgctgacagctgcagaagttgggaaagatccatcatcttgaaaactttttccccacaaacccactgcgatctctcaagcaattggtgaggaatccaagagagtctgtatatgacacagatcagggagagcagaacacttgggaggtgaccaggtcttgggggccgagcccttatgaatgggattagtgcctttataaaagaagctcaatggagttattgtgtgccttccactgtgtgaggacatagaaagaaggcaccatctatgaaccatgaaatgggctctcatcaacactgaatttg

SEQ ID NO: 607239 - DNA, 544 bp, Homo sapiens
aataggtttcctaacctgacaacaatgaaagaaccaaactaacttcaaagtcatgactttatttttatagcaaccaggttgccaagaactgagtcaaaatgtgagggaaaacaagcacctgcaaggagaaagaggacagatgcacttacrtaggacagatgcaaatagacaccattatgacaagtaaagctggaataatcaataaattcctaaagacaaagtggggctggtgagattgggagaccgctgacagctgcagaagttgggaaagatccatcatcttgaaaactttttccccacaaacccactgcgatctctcaagcaattggtgaggaatccaagagagtctgtatatgacacagatcagggagagcagaacacttgggaggtgaccaggtcttgggggccgagcccttatgaatgggattagtgcctttataaaagaagctcaatggagttattgtgtgccttccactgtgtgaggacatagaaagaaggcaccatctatgaaccatgaaatgggctctcatcaacactgaatttg

SEQ ID NO: 607240 - DNA, 537 bp, Homo sapiens
gtttcctaacctgacaacaatgaaagaaccaaactaacttcaaagtcatgactttatttttatagcaaccaggttgccaagaactgagtcaaaatgtgagggaaaacaagcacctgcaaggagaaagaggacagatgcacttacataggacagatgcaaatagacaccaytatgacaagtaaagctggaataatcaataaattcctaaagacaaagtggggctggtgagattgggagaccgctgacagctgcagaagttgggaaagatccatcatcttgaaaactttttccccacaaacccactgcgatctctcaagcaattggtgaggaatccaagagagtctgtatatgacacagatcagggagagcagaacacttgggaggtgaccaggtcttgggggccgagcccttatgaatgggattagtgcctttataaaagaagctcaatggagttattgtgtgccttccactgtgtgaggacatagaaagaaggcaccatctatgaaccatgaaatgggctctcatcaacactgaatt

SEQ ID NO: 607241 - DNA, 485 bp, Homo sapiens
aacttcaaagtcatgactttatttttatagcaaccaggttgccaagaactgagtcaaaatgtgagggaaaacaagcacctgcaaggagaaagaggacagatgcacttacataggacagatgcaaatagacaccattatgacaagtaaagctggaataatcaataaattcctaaagacaaagtggggctggtgagattgggagaccgctgacagytgcagaagttgggaaagatccatcatcttgaaaactttttccccacaaacccactgcgatctctcaagcaattggtgaggaatccaagagagtctgtatatgacacagatcagggagagcagaacacttgggaggtgaccaggtcttgggggccgagcccttatgaatgggattagtgcctttataaaagaagctcaatggagttattgtgtgccttccactgtgtgaggacatagaaagaaggcaccatctatgaaccatgaaatgggct

SEQ ID NO: 607242 - DNA, 536 bp, Homo sapiens
ttcctaacctgacaacaatgaaagaaccaaactaacttcaaagtcatgactttatttttatagcaaccaggttgccaagaactgagtcaaaatgtgagggaaaacaagcacctgcaaggagaaagaggacagatgcacttacataggacagatgcaaatagacaccattatgacaagtaaagctggaataatcaataaattcctaaagacaaagtggggctggtgagattgggagaccgctgacagctgcagaagttgggaaagatccatcatcttgaaaactttttccccacaaacccactgcgatctctcaagcaattggtraggaatccaagagagtctgtatatgacacagatcagggagagcagaacacttgggaggtgaccaggtcttgggggccgagcccttatgaatgggattagtgcctttataaaagaagctcaatggagttattgtgtgccttccactgtgtgaggacatagaaagaaggcaccatctatgaaccatgaaatgggctctcatcaacactgaattt

SEQ ID NO: 607243 - DNA, 531 bp, Homo sapiens
gaataggtttcctaacctgacaacaatgaaagaaccaaactaacttcaaagtcatgactttatttttatagcaaccaggttgccaagaactgagtcaaaatgtgagggaaaacaagcacctgcaaggagaaagaggacagatgcacttacataggacagatgcaaatagacaccattatgacaagtaaagctggaataatcaataaattcctaaagacaaagtggggctggtgagattgggagaccgctgacagctgcagaagttgggaaagatccatcatcttgaaaactttttccccacaaacccactgcgatctctcaagcaattggtgagraatccaagagagtctgtatatgacacagatcagggagagcagaacacttgggaggtgaccaggtcttgggggccgagcccttatgaatgggattagtgcctttataaaagaagctcaatggagttattgtgtgccttccactgtgtgaggacatagaaagaaggcaccatctatgaaccatgaaatgggctctcat

SEQ ID NO: 607244 - DNA, 531 bp, Homo sapiens
gaataggtttcctaacctgacaacaatgaaagaaccaaactaacttcaaagtcatgactttatttttatagcaaccaggttgccaagaactgagtcaaaatgtgagggaaaacaagcacctgcaaggagaaagaggacagatgcacttacataggacagatgcaaatagacaccattatgacaagtaaagctggaataatcaataaattcctaaagacaaagtggggctggtgagattgggagaccgctgacagctgcagaagttgggaaagatccatcatcttgaaaactttttccccacaaacccactgcgatctctcaagcaattggtgaggaatccaagagagtctgtatatgacacagatcagggagagcagaacacttgggaggtgaccaggtcttgggggccgagcccttatgaatgggattagtgcctttataaaagaagctcaatggagttmttgtgtgccttccactgtgtgaggacatagaaagaaggcaccatctatgaaccatgaaatgggctctcat

SEQ ID NO: 607245 - DNA, 544 bp, Homo sapiens
aataggtttcctaacctgacaacaatgaaagaaccaaactaacttcaaagtcatgactttatttttatagcaaccaggttgccaagaactgagtcaaaatgtgagggaaaacaagcacctgcaaggagaaagaggacagatgcacttacataggacagatgcaaatagacaccattatgacaagtaaagctggaataatcaataaattcctaaagacaaagtggggctggtgagattgggagaccgctgacagctgcagaagttgggaaagatccatcatcttgaaaactttttccccacaaacccactgcgatctctcaagcaattggtgaggaatccaagagagtctgtatatgacacagatcagggagagcagaacacttgggaggtgaccaggtcttgggggccgagcccttatgaatgggattagtgcctttataaaagaagctcaatggagttattgtgtgccttccactgtgtgaggacatagaaagaaggcaccatctatgawccatgaaatgggctctcatcaacactgaatttg

SEQ ID NO: 607246 - DNA, 581 bp, Homo sapiens
gatgtggatatgaaatttgtcctgtgctgtgcaagctaccacaaagtcaccttcctcaccagtggcgttataaatagtgtgtgaaagttgtcagaatcaaaatggagccacttgtgttaaaaccctgacaaatggaactaggaatgaccatgaaggagggttcgcatgcacatactcctgataagaagaactaccataaattgactctgcttaatcacaaccttggatagaagccaccaacaccatataaaacttccttctacaaagatatgtgtccagcaactgcctgttcagccttatactgatgccacccttggtattgattctacaagcacaggataattctttcaaaacagcttatgtaacccacctcattttcacttcataaacctatggattgacatcctgtagtcactgctgcatttcttattaatgttaataagccccctttacaatattcgaarcaatttttctctgatatctcttctaaaataaagaatttccaagttgacgccaataaagaagacacttaggaagatctatttggcatatttggaaggcatatttttatttatttattt

SEQ ID NO: 607247 - DNA, 619 bp, Homo sapiens
atgttaataagccccctttacaatattcgaaacaatttttctctgatatctcttctaaaataaagaatttccaagttgacgccaataaagaagayacttaggaagatctatttggcatatttggaaggcatatttttatttatttatttacttttgagatggagattcactcttgttgcccaggctggagtgcaatggcgggatctcagctcactgcaacctctgcctccctagttcaagtgattctcctgcctcagactcccgagtagctgggattacaggcatgcaccaacacgcccggctaattttttatttttagtagagaggagatttctccatgtgggtcaggctggtctcgaactcctgacatcaggtgatcccccccgcctcagcctcccagagtgctgggtttacaggcatgagttgatgcgcctggccaggaagccatctttaacatcctgttgaatgattctgcatagcacatcaatcccttaaaatactttgctgtatcggcttgtgattaatcagtatataaaactgaaggtaaaatgggaaatacatgggcttttgatgaaccaagccatagggtgataatgtctgtgtccttgaggaagcagac

SEQ ID NO: 607248 - DNA, 583 bp, Homo sapiens
caattctgaatcagtggaatataatttaatatgattttactatgattgagtcattctctcccaggtactgctgggctaggataaaatgagatctgaattacattaaaataattaattattccaagagaagaggtgacagaatgktttaagtgggtgtgtaatttagataacctagatgcagataagctgaataaagcatttaatccagcacattcatattttaacttgatcatcagcaatgggagtttgaaacccaattgcagctgcaggtcccacacaactgaatttggttccgtgtgcatagcagtgttcgctggacatgcctggaagtctgaaggtgtgcccttttataggcaggaattccaccaggatgggtatagcttgtttttttaaaaggcttgggactggatatgattgcccaagaagacagtgtagacagcgaggagggctgagcatgaatgggatgacctaccagcacaaaaacagcaggcaggaaggcagtaaagaaatcagcagggcccaaaccaggagagtgtggcatgccacggtggagactgaacagaaacaaagccacgggcgactg

SEQ ID NO: 607249 - DNA, 612 bp, Homo sapiens
actcttgttgcccaggctggagtgcaatggcgggatctcagctcactgcaacctctgcctccctagttcaagtgattctcctgcctcagactcccgagtagctgggattacaggcatgcaccaacacgcccggctaattttttatttttagtagagaggagatttctccatgtgggtcaggctggtctcraactcctgacatcaggtgatcccccccgcctcagcctcccagagtgctgggtttacaggcatgagttgatgcgcctggccaggaagccatctttaacatcctgttgaatgattctgcatagcacatcaatcccttaaaatactttgctgtatcggcttgtgattaatcagtatataaaactgaaggtaaaatgggaaatacatgggcttttgatgaaccaagccatagggtgataatgtctgtgtccttgaggaagcagactaagggttgtaagttctggtgggagtacctttggcaaagggagttcctgagtttctggatattatgctacttttaacttaaagatgcaatttatgatttatttttacttaaatctttccagaagatatttggcagtaaggacaggatagcgtttgtgtgat

SEQ ID NO: 607250 - DNA, 443 bp, Homo sapiens
gactggatatgattgcccaagaagacagtgtagacagcgaggagggctgagcatgaatgggatgacctaccagcacaaaaacagcaggcaggaaggcagtaaagaaatcagcagggcccaaaccaggagagtgtggcatgccacggtggagactgaacagaaacaaagccacgggcgactgtagtgttgttccctgttgaaggagagacactctattatagaagacctggacttcagttcagttcagtttccttagtaaaggacaaaatggggagagaagacagggaatcagggaagaaaaactcattcacttatgtgaggcaaacatcgcatgcagtcgtaccaaccaacaaaacatgataagctacaaagaactacggttttcrctactctcaaaacgctactgagattaccaggttttaagcttatttcaagattattta

SEQ ID NO: 607251 - DNA, 515 bp, Homo sapiens
actcttgttgcccaggctggagtgcaatggcgggatctcagctcactgcaacctctgcctccctagttcaagtgattctcctgcctcagactcccgagtagctgggattacaggcatgcaccaacacgcccggctaattttttatttttagtagagaggagatttctccatgtgggtcaggctggtctcgaactcctgacatcaggtgatcccccccgcctcagcctcccagagtgctgggtttacaggcatgagttgatgcgcctggccaggaagccatctttaacatcctgttgaatgattctgcatagcacatcaatcccttraaatactttgctgtatcggcttgtgattaatcagtatataaaactgaaggtaaaatgggaaatacatgggcttttgatgaaccaagccatagggtgataatgtctgtgtccttgaggaagcagactaagggttgtaagttctggtgggagtacctttggcaaagggagttcctgagtttctggatatta

SEQ ID NO: 607252 - DNA, 610 bp, Homo sapiens
gcaggttgaaaaactacctattgggtactatgctctctaccggggtgcaatatactgatgtgacaaacttgcacacatacccccatatttaaaattaaagctaaaattttaagacatgagtatcattctgatctaagtttcttgagttgttcaaagaatcattcattttgcattctaagaaaacaacacccaaagaggccttaaatgagttttctttgaataagcaaaagcagaatagtgtgacaactcacaatttccagaaattttsgtgggtcttggaggtctggggaagagaaaccttaatggtaatctccttatttcaaaaagggaaatccttaaaataaaaaagggagtttccttccttcctgtgtttctagtactgaaaaagacagatcttaatcttcactgagccagctaagtattttcctccctattcacctaaacccaggacataatctgccctctgtagattatcgctgtgtgaattttaaaggaaatagcataacctatgttgtgcctacacgtttctgtcgtatgaatggcagggtataatattaacatgaaagtaatttgaaagcatgttctacgatcttttcctcaaagaaggagc

SEQ ID NO: 607253 - DNA, 610 bp, Homo sapiens
gcaggttgaaaaactacctattgggtactatgctctctaccggggtgcaatatactgatgtgacaaacttgcacacatacccccatatttaaaattaaagctaaaattttaagacatgagtatcattctgatctaagtttcttgagttgttcaaagaatcattcattttgcattctaagaaaacaacacccaaagaggccttaaatgagttttctttgaataagcaaaagcagaatagtgtgacaactcacaatttccagaaattttcrtgggtcttggaggtctggggaagagaaaccttaatggtaatctccttatttcaaaaagggaaatccttaaaataaaaaagggagtttccttccttcctgtgtttctagtactgaaaaagacagatcttaatcttcactgagccagctaagtattttcctccctattcacctaaacccaggacataatctgccctctgtagattatcgctgtgtgaattttaaaggaaatagcataacctatgttgtgcctacacgtttctgtcgtatgaatggcagggtataatattaacatgaaagtaatttgaaagcatgttctacgatcttttcctcaaagaaggagc

SEQ ID NO: 607254 - DNA, 604 bp, Homo sapiens
actgcactccagcctgggtgacacagtgagaccctgtctcaatttcttaattttttaaaaaagatgcaaaacaaaatgtaatcawtgctatgcagtaaaacatacctttggggtttttttttttagcatcttgactttgtgtgtgtgtttattttgtattttttgtatttgagaatacatgtaaatttagaaaaatttagaaaatttacaatttagaaaaaaacaaatgaacaaaaattatttaaattacatacgctcttttaaaaaaatttgttatagatctgatttattgttttcttccccctacccctcccttgttgggaattgtagtaaagcaaatcttacatgaaatcattagaccagacaagaacaatggcagaggctattttgtgattactcaccgaagagaaaaactgcactttcacatcatcatacagaggtggaccgtcgaatacatcaattaatattttgtctgttgtaatgttatcaagtacctatgaatgaacacatggaattgagaactataaacctagataatgataacaatgaagttccttttcacttatcatgacttcctgtatttatcaagtacttttggtctcac

SEQ ID NO: 607255 - DNA, 604 bp, Homo sapiens
actgcactccagcctgggtgacacagtgagaccctgtctcaatttcttaattttttaaaaaagatgcaaaacaaaatgtaatcaatgctatgcagtaaaacatacctttggggtttttttttttagcatcttgactttgtgtgtgtgtttattttgtattttttgtatttgagaatacatrtaaatttagaaaaatttagaaaatttacaatttagaaaaaaacaaatgaacaaaaattatttaaattacatacgctcttttaaaaaaatttgttatagatctgatttattgttttcttccccctacccctcccttgttgggaattgtagtaaagcaaatcttacatgaaatcattagaccagacaagaacaatggcagaggctattttgtgattactcaccgaagagaaaaactgcactttcacatcatcatacagaggtggaccgtcgaatacatcaattaatattttgtctgttgtaatgttatcaagtacctatgaatgaacacatggaattgagaactataaacctagataatgataacaatgaagttccttttcacttatcatgacttcctgtatttatcaagtacttttggtctcac

SEQ ID NO: 607256 - DNA, 569 bp, Homo sapiens
atgcaggctcaacataaacaaaaattaatagctaaatcaaggatgcaggttgaaatctttacagtaattactaaaaacatagaaaaasagtatatgacttccaaggtaatgacagacggtgagaaggaaagaattatattattaaaattcaatcaaatgaaaacagaatgtcagtaggaaaacagaagagttaaatagatgtacatagaacactgttctcaacaatgcataatacatgttcttttcaaatgtacagaaaacatttgacaatatcgaccaaattctgggccattaagcaagtctaaacaaatttcaaagaactaaaaaagaaaaaaatacatagtatgttctgtgtccaccacacaatataatcagaaatcaaaaatttaaagataaatacaaaattctcatatgtttggaaataaggaagtatatttctacataactcatgggtcaaaaaaaaaaacaagcacaaagttggaacatagtttgaactaagtaaaataaaaacactaaaaataaaaatttatgggacgaaactaaagcaattcttagaggaaaacttgtag

SEQ ID NO: 607257 - DNA, 423 bp, Homo sapiens
ccgccgtggttcctgccccttatatgtgcggggctcctggcacatgcacacttctcctcaaactctgtttacaccccagcaacaatgctgggtgttgtcagcccctctcctccccagataccgctctgtcatcagccaaggaacaaattccccatgaaagacattattctttctctcaagaagatcaactacttatatytcttcctttgctgacagctttgcagggtgaacatctagaatttaaaaaagggttgatgtggacaagtgagctctctgtgtggctcaccaggatgttccctcttattccaggtgtcctgtcccatgtgtaggtgcaggagtcaggtccaggacccatgaggccctcagacactgccctccacatgtgctgtgtctggattcttttttaccatggatactatttga

SEQ ID NO: 607258 - DNA, 560 bp, Homo sapiens
aaacagagaaaatgaaatttaactcattttacgaagccaagatttgaaaaaactatgagaaaggaaaattataaccaattgcccagaagacatgaatttgaaaatcctaaacaaaatattaacggacagaatccggcaatttaataataaaataatttaataagtatttaacaaaataatacagcacaactaaagtacatttattccagaaacatgttggtttaccacttaatcaatgcaattaaccacatttatttataggataaagtagaaaaattatcatctcaaagattcagaaaaatctttaagaattcaamatccattcatgatttaaaaaaaaaaactcttagcaagctaaacgaatttcttttttctttctttcttttttttttttttgtttcattttttgagacagagtcttactctgtcatccaggttggagagcagtggtgcgatcttggctcactggaacctctgcctcctggtttcaagtgattctcgtgcctcagccggagtagctggcattacaggcatgtgccaccgcacctcgcaaatttttg

SEQ ID NO: 607259 - DNA, 539 bp, Homo sapiens
tttgtacaacaaaataaatcacgatcaaatttaaaaggcaacatgtggggagaatataattacaatactaagaaaaattggcatccagattctttaaagaacttctataaatcaatrtaaaatatttttactatcacgatactactggtaacctgcaagcagcaaccaaccagaagacagcaagactaatatgaatgaacacataaaaaagaggctgctctcgtacataccagctgaatattagccctctaaacaacctttaacaaaatcaacaaaatattatgtgaacacagaataatgtaaaccccctctcagcacaaaagaaaaaaagtcagatttgaaatgattgttttccttcaagcaaggaattagcattagttaatagaaaactgatgctaacttctttaataataacattttaggttggacaatgtgaaatggccatttttaaagcaaaagatggttaaaaactggcaatttcaaatgattcaacctctatattcttaagtatggtactgtaaattgccagtatatataca

SEQ ID NO: 607260 - DNA, 565 bp, Homo sapiens
cttgaaactagtcaataagacaaaaacttgattttactgaattatataagtcagttgatggtgctatgttttcctggaatttgatataaaaattgatttagagcccactaaaaatgtaattatttatgtttgtcaaaatttgtgaaatatgcttagatgattatttaaagcccaaacctgaatgagagaaaatctaactaaacttaaattggttggatttacaaatggcttttttyccccattttcaccccaccaatgtcaacttcttcgtatcattacactataaaaattccagtataatttttgatatagcatctctgttggctcccttaatctaaaaggttctcacaaagtttaagaacaaccttaaatattactggaacaaaaacagacatatagaccaatggaacagaatacaaagcccagaaaaaatccatgcatttatactcagctgatattcaacaaaggtgccaagaatccaagatgaggaaaggacagtctcttcaataaacgatactggggaaactgaatatccacttgcagaaaaatgaaattgcaacctatc

SEQ ID NO: 607261 - DNA, 550 bp, Homo sapiens
ttattgtacaacatagtgaccacagttaataataatgtatacttgaaaattgctgagacagtagattttaaatgttctcacacaaaaatatgtggagtaatgcatatgctaattagcttgatttagccatttcacaatgtttacstatatcaaaacatcatgttgtacaccataaatatattggttttttatttgttaatttaaaaataaaaaagatcagccttaaataacagtactctgatattctaaaattaaagactgtttgtattttgagagatataaactagcaaaccaaaaataaagaaatccaaatactaggaaaacaagggaaaatatgctcaaccttccttagttcttttttcttactttcttcccttccttatcctctccctatctcctacccttcctcctctcctctttcctttctccttcccttctttcagtcttggagctaatatttaaaaatgctaacaattattaatacatattaatagcaatacgtatcttgttcttgtactttatgtatatttacatgtctttagaaatggag

SEQ ID NO: 607262 - DNA, 598 bp, Homo sapiens
tgctgctggattcagtttgccagtattatactgaggatttttgcaatgatgttcatcagggatattggtctaaaattctctttttttgttgtgtctctgccaggctttggtatcagaatgatkctggcctcataaaatgagttagggagcattccctttttttctatagattggaatagtttcagaaggaatggtaccagctcctccttgtacctctggtaaaattcagctgtgaatctgtctggtcctggacattttttaattcgtaggctattaattattgcctcaatttcagagcctattattggtctattcaaggactcaacttcttcctggtttagtcttgggagggtgtatgtgtcgaggaatttatccatttcttctagattttctagtttatttgcgtagaggtgtttatagtattctgtgatggcagtttgtatttctgtgggatcggtggtgatatctcctttatcattttttattgtgtctatttgattcttctctcttttcttctttattagtctggttagtggtctatcaattttgttgatcttttcgaaaaaccatctcctggattcattgattttttgaaggg

SEQ ID NO: 607263 - DNA, 598 bp, Homo sapiens
tgctgctggattcagtttgccagtattatactgaggatttttgcaatgatgttcatcagggatattggtctaaaattctctttttttgttgtgtctctgccaggctttggtatcagaatgattctggcctcrtaaaatgagttagggagcattccctttttttctatagattggaatagtttcagaaggaatggtaccagctcctccttgtacctctggtaaaattcagctgtgaatctgtctggtcctggacattttttaattcgtaggctattaattattgcctcaatttcagagcctattattggtctattcaaggactcaacttcttcctggtttagtcttgggagggtgtatgtgtcgaggaatttatccatttcttctagattttctagtttatttgcgtagaggtgtttatagtattctgtgatggcagtttgtatttctgtgggatcggtggtgatatctcctttatcattttttattgtgtctatttgattcttctctcttttcttctttattagtctggttagtggtctatcaattttgttgatcttttcgaaaaaccatctcctggattcattgattttttgaaggg

SEQ ID NO: 607264 - DNA, 536 bp, Homo sapiens
gaagttatgaataagttaacatatcttattagaattccttatctatcttcaaaaagagctttccaagttgctcctgccactctaaaataaacgcaagcgtttcaaaaatrtaaggatggtagtggtttatccatctcatataacctaaactcaacttatttttgtttaataggtataatttttaactttctagcagactattcattatattatttcagggtagttagaaaccacacaaggcaaatgtagctgaccaaaatgtttgccccctgaaaatgtctattgagtatacaggtagaggaaaaaatcaagagagacagggtattaaactgggttacaacctattttctacagttttttgcttttttcccatctagagccttgctctcatcacatgccactgctgatgggtcagaagactcatttgttaaattgtctatgtcctcataacacaatctggcaagaaaaacagaaagattttcctaaacctaatatcgctagaacagatcttccctaaaatggttttcttccactcc

SEQ ID NO: 607265 - DNA, 536 bp, Homo sapiens
gaagttatgaataagttaacatatcttattagaattccttatctatcttcaaaaagagctttccaagttgctcctgccactctaaaataaacgcaagcgtttcaaaaatataaggatggtagtggtttatccatctcatataacctaaactcaacttatttttgtttaataggtataatttttaactttctagcagactattcattatattatttcagggtagttagaaaccacacaaggcaaatgtagctgaccaaaatgtttgccccctgaaaatgtctattgagtatacaggtagaggaaaaaatcaagagagacagggtattaaactgggttacaacctattttctacagttttttgcttttttcccatctagagccttgctcycatcacatgccactgctgatgggtcagaagactcatttgttaaattgtctatgtcctcataacacaatctggcaagaaaaacagaaagattttcctaaacctaatatcgctagaacagatcttccctaaaatggttttcttccactcc

SEQ ID NO: 607266 - DNA, 423 bp, Homo sapiens
ccgccgtggttcctgccccttatatgtgcggggctcctggcacatgcacacttctcctcaaactctgtttacaccccagcaacaatgctgggtgttgtcagcccctctcctccccagataccgctctgtcatcagccaaggaacaaattccccatgaaagacattattctttctctcaagaagatcaactacttatatctcttcctttgctgacagctttgcagggtgaacatctagaatttaaaaaagggttgatgtggacaagtgagctctctgtgtgrctcaccaggatgttccctcttattccaggtgtcctgtcccatgtgtaggtgcaggagtcaggtccaggacccatgaggccctcagacactgccctccacatgtgctgtgtctggattcttttttaccatggatactatttga

SEQ ID NO: 607267 - DNA, 462 bp, Homo sapiens
gcatatagtatgattgtgtgtatgtgtgatagaaaaagataaacatatcaaattttaaataactggtaacaatatggagacttttttggctcatttgttctctttatttttttaaatgaagatatatgtgtacctataaagtgtgtgtctatatatatatatatatatatatatatatatgtatatatgtataacctttaaaatgaaaaacaaatagtagttatwatttaaaatacaatcaataccactatatgaatccaactttcagtaaatacatctttctgaaacatacacacacatacgtatatatctctgtgcaacaacaaaaatgacacaaaattttaaaactgattagtatggtaccctcagagcaatgtttactggcttaatattgagaaaaataaaatgaaggtatcaaagtcatccatttattaaactggctatctctgttaagaggaaata

SEQ ID NO: 607268 - DNA, 462 bp, Homo sapiens
gcatatagtatgattgtgtgtatgtgtgatagaaaaagataaacatatcaaattttaaataactggtaacaatatggagacttttttggctcatttgttctctttatttttttaaatgaagatatatgtgtacctataaagtgtgtgtctatatatatatatatatatatatatatatatgtatatatgtataacctttaaaatgaaaaacaaatagtagttataatttaaaatacaatcaataccactatatgaatccaactttcagtaaatayatctttctgaaacatacacacacatacgtatatatctctgtgcaacaacaaaaatgacacaaaattttaaaactgattagtatggtaccctcagagcaatgtttactggcttaatattgagaaaaataaaatgaaggtatcaaagtcatccatttattaaactggctatctctgttaagaggaaata

SEQ ID NO: 607269 - DNA, 462 bp, Homo sapiens
gcatatagtatgattgtgtgtatgtgtgatagaaaaagataaacatatcaaattttaaataactggtaacaatatggagacttttttggctcatttgttctctttatttttttaaatgaagatatatgtgtacctataaagtgtgtgtctatatatatatatatatatatatatatatatgtatatatgtataacctttaaaatgaaaaacaaatagtagttataatttaaaatacaatcaataccactatatgaatccaactttcagtaaatacatctttctgaaacatrcacacacatacgtatatatctctgtgcaacaacaaaaatgacacaaaattttaaaactgattagtatggtaccctcagagcaatgtttactggcttaatattgagaaaaataaaatgaaggtatcaaagtcatccatttattaaactggctatctctgttaagaggaaata

SEQ ID NO: 607270 - DNA, 462 bp, Homo sapiens
gcatatagtatgattgtgtgtatgtgtgatagaaaaagataaacatatcaaattttaaataactggtaacaatatggagacttttttggctcatttgttctctttatttttttaaatgaagatatatgtgtacctataaagtgtgtgtctatatatatatatatatatatatatatatatgtatatatgtataacctttaaaatgaaaaacaaatagtagttataatttaaaatacaatcaataccactatatgaatccaactttcagtaaatacatctttctgaaacatacacacacatacgtatatatctctgtgcaacaacaaaaatgacacaaaattttaaaactgattagtatggtaccctcagagcaatgtttacwggcttaatattgagaaaaataaaatgaaggtatcaaagtcatccatttattaaactggctatctctgttaagaggaaata

SEQ ID NO: 607271 - DNA, 504 bp, Homo sapiens
gacttttttggctcatttgttctctttatttttttaaatgaagatatatgtgtacctataaagtgtgtgtctatatatatatatatatatatatatatatatgtatatatgtataacctttaaaatgaaaaacaaatagtagttataatttaaaatacaatcaataccactatatgaatccaactttcagtaaatacatctttctgaaacatacacacacatacgtatatatctctgtgcaacaacaaaaatgacacaaaattttaaaactgattagtatggtaccctcagagcaatgtttactggcttaatattgagaaaaataaaatgaaggtatcaragtcatccatttattaaactggctatctctgttaagaggaaataataagtcaaaaagatgaacactctgaatctgcatagtgggggaggcaaggataaatagttttatatacttcaggtgtatcctccccccaggtgatggctttgttcttatcaatctctatg

SEQ ID NO: 607272 - DNA, 598 bp, Homo sapiens
tgctgctggattcagtttgccagtattatactgaggatttttgcaatgatgttcatcagggatattggtctaaaattctctttttttgttgtgtctctgccaggctttggtatcagaatgattctggcctcataaaatgagttagggagcattccctttttttctatagattggaatagtttcagaaggaatggtaccagctcctccttgtacctctggtaaaattcagctgtgaatctgtctggtcctggacattttttaattcgtaggctattaattattgcctcaatttcagagcctattattgktctattcaaggactcaacttcttcctggtttagtcttgggagggtgtatgtgtcgaggaatttatccatttcttctagattttctagtttatttgcgtagaggtgtttatagtattctgtgatggcagtttgtatttctgtgggatcggtggtgatatctcctttatcattttttattgtgtctatttgattcttctctcttttcttctttattagtctggttagtggtctatcaattttgttgatcttttcgaaaaaccatctcctggattcattgattttttgaaggg

SEQ ID NO: 607273 - DNA, 571 bp, Homo sapiens
tcttaacttgtgaggtgccaaggaaayggggcctgcagaatgatgctgcctggctccctggattcagcccccttcccagagatacgtatggacagatttcccactgtgctgaagatccccggggctagagtgtgtaaaactcctgggtttctgtgtgtgcctgagcagctgatgtgcccagactccatacaggtctgtgtatcagatccacagccctggtggcatgggctcacaaggggatctcttgatccacggcttgcaaagatccatgagagaaacacggtttcccgggcaggactgcacactcactcactgcttcccttggctgggagtgggggttcctttggctccatgccgcccccggctgggccatcgcaccctctgcctgcttatcttcattctccattggtcgacctgttcatccagtcagtcccaatgtgagaacctggttatctcagttgaaggtgctgaattccctcgccccttttcattcctctttgtgagcgcggcagactgcagctgcttctaattggccatcttgcatcactctaaacatttcttttttagccct

SEQ ID NO: 607274 - DNA, 287 bp, Homo sapiens
ccgcccccggctgggccatcgcaccctctgcctgcttatcttcattctccattggtcgacctgttcatccagtcagtcccaatgtgasaacctggttatctcagttgaaggtgctgaattccctcgccccttttcattcctctttgtgagcgcggcagactgcagctgcttctaattggccatcttgcatcactctaaacatttcttttttagccctagttcttaattcctatagcccttggtttatcactagtttcttgataaaataatccgtccacgttctctag

SEQ ID NO: 607275 - DNA, 571 bp, Homo sapiens
tcttaacttgtgaggtgccaaggaaacggggcctgcagaatgatgctgcctggctccctggattcagcccccttcccagagatacgtatggacagatttcccactgtgctgaagatccccggggctagagtgtgtaaaactcctgggtttctgtgtgtgcctgagcagctgatgtgcccagactccatacaggtctgtgtatcagatccacagccctggtggcatgggctcacaaggggatctcttgatccacggcttgcaaagatccatgagagaaacacggtttcccgggcaggactgcacactcactcactgcttcccttggctgggagtgggggttcctttggctccatgccgcccccggctgggccatcgcaccctctgcctgcttatcttcattctccattggtcgacctgttcatccagtcagtcccaatgtgagaacctggttatctcagttgaaggtgctgaattccctcgccccttttcattcytctttgtgagcgcggcagactgcagctgcttctaattggccatcttgcatcactctaaacatttcttttttagccct

SEQ ID NO: 607276 - DNA, 556 bp, Homo sapiens
gtttcccgggcaggactgcacactcactcactgcttcccttggctgggagtgggggttcctttggctccatgccgcccccggctgggccatcgcaccctctgcctgcttatcttcattctccattggtcgacctgttcatccagtcagtcccaatgtgagaacctggttatctcagttgaaggtgctgaattccctcgccccttttcattcctctttgtgagcrcggcagactgcagctgcttctaattggccatcttgcatcactctaaacatttcttttttagccctagttcttaattcctatagcccttggtttatcactagtttcttgataaaataatccgtccacgttctctagtcatgggatgatgactcaggccaggtatccaggacattttctgggaagtagctgaacttgcagccctgtcctgttcagaactgagctaacacactgcagagaggtactccttccacctctcggcaactgataccagccctcgatagttatatttttattgaggtataataagtattgtaaattacataaaattaaac

SEQ ID NO: 607277 - DNA, 556 bp, Homo sapiens
gtttcccgggcaggactgcacactcactcactgcttcccttggctgggagtgggggttcctttggctccatgccgcccccggctgggccatcgcaccctctgcctgcttatcttcattctccattggtcgacctgttcatccagtcagtcccaatgtgagaacctggttatctcagttgaaggtgctgaattccctcgccccttttcattcctctttgtgagcgckgcagactgcagctgcttctaattggccatcttgcatcactctaaacatttcttttttagccctagttcttaattcctatagcccttggtttatcactagtttcttgataaaataatccgtccacgttctctagtcatgggatgatgactcaggccaggtatccaggacattttctgggaagtagctgaacttgcagccctgtcctgttcagaactgagctaacacactgcagagaggtactccttccacctctcggcaactgataccagccctcgatagttatatttttattgaggtataataagtattgtaaattacataaaattaaac

SEQ ID NO: 607278 - DNA, 287 bp, Homo sapiens
ccgcccccggctgggccatcgcaccctctgcctgcttatcttcattctccattggtcgacctgttcatccagtcagtcccaatgtgagaacctggttatctcagttgaaggtgctgaattccctcgccccttttcattcctctttgtgagcgcggcagactgcagctgcttctaattggccatcttgcatcactctaaacatttcttttttagccctagttcttaattcctatagcccttggtttatcacyagtttcttgataaaataatccgtccacgttctctag

SEQ ID NO: 607279 - DNA, 638 bp, Homo sapiens
gactataatttaggatctcaacctaagaaaacacattttgggttatggcatccccatctttcttccctatggtagactatcaaaaacggccacaattctttataattccttccatcaagagttggagtttattttctactccttgaatccagactggtagtgtaatttgcattgtccaataaaatggggtagaattaatatataattttgagcctgggcctgaagaggatttgcattgttttgttgccgctcctcggactcttgcctctgccatcatgtgaacaggcctgaagtagcctactggagaatgagagaccacatggggccattcagccaagtcaggtaattttctttcctttcatttaaaaaatctgtttccttcattctttaaaaatatttttaattgacacataatacttgttcatatttataaggtagagagggatatctcaatacttgtatacaatgtgtaatgatcaaatcaggataatcagcatatctatcacctcaaatatttatcattctttgtgttgggggcactcaacatcctctctatttaraaatatacaataaattattgttaactgtagtcaccctacagcactacagaacaccagaacttattcctatctgtaagc

SEQ ID NO: 607280 - DNA, 579 bp, Homo sapiens
tatgatcttggcccactgcaacctccacctcctgggtttaagcaattctcgtgattcagcctcccaagtaactggaactacaggttcacgccaccacacccaggtaatttttttgtattattagtagaaatgyggtttcttcatgttggccatgctcgccttgaactcctggcctcaagtgatccacccgcctcagcctcccaaagtgctgggattacaggtgtgagacaccgcacctgatgaatattccctctttttgacttttgacagtttgactactatgcacctcagagaagaccttttttgggttgaatctatttgagaacctttgagcttcctagattttggccatatctctcccatgtctgtttttaaagctcttgattgtattttttttttttttttgagacagggtatcactctgccacccaggctggagtgcagtggcacaatcttggctcactgcaacctccacctcctggattcaagcaattctcatgtctcagcctcccaagtagcttggatggcaggcatgcaccaccaaacccaactaatttttgtattttttagagacaggat

SEQ ID NO: 607281 - DNA, 631 bp, Homo sapiens
atttgatatactctttaaatttagggtctgttaatggggaattatggtgtttctttggaggtgtaatgtttccttgcttttcacgtttcttatggccctaaactgatttttgcacatctgggagaacagttgcctcttccaatgttagggagctttcacagagaaatactttttccaatagttgtctcctatagtgttcattgagtagggtgctttgactttggttctgggtgggtgcagtaatatagtcttcaggtgacttttttggctgtaatcagcattcagtggtgtctgtgagtgcctcagtggcctgatggtgagtgtttgtggagacagtggtatggcttttcttgttgtgagagccatcattcagattagttctcaggccttaggcatatgcatgctagctgcagtggctttgctagttrtggggtattgccaacagcagggcgggcaccaggcaggccagtcctcagtgccttagaagtgcatgaggcaaatggtggctctgctggtgaagggggtggggctgttggcagcagtgggtgccagatgggatgggccttgggccttggggggtgcatttagcatgcagtggctctttcagtcgagggtagccaagtcattttag

SEQ ID NO: 607282 - DNA, 599 bp, Homo sapiens
attttccctcctctccccaattacctacctgggggatatttggcaatgtctggaggcatttaggttttcaccactggcgtgcgtgcatgtgtgtgtgtgtctgtgtgttacttacatctagtgaatagaggccaggaattttgctaaacaccctacaattaatataactgctcaccaccctcttatgacaatsatctggcccaaaatgtcagtaatgctgaggctgagaaattctggtctagagaaatagtgatacaatagactcttagcatctgtaaatttaattttgggatttaagactagcattttcaattttttccacatcaaaacaaatcgattattcttgttcatctttgttattcccatgagtaacagatgttcactacagctgctactacacatcagggaggcaacagattgagatacttccgaagtgtgctagctggaatctcccctaccatcagaaccactgaagcagagaactgatggtctggactagtgcttctctgatttgggcacacatcaataagagccacctggaaaagcttgttaagctgcagattgctgggtcccagagatactgattcagtgggtccagg

SEQ ID NO: 607283 - DNA, 612 bp, Homo sapiens
aatcccacttctaactttgcctgctttctttgtttctaccacaactatactgcaaaactctactattgtgttgccacgtgtcatctcctagtttctgttctgtttgctattttttagaaactcatgattgaagtcactctaattttgcatatgctcaaataaattccctcttggctgtaggaaaaatccagacagaacattatgtgtaagggatytgtagttgaagcacagaggggaattgttttcaatataaatttttttgatatagcagatattaaactgataagaatattatacttgatcttagccaaaaggccaaaaaatgatacaaatgggaatttgacgagaacttcaaaatgtagagaagttaaagttagtacaagagtaaaagtccttctttggggtactgcatcttctttattccattaatggtacttagcctgtatactcttcaccggtccctaaatatcacaatcttttagtttcaaagtatgtgggaatttacctaaacatttcattttaaagcaatgtatttggtatagaatgagaacatttgaagttgaaaagattatatagaataaaaggcacagaaaatgctaaaattaatgaaaa

SEQ ID NO: 607284 - DNA, 559 bp, Homo sapiens
ctcctagtttctgttctgtttgctattttttagaaactcatgattgaagtcactctaattttgcatatgctcaaataaattccctcttggctgtaggaaaaatccagacagaacattatgtgtaagggatctgtagttgaagcacagaggggaattgttttcaatataaatttttttgatatagcagatattaaactgataagaatattatacttgatcttagccaaaaggccaaaaaatgatacaaatgggaatytgacgagaacttcaaaatgtagagaagttaaagttagtacaagagtaaaagtccttctttggggtactgcatcttctttattccattaatggtacttagcctgtatactcttcaccggtccctaaatatcacaatcttttagtttcaaagtatgtgggaatttacctaaacatttcattttaaagcaatgtatttggtatagaatgagaacatttgaagttgaaaagattatatagaataaaaggcacagaaaatgctaaaattaatgaaaaactttaagagaggtaagtcttatgtttcata

SEQ ID NO: 607285 - DNA, 374 bp, Homo sapiens
aaaaatataacattcatgggaagttttcaaacaataaaattatattcatcatttgacayttatatgtgactaaaacaccaacatggcaattcaaacataataagagatataactaaatgcgtaataatcaccctcattgtggacaatggggtatctatcccctcaagcatttatcattcatgttacaaacaatccaattacactctttcagtcatttaaaaatatacaatcaagttattgttgactatggtcaatctgttgtgctatcaaatagtaggcgttactcattctatttttttgtacccattaaccatccccatctccccacccccaagcccctactaccattcctagcctctgatgaccatccatct

SEQ ID NO: 607286 - DNA, 374 bp, Homo sapiens
aaaaatataacattcatgggaagttttcaaacaataaaattatattcatcatttgacacttatatgtgactaaaacaccaacatggcaattcaaacataataagagatataactaaatgcgtaataatcaccctcattgtggacaatggggtatctatcccctcaagcatttatcattcaygttacaaacaatccaattacactctttcagtcatttaaaaatatacaatcaagttattgttgactatggtcaatctgttgtgctatcaaatagtaggcgttactcattctatttttttgtacccattaaccatccccatctccccacccccaagcccctactaccattcctagcctctgatgaccatccatct

SEQ ID NO: 607287 - DNA, 374 bp, Homo sapiens
aaaaatataacattcatgggaagttttcaaacaataaaattatattcatcatttgacacttatatgtgactaaaacaccaacatggcaattcaaacataataagagatataactaaatgcgtaataatcaccctcattgtggacaatggggtatctatcccctcaagcatttatcattcatgttacaaacaatccaattacactctttcagtcatttaaaaatatacaatcaagttattgttgactatggtcaatctgttgtgctatcaaatagtaggcgttactcattctatttttttgtacccattaaccatccccayctccccacccccaagcccctactaccattcctagcctctgatgaccatccatct

SEQ ID NO: 607288 - DNA, 374 bp, Homo sapiens
aaaaatataacattcatgggaagttttcaaacaataaaattatattcatcatttgacacttatatgtgactaaaacaccaacatggcaattcaaacataataagagatataactaaatgcgtaataatcaccctcattgtggacaatggggtatctatcccctcaagcatttatcattcatgttacaaacaatccaattacactctttcagtcatttaaaaatatacaatcaagttattgttgactatggtcaatctgttgtgctatcaaatagtaggcgttactcattctatttttttgtacccattaaccatccccatctccccacccccaagcccctactaccattccyagcctctgatgaccatccatct

SEQ ID NO: 607289 - DNA, 523 bp, Homo sapiens
gatttttgtatatggtgagaggtaggggtctaggtgcattcttctgtatgtgtatatccagttttcccagaaccatttgttgaagagatgtcttttgttcaatgtaygttcttggcacatttatgaaaaatgagttcactgtaagtgtgtgtggatttgtttctgggttctctattctattccagtggtctgtgtgtctgtttttatgccagtgccatggtgttttggttatatagttctgtagtataatttgaagtcaggtaatgtgattcctccagctttgttctttttgcttagaatagctttggctattctgggtcttttgtggctccatataaattttaagattgtttcttctatttctgtgaagaatgtcattcatattttgacagggagtgcattgaatctgtaaattgctttggagagtatggacattttaacaatattgattcttccaatccatgaacatggaatctccttccattttttggtgtcctcttcaatttctttcatcagtgtttta

SEQ ID NO: 607290 - DNA, 600 bp, Homo sapiens
gttttatcattttcattataaagatcttacacttctttggttaggttaatttctaggtatttaattttatttgtggctattgtatataggaccactttttaaatgtcctttccaaatggttcactgttgacatatagaaatgctactgatttttgtatattgattttgtatcctgcaactttactgaatttatcaattctaatagttttttttggtggagtctttagtattttccaaataaaatgtatcatctgcaaacacagggataattttacttcttccatcccaatttggatttctttttttattccctttctttctcttccataatggctctagctaggacttccrgtactatgttgaacaacggtggtaaaagtgggcatcctcattgtgttctagatcgcagagaaaagcttttcattttttccccattcagtacggtaatgactgtgggtctgtcatatatggtttttattaagttgaggtatgttacttctatacccagtttttttagggtgtttaccatgaagggatgttgaattttatcaaatgctttttcagcatcaactgaaatgatcttatggtttttatccttta

SEQ ID NO: 607291 - DNA, 423 bp, Homo sapiens
gaaaagttgtagttaatatttttgattggctcatagtttagtctctctacttagagtaagagtagtttatacatcatagttacagtgttatracattctgcatttttctgtatacctactattaccagtgagttttataccttcaggttgttacttattgctcattaatgtccttatctttctgattgaaatactccctttagcatttcttctaggacaggtctggtgttgacaaaatccctcagcttttgtgtggaaaagtctttatttccccttcactttgaaggatactttcactggatacactgttctagggtaaatgtttttttccttcagcactttcaatatgtcatgccactctctcctggcctgaaacgtttctactaaagagtctgctgccagatatattgtagcgccatcgta

SEQ ID NO: 607292 - DNA, 484 bp, Homo sapiens
tggggttgagtgacataagcacctctgtggccaccactactgtgactgcattgggtcagacctgaggccagcacagcacggggtcttgcccaagacctgctgtaaccactccttagctattgcaggagtttactgaaggccctggggctctacagtcatcacatcgtaaaaacagccaggcctgtgtccttgccttcaggatggcaagttctcctagcctacaggtggatccacaggtgctgtctgggaatcagggcctagatcaaaaactgtaaaagtctacctagtgttttattgtgctatggctgagctgtcactcaaaccacaagatgcagtccttcccactctttccacccctgtccaaaggcagaggagcatcaatccatggccacctcaaacacaggacatkgggggggtactgccagactaccaccaatgttctcataaggcccaaaggctcttaagtcagtttgtagtgaatgct

SEQ ID NO: 607293 - DNA, 579 bp, Homo sapiens
gtcacaatcattccctttgacacagaatttccacttctgagaatttataacaagcaaataaccaacaatatacagagatttagcctcaaatatattcatttttgtaagttaaaaacttgtaaaaaaactgaattgttcagcaatatctgactattaaatgaattatagcacatctacaccatgaaatatcacacaactgttacaaataatgttgtaagtgcacatgaatatatattaacaaaaaaatatagycatgatgtcattaagtaataaggttatttacaaaagaataagtatggtctcatatctgtaaacaaaaaagtatatgcctaaagaacttagaagtgcatgcatcaaagtttaagaatgactaaatgtgggtagatttgttgattgtattttcagattttcctttaatgaactcttacattatttttagtttttagaataaaacctatttacagaactacagagttttcaaagtatttttgcatgttattttcattttattactaattttttaaatacaatatccagtacatggattgcattatagccagtttacatttgaataatctg

SEQ ID NO: 607294 - DNA, 476 bp, Homo sapiens
gtttttgtttatctatgacagattttatgtcttcttcatttgtaaaggatagctgtgctggstataatattcttggctgaaagatttttttctttcagaacttcgaatgtatcatcccattctcttctagcctaaggtttccactgggaaatcagctgttagtctaatggggattccattataagtgtgttacttttctcttgctattttaaaaaatctttgtcttttgatttttcacaatttaactataatgtctgggttgaatgtatttggggttctttgatcttcctggaactagatgtctagctctccctcaagagttaggaagttttacgctattttattaaatatgttttcctcatattttctctactcttttccttctggaatgcccataatatgaatatttgaccaaattaatggtgtcccataaatcctgtaggcttttttcattcttttttatcctttttttgcct

SEQ ID NO: 607295 - DNA, 476 bp, Homo sapiens
gtttttgtttatctatgacagattttatgtcttcttcatttgtaaaggatagctgtgctggctataatattcttggctgaaagatttttttctttcagaacttcgaatgtatcatcccattctcttctagcctaaggtttccactgggaaatcagctgttagtctaatggggattccattataagtgtgttacttttctcttgctattttaaaaaatctttgtcttttgatttttcacaatttractataatgtctgggttgaatgtatttggggttctttgatcttcctggaactagatgtctagctctccctcaagagttaggaagttttacgctattttattaaatatgttttcctcatattttctctactcttttccttctggaatgcccataatatgaatatttgaccaaattaatggtgtcccataaatcctgtaggcttttttcattcttttttatcctttttttgcct

SEQ ID NO: 607296 - DNA, 528 bp, Homo sapiens
aacataatactggaagtcttgaccagagtaatcaggcaagagaaagaaacaaagggcatccatattgcaaagaaatatgtcaacttagccttttttgcagaccacaggatcttatgcttaaaaaaacctaaagattccacacaaaaaaaactattaaaactgttaaacaaacttagtaaagttgcagtatacaaaatcaacatgcaaaaaccagtagcatttatatatgccaatagcgaaaaacctgaaaaagaaatcaaacaagcaatcccattgcaatagctacaaagaatataaatacctagaaatccattgaaccaaagtcaaagatctatataaggaaaactaattrtaaaacaatgatgaaagaaattgaagaggacacaaaaattgaaaagattttccatgctcatgggttaaaagaattattattgttaaaatgcaaataccacgcgaaacaatttccagattcaatgaaatctctattataatagcaatgacattcttcacagaaatggacaaaaatgt

SEQ ID NO: 607297 - DNA, 214 bp, Homo sapiens
taaatattaaaaaaacatttgattttcaaaacccccaaacagttaaaataaattttagaaataattcattttacaaataaraataaaggaacatgtccaacaaaccatatgcaagagctttatattgaaaagtataaacctttattaagatatattaaagacgacctaaacaaataaaaagttatcgtgtataagaaccctcactagtataaag

SEQ ID NO: 607298 - DNA, 415 bp, Homo sapiens
cacttgcccacggtgtatagagaccccaggctgcaccytgcatgccttgggaatggagagagtcatgcatggattcaatgttaactgtttgcctcattttggttgagaacctccggaacagatgactcgaacgaccctcttgactttcatttaagttctgtgaccagagatttcctgtggttaatggggagaaaaactcagggtacgagaacttttgactctttcaaaagcaaccgaaagattccttagaaaattgcttaacattttgaatttcatgttttcatctgaagaatgagagagctagaaaagcttagttatctttaagtttcttctctgtattaaatgttatatcagcaggcatattaatgcataaaattgctgactagttctgtacattttgggaatagagagaaga

SEQ ID NO: 607299 - DNA, 316 bp, Homo sapiens
aaaatatttagtcaagatatttcaattcaatattttasattgcattagatttaaaatatgtaaaaatattaaataagccagctctcaccaaaatccctttaacgaatatatgttaagtcatatgatgttttttaaaagcagtcaccaaagagggtgggaaaaacctaagacgcgaattttagaaatacaacatttctatgactgtagtaaattttcagaagccaaaaaagatgttgagatttaaaatatccacaatcaatatttattactatgttatgggttttcctctacactttaataaataatactaagcttt

SEQ ID NO: 607300 - DNA, 316 bp, Homo sapiens
aaaatatttagtcaagatatttcaattcaatattttagattgcattagatttaaaatatgtaaaaatattaaataagccagctctcaccaaaatccctttaacgaatatatgttaagtcatatsatgttttttaaaagcagtcaccaaagagggtgggaaaaacctaagacgcgaattttagaaatacaacatttctatgactgtagtaaattttcagaagccaaaaaagatgttgagatttaaaatatccacaatcaatatttattactatgttatgggttttcctctacactttaataaataatactaagcttt

SEQ ID NO: 607301 - DNA, 316 bp, Homo sapiens
aaaatatttagtcaagatatttcaattcaatattttagattgcattagatttaaaatatgtaaaaatattaaataagccagctctcaccaaaatccctttaacgaatatatgttaagtcatatgatgttttttaaaagcagtcaccaaagagggtgggaaaaacctaagacgcgaattttasaaatacaacatttctatgactgtagtaaattttcagaagccaaaaaagatgttgagatttaaaatatccacaatcaatatttattactatgttatgggttttcctctacactttaataaataatactaagcttt

SEQ ID NO: 607302 - DNA, 316 bp, Homo sapiens
aaaatatttagtcaagatatttcaattcaatattttagattgcattagatttaaaatatgtaaaaatattaaataagccagctctcaccaaaatccctttaacgaatatatgttaagtcatatgatgttttttaaaagcagtcaccaaagagggtgggaaaaacctaagacgcgaattttagaaatacaacatttctatgactgtagtaaattttcasaagccaaaaaagatgttgagatttaaaatatccacaatcaatatttattactatgttatgggttttcctctacactttaataaataatactaagcttt

SEQ ID NO: 607303 - DNA, 519 bp, Homo sapiens
ggacctgggatcatgggggcagtttcccccatactgttcttgtgatagtgagctctcacaagatctgatggttttataagtgtttcacagtttctcctacatgtgcattctctctcaccagtcatcatgtaagacgtgcctcttccccgtccgccatgattgtaagtttcctgaggccttcccagccgtgcagaactgtgagtcaattaaacctttttcctttattaattacccagtctcgagtatttccttatagcaatgtgagaatagactaatacagtgatgagggataacaattaatgctgatgttttggtctaaatcaataaacaaatgtgtggaaggaaagaccctgaactggaagttaggatggcaaggagttctgtaaaataacaggtatgtaattaacacagaggggcccttccaactatacaactctacatgattcytgtcatttctaggtgtattgttatgaataactttaattattccatttggattatttttcttttccaataatc

SEQ ID NO: 607304 - DNA, 545 bp, Homo sapiens
gattttttgtttaaaataaaaggggaagcaatagcatcctattccatgcttttgatatatttacatatgaagaatgctttcaaaagcttttatcatattcgrctgaaaaaaaaatttacctgtattactcagttttgaccaagataaaaactgtgttagaaagtgttattaagatgccttaaatataagagggtttaattgattattttaagaagtgctaaacttcttacactcaggctcagctcaccagggcaagtcacgaacctccctagcccacaaggtatcatataatagaaaagaacaatgatagccaatgttttgtcattagagtcacatattgagtttcagaagcaactgcattttaaattagtttccacatacttgggcaacataaagaataggctaaatgtaagtataaagataagcataccaagaaaagaactactacttacgatacatgtttcatatttaatcttagtgcttcatttcttttcatttgtactttatagaaatacatgactcagcagaattagtgaaggcagatg

SEQ ID NO: 607305 - DNA, 585 bp, Homo sapiens
gatgaagacaatcatgatatcatgataaacacaaagtttactgtgtgccagacatttattaagtactttctcatggaatcctcacaaaaacttttgaaataggtacgactataatccctattaataagtgggaattctgatgcttaaaaatggttcactaacctcccccaaggtcatacagcaagcaatagctgtagcactcaggcacaggtctttctgactccatagcactgcagtcttaactattgtcacacaatgtttctcaatgcctctcagaggtgccacttggaaccacagccagttagaaatggtggggctggtgtcaggagagaggagaaggatgaagttgtaactgtcacttagcctggccttgtgcctcagttatccatttaaggaactctcagttgaagcccatgacttgctaaagatgaaaagcctgtcrtggatgcaattcctagtgaaaaactacctgcagggtgaacacagtagatttcaaatctggtctatctatgcttcaagaaatgtcttcaagaagtggaggtttgctacaaaattggaacacattcctagagtaacacctggaat

SEQ ID NO: 607306 - DNA, 608 bp, Homo sapiens
aattatcaaattataacattaaaacctaattctgaggtgggcggatcatttgaggtcaggagtttgagaccagcctaaccaacatggtgaaaccccatctctactaaaaatacaaaataattagcggggcatggtggtgcatgcctgtagtcccagttactcaggaggctgaggcaggaaaatcgcttgcacccaggaggcggaggttgcagtgagccgagatcacgccactgcactgcagcctaggcgacagagtgagactccatctcaaacaaacaaaaaaaaacttrttccacttagagttaccctttatcttactttatattctctaaggtcactgatatctttccagtcttcctgaaaatacaagcaaatactgacacagatgctattttcttacacaaaatataaccagctatatatactcaatgctttttgcttttgtctcttcacggcattttctggaaagcttgccaggtctgtgcacagacagcagccctgctcctttgccctgctgtgtagtattcatgtgtgggatgttcacggattacccagtcctctaaagacgacacttgggttgcttccaggcttctgctcctacaagagat

SEQ ID NO: 607307 - DNA, 430 bp, Homo sapiens
tctccagccccagcactgcagacccaatttagataataactctcttccacttttccaaattcctgtycactgtgtgtgggaagctcagcctcaggccacactggccagtacagctgacaggcccagggacattcctgtcctctcccatctcacctcccttccttctgatattgtgtgagcaccaagataactcatgcacttctacttcccaccctgtgtgcagcagagaaacatcgccagcgtctctctgcctgtaacaagcccacctttgcttccagctctgagaaagcacgttatctgtgtgctcagctcctgaacctgggcacccctctgctttggtctctaacctgacttgaagacggcctcttcaccccaccatttctgctttttttttttttaattccttttacacacacaccacacaattttg

SEQ ID NO: 607308 - DNA, 433 bp, Homo sapiens
gaattcgggaaaatctccagccccagcactgcagacccaatttagataataactctcttccacttttccaaattcctgtccactgtgtgtgggaagctcagcctcaggccacactggccagtacagctgacaggcccagggacattcctgtcctctcccatctcacctcccttccttctgatattgtgtgagcaccaagataactcatgcacttctacttcccaccctgtgtgcagcagagaaacatcgccagcgtctctctgcctgtaacaagcccacctttgcttccagctctgagaaagcacgttatctgtgtgctcagctcctgaacctgggcwcccctctgctttggtctctaacctgacttgaagacggcctcttcaccccaccatttctgctttttttttttttaattccttttacacacacacca

SEQ ID NO: 607309 - DNA, 567 bp, Homo sapiens
ttgattgcatgtctttgctattgtgagtagtgcactgcatgtgtgcatgtgactttttrgtagaacgatttctattcctttgggtgtatacccattaatgggattgctgagttaaatggtagttctaagtgctttgataaatctccaaactgcttttcacagtggctgaactaatttacattcccaccaacatttccttttcttcataacctcactaacatctgttattttctgacttttcaataatagtcattctgactggcatgagataagacaccactgtgttttcgatttgcatttctctaatgagtagtgacattgagcattttttcatatgctcgttggctgtgtctatgttttcttttaagtgtctgtttatgtcttgtgcccattttttaatggggttgttgttttgggcttgttgatttgtttaagttccttatagattctggatattagacttatgttgtacgcatagtttgcaaatattttctcccattctgttggttgactgtttcttctgttgatagtttcttttgcgtgaaaaagctctttagtttaattagg

SEQ ID NO: 607310 - DNA, 507 bp, Homo sapiens
gtatttagcaactactgaagaggggtttaaattatatcaacattttacacgtttcagacatgttgatagttggcttttatgaaagtttctcaatttgtagagttttaattatggcaacatgaacacagtctttaccagaatgaatactactagagagaaatgaatgtacatgactatgttttttgatggggaagggggaataggttactttttaaagactgataggtttatagtctgtgtatcatcccagcttcttctatttgaaatctgggcttattgctttgctacaaaaaagtttctgtgcaggggtcactgtccatacaaaataacttcaccatttttatatattttgaatttatacgtaaaagtttactaacatctatttctgaacaaatttcagtttttgcactttcaactgttcatgttcctcttcttgaagtatakgcaaaatgagacacatcataccataaacatagggtatctggattttctctgcaatgttcctga

SEQ ID NO: 607311 - DNA, 647 bp, Homo sapiens
tcagtagggtagtcaagaatcatactatttgtcttggagcatcatactatttgtttggagtattatactatttgttttggagtatcatactatttgttttggagtatcttaatggcagtagatgcaatggctttgttgcaaaatgttaggacaacatgagctgagctatatattttggttctgtcaaatcacatattggcatctgatctttgaaatattgtcttatttatataarccttagtattctgatctctaaaacatgtgttgcaaaaatatctacaggtttttgttctggataagaaaaactaaacacacctcatcttctctttctattcaacatagctgtagaaactgcacagaatgcatgtaacagctatttgagaacactgacaggtaaatagtagtaaattaaattaaaaaaaaagaatacaaaataccacccaactatcattagtttgcctgttttaaaattatgttatcctgtagccaagaaccaacataacttaaaacctgcaagtaagagtttgcagcaatagagagatccagaactaacattctatttctgggtcaaggaatgtagaatgtgatcctaattctcactaaaaaaatgaaataaatttattgacatttttcttttctaaatttga

SEQ ID NO: 607312 - DNA, 679 bp, Homo sapiens
atgtcctcaccagctcatctataaaaccccctgcatttcacggaagaccagcaaccagtttttctgggacccatctctgcagcagatagttattctctttctttcacctactaaaatttcgctctcaagctcactctttatgtgtctctgtccttgtcctctgtggccatgagacaatgaacattgggtatcaccccagacaatgaggccatttcattgtgggagctcgctcgggatccagggtagattgatcagaagggtgagtataggagtgtaccccaactctttactttcatttctaggccttctgccctcgattttaaaatcaaactaagaaatgggtgtcatatggtgagttaagagacctttagggtgaccaccattctcaagactcagatgacaggcttactgggtataacttagcaaatcctcccgtgccctcagggtgctgtgaatgtcagctcggttttgaactggtttctttttcatggagagcctagctgttgcattgggctggaactgacagttcctggctagagctacacccyggtgctacctgaaaggcttctggacttaccccaacctctgaatgcccattgggcattggcaacaggatctccaggcattttctatcaaaatttttattcttttctttctgtgaccaccatttctcctgtcc

SEQ ID NO: 607313 - DNA, 547 bp, Homo sapiens
tatttgtacagttttgcaaatttcttttgttttttatttctaattttattccattgtgttatgagaaactatttaatataatttcattttttcattgtattgaaacatgttttgtgttgtatgataaaaatatggtttatcatggttaatgtcccatgtgcagacacagagactgtgtattacatagctgttgaatgaaatgttttctaaatgttgcttatgtccactgggtctaaggtgcagtttaagtccaaagtttcttttttaattttctgtctaaataatttgtataatgctgagcatggggttttgaagaactcaactattactgtattggaatctatgcctctttttagagataataatatttaatttatatgactatgtactccagtactgggtgaatgtaagtttagaattgttatatcctgttgctgttgctgaattcatccctatatcattatataatgacctccttcatttatttttagttttcttctaacagtgtgytacttctgctcaccttcggctttcatttgcgtgtaat

SEQ ID NO: 607314 - DNA, 597 bp, Homo sapiens
cctaaaaactgactgtcgtaaaaaatgcccatgaaatattcagtagagagaacagtagacatttgttcatctgttcaccatctctcacttcttataaaagcagcaactgtttcaccatccaatatcttacttagattttttcttttttaaatttgtgactcaaagagttgaagtcattttactacagattctcttttaatagccataattattagtccaagagggcatatgaccttagctatgccaaacatattggttccctagaaattttcaaaatggagttaatttgggttaggttattgtttttttgcaattaacggccctggccaatactagaacatgttgtataatctactgcaattgcccatgtttcatacattgaaattttgatttatataaataagttttaaaaacacaacatatacttgtctgcatattgtagtaagtggctttcattacaatgtggttgggatacagtattccatttggatgtttgttcaaaactgataatgtaagattctttagtttcagttataggaaggctaatataatattatytgcaaatggttccacaatcctgattcttctaatatcctt

SEQ ID NO: 607315 - DNA, 449 bp, Homo sapiens
aggggcatgccaccacacccagctaatgttggtatttttttgtagagacagggtttcgccatgttcccccagctggtctcgaactcttggcctcaagtgatcctcctgccttggcctcccaaagtgctgggattacaggtgggggttaccacgctcggcccccctttgtgtttttttaaacacatttcagaatcagcttgtcatgttctrtaaaaatgttggaattgcagtgaatctgtagatcattttgaagagaattgatgtttatggtgttgagcctccctccctaagagcctgacatagctctctattgtaaataaattattgaatgtcttctggcagagctttatgtttttctgcataaggtctacatatcttgtgttcgatttatttattggtactttatgggttttctgctattataagtgggatcttttattgtatttttt

SEQ ID NO: 607316 - DNA, 489 bp, Homo sapiens
ggcatgttgtagcactattttagtctaacttagaatctttttcctgaaccaccagtctgtagggtttccttggcaccttccatctaagacataagcaaactagttaaggttgtatgcatgaatctgggtgtcttaggtgccaggtagttcggtcaggcttactaaagtagcaagtaaactgcctagtctatgttgagaagggtaaagagaagcatctatagacttcaagaaaatagagctaagtttctgcgggtttcttaatcagcatccgaatgtgaataagggatatgaagctaaggaatggaaaagaataaggaaggcttgtcgggcagagtccayggttcctatgaatgtggtcagagctgctggggagcattggaatggaagtggcattcagggcacctaggaactgggaatcagacatttttctgggtgccagtgcctgctgtgcaaaaaccatctgctgccagcaacttggcagcagtatgt

SEQ ID NO: 607317 - DNA, 539 bp, Homo sapiens
tttgctgtgcgcagccttttcttcaaggcaggttggttcctgtatcttgtcttaatctgttactcaacgaatgtaatctccatttggtcacagcctaatcttttcggcccaggggctggggaaaggaggcaccttccatctacggttggatgggacacgaccttgaggggccatcakggggagatgggaggaggtgggttggaggtgggaggagaatcacctgcggcaatgaaggactcgcgggaggctcgcgggaggcccgcaggagagcagccacctcgggggcgtccggaggccgggcgcgcggtgcagggttgcactgtagctccaccttgtggccgccccaagaggagggccgcatccgtcgtcgccgtgacgtatttgctgaatgccacctgttttccgtgccgcttggggactcgtgtccttgactcaggactccgagggcaaggtccgatttccacaagttttcgctcctctgggctgcgcgcagggtccaatttccggcccagccttcccttggaggagcaagttcccca

SEQ ID NO: 607318 - DNA, 635 bp, Homo sapiens
aactgaacctcaataggggcaaagatagaaagagttctatactcctggtctttaacaacagttcaaagacattgctatctttaggaaataaggctttcaagtagaactttagattttgcagtgtttacttctaaaaaaaggaaaaaaaaaaagctatttctccttttttcctgttcccagtgtccacaagagaaatggcagttcaagttgttcataccttcactcgagctgcagtgccttccattccacggctctgagtctctttccgcttatctgcaacctcccgttgtttctggagagcatccttgagacgcttgttggcagctgctgcctaaataaaattggcacatagtaatgttgaatgaatggtaaaaaaaaaaaatccaatttctagcacattagtaaagataaaaattctatgggtttgagttcctataggaaccaggtttataaacttccatggacataacactggtgaacagctactgctttggtgyctaggggaggaacacacttcaaggaagttctgcagactaaaagtgtctagaaatgtcacatatcaatatcactttgttttttcaggaaaggctcacgtccagttaggaaaaaatccttatttgaacagtaccattttt

SEQ ID NO: 607319 - DNA, 598 bp, Homo sapiens
gtagttagaagttttacctggagagatatttggaagttgccaaaaagataataggtaaattcaaagaaaagtctttggagtagaagacgaagattgcagataaaatcttagagaataatgcctacctttaggatggaggttgaaaagaacttgccaagaaagagttacaaaagaaaaggaggataaccaaaatctgtgctttatctcaggagccaagagaagaaagcatttttagaatactagggagtaaaacaacaccatcagtgtccacagagaaattgagaagaataagctgctatcaggcctttaagtttggtggtgacatagttatggagatatttcatagaagaggttgaggagactgggaaaggtagattggaagggctyacttaatagaagcagtagtggaggaagcagaagcaatggaccgtccaatacgaatagtcatgaaggtaaggaaagagctttactgtttcttcttcccatttaactgatagctcagtagataaaaaaggagaacaagataaacttatttgttgaaaaattactagaagtttgttatattgtttaaattgatttcaacttcagactgtttaat

SEQ ID NO: 607320 - DNA, 550 bp, Homo sapiens
ctgtattctttttgtccttacaatctcggtgctatcatagcacctcagtcggaggggctcaatctatggccataccaacctgaatgcacctgatattggaagctaaacagggtcctgcctggtcagttcttggaagggaggtagaagtgcttaataaatgcttattaaattaattgcatatcattttagtacagcagtcatatttcaaaataagacattgtgggaagttgacaaatagagagtaacagtctgaaaattactgttcactgtaaatttgagaggagaaacaaggtaaattagaataaggaggacaccggtatttaacaatatttcccagtccayactttgcttcttcaagggaaatggtgaaattggaaacaatttgttaataatggagaggacctaaacttatggacgccaccaaaccacaaaggtttatggtgaacagtaaggaccaagtcataggacctaatgggagtgactgtctcaatgtgaaatgtaactaactgctgaaacatctatgtttaatacctgaaaaaaaaaattgcat

SEQ ID NO: 607321 - DNA, 492 bp, Homo sapiens
tcggctcactgcaacctctgcctcccaggttcaagtgatcctcccacctcagccttctgtatagctgggactacaggtgtgtgccaccaggcctggctaattttttgtatttttggtagagactgggtttcgccatgttgcccaggctggtatctaactcctgagctgagatgattcacctgccttggcctcccaaagtgctgggattacaggcttgagccactgcgcctggccttgttcaattcttgagtggcaaaatyaacaggtttgttcagaagatgtttacaaaaatgtcaaaaagttattgtaacagttttctttggctacaaaatagatgcttagaagataattaataactcagtggcaagtttttttttttaatttttcatgatgtgattacacctaggtctattgtcagttaactatttaaaagtgaataaaggaagatgaatcctaggacaacattgtcaaacttcagcaaactgccatcct

SEQ ID NO: 607322 - DNA, 501 bp, Homo sapiens
cttctcagaaacaatccagataagaagacacactttgaaatattgaaagaaaaccaaaattgacaaagtagaattattcaccaaacaaaaaaaaaattcctctcaaaagcaaaggtaaaatgaattcatctgcagcagatccacattacatgaaatgttgaagtatgtctttcagacagaaggaaaataaaaccagatggaaatataaatatatacaagagaatctagagtactggaaagattaacactagggcaggtatataagattttttcttattatttaaatttctatcaaagataatcatctaattaagcaaaaataatataaacgtagcataataaacataaaatactatacaattatagcataaagatggaggagggagaaacagaagtctactattgtagcattcttatacttatgtatgtggagtggtacatgattacttaaagatagacttcartaagttaaagatgcatacaataaatcctaaagcaact

SEQ ID NO: 607323 - DNA, 527 bp, Homo sapiens
ggaaaaagaacagattttagaatcagacctaagggcaaatcctgacttgagtacttatcaatgatcatggaaaacttacccaatttctctgggcctcaattccttatttgggaaatgggacactatgacctaccacacagggttgtattctgtgaaaatcagaagcagaggttgtttttctgatagtaaacaatgcagaaagagcaatgataatattaaacatgtatataatattgatatggtttggctctgtgtccycacccaaatctcatcacgaattgtaatctccatgtgtcaaaggagggaccgggtgggaggtgattggatcatggaggcggtttcccccacgccgttctaatgacagtgagggagttctcacgagatctgatggatttaaaagtggcaattccccctgcactctctctctctctcctgacaccctgtgaaaaaggtgcctgcttcccctttactttctgccatgattgtaaatttcctgaggcctccccagccatggggaagtgtgagtc

SEQ ID NO: 607324 - DNA, 557 bp, Homo sapiens
gattgtaaatttcctgaggcctccccagccatggggaagtgtgagtctattaaacctcttttctttgtaaattaccagtctcaggtagttctttatagcagtgtgaaaatgaactaatacaaatattaacaatgtgtcatgaagcattctataatgaaattgaggcacagagagataaagtgatttgcccaaggtcacacagataataagtgtkgaatctagatttagacccaggcagtttggctgcataatctgtggtgctaatcatcacactctaaaatgaatattttctaagtccaggaatctattatactgtagccctcatgaatataaaaaacagaaaaacatttgaatgaacctgaatgagaagagttgattgtaagcctaacagagactcttcaggccatggaagttgggttcccagtcatgactcaaagaagcagaactggacagtaggtctgaattccaggcaatggctggagaacttaacagaaagagctctggcttttctttagggccaaccagccatggaataaccttgctctagggactccacc

SEQ ID NO: 607325 - DNA, 544 bp, Homo sapiens
gaatgcagtggtgtgatcttggcttcatttcttcttatcactgaataatattccattgtctggatgaactatagttcatttattcattcccctattgctggacatcttggttgccaccaaattttagcgattrtggataaaggtgctagaaacatgtgcgcacacacttgtgtgaatatcagttttcaactcacttaggtaaataggagtgcaactgcaggatcatatggaaaaagtgtgtttagctgtgtaagaaactgccaaactgtcttctaaagtggctgtttcattttgctttccctccaagaataaatgagaattcttattgctccccatccttgtcattgtttggtattgtcagtgtcttctatttaagcatttgaataggtaggtagtggtatcagttttaatttgctatttcctaatgacatatgacattgagcaattttttcatatgcttattagccaactgtagatcttctttggtgaggtgtgtgtacagatcttttgtgaactttttaattgggctgttccttattgttgt

SEQ ID NO: 607326 - DNA, 544 bp, Homo sapiens
gaatgcagtggtgtgatcttggcttcatttcttcttatcactgaataatattccattgtctggatgaactatagttcatttattcattcccctattgctggacatcttggttgccaccaaattttagcgattatggataaaggtgctagaaacatgtgcgcacacacttgtgtgaatatcagttttcaactcacttaggtaaataggagtgcaaytgcaggatcatatggaaaaagtgtgtttagctgtgtaagaaactgccaaactgtcttctaaagtggctgtttcattttgctttccctccaagaataaatgagaattcttattgctccccatccttgtcattgtttggtattgtcagtgtcttctatttaagcatttgaataggtaggtagtggtatcagttttaatttgctatttcctaatgacatatgacattgagcaattttttcatatgcttattagccaactgtagatcttctttggtgaggtgtgtgtacagatcttttgtgaactttttaattgggctgttccttattgttgt

SEQ ID NO: 607327 - DNA, 461 bp, Homo sapiens
gcactggattttatagactggcttcaggaggcagtatcagatttacacagggcccacagattggctggagcttccccragctccctccttcaccacttacatcacgtaacctatgttgctgtgcatagttatttattaacctgcctacgcagcccaccaagttgcatatgctttagcagaattaagctttctatatcttatgtgccctgcagtgccctgaagatgttgatttcaataaaggtttgctgaattaacaaacacatgcgtactatggacagacactacttgggaggctgaggcaggaggatcgctggactccaggagttcaaggctgcagtgagctatgatcatacccctgcactccagcctgagtgacagagcaagattctgtctcttaaaaaaaaaaggacagacaatgcataacccaaaagaatgaaaagaaagatctctaatgggaattc

SEQ ID NO: 607328 - DNA, 532 bp, Homo sapiens
tttctactttcctatctcagattcacagtaagcacgaatctgatttatgcatcagattattaaactattgattacttcatcatcattctccagtttgtaaacatgtatttggtttctagttattgttcatgattacaggtaacccagagctaatataatgcatctttgtacaagtagtacttatctccttttaaattgttttcatataaaaacttcgctgcaatgggtttcccaaaataaagctaaaaatattttatctgtatttatttattttttttttgagaaagagtctcgctgtgtcacccaggctgaagtgcaatggcacaatcctagctcatggcaacctccatctctcaggttcaagcgattctcctgcctcagcctcctgagtacctgagactacaggcatgcaccattayacgcagctaatttttgtatttttactagagacagagtttcactatgttggcctggctggtctcgaattcctggcctcaaatgatccacctgcctcagtctcccagtgctggga

SEQ ID NO: 607329 - DNA, 538 bp, Homo sapiens
ccaaataaattaagacatctcatggggagttgtaatccccgtcaatatgacagtgattaaaaaaatggctgctactaaccacatgcagcrtggtttaaatctgactcatctgctaggcatcccatcctaatcaaaagctattcaggggctggaaggcaaccatcaagctccagcagcaacgtgccagggcccacagctgcacagctgaaaatgtcacgccaggggctggctgcctcccttgccctgaacattgcatcccgcctgctgagtgggggctggcggagcggcccagccagctgtgtctgatgtcgcagttgtccatgggtttcaccttcctttttccttgacccatggagtttggggaaaaaaaaaaaaaaaaaaaaagctgcaaagtcaaacaatgaagagaccagagaattgaagtccatttccttcccaaaccaaataatgtcctctcctgcagggattctagcaaaccttctggttcatttttctcaaggtgtgcaattgaaccttcttttctctatctaaggcatta

SEQ ID NO: 607330 - DNA, 584 bp, Homo sapiens
gtgtgaccccaagccagggctgaactgatctttaaatgttataatcacctggaagaacttgatgatctgtaagccactgagacatataagagaactaaaaacttctgagaatgtttttttccattttgctaaatatttttaaaataattttattatttatgaattcaatactcttgggtcaataatattsactgtttggcatgaattatcatttaaacacataaataacttgtaccttagtttggtttgcctggcattgcatagttgttattcacagaaaaactgagaaaaaattataatgcatgcccactcaaatgtaaaacttctgtaacaaggagaggagggagaagccatcatacagatatgtgagtagcaacatctatgtgcttccatgttacaaaaagaaagattattaaaattgctagaaagtatagttttacatttagctatgcagctcttcgatttattaaaacataaattaaatcatcattctcagtaaactatcgcaagaacaaaaaaccaaacaccacatattctcactcataggtgggaattgaacaatgagaacacatggacacaggaag

SEQ ID NO: 607331 - DNA, 527 bp, Homo sapiens
gagaacagcatgggaaagacctgcccccatgattcaattacctcccactgggtccctcccacaacatctgggaattcaaggtgagatttgggtgaagacataaccaaaccataacaagcatcaagaccaaacactgcctagcaaggtttaatataaaagagagttcaggggaaggaacaaacctcaggagttatttccagaagtctagcttctatgactatgagcaaattcatcactgacttgctatgttttaaagcatgtttatattttaaatatggacaatattgactgggattggtggctcatgcctgcaatctcagcactttgagaggccaaggcagggggatcacttgagcctgggagttcaagataagcctggtcaacatagtgagaccctgtctataccaaaaataaaattagccakatgtggtggtgcacagttggtcccagctacttgggggcctgaggtgggagatcactggtttgtgagttccaggctgcagtgagctgtaatcgtgccattgcac

SEQ ID NO: 607332 - DNA, 533 bp, Homo sapiens
aaatttttcgtaagaacttctaacatattatctgttacgaacacaggcctgaatctggggcaggttgtttggagggagctgggggaggaagaactataaagaaatgctcagaagccattttcactaaattttgagactcactggaactgagaaattctgctttaaagccttctaacagtgttaaacaaatgggaagctttgcaccctgagagatcaagacaatcactagcagagaaatggccatgcctacctaagtaaggaaggtagagaatactgtgttgggcagagcagtagagtggtgaagtgtctagctgctactgccatgctttgtgagcaacaatggactcctccatgtgcataacacttttaatcacttcrgcactgatcttctaagactaaggacattcccctgcataagcacactaccattgtcaaagttgagaaaaattataataattccataatttcatctcatattttatctataatcagattttcccacttctctcaaaatgtctttcatagtggtttta

SEQ ID NO: 607333 - DNA, 551 bp, Homo sapiens
ggagtcctttttttttctttttttttttttcctttttaacctttttggtggccctctggtgaatatgagggaattgtgaatagagaaacagggaggagaaatagttatttttcaacttaatctttcagtaaatgtttatacccttatgatctaccccactcctcaraatattacttgtatatatggtgtttcctatttcctatgctcttcaaatgcgagagataatctagtcggatcctggtacccaagagcaagcaataaacttgagacaagagttgaaatttcctttcatttatagaactcacgcctgtaatcccaacactttgggaggctgaggtgggcagatcacttgaagtcaggagcttgataacagcctggccaacatcatgaaaccccatctctactaaaagcacaaaaataagccaggcatggtggcacgtgcccgtaatcccagctaatcaggagctgaagcagaagaatcgtttaatcgagaggtaaaggttccagtgagccaagatcacaccactgcactccagcctgggcaacagagc

SEQ ID NO: 607334 - DNA, 599 bp, Homo sapiens
tatatatcatatatagatgatacctgacattttgttctcttttcctgcactaggtatcccccatatccatgatgtctgaaactcagtctctgaggtcttcaatgttgtctaaatgtatttagcgctgcctccagctgacatatcactaatttaccactgtaacttgctggatactgctgcctttgccraacattgtgcccatgtcttatggataccacaatctcctgttgcattctggccagtgaacctgagtccccgaagacctaaagttgctctgggttctctgaaattcataatatgtagaagttactctgtgttgcatgaaaagtggacagctgtctggaagtgcctcattccctgattcagggatgtaatttttcacacaaatactgaagaggtactgctccaaaggctcccaagactttagtgagaagttctttgtttttctctacagttctttcctgcctatctccctataagagtcacagggtattttaagggggaatgtccagtacatgaatcaagtgatgggcacaatgatattctcagaagtatcactcgcaacaattattaaagttttgttaatagttcaactttgt

SEQ ID NO: 607335 - DNA, 581 bp, Homo sapiens
agcataaataaataatcacaacttctggaaatggactccacttaaagaaatgcaaaatgcactggaaagtctcwgcaatagaatccaacaagtagaagaaacaacttcagagctcaaagaagattttcaaattaacgcaatcagacaaagacaaagaaaaaaagaataataataattaaaaaatgaacaaggcctccaagaaatttgggattatgttaaacagccaaacctaagaatatgtggtgttcctgaggaagaagggaaatctaaaagtttggaaatcatatttgatggaataattgaggaaaacttccctggccttgttagagatctagacatccaaatacaagaagcttaaagtacacctgggaaattcattgcaaaaagatcatcacccaggtacacagtcatcaagttatctaaagtcgagatgacggaaagaatcttaagagctgtgaggcaaaagcatcaggtaatttataaaggaaaacctatcagattacagcggacttcacagcaaaaaccctacaagctagaagggattggggtcctatctttagcctcctgaaacaaaacaattg

SEQ ID NO: 607336 - DNA, 560 bp, Homo sapiens
aagcactgggtcaaaaacaaaatcaagatggaaattaattcttaaaactgaattacaataatgacacaacctatcaaaacctctgggatacagctaaggcggtgctaagaggaaagttcacagccctaaatgcctacatcaaagtctgaaagagcacaaacagacaatcccaagtcacacttcaaggaactagagaaacaagaacaagccaaacccaaacccaaacccagcagaagaaaagaaataaccaagatcagagaagaactaaatgaaaatgaaacaaaataaatacaaaagataaatgaaacaaaactggttctttgaaaagataaataaaatttatagactgttagcaagactaaccaagaaaagaagagagaaagtccaaataacctcactgagtaaagaaacaggagatattacaactgacaccactgaaatacgaaagatcattcaaggctmctatgaacacctttatgcacataaactagaaaacctagaagagatggaaaaattcctagaaaaatacaacactcctagcttaaatcagggagaactag

SEQ ID NO: 607337 - DNA, 540 bp, Homo sapiens
ccccatcaaaataccaccatcattcttcacagagttagaaaaaacaattcaaaattcatatggaactaaaaaagagcccacgtagccaaagcaagactaagcaaaataaacaaatttggagacatcacactacctgatttcaaactatactataaggccatagtcaccaaaacagcatggtactggtataaaaataggcacatagaccaatggaacagaatagagaacccagaaataaacccaaatacttacagccaactgatcttcaacaaagcaaacaaaaacaaagtggagaaaggacatccttttcaacaaatggtgctgggataattggcaagccacatgtagaagaatgaaactggatcctcatctctcaccttatacaaaaatcaacttaagatagattaaggacttaaacctaagacctgaaactatraaaactctagaagataacattggaaaaacctttctagacattggcttatgcaaggatttcatgaccaagaacccaaaagcatatgcaataaaaacaaagaaata

SEQ ID NO: 607338 - DNA, 646 bp, Homo sapiens
tgataggaaacgtataactattagctaatattaaatacaaactcctaggagctcagctgataaactcaggagaaatgtggtggtccagccagactttcaggagagaaagaattggagaaggagaggaacacacacacaacaaaagagagacaaggaaaacggagaactgggccttaactccaagatgcatttgaattggatgcatttgcgtttctgaaattgcttgggtgggagccatagagacaaactccggcagttaagaaaaaactgttgagctgccagctgttgagggggttaattaggacacagaaccaaaccaaaagtaacaatcaagcctttcctcatatactgtgatagagcaagcaagcgaggagccaaaaagaggaaggcaccactcctcatggtttccccctagaaaggcactgggcaatgatggggtggcatccaatcagatgcagtgcagacaggggcaactgccttacagctcaggagcccctaacaaaaaggctccttgaattagttmgttttaacactgctataaagacacacctgagactggataatttgttacttttccaattactttcaatggcaaacatcacaattactttggtaccaacctaatataaagaaaagaggtttaatt

SEQ ID NO: 607339 - DNA, 634 bp, Homo sapiens
actcacactgtacgttagccccagtaaacagtgttgacacagagatttggttcctaggtcaggacagtaacattcaagtggraagattagcgccgatattactaacctgcattcagggtcctgttgaggagagaccacagagacaaaggtgctgggaaatgttgcaatttttatctcaaataaggctgaatttacagtagttttaagtatttcacttttaattaaaaggaagttaactgattacatttaaaccattttaataaaattagagtgatgttgatgtctaactgtatcttggttttaagcaaaataagtaagttgactgtcaaattaataatggaaattaatagaaactaaaccataatcagccaacagtacttaactttgattcactatttataaactccaatttgcatataaaatctttactgccagattgccaataaactgagctagtcccttggtagttaaaatcagagcaaggattgcgttgctatttattttttgtccagtgggtggcagcataactcaactggttatcttgtgtacggtcatttgaaattttttatgtgttttaaaggttttaatttctaaatctcttgtactacaaagtgtattctaagaaaactttcct

SEQ ID NO: 607340 - DNA, 634 bp, Homo sapiens
actcacactgtacgttagccccagtaaacagtgttgacacagagatttggttcctaggtcaggacagtaacattcaagtgggargattagcgccgatattactaacctgcattcagggtcctgttgaggagagaccacagagacaaaggtgctgggaaatgttgcaatttttatctcaaataaggctgaatttacagtagttttaagtatttcacttttaattaaaaggaagttaactgattacatttaaaccattttaataaaattagagtgatgttgatgtctaactgtatcttggttttaagcaaaataagtaagttgactgtcaaattaataatggaaattaatagaaactaaaccataatcagccaacagtacttaactttgattcactatttataaactccaatttgcatataaaatctttactgccagattgccaataaactgagctagtcccttggtagttaaaatcagagcaaggattgcgttgctatttattttttgtccagtgggtggcagcataactcaactggttatcttgtgtacggtcatttgaaattttttatgtgttttaaaggttttaatttctaaatctcttgtactacaaagtgtattctaagaaaactttcct

SEQ ID NO: 607341 - DNA, 634 bp, Homo sapiens
actcacactgtacgttagccccagtaaacagtgttgacacagagatttggttcctaggtcaggacagtaacattcaagtgggaagattagcgccgatattactaacctgcattcagggtcctgttgaggagagaccacagagacaaaggtgctgggaaatgttgcaatttttatctcaaataaggctgaatttacagtagttttaagtatttcacttttaattaaaaggaagttaactgattacatttaaaccattttaataaaattagagtgatgttgatgtctaactgtatcttggttttaagcaaaataagtaagttgactgtcaaattaataatggaaattaatagaaactaaaccataatcagccaacagtacttaactttgattcactatttataaactccaatttgcatataaaatctttactgccagattgccaataaactgagctagtcccttggtagttaaaatcagagcaaggattgcgttgctatttattttttgtccagtgggtggcagcataactcaactggttatcttgtgtayggtcatttgaaattttttatgtgttttaaaggttttaatttctaaatctcttgtactacaaagtgtattctaagaaaactttcct

SEQ ID NO: 607342 - DNA, 556 bp, Homo sapiens
ccattccgtatcttttaagtgcatttaggccatttacattcaatgttagtattgagatgtgagatagtattctattcatcatggtatttgttgcctgaatacctttttttaagaaaactgtttggccaggtgcagtggctcatgcctgtaatcctagcactttgggaggctgaggtgggtggattgcctgagctcaggagttcaagaccaacctgggcaacacggtgaaaccccatttctactaaaatacaaaaagaaattagccaggcatggtggcatgcacctgtagtcccagctacttgggaggctgaggcagaagaattgcttgaacccagggggtggaggctgtggtgagccaagattgcmccactgcactccagactgggtgacagagcgagactctgtctcaaaaaaaaaaaaaaaagtttttattttataggtcctgtgagatttgagcctcaaagaggttttattttgctgtatttcaaggatttgtttcaagatttagagctccttttagcagttcttgtagtgctggcttggtagtgttgaattc

SEQ ID NO: 607343 - DNA, 543 bp, Homo sapiens
agctgacctccacccacctcggcctccccaggcgtgagccagcacgccgtcccattctactctcttgaataaggcgcttcactgtctggaggctgcagggtgcggtggagagtctcaggagacttgctgctgccttattctgatgtgcaggaagaatgtgactcagtactcagtgtcttatgaaccaaatgatccacttcctaagccgttttgcaaaagaagccttcgagtgatcttcaccttggagagacccagaactcataccacgcttgcacggcaggctagggatcagactgctctgtccatatacggggacaggcagatgtcatgatatggtcctcggtgctctttctggactgctcagcaacaggccagctgggattggggtgccttcagcccagcagggactgggggctgggggcatggatcccaggcctactgatgctggctgctgaamttcccagcactcccttagggagggggcatccaggctcagatgactcccaccccagctcctcatgttccctgctgatgagtgcactc

SEQ ID NO: 607344 - DNA, 373 bp, Homo sapiens
catttagttattgtgtttccttcctctcttccaatctgtgacactttgacagtcttttaggacctcgacacttagtgattattggttagttattttgttgtcccacattttcttatgattagagtcagggtgtgcatttttggcatgagtactgcagaagtgatgttgtgccatcttggtacgttgtacggaggagggttcatggtattgtgtcccattactgctgttgttaaccttgtcacttgattacgatggttttatccacggtaaagttactatttttctctttacaattaatacraatcttggggaagatagtttgaggctgtgcaaacatccagtttctccttaaacttttgcctcctaattttag

SEQ ID NO: 607345 - DNA, 606 bp, Homo sapiens
aattaatctatttaacatattaaaatagtgagcattcaaaccatcactttatagatgtcacatattatttttaaagtttttcaaacttaagatattgagaatttaaataaatatactatgtaaataataggagaggtttagcatacatcttgcagttagtacccaagtgactgatgcttggtaaatactgtgctaagctaaactgcatccttctaaatatacctattgctgtatctcattcctaagctaagcagtcccccccccagtacccaatggttgcctcatgcatccatttaagaaagacagcagaccaaaactggagtcactaaatgctaaggattcatgctaccaaactgaaacctgggttgcttacttgtaagatcttctgagaaatcaggagagggatgaaagccaaattacattacaccaagatttcgtctacacctctataaggaaagtaaycttgaaatgactgatctgctatttgttcattcttcctgctttcctccactttttcctgcctgtcaaactcacccactcggtcctcattggagcacctttctatcttgtagactgcctggtgcatgcaatgctattaaaaaccaa

SEQ ID NO: 607346 - DNA, 581 bp, Homo sapiens
ccaggctggtgaaacagaaacagaggtctatgcacatgactccaggctatttccaaaaacatggaagagctaaaaatgacataastaacaaaattaaggggacaatgtaggaagtggaaatgacttaaacttctctttcatactgggacatcaaatagaaatggtcgaaaattgataaatccagaaacaaagtaaaagcattttatttagaattatggtggtaacaacaagatctgaaaacacaaactgttaaaattgttctctcccgagagcgggactaagggcaggaaactttacttttttcatttaatatcagtctatactgctttaatatttttactttgtgtgtgtattacttttataattttaaaaaatgtggggaaaaagctatgtacacagacctcaatatccttgtttcctgtaaaaatgtcttcacttatttatgatttagtattatgccactggactttatagagggtcaatataaaaaatggccatctgaagagtgtatctatattgtttgaaaactgcaataaaagacattcatgtccattatgtcaccaaatgtcccttatgtgagg

SEQ ID NO: 607347 - DNA, 648 bp, Homo sapiens
aaagaagtactgcaggattggagctggaagacagagctgcttggcattcctgtattttatcttccacctctgcttgcaaattggccagttcttacttaacctcgtttatttcaaagttcctcgctaggggcagcagtgagcagccaacataccgcatatttgcttttttttttcttctagagctacacaggcttggtaagtgcaggatccgtcttcccagttaatacaggcagcatttttttagatgtctttactgcgtagcgggaatgactrgctttctaccctgcaccatctctttcctcactactcactgcctggccgtgaagccagtaccacttaggtttctatcacagccgcacccctcctccaggtaccaattgttatattactagggtgcaggttaccccagtaatatagtaataatatggtatagtaatgtagtatagtaatagtatagtacagtaatatagcaggttagggtgcttttgtaaccaagagccttcaaagcacgctggccctaacaagatggaagtttgattctcctgcacagaacagcatggacgtgagcagtccagtggggtggagcccagggtcactaaatataggcgtagggctggtggtacccagatcaggggatatgcagggacc

SEQ ID NO: 607348 - DNA, 536 bp, Homo sapiens
cctggctaatttttgtatttttagtagaaacaggatttcatcatgctggccaggctggtcttgaactcctggtctcaagtgatccacccacctcagcctcccaraatgctggggttataggtgtgagcctctgcaccctgccagaagtgtacttaatacaacaattttggaaaactgcttgcagtatatcctaaagttgaacggtgaaagaagtaaggttgaatgtggatacaaataagtttgcagctgggtgggactggaagttaaaagggttctgattaatgatcttttcatttttgcatattagttttgtctgatcaatttactggattttttttaataactcgaaaagtttttcagttaactcttttgggttttctggataaagactcatattatctacagataagtaaaacctagtattctactagccagtatttatactcttaattctttttcttgccttactgcattggcaaggatgtgaaaataatcttgcactgaagcattattaatgagtattttatgtgacacct

SEQ ID NO: 607349 - DNA, 536 bp, Homo sapiens
cctggctaatttttgtatttttagtagaaacaggatttcatcatgctggccaggctggtcttgaactcctggtctcaagtgatccacccacctcagcctcccaaaatgctggggttataggtgtgagcctctgcaccctgccagaagtgtacttaatacaacaattttggaaaactgcttgcagtatatcctaaagttgaacggtgaaagaagtaaggttgaatgtggatacaaataagtttgcagctgggtgggactggaagttaaaagggttctgattaatgatcttttcatttttgcatattagttttgtctgatcaatttactggattttttttaataactcgaaaagtttttcagttaactcttttggrttttctggataaagactcatattatctacagataagtaaaacctagtattctactagccagtatttatactcttaattctttttcttgccttactgcattggcaaggatgtgaaaataatcttgcactgaagcattattaatgagtattttatgtgacacct

SEQ ID NO: 607350 - DNA, 457 bp, Homo sapiens
catctgaaccttcattgcttcgctcctagactgtacaagtgggatcttaaaatttaacctctgtctctttcaattccaccttaagctgcacttccagattgcttamatatcactttgttagtgtcactcttgtacccccaaactttaagggctctctgttaccaatcacttatggactaaactccttacctgatacacagagcctttcagagtccggccccaacatatttctcctcactgatctcttgctctccaagtgcacctatctgacccggccagtctatgccccagggctttccccaaacacaccctgctcctgacagtctccatgtggggctcatgctagtccatgcccaggaatgtctcctttcctcctctctgcctctctaagttctacccagctttccaagcttggctcaagtcccaagttccacgatctcttctctacctatgccct

SEQ ID NO: 607351 - DNA, 360 bp, Homo sapiens
actccataatggacagtgtgagaaagccacctctcataatcccctagtccagccctaggaatctrccctcttcttgcctgcccggaattacccccaccctttcccccttggttcctgggcccatttggttcagcccaaattcttcagcttggtcttcacagccttctcacttcgccgccccagaccccaaggatatcctcacccaaataggcaaatgcccacccatcctgagccttcacacggctcctacccagatccccccatcctcatgtattctccacattgcccctctcgaaggaccccagtccaactgcccccccggcatcaagagctgctcctctctatggttctccagtcaga

SEQ ID NO: 607352 - DNA, 623 bp, Homo sapiens
aagcttgagttcttttttttttttttttgagacggagtcttgctctgtcacccaggctggagtacagtggcgcgatctcggctcactgcaagctccacctcccaggttcacgccattctcctgccgcagcctctcgagtagctgggactacagatgcctgccactaccccagctaatttttcttttttgtattttttagtagagttggagtttcaccgtgttagccagaatggtctcgacctcctgacctcatgatcygcccacctcagcctcccaaagtgctgggattacaggcatgagccaccgcgcctggccttattttttattttattttttatttttttgagacaaagtctcactctgctacccaggctggagtgcattggcacgattttggctcactgcaacttccacctcctgggttcaagtaattctcctgcctcagtctcccaagtagctgcgattacaggtgcccactaccacgcctggctaatttttttatatttctagtagagatggggtttcaccatgttggccaggctggtctcaaactcctgacctcaggtgatctgcccgcctcagcctcccaaagtgttggggttataggcgtgagccaccacgcc

SEQ ID NO: 607353 - DNA, 569 bp, Homo sapiens
cgcctgtcgctcgggacccacctggtggggaccgcagcggctgaactcgggtggccgctgggactcagaggtcatggcgagcacggtggtgaagtacctgaggtaggcacgggtctcgggtggcctgctctgccccggggcggggcctgggacggccgggccacctgcgcgacagagaacacgaggggcgggactcaggccgcgggttttcctcagccaggaggaggcccaggccgtggaccaggagctatttaacgaataccagttcagcgtggaccaacttatggaactggccgggctgagctgtgctacagccatcgccaaggtcagtrgcacaactctcgacctttgggagcagccagggaggagtcactgtcccagccccctggcctaggcacaaaggggtgggagagacagctgggccaatatggtctattaccgcctgaaaccccgccgaaccacccttgactctgccttcaggcatatccccccacgtccatgtccaggagcccccctactgtcctggtcatctgtggcccggggaataatggaggagatggtctggtctg

SEQ ID NO: 607354 - DNA, 569 bp, Homo sapiens
cgcctgtcgctcgggacccacctggtggggaccgcagcggctgaactcgggtggccgctgggactcagaggtcatggcgagcacggtggtgaagtacctgaggtaggcacgggtctcgggtggcctgctctgccccggggcggggcctgggacggccgggccacctgcgcgacagagaacacgaggggcgggactcaggccgcgggttttcctcagccaggaggaggcccaggccgtggaccaggagctatttaacgaataccagttcagcgtggaccaacttatggaactggccgggctgagctgtgctacagccatcgccaaggtcagtggcacaactctcgacctttgggagcagccagggaggagtcactgtcccagccccctggcctaggcacaaaggggtgggagagacagctgggccaatatggtctattaccgcctgaaaccccgccgaaccacccttractctgccttcaggcatatccccccacgtccatgtccaggagcccccctactgtcctggtcatctgtggcccggggaataatggaggagatggtctggtctg

SEQ ID NO: 607355 - DNA, 589 bp, Homo sapiens
acccatcagggcagccgagagccagggcgcgaagccacaccatgcaccacagggaggctctgctccatgcgactactcacggccagtctataactctgcatcattttatcaaactcctcgtctatctttttatatttctcttccgtctggggggtcagggcaaacacctcgtccacctcagggctctcacattccctgtgcttcttgtgcagcgcctggggggaaggggccggaagggggggccaacagagacagagtgagtggggctcaccccatagcgccggaagagcccgtcgagctcctcgctggcgcgtcggtacttgtcctccagcagggggctctgttccagcgagtcctccccgtcgggctcggggctgtcgcagccrttgaagcccttcttcctcagggtctgtaaccgcaccactgccatcagctgggtgagagtccttcccgcccgcctcgctggagttccttccagcccctccctaagggccccctactcttccccgacctccttcttcagggttcccagcatctccctggcccctccccactgacagtgcctcctggggcatcgtgtgaagatctg

SEQ ID NO: 607356 - DNA, 584 bp, Homo sapiens
caggggcccttggctatcagaagccctggctgaggagaggtgggggcggttgggacggttagtgtgtcaccttccacctccccaacacaacttccctctggggtctcaggagacagaagtgaaagtggcagctggggccttgggggcgggtcagcttgagagccgttggaatgagcataatgccaccagtgctgggtctgggctgcctgccattgcagcgggtgggctaatggttagatcaggggagggacttcccatggaaataagtgcatggggtaatgaggagtgtgggcccctggccaaaggaagagcaggctgaagagataaaaatggagagaggcaggcagcagacagtctcagaagggcattctcttcctgggcagtgttygtccccttttttaaagcagcaagatcctttcttctcacccacagcactgagacagggctgctctggctgaagcagatgaagggggtctgagccctgattgctgggacatgagagctaagagagaggggaaagagtccaaggcctgggccctcagactggacagcaccaattatgaggaaaggggaggtggaaaaca

SEQ ID NO: 607357 - DNA, 485 bp, Homo sapiens
gagtttttgaggaataaggacaagcacaccaaacaaaggaatacagacaaattcaacttgggcatggtatgagcctcttaatactgagaaggataaatggggttcgtgacagagaaaagtatgactatgtttggacyaattcagagacgcctgggtgagggtttttggtttggtctgctaggatatgagaaaccattgttgatctttaaacacatgagtcaaattatttgtatagtatctggccaagttcagcctattctctctttcattatggttggaatgattaccaaatagtttatttttaacagaaaaaaatgcagataacatttcttagtagaatctgtcctgtgctataaatcattgaaaattctcatttctataaataaagaacatatatacataattgaagcatggtttggaaataagcattgcttcatttgctggtgatatggatttttatcatgtataaaaatactggctttgtt

SEQ ID NO: 607358 - DNA, 609 bp, Homo sapiens
gcatcctttgctcttataatatcctttgctcttataagcttataccaactcataaacaacataaatttatttctcatagtcctgaattacaaaaaaaaatcacccaacccccagtgctaaccttagtgtccagtggcacttataaggtgctaaatgattacttgttgaactgwttgttttattgagatttcaaccctttgacagtatatactaatgaggtatccttctcacagattctcccagaaggataaagcaataagaagcttgaacctagagctatccctctttattaagggctttttaaaaattggaattctatctgtactataaatttcattttattactgactcacaagattgttctataaacctctggctagaccgattttatatgattttgtaaaaatgtcatctcttctatttaaagaatataaatgcatagaattatacacatagtgttacatagacacacacactagttttctattgttgcataacaaattaccccaaacttacaacagtaaataatacagattattagctatagtttccatgggtcaggtatccagcatattgtagctgggccctctgttcaggatctcaaaggtt

SEQ ID NO: 607359 - DNA, 583 bp, Homo sapiens
tctccttcctccagttccaataacatgattctcacttcgttctgagtcttccccaacagtattctaaaagcccagatttctaattaaagtctgttcatgatgatttaggctttctccaaggaaatttaggtttgctctataatgctcttcacctccttctaagctctcaccagttgtatctttaatatccatatttctactaacagtctgtttgagacaatttagcctttctctatcatgttcctcaaaattcttctagcctccagctactgcctaatcccaaaaccatttccaccttttaggtattaattacagcagtatcaactttcagtatcaaaatctgcattagtctctattgctgtgtaactgtcataagcttagcagctgtaaacaatacatatttattatcttacatttttcatgggtcaggagtttggcacatgttaactgggtcctctgcttagggtcagtcacaaaggctgaaatccagwtgttggccaagctggaggtactgtataggatttgcttccaagttcagtcaggctgttgggcagaatacagttctttttgtttgtaggactga

SEQ ID NO: 607360 - DNA, 481 bp, Homo sapiens
cagttacaagaatcaacagtgcctacatgaaattaattatgtttaaattatagttttctgcaaaaaaatattgtgatcaggattggtatcaaaggtaggcaaagcaaatctttaaacttgagttttcctgaagattcatagcaggccttcaagttacctatgaacgtaagatggcttgaatcggtcactgcaggggaattgtacaacgatctctgacttgcttattggatcttccttgtctgaaataaagtggttttaaaaggctttggaasagcctcttattttttttttaatacaaagcatttagaacagcttatacaggcaaagaaacacattttgattgttttagaggggttattttcattttctccatcatttgcacttcttagtgaaatttcatgtgaagctgcaaaatcacccaggaaaatccaaatagcagcagatttggaaacgtgcactcaaatagggttgtggcaagtgg

SEQ ID NO: 607361 - DNA, 528 bp, Homo sapiens
ctaaaatgagtacattcataacatcttttttmataatattattatacaaatttagccagatattcatgtaaattgtctggctcatgttaaaaaatgatagctattattatcggctgttacgcaggtgccaaaacttgtagcagaaattgctattatttgacaacaccaaaaagaaaaggtctggccattattttaatgctttaccaggatttgtattccttggaatgactgacacatacatatttgttgagtaaacaaataaattaatgtctggatataatcagtttttaaaccgtttgttcattcggtcactcatttattcagcaaataatcattgagtacctcctatgtgccagatgaacttacatggaagtggaagagacagatattaattaaataaactcaaatgcaaatttaaaactctaactgataagtttctgcaaagtgcatcatgaggacattttaatcagttgagtcggcatgcatatgtcgcatgccttttgtagattttgagccagttgacagatg

SEQ ID NO: 607362 - DNA, 528 bp, Homo sapiens
ctaaaatgagtacattcataacatcttttttcataatattattatacaaatttagccagatattcatgtaaattgtctggctcatgttaaaaaatgatagctattattatcggctgttacgcaggtgccaaaacttgtagcagaaattgctattatttgacaacaccaaaaagaaaaggtctggccattattttaatgctttaccaggatttgtattccttggaatgactgacacatacatatttgttgagtaaacaaataaattaatgtctggatataatcagtttttaaaccgtttgttcattcggtcactcatttattcagcaaataatcattgagtacctcctatgtgccagatgaacttacatggaagtggaagagacagatattaattaaataaactcaaatgcaaatttaaaactctaacygataagtttctgcaaagtgcatcatgaggacattttaatcagttgagtcggcatgcatatgtcgcatgccttttgtagattttgagccagttgacagatg

SEQ ID NO: 607363 - DNA, 620 bp, Homo sapiens
tgtggatggatagaaataactagagagttytaagcggaaagatgacaatcagatttcttttgtgaaatattattctataatcatctctttagaaactcaataattaaaaaccagcaataaatagcaaatgcttctaagcagtctaaatttattatatctatgataaagccacatccccaaatttatgcatttattttactcataaaagaattcccatgtgtgtaatttagtttacattttatttatgcactttcaaaagctttgttatctcctttacatagttttttttgggggctgtcatttcactttcactttttttgtttttgtttattttttgtttttattttgtcggtggtaaaagataaatatacttaacaaatgaatgtattttaactgaaccttgaaagatcatagaaaaggcaaagcataaagagaaagccgactggtcagtattagctacttaagaagacatttagtgtactttagaaatattttcataaaatattaacaaatctttaaaggtttgttattatgacaaccaattacatctgcaggaatttgggacaaactctagtcccacaatatgggagcttttcctttatctgtcatcaaggaagaat

SEQ ID NO: 607364 - DNA, 620 bp, Homo sapiens
tgtggatggatagaaataactagagagttctaagcggaaagatgacaatcagatttcttttgtgaaatattattctataatcatctctttagaaactcaataattaaaaaccagcaataaatagcaaatgcttctaagcagtctaaatttattatatctrtgataaagccacatccccaaatttatgcatttattttactcataaaagaattcccatgtgtgtaatttagtttacattttatttatgcactttcaaaagctttgttatctcctttacatagttttttttgggggctgtcatttcactttcactttttttgtttttgtttattttttgtttttattttgtcggtggtaaaagataaatatacttaacaaatgaatgtattttaactgaaccttgaaagatcatagaaaaggcaaagcataaagagaaagccgactggtcagtattagctacttaagaagacatttagtgtactttagaaatattttcataaaatattaacaaatctttaaaggtttgttattatgacaaccaattacatctgcaggaatttgggacaaactctagtcccacaatatgggagcttttcctttatctgtcatcaaggaagaat

SEQ ID NO: 607365 - DNA, 602 bp, Homo sapiens
aaactggcagttcatttcaggtgaggtgatgatggtgcttagattacagtagagcaatgcatatggaaaaaagattgaaagatttgagatatgttttgtaggtagaaattataggacacatgataggttgatatatatgggatataagaaaatgagttaaagatcatcacctatctattgctaacattgtagcataaaagccaaacagcaaacctcagtgtcacacaagagtaagtttctcgggtggttggctaggtgtatctgcaatatgtcttratttgctttcataactggagtttaccttgctgtctagatactggctgaaataagtgaggttatttggctctgctatacctctcctctccagcaggccagccagggcttattcccctggcaatgacaaatgaaagagcaagtgataacaggagaagccgcttaaggcctaggctcagaactgatctactgtcactttcaccactttctactagccaaaacaagtcatgtggccagcttagactttgagtggggtgaaaatagctttgaccttggtagtcttcagtgagaaggactacagtgtcacactgcagaggtcatgaaaacag

SEQ ID NO: 607366 - DNA, 602 bp, Homo sapiens
aaactggcagttcatttcaggtgaggtgatgatggtgcttagattacagtagagcaatgcatatggaaaaaagattgaaagatttgagatatgttttgtaggtagaaattataggacacatgataggttgatatatatgggatataagaaaatgagttaaagatcatcacctatctattgctaacattgtagcataaaagccaaacagcaaacctcagtgtcacacaagagtaagtttctcgggtggttggctaggtgtatctgcaatatgtcttaatttgctttcataactggagtttaccttgctgtctagatactggctgaaataagtgaggttatttggctctgctatacctctcctctccagcaggccagccagggcttattcccctggcaatgacaaatgaaagagcaagtgataacaggagaagccgcttaaggcctaggctcagaactgatctactgtcactttcaccactttctactagccaaaacaagtcatgtggccagcttagactttgagtggggtgaaaatagctttgaccttggtagtcttcrgtgagaaggactacagtgtcacactgcagaggtcatgaaaacag

SEQ ID NO: 607367 - DNA, 460 bp, Homo sapiens
ctagtgtctcttgttcccttytttctgtacatgagttctcaccatttagctcccacttacaagtggaaacaagtgatattggttttctgtttctgcattagtttgctaaggataatggcttccagctccatccatgttcctgcaaaatacatgatctcattgtctttctggttgcataatatttcatggtgtatatgtaccacattttctgtatccattctgtcactgatgggtttttaggttgatttcatgtctttgctattgtgaatagtgctgcagtgaacactcacattcttgtgtctttatggtagaatgacttatattcctctggatatttacttagtaatgggataaattcccccttttagtaaagacatcagtcatattggatcagcatccatcctaataacctcaatttaacttgattactttataaataacctgttttcaaagaacatag

SEQ ID NO: 607368 - DNA, 530 bp, Homo sapiens
tgaaattaaaacggattccataaagatggtgaggaaatcttatgcagaggaattcttcccattacaaatgattgaaaagggttttgttgttgttgttgttgtcgttactttgtttttgttttctggcttagatggtaaatgtacaaatatctctttaacaatgataggacaacttcacttcctcaagtggtttagcctctgaatcttgtggaaaagaaatgccttttggtgtgacaggagctctgtaaaggtgttcatgttctcagatgatccagagattgctattaaattatcatcatcatcacagaatttatcctctgaggccttttgtttccyggtgcaaaggtaaattgtttcaccttcctgttcctcagtttcttcattgtaatataccaagaataattgtacctacctcaaagaattcttgtaaaaaataaattattaatgtaaagtgctaaaaatagtgtctggcaacaagttctcagtaaattgttagctattattattattattattgtcagttaagaatg

SEQ ID NO: 607369 - DNA, 607 bp, Homo sapiens
acctctgctattctcacccttttgatttccagctgtctgccaggacatacacccccattccccttccctacatctctacaccctttgtctggcaaaatattcakcaagggcatcaccttgtataagaaatggggcctctcccatttactctcaaaagatctgtgcctgcctctaccaccaacttcatcacactatatagatctgtttaggtgttgcctgtcttgctccattagttaaaaagctatttgagagcagggaaggtgtcgttcatttttctagccccatcatttaacatagtacctggcacaaagtaagggtttaagaaatgttaagtgaacatgtgagtatcactgaaattgtttatcagttaattaggagaggaagaagcaggggaagagaaggggaaagagtttttatcttgagttgttaagaaagtttagtaaagagtggatctctgctgggtgtggagaaggaacagcagacaaggggaagacgagatgagatatacatgactttcaggcagtgaggataatgagcctgaggcgctgaagcctcagggccgcatttctcagcagggttgcttttgatgtgtgcctgctttgatccc

SEQ ID NO: 607370 - DNA, 632 bp, Homo sapiens
tagtcattatctttggccaataattttgtgttcttccccttccttctcagcctccaattgcacatgttaatgtttcatgtttttacacagctcactgaggcrcctttcatttttttttgttttgttttctctttatatattgttttagtttctactgatatttttgaattcaccaacctctcttctgctgtatctaattttctgttaatcccattccatgtatttttttcaatttggatactgcatttttctttttttgaattttatttgaatcctttttatgtcttccatttctattactttatttctgatttcttttttatcctagaatattatatttataataactccttggaagtttgcctgttaattccattacctctaccatttctgggtatgttttgattgattcattttttctcctgactctgtgtcatattttttgtttctttgcatgtctagtaatttttgattggatgatcaacattgtgatttttacattgctgaatgctggattttgctgtttcttgagtgggaaactttgttctggcacacagtgctacttgaagaccaatttgaacattttaaggcttgcttttaaatgttagagtaaatccatagcagcttttatt

SEQ ID NO: 607371 - DNA, 632 bp, Homo sapiens
tagatggcaagaccatgagagagggctgcatggaggggaggggctcagaagaagggggatcacctctaggtcaggggagcaccgagattagaggcttctccatgccagaagcacctgtgctgggccctaaaaggctgatgaggaccacrgggcctgagtagcctacttggaaaagctaagggcccaggccaagtgcagtctatctggggctattctgggccctgccctgacttgggaggctcacacagaacattaggttcctggaaagtgttttgatggcagaggtgcagctgactctgcagtgactccaggtcttgcgataccttcacttccttcatttattctatagatatttattcagtatcctctatgtgcctggcactgttctaggtcttgggagtcattaggagcaaaaaagacaaaaatctctactcttgtggagcttacattctaatacaggttctcactagacaagaaacaatgaacaaaaaaggaaattaagactgttagaaagtggtaagtacgccgggtgtggtggctcgtgcctgtaatcccagcactttgggaggctgaggtaggtggatcacttgagatcaggagtttgagaccagcttggccaacagggtgaaacc

SEQ ID NO: 607372 - DNA, 632 bp, Homo sapiens
tagatggcaagaccatgagagagggctgcatggaggggaggggctcagaagaagggggatcacctctaggtcaggggagcaccgagattagaggcttctccatgccagaagcacctgtgctgggccctaaaaggctgatgaggaccacagggcctgagtagcctacttggaaaagctaagggcccaggccaagtgcagtctatctggggctattctgggccctgccctgacttgggaggctcacacagaacattaggttcctggaaagtgttttgatggcagaggtgcagctgactctgcagtgactccaggtcttgcgataccttcacttccttcatttattctatagatatttattcagtatcctctatgtgcctggcactgttctaggtcttgggagtcattaggagcaaaaaagacaaaaatcwctactcttgtggagcttacattctaatacaggttctcactagacaagaaacaatgaacaaaaaaggaaattaagactgttagaaagtggtaagtacgccgggtgtggtggctcgtgcctgtaatcccagcactttgggaggctgaggtaggtggatcacttgagatcaggagtttgagaccagcttggccaacagggtgaaacc

SEQ ID NO: 607373 - DNA, 632 bp, Homo sapiens
tagatggcaagaccatgagagagggctgcatggaggggaggggctcagaagaagggggatcacctctaggtcaggggagcaccgagattagaggcttctccatgccagaagcacctgtgctgggccctaaaaggctgatgaggaccacagggcctgagtagcctacttggaaaagctaagggcccaggccaagtgcagtctatctggggctattctgggccctgccctgacttgggaggctcacacagaacattaggttcctggaaagtgttttgatggcagaggtgcagctgactctgcagtgactccaggtcttgcgataccttcacttccttcatttattctatagatatttattcagtatcctctatgtgcctggcactgttctaggtcttgggagtcattaggagcaaaaaagacaaaaatctctactcttgtggagcttacattctaatacaggttctcactagacaagaaacaatgaacaaaaaaggaaattaagactgttagaaagtggtaagtacgccrggtgtggtggctcgtgcctgtaatcccagcactttgggaggctgaggtaggtggatcacttgagatcaggagtttgagaccagcttggccaacagggtgaaacc

SEQ ID NO: 607374 - DNA, 586 bp, Homo sapiens
ttcttcttctccaactataaaccacattcttggaaagctttctgactactggtctaaggaagctctagcaacatcaacttaaatatttaatataccatgtttagtaagcctcactaattgctggaagagtttacaaaagatatgaaagaggagtcactatatgcattgacaatatatatgttgagtgaacaatatgtaccaaaatgaatagatgagaggtgtacattggggtgtgacttgataatctagcaggtcatgagactagggggcttatggaaaagacagagaaagaacatgcaaacaaattaaaaaacactgagaaacacctaaaacctgtttagaaacagaggggaagaatacatattagattatacttaatttgtattttcccccagatttcagactttaggtgcgctgaccatctccactctgcaaacctacttctaattattcacatatgataatgtgagtctatgcagattgtkctctatagggtggtttcagggaatcatataggcatggttcaatacatagattttgaatgaatgcttgtaattttgtttcatgtctctccgtttccttaatg

SEQ ID NO: 607375 - DNA, 658 bp, Homo sapiens
ctgtccaggtggagactgagcaaagaaagtcttggctgtgccagctcccagagcttcagaagaaagagcagctctctccctgggaaccattagagaattctgttgatgttttctgtgtctgtctgtcccctgggcatgagcttccaccacctgtgcagttgtcactttcctttcactccctgaataaagaatctatgcatatatatttgtgaatggatcttttgtttcttttcaaatatgctttattagcaatattttataatcatttgggtatatttccacttttctttcatccacagacaggatctcacaatttgggacatatcaaagattatttctgtatttttttatttttattttccttaattagtgtttgattgatttgaggaacatattattcaacttctctgaatgtcaatctctttactgcaaagtgagcaaaataacatttacttaacaaacttgtctaaggcataaaattgaattactatctgaaattttaatggcacaatgcctaacacatgattagctgtcatttgatagaggtttattcrcagcaacatatcatcatcgtttccaccattatgattatcatcatcatcatcatcatgatcatcaagatcatcatcatcatcactccccacgacaaccactacca

SEQ ID NO: 607376 - DNA, 630 bp, Homo sapiens
atagaaaataagaagactctctttgctattttttattgattcttaatacctatacacattttggggtacatgtgatattttgttacatggatcaaatgtataatgataaagtcatgatattaggaaatttagggcattcattaccttgagcatttatcatttctttctttgttggaaacattttaattcctctcttctagctattttgaaaaatacaatatgttgttgtaaactgtagtcaccctactctgctatcaaatattaaaacttactcctttttaaaaattttttattatactttaagttctggggtacatgtgcagaacgtgtaggtttgttacataggtatacatgtgccatggttgtttgccgaacmcattaacccattatctatattaggtatttctcttaatgctatccctcccatagcccctcactccccaacaggccccagtgtgtgatattcccctccctgtgtccatgggttctcattgttcaactcccacttatgagtgagaacatgcggtgtttggttttctgttcttgtgttagtttgctgagaacgatggtttccaccttcatccatctccctgcaaaggacacgaactcatcctcttttatggctgcata

SEQ ID NO: 607377 - DNA, 630 bp, Homo sapiens
atagaaaataagaagactctctttgctattttttattgattcttaatacctatacacattttggggtacatgtgatattttgttacatggatcaaatgtataatgataaagtcatgatattaggaaatttagggcattcattaccttgagcatttatcatttctttctttgttggaaacattttaattcctctcttctagctattttgaaaaatacaatatgttgttgtaaactgtagtcaccctactctgctatcaaatattaaaacttactcctttttaaaaattttttattatactttaagttctggggtacatgtgcagaacgtgtaggtttgttacataggtatacatgtgccatggttgtttgccgaacacattaacccattatctatattaggtatttctcttaatgctatccctcccatagcccctcactccccaacaggccccagtgtgtgatattcccctccctgtgtccatgggttctcattgttcaactcccacttatgagtgagaacatgcggtgtttggttttctgttcttgtgttagtttgctgagaaygatggtttccaccttcatccatctccctgcaaaggacacgaactcatcctcttttatggctgcata

SEQ ID NO: 607378 - DNA, 507 bp, Homo sapiens
tttgtatttgctgaggagaattttatatcctatcatgtgatggattttagactatgtgccacgtggcaataagaacaatatgtattctgttgtttttaggtggacagttgtggattattagcaggtaaatttgatccagtgctgtgttttggtagtgagtagcattgttaattttctrtctctttgatgtgtctaatactgtctctgtgatgtttcagtctcccactattattatgtgggagtctaagtatctttgaaggtctctaagaacttgatttataaatctgagttctcctgtgttgggtgcacatatatttaagatagttaggtcttcttgttgatttgattcctttaccattatgaaatgttttagtccttttctgatgtttgttggtttaaagtctcctttgactgaaattaggatggcaacacctgcttttttctgttttttgtttgtttgtttgcttggtagatttttctccatccccttactttgagcctatgtgg

SEQ ID NO: 607379 - DNA, 599 bp, Homo sapiens
gggaatattatcagggttttcttcaagagagattttagaagggatgtgatcaaatgtagagctataacaataaaacaactgctgcttccatccagctccacctttagcgtctgcccaaaaatgctgaaaaaataaaaaagaccattatctgactaactgagcaatggacatgcttgtctcttgtcaacttttcaaagtagaattttaagattccttactcagtaataggtaacatttggagaatactttgaaaagtaaaacaagaaaataggtatcatctgtaatttcaccagccatatataatcacatttaatatattgtttcatatgtttcctatcttttaataaatgttgatgagaatsatgtcatgctttatatgtttttagtacaattccagtgttttaaattatactaaacaaatttccaaaacatccaccttaatgattttcactattctaccatatgaatgttctgtaatttattggattcagcatggaaggacaatggatgcttagcctttcattcagaaataaaagcagaagacagatatgcatggggaattgcagttaccctttctctgagcttatcaagaatatttt

SEQ ID NO: 607380 - DNA, 589 bp, Homo sapiens
gaacatacaaacggatgtgtctttttggtagaataatctattttcttttrtatatatactcagtaatgggattgctgggtgaaatggtagctccattttaagttctttgagaaatctccaaattgctttccacgatggctgaactaatttacattcccatcaactgtgtataaatgttctgttttctccacagccttgccagcaactgctgttttttgactttttaaataatagccattttaactggtgagagagggtatctcattgcggttttgatttacatttctgtggtgattagtgatgttgaacattttttcatgttttttggccactcctatgtcttcttttgagaagtgtctgttcatatcttttgcccacttttcaatgtgattatttggtttttgcttgttatgttgtttaagttccttttagattcaggatattagaccttagtcagatgatttacagatatcttctcccattgagtaagttgtctgtttgctctgttgatagttccttttgctatgaagaggctctttagtttaactaagtcccacttgtcaatttttacttttgttgctattcttgt

SEQ ID NO: 607381 - DNA, 365 bp, Homo sapiens
gtgttttttaatttgtttgcatgttcttcctttgtcttttccataaaccttctagtcccamaaactgctagattatcaactcatacccaatgtatacctgtcatctgtccattttggtacatattgttcacttaacacatatgttgtcaatgcatttagtgattgtcctttcacaacttttttaaatgcttcctacaatcagtgagcctttctaagtactgtatattaaacatttaaagtgatgttgctactgcttccttatctggaccattaatcgggaagcttcccaagaacatggttttataagtgaataagaagaaaggagaatgaggaagaggaaagactcaaaatcactggagcagtca

SEQ ID NO: 607382 - DNA, 530 bp, Homo sapiens
cctggtactggggagtgtctgcagggtcccgtaatgtgatccaccttcaggtctctcagccatggataccagcacttgctctagtggaggtagcagaggagtgaagtagactctgtgagggtccttacttgtagttttgtttagcatgctggttttgtgttttgttggcctccaaacaggaggtggcactttccagacagcatcagctgcagtagtataggggagatacaagcttgccccagggttgcctggattgttacaggaagtcagggaccccgaatggagggaccgactgaagccatggcagaataacataaattgtgaagatttcatggacatttattagttccccaaattaatacttttataatttcttacacctgtctttactgcaatctctgaacataaattgtgaagattttgtggacacttatcacttccccaatcaatacccttatgatttcctatgcctgyctttagtttaatctcttaatcctgtcatctttgtaaactgaggaggatgtatgttg

SEQ ID NO: 607383 - DNA, 506 bp, Homo sapiens
acaatgaaatagtatttctttgcatgtatattctatcttttctttgtccattcattcattaatggatgcttaggttatacatctttgctattgtgaatagtgctgcaataaccatgggagtttaggcaaccctttcataatctgatttcttttcctttggatagatacacygtagttggattgctggattgaatgataattctatttttagttttttggataaatcttactgttttccacagcagctgttctaatttacatccttaccaagagcatataagacatttttctttgcatcttctttggcatctgctttttttaagtttttattttaagttcaggggtacatatgcaggtttgttatatacttaaacttgtgtcataggcgcttatcatacagctatttcatcacccaggtattaattctggtactcattagttattttttgtgatcttttccttccccataactgccaccctgtggtaggccccatggtctgctgtct

SEQ ID NO: 607384 - DNA, 621 bp, Homo sapiens
tacttagttcatcatttttctcaagaaccacctcctggatttgttgatcttttgaatggttttttgtgtctcaatgtccttcagtatgcctctgatttcagttatttcttataatcttcttgctttgcagttagttttctcttggttctctaattcttttatttgtgatrttatgtttttgcattgagatctttccagattttttttttctttttgagatggagtcactctctgttgcccaggctggattgcagtagcgtgatctcgactcactgcaacctccacctccctgtttcaagcaattctcctgccttagcctctcgagtagctgtgactacaggtgcccactaccacgtttggctaattttttgtatttttagtagagatggggtttctttgtgttatagtgctataaatttccctcttaacactgacttagctgtgtcccagagattctggtatgttgtagcttaagaacttcttgatttttttccttaatttgattatttatccaaaagatattcagaagcaggctactgaatttctaagtaattgtatgttttggagtgaattttttagtcttaatttctaatgttattccaatgtggtttgagaaattgg

SEQ ID NO: 607385 - DNA, 570 bp, Homo sapiens
catctattttagggtcccaacactcagctcccaaatcctggactgcatgccataactctgagggaagtgtgtcaggcttgactttgttctttggctcccccgggttaggaatccactgtgctatggaggctgaggtgctccctgacccctgttcactacactctgatgggtggtgtcagccaaagtgttttgcagtgtggtggcagtggggtccattcttgtttgtatgtgtcaagagcagtgkcagcatggcagggtgcatactattgggctgggggcagggttcttgcaggtgctagggtacctgcctctgtggggacattcaccacagtggtagaggcaatgtggcttgagggcataggaggtcccttctggtgactgtgtgttgtcacacttgtagtgttgttggtatgtgggtagggtgctgatgggtgcaggtgtgtgtgctttttctgtgtgcaacaatttggggtttttgtttggggtgcaggagtttccactgtttccagtgcctagtttcactcccatggcagtgttggcacaagggtatacattggcatgaaagttggg

SEQ ID NO: 607386 - DNA, 628 bp, Homo sapiens
tttaatcaaatattaatctaagtgttgctgtgaacaaggtattttatagatggagttaataacatctacaataagttgcctttaagtaaagattacccttgataatatgggtgggtcacattcaatcaattgaagcaataagagtcaaaacttcggcttcccaaagaagaaattctacctcaagactgtaacatcaacccttgtctgagtttctactctattaacctgccctgtgaattttggacttgcttatactcacaaatcaagtaaaccaattgcataaaacaaatctctctctatctcatctatctatatacacctcacactatacattctgtttctctggaaaacactaatacatcrtcataccacttaacatttttaagcaattaaaatctctcactatcttcccaagatttggtattacttaatattcactagagaggctggtttgaccaattataaaattcccatttaacaagaaccactaagaccaggtgaagagagcccttttccaaagtctgactataagccggtaattgaattcactaccaaattacaaaccatttatttcaaggaatctgtggaaagattaatctggcaggcaccaatacttttctgttttgca

SEQ ID NO: 607387 - DNA, 593 bp, Homo sapiens
agcaaaatcgttgcataggaaagaggggatcaaatctggtagagaccataacaggataggagtaaggatcaacatccagtgaaacaggagacaatgcagaaaagtatgtgtgtgaacagcaggtagttttcttctgattgcttctatatctagatgaaaaaaataaataaagtcattagcaaagtacaaggtgcggactgatggttaaggagggagataataaaacagaggaggagaaaggaagtgtcaaaatcatttaggcccatgatcattaatttaaagcaaggcaagtcagcaccgttgcatttggttttttttttcaacttttcataatgtaaacctttatttatttatttatctttattattatgctttaagttctagggtacatgtgcacaatgtgcaagtttgctacrtaggtataaatgtgccatgttggtttgctgcacccatcaactcgtcatttacattaggtatttatcctaatgctatcactccccctgccccccaccccatgataggccctggtgtgtgatgtcccccgccctgtgtctaagtgttctcattgttcaattcccacctatgaatgagaa

SEQ ID NO: 607388 - DNA, 535 bp, Homo sapiens
tggtgcgatctcagctcactgtgaactccgcctcccgagttcacgccattctcctgcctcagcctcccaagtagctgggactacaggcacctaccaccacgcccagctaatttttgtattttcagtagagatggggtttcaccakgttagccaggatggtctgaagttacctcattcttaataccagttttaagtggaatttataactagaacagtgatgctgttatgttaagatgaggactgatcaccttcacttgcttgcctactgatgtagctgaactcttggctagaaaaaagaaggggcttcctctttcctcttcaatggcccatttctgaatattccaaactcagagactcagggaccacaacaaggaaattgaacagcttttattttgctcaagttaatattacatgataaactcagagtattattgtgaaaacactgattagacactatttgcttattttgcacaaccctccatgaactttgatgtttaccacaaaggactttactaaactagcttccagttagtac

SEQ ID NO: 607389 - DNA, 520 bp, Homo sapiens
gggtatgaaataaacatacagaaatcagtagcatttctatacatcaacagtgaacaatgtgaaaaagaaatcaagaaagtagtcccatttacagtagcctcacataaagttaaatacctaggaattaaataaagaagttaaagagctctttaatgaaaactataaaagcctgatgaaagaaattgaaaaggatacaaaaagatggaaagatattttatgtttatggattggaagaatcaacattgttaaaatgtccatactacctaaagcaatctacagattcagtgcaatcactgtcaaaataccartaacattctttacagacataggaaaaaacaattctaaaatttatatggaaccacaaaagacccagaatagccaaagctatcctaagcaataagaacaaaactagggaatcatattacctgacttcaaattatactacacaactatagtaatcaaaacagcataatagtggcataaaaacagacacatagaccaatggaacagaatagagaac

SEQ ID NO: 607390 - DNA, 392 bp, Homo sapiens
gtcaagggaggctgatgaggggttwgcacggaagaattgagagggggatgaaatcagaagccctggccagtagtacagcgagtgcagggatcagcatcctcaggtgtatatttttgaggactttaagtggcagcagtagctgactggatggattaggggtccaggaaaagtacaggtaccctacatcatattttaaaaacttgctctcaacctgtaggtctaatacagtggttatttaaatttaattcaaattaaatagaatttaaagttcagttcctctgtggcactagcaacacttcaggtgctcaatagccacacatgtggctactggctacaggatctagcacagacatagaagatttccataaacacagagcattctattggacagc

SEQ ID NO: 607391 - DNA, 640 bp, Homo sapiens
gtgactcattcatctttataccacctactgcctatggccagttgccagacatgtggtaccttttcagcagaggttggtgaacctcatggaaccgtgtagaactgcatggcacctgacaacctcctccctcaggtttacctggtctactaccctgtggaggcagctgaaataaaagctgtagagtcttattgccttttcagtggtgtaaattctactgataactttgtcttattctccctatttggacatttctttattattattattgtggtggcagtaattattgttatttttaaaaattgacttataggtatcttttcttccttttttaaggaaggttttcttctgtgaaaatatatttttttcgggtggagagtctataccttcactgtcagtaataactgatatttcggatatcatcttactttgcttaactcttggttgaggtaggcgaaggtacagagaagctgtttgagtctctattctctcctcaaatctctgccctgagctttgatttaggctgatatttttgaagtttaataaaytggtttttctactttactttcccgtatccttttgtagtgaaatccttactccatcttatgtttaaaatccaaaactatgtttgggataaagtaaa

SEQ ID NO: 607392 - DNA, 422 bp, Homo sapiens
gaattcaggaagagaacaggagctggaaaagagattgaaaaagactattcagagagatagagaagtccaagagttcagtgtcctgtaagctaagtgaagaaaagttttcaagaaggagggaatatttaattgtgttaaattcagcagaaagtagaagataagaaattagacttgactactcatttggccacatcaagtcatcagggacaattgactttgacaagagcagcttcagtgaaatgctggctctgaaagtctggtttcatagccaacatgtcactatgatggactcctcagaggaagaagtaaggtagtagaagaatgtaaacatgtttccaagagattttcagtgaaagaaaacaatatrtggggcagaatccagagagggacatttggccaagtgaagcttttgctgtttattg

SEQ ID NO: 607393 - DNA, 597 bp, Homo sapiens
gttttagagaagttaacatgtgaaaaaacaatgtgtatcttatataatgggtgaaatacagtttctctaggtctttaaattaaacttctctaggtcttgattttttcatttctaaaatggagacattcagccatatttcccttctaaaggatgtcctaaagttctcaatttctatggattatcattatgtattttatccaatgagcaaaaactggtaagaaaataggaaataacttgatgatctaaaataactaactaattagtattgccatctttgactacaaggttaatagaagcaagccaacyggggctgctgaaagcctacatcaactatttcaccacataacatatcaaaacaggtgacctgtatacgtatacccctagtcctagtacctttctcatgaggcaacagttgagtagattcttggttattatacacctaggaagctatcattaagggccctgctatttctgtcttttataggtcaagtctttacttgatctctatgggtaatttcatattacaggtcaaagggaaaatgaatatgtatgcatgattcagagagtaatgtaattaatataaatgaaaaaatcaaa

SEQ ID NO: 607394 - DNA, 520 bp, Homo sapiens
ctatctttaacaaatggtgttgggcacccacagtggttcatgcccgtaagcccaatacttagagaggcagaggtgggagaattgcttgaggccaggggtttaataccagcctggacaacataataagacccccaactctacaaaaagcaaaaaaaaaaaaaactggccaggtatgatggcacrtaactatagtgccagctacttgggaggctgaggcagaaggattactttagcctaggatttcaaggctgcagtgagctaggatggcaccaccacactccagcctgggcaacagagtgaaaccttatccctaaaaataaatataaataaataaataaataaatgtggtgttgagaaaattgacatgtaaaacaatgaaactgaatccctatcttacaccacacaaaaaaaatcaattcaaaatgaattaaagactaagacttgacaccataaaattcttagaagaaaacatcataaaaaaccttcatgacattgatcttgccaatgatttcttggatat

SEQ ID NO: 607395 - DNA, 504 bp, Homo sapiens
gatgttgagtgttttccatttctctgagctgtgttgtcagtccctctcctgatgaagcaagggcagtttgaatgctgaatggaggtggatgaggaaggggaacactacgtgaaaatatttgttttacacagatgaaatgttggatcagaacgcacggaactacatccaggtgagaggcatcaaataaatcacttaacctctttgtactttagtttccttatatgtttttatgggcatcatgatagtgcctacttcactgggctggcgctggaaatgaagtgtgattacagatgaagctgttaatcagtgtctggcacacggtctgctctatccgaggattaaccgtgtttattatctgtcctttattactagttaagttctcttcaccactgaaagaaaaagtccaaatgaacccaaacatatgagtttattttctcctccacattttcgctgcccctccttcattactctatccccrtcaccaccccaagaaattagatcttt

SEQ ID NO: 607396 - DNA, 415 bp, Homo sapiens
ctttattaatgtggtaggttatactgattgaaatgtaaatcaacattgtattcctgccctatacagtcatgatgtattaggctttctatgtattaatrcatacctttttaaatttgggagagtatatagtaggtgtatatatttatggtgtacatgagatgttttgatacaggcatgcaatgtgaaataagcacatcatggagaagggggtgtccatcccctcaagcatttgttctttgagttagaaacgatccagttacactctttattttaaaatgtacaattaagttattattgactatagtcaccctattgtactatcaaatagtaggtcttcttcattctttctatatttttttgtacttattaactattcctaccttcccctccaactccccactccctttcccagcct

SEQ ID NO: 607397 - DNA, 600 bp, Homo sapiens
aatttatttgcagttgtttatattatcctattattatctaaatctctgcagatctggagttattaatcttttttttttcctgacattggttatttgtgcaatctctctttttcttgattattttcaacagaagttactgatatatttaggtataaatttaccatctcattgtatgttttcaatttagtctacctgttttacatttcttttgttctctgtgatggttaattttacatgtcaacttgactaggccaggggggccccaaatatttggtcaaacattattctgggtatgcctgtgagggtgtaaattggtagaccaagtaaartagattaccattcttaaagggcagctctcatctgctcagctgaaggcctgaataggacaaaagggttgacccttttgcaagtaaaaaggaactccttcctgagtgcttgacctgggacatagatcttttcctgtttttggacttgaactgaaacatcagctctccttgggtctggagtctgacagcattcagactagaaccccactattagctctcctgggtctccagcttgctgactgcagacctcaggactgtcagcctccataatcac

SEQ ID NO: 607398 - DNA, 573 bp, Homo sapiens
agacattggaaaaagcttctgatgtaaygtttggttaaaaaagagagagagagaaagatagcaaaacacaaatggcatgtctaccaaattcacttgatatacatgtggacacacacaggatgaacacatggcaaattaaaacagctggatttttttcaggtggcagggttataaccaaactttccctttttttctttcctttttctaaactataaacctttactttatagtttcatttatgttgctaaaatataaactctagataggaaaagggataacagaaatattaaggctttcatagacagacaagcctggattcacatcccacttttgccaatgacttgttgtatgatcttgggaaagttatttaacttccctctgtctcagtttctctggcagagaataatgttaaccttgtaggattgtgtttagaattagagattatatgttaaacacctagtacacacagagcagccactcagcctgtaattaattttgtcatgattacatagtgtgaaccaagaagtgtgcttgagaatattgctaggcctgctgtgagccacaggtttggcc

SEQ ID NO: 607399 - DNA, 549 bp, Homo sapiens
tataaatgtaccacagtttatttaaataatcccttattgctgaatggctctttctcatttttcacacttctaaataataaggaaatgaacaatactagttcacatattttccattcattcatgcctatttgtgaagaatagatttctagaaayagaatttctaggtcaaaaatattgcatacttcatggtgtctgatttactttttcattcaacaaatagttactaatcatctataatgtccagacactcttaaaggtgctagggatgcagaagtaaacaaaaaaaatcccaccctcatggaggagcttacattcagctcccttcagtaaagggaggctgcaataagcaaagaagtaatatattatctagtgggtttgagactaataaatgctatggggcaaaacagatagggaatgggggtggggaggaccaagtagggggagaactacagtgtaactaaggtagccaggataggctcactcacatgacatttgcttaaaatatattgttcagtttctttcttcagggtatgtaacattagggaaggg

SEQ ID NO: 607400 - DNA, 630 bp, Homo sapiens
aacacctaccatatgccaggccctgaacggtaagtgctccacaagcaccatcccatcaatcctctagtcacccccatgacacgtaagtgttcccattactttccggatgagtaagctgaagttaaataccatgcccaatgtctcagatggttggtaaatggcagctgggggaaggaccaggactctgtgagccacacttccccacactgtgccctgctgttcccctaggtgataaccactctccctgatgccgctgaggaaaataacatggacaacagcaagagaaaaattattttttattaaacaattttttatttaaaaaatattttttaataattatttttaaaaataattatttaaatatatttttaaataattatttttwaaaaatatttaaataataaatttaaatataatttaattatttaatttaaattaaattatttaaatacattatatttaaataattgttttaaaatatctatctaaatatattatttttaaaaatattttttatcttaaaaaatttttatttaaaacaattattttttgttatttattatttatggtacacaaatacgtgtgtaccaaagcgatgactgtgaggtttacctgaagttaaagtcttta

SEQ ID NO: 607401 - DNA, 630 bp, Homo sapiens
aacacctaccatatgccaggccctgaacggtaagtgctccacaagcaccatcccatcaatcctctagtcacccccatgacacgtaagtgttcccattactttccggatgagtaagctgaagttaaataccatgcccaatgtctcagatggttggtaaatggcagctgggggaaggaccaggactctgtgagccacacttccccacactgtgccctgctgttcccctaggtgataaccactctccctgatgccgctgaggaaaataacatggacaacagcaagagaaaaattattttttattaaacaattttttatttaaaaaatattttttaataattatttttaaaaataattatttaaatatatttttaaataattattttttaaaaatatttaaataataaatttaaatataatttaattatttaatttaaattaaattatttaaatacattatatttaaataattgttttaaaatatctatctaaatatattatttttaaaaatattttttatcttaaaaaatttttatttaaaacaattattttttgttatttattatttatggtacacaaatacrtgtgtaccaaagcgatgactgtgaggtttacctgaagttaaagtcttta

SEQ ID NO: 607402 - DNA, 618 bp, Homo sapiens
tgggatcttaggcaacttttctgagcctaagtttcctgacctgtaaagtaataatgatgttaatacaatctgatattaaatatctgatgaaactctatctcacagagctactatgatcatcaaattgcacataaaacacaggctcactaaatggggtgactgttgtcccagggtgagtccatggacaatctccaggagtcttggtgcagggctgggtgcctctgcatgtgtgtgaaactcagtacaaacacgcaagcggccctttagctatcaaaacactcccacattactacccacgtagtggaaggaagcagacttactctcttcaggcagcaggaaaaatgaagcaggtacgtaggagaagatccggctgctcaggccagaccaggaaactagggagccgaccagtcaccaccaggaagtgtggactgggtgagagatgggggtccaaagaggtgtctctttcctgattgaaccaacttccacataaagtgygtcagaaacagtcaccaagaggcaattgcagctcctgcagggcagggatcatttctggtgcattgcagtgtcctcagtgcccagcatggagccgaggcattgtagacaccaaccaaaaatgtg

SEQ ID NO: 607403 - DNA, 599 bp, Homo sapiens
ttccccaattttaatatatagacatatagggcagtagatgagataggtaaatgtccacttacaatagaacatttaattagaaaaatatttgaaatcacacagtatataaaatgatatattttaaaatgttattttccacacccacagttcatgaaacagttgtattcaaacttctcatattcatttccaatascagtgtcctgacctccctgaagccaccttctgagttatcagactttgttttctagagcatttcaacttcttccatgtatgtttttcaagatcatacataagcctgtcactggaaattttatcccaagccacagaaggagaaaaggaaggaaggaaggaaggaaggagaaaagcaattcacaatttataacatcagaactgttatatacatacttttttcctttttttgtttgtttgctttcttagagacagggtctcactctgtcacccaggctggagtgcagttgagcgatcatagctcactgcagccttgaacccctgagtgcaagtgatccccctgcctgagtagctgggactacaggcatgccccaccatgctcagctaatttttttttaaaggcagggtcc

SEQ ID NO: 607404 - DNA, 632 bp, Homo sapiens
tgtcctgacctccctgaagccaccttctgagttatcagactttgttttctagagcatttcaacttcttccatgtatgtttttcaagatcatacataagcctgtcactggaaattttatcccaagccacagaaggagaaaaggaaggaaggaaggaaggaaggagaaaagcaattcacaatttataacatcagaactgttatatacatacttttttcctttttttgtttgtttgctttcttagagacagggtctcactctgtcacccaggctggagtgcagttgagcgatcatagctcactgcagccttgaacccctgartgcaagtgatccccctgcctgagtagctgggactacaggcatgccccaccatgctcagctaatttttttttaaaggcagggtccgtaactggtctttaactcctagcctcaaacaatccttccaaaattctgggattacaggcatgagctaccatacctggccttgttttctcataggtaggtatttatgatctaagaatgatcttcaaagggcttatttaccattacatccatcacttgcaagtgagaagcctcatttccagtaataattactgtcctttttttatcccatagattctatctaaaaatctct

SEQ ID NO: 607405 - DNA, 632 bp, Homo sapiens
tgtcctgacctccctgaagccaccttctgagttatcagactttgttttctagagcatttcaacttcttccatgtatgtttttcaagatcatacataagcctgtcactggaaattttatcccaagccacagaaggagaaaaggaaggaaggaaggaaggaaggagaaaagcaattcacaatttataacatcagaactgttatatacatacttttttcctttttttgtttgtttgctttcttagagacagggtctcactctgtcacccaggctggagtgcagttgagcgatcatagctcactgcagccttgaacccctgagtgcaagtgatccccctgcctgagtagctgggactacaggcatgccccaccatgctcagctaatttttttttaaaggcagggtccgtaactggtctttaactcctagcctcaaacaatccttccaaaattctgggattacaggcaygagctaccatacctggccttgttttctcataggtaggtatttatgatctaagaatgatcttcaaagggcttatttaccattacatccatcacttgcaagtgagaagcctcatttccagtaataattactgtcctttttttatcccatagattctatctaaaaatctct

SEQ ID NO: 607406 - DNA, 587 bp, Homo sapiens
tccctgaccctgtgaagactaaaaggagctttcttgactcagtaggtagaacagagtgctgagcaaagagcctgctcatggcactcgagggtatgacagccaagaatgctttcgtagctgtgctttgctgcctgattccatctggaatgcacaggctttgtccctttgatctttaatatggctgctcagaggggccaggagctcacatttgcagctagttctgtcttcattctccacagartccacctccactccaagttcctggacacaattcagaagtttcaccttcttccctttcatctcacccactgctgaaggtgggccttcaactccagaccaccaacaaccctgcccccccccccagaagactggccccatcatctccctcagtcctgtcccatctgggtgaagggaaacttgcctcttctttactcaggactgcctgtgaagtttcccgcatcccaaatacaagagccaaacatctagatgcttggaaagaagcatctggttaattggctggggtttttctgtttgtttgttttttgcttttcatccagatgttggtgtaatgtagaccctgcatggaa

SEQ ID NO: 607407 - DNA, 398 bp, Homo sapiens
gaaatggagagatcatcctggatgatctaggtgggccctaawtgtcatcactatatatatttgagagggaggcagaaagatatttgacacccactggagaggggatggcatgtgaagatagaggcaaagattggagtgatgtgaacacaagccaaggaatgctggcagccaccagaatctcaggaggcatggagggatgctcccctcagagcctctggagggagcacagccctgccaataccttgattttggacttccaggttccagaactgtgaaataaaaactgtttttaagccaccaagtttgtggcaatttcctacaggagccacaggaaactaatagactgcttatttccagaagctacagcagacaagcctggagatgggaggaaaaggaga

SEQ ID NO: 607408 - DNA, 611 bp, Homo sapiens
acttgcagaccatgcaatgccctgggcttagttctaaggattacaaaggtgatcacaaacctgaagggaggatcttgtagagacatgagacaaatatgtaaatgcccataatactagagtgacctttccacacaaagagtggaacttgttaagacacattttaaaaaataaacttttaattttataacagctttagattaacagaaaaactatgaacagagtacagagttcttatatacctcacactcaagttctccaatttttaacatcttacatgagtatggtacatttgttattaatgaaacaatattgattacttattgttaagtaaagtgcctactttgttcatatttcattagtttttacctagcgtctttttcctcttccagaatcccatccagagtaccacactgaatttgatcaagtctccttgacaggtgataatgtgcatttttaaagcaatcttatttctctcttactgtctttccaaacaggcytagtagacctgtcatttctctgtccccatgaaatattgagctgttcccaaaactttttggatctccctcagataatatgtcctattcacatacaaataatatgtacagaatagt

SEQ ID NO: 607409 - DNA, 560 bp, Homo sapiens
ggaaagtttgaatgcagtgaaaagaaaataccaagatatgcaattcagagatgtgggtcttgatgtccaagagaaagaaggggcaagaatccaggaaccatggggaagttggccttaaagttttggcttttttctctgaaacaggaggaaagacttttttaaagggtgaaaatacatcaaaactttgaaatagaaggaaaagcctcagtgttctccaaaagaaagactgaggctatctacaaagcctgaggaagtggaggtatttgttcaaggtttaaagagacaggaaaaaatagactcctagagaaggcttagtgagccactrataaacttcaaaataaaagtaaatgtattgagattgcctgaggatgactgatgggcacaatttgaaagaaatgaagaaactcactctacccaccctccttattccactgggaatggaagaaggaaaatctctgtggaagaagattgcaagaacagtatccagggaaaaggcaagtctgttgtggtaaggaagcagaaaaagggctttagggaaaggttaaggggaatatgtcgtt

SEQ ID NO: 607410 - DNA, 627 bp, Homo sapiens
cctcagtgttctccaaaagaaagactgaggctatctacaaagcctgaggaagtggaggtatttgttcaaggtttaaagagacaggaaaaaatagactcctagagaaggcttagtgagccactgataaacttcaaaataaaagtaaatgtattgagattgcctgaggatgactgatgggcacaatttgaaagaaatgaagaaactcactctacccaccctccttattccactgggaatggaagaaggaaaatctctgtggaagaagattgcaagaacagtatccagggaaaaggcaagtctgttgtggtaaggaagcagaaaaagggctttagggaaaggttaaggggaatatgtcsttaatagaactggggctccatgggctcaggtgaagcatcccattgaggagcagcaagggtgggagtgggcctgaactggatagaaagagagggaagcaggactcactcacaggggagtagaaagcagtttttaatgattaagggataaaggaggctgaaagttggagatgcgctagagattcttgtttgttatgggaggacagagcaaataccaattaagttcattgaattaacctgcccctaaaatctaagttaaataagttaaatattg

SEQ ID NO: 607411 - DNA, 534 bp, Homo sapiens
ctccactcctgatacactagatgaccttaaaaagccattaactttcctgataccatttgtaaagtgaggggcctgaaccagatgttcccttaagtcccttccagcaccaacatactaaaagcctgaaaacacaaaacactaaaccacgtctagggatcatctggtctagttcttggaaatttagttttwaaaaaaaaaaaaaaaaaaaaaaaaaaaaaaaaaaaaaggagagaattccagctcctatctgtaaccttctggagacttactacccattgatagaattccctgtgggaaatgttttgaaatagtggatagtctataaaacgaaattctggggattaatctgcaatgagggctgaaaattttctgagtgatttttcccaaatgtatgagaaatctttatctaattgaatgtggagcgtattcttttctgaagcatcttgtttgcattctcaaagcagggtttggtaggaaaaagagcttaggccagatattttgccacttactcatcaagttattagggaagatgcg

SEQ ID NO: 607412 - DNA, 603 bp, Homo sapiens
ctcttgtgcatacacacacacgtgccctcccaatatgtcacctcctaagctttgtgcaggccggatgtgtgcctaataactgcttcttcacctctgtcctccatcttcctcactgcctggtgccttrgcaataccttcacagataccccttcccctccttctccctcacaacatcaccaaaggagaggtagttttaccaagaccttaattttatattggcaattttgtattttttcctaaaacataccccccaaactgtataagcgtcaggctcttaaaaacaacctgcaccttcctccacttaatagtaaaacaaactgaagggtttgggcacacagagaaaatatacagaataatgtagagcataattggctactgctgagtttgtgcctcttttcaagactcagaaaccataaagtgacctttcttactttgtttacaagaatctacatgaccctcactgacttctgcaaggattgtttttatctgaaggagctctaagcacactaaattacatgatcagtcactgctgcttctcatcccaggaactggctcaagcttctccaggtcaagccacttggcacacagcagttatgctccctt

SEQ ID NO: 607413 - DNA, 484 bp, Homo sapiens
aagctttgtgcaggccggatgtgtgcctaataactgcttcttcacctctgtcctccatcttcctcactgcctggtgccttagcaataccttcacagataccccttcccctccttctccctcacaacatcaccaaaggagaggyagttttaccaagaccttaattttatattggcaattttgtattttttcctaaaacataccccccaaactgtataagcgtcaggctcttaaaaacaacctgcaccttcctccacttaatagtaaaacaaactgaagggtttgggcacacagagaaaatatacagaataatgtagagcataattggctactgctgagtttgtgcctcttttcaagactcagaaaccataaagtgacctttcttactttgtttacaagaatctacatgaccctcactgacttctgcaaggattgtttttatctgaaggagctctaagcacactaaattacatgatcagtcactgc

SEQ ID NO: 607414 - DNA, 533 bp, Homo sapiens
caacatagcaagaccccatctctataaaaataaataaataagtaaaaatgctatgagtgcacaaaagcatgcagtggccacaggatcaacattgaacaaagtcaagtaaagatttttaaatttttatttagggctgtttatttagtttgatgctttgtctttctacctacctctatgccctgggaattaagagaactgagttcaaggagcaaatttgcattttgcttaatgttawttgagatgtttcctgcacttttgcaccaatatgatttggctgtgttctcacccaaaatctcatcttgaattgtaattcccataagccccataatccccatgtgtccagggagagaccaggtggaggtaattgaatcatgggggtggtttcccctatgctgttctcatgatagtgagtgagttctcacgagatctgatggttttataagtgtttgctagttcctcctgcattcattctccttcctgccacctcatgacaatgtgccttgcttgccctttgccttccaccgtgattgtaa

SEQ ID NO: 607415 - DNA, 533 bp, Homo sapiens
caacatagcaagaccccatctctataaaaataaataaataagtaaaaatgctatgagtgcacaaaagcatgcagtggccacaggatcaacattgaacaaagtcaagtaaagatttttaaatttttatttagggctgtttatttagtttgatgctttgtctttctacctacctctatgccctgggaattaagagaactgagttcaaggagcaaatttgcattttgcttaatgttaattgagatgtttcctgcacttttgcaccaatatgrtttggctgtgttctcacccaaaatctcatcttgaattgtaattcccataagccccataatccccatgtgtccagggagagaccaggtggaggtaattgaatcatgggggtggtttcccctatgctgttctcatgatagtgagtgagttctcacgagatctgatggttttataagtgtttgctagttcctcctgcattcattctccttcctgccacctcatgacaatgtgccttgcttgccctttgccttccaccgtgattgtaa

SEQ ID NO: 607416 - DNA, 584 bp, Homo sapiens
ggaaagggagacataatcaayccataacagctgcaaacactgaagacaggatcaaaatccttagcccttcatcaatcacattcatcctatttctgaatatgtcattctaaataggcccattcattctgaagtcatgcaagtccccagaaagaaaatactgactgcctcttttttgctcaaagtcttctggaccattcggcttacaaggcagatggggctcttccattgctaagtattcttattctctgagtggaatgacattaatgaaagcagttgggctgccttggaatagacaagcgttcctccagctggcagcagggtgagctcatcctccaaaggcgccgaatattaaaatgggtttcacacttctggatttggtaccgggcaaaaacaattctttttgactaatccatcgaatccacaggcagagagaacacaggtgtagggacagatgcatgtatgaagttgggaaagagaggagtgggtatgggcagcaagaagagcgcagtgtttgagtcaggcagacctgggcttgccttccaatccgaccacacactgcccgggggacctcaggcccagcattc

SEQ ID NO: 607417 - DNA, 569 bp, Homo sapiens
ggggcttcactctgccccagctggagtgcagtgtcatgatcatggctcactgcaaacttgacctgctgggctcaagtgatcctcctaccttagcttactgagtagctgagaccacaggcatacaccaccatgcccagctttttatttttttgtagaggcgtggttttgccatgttgtccaggctggtctcgaactcttgagctcaagcaatccacctgcctcgacctcccaaagtgctgggattacaggcatgagccaacgygctcagcggcttacatctattctttattgcagtttcaggaaaagtttaaaaatagtcaccatttttcttttaaacaaccaattagattccaccaaataactagtcagctgttttaaagaaatgatggttttcattagattatattgtttaaattttactttacaaattgcattgtatatcaagatctttctaaccagaggacaaatggtgagtatgggtttggtccctttttttcatttttgctggctctaacttagttattggaacaattcagtcttttctgaatttttgtaaaatctaatttaag

SEQ ID NO: 607418 - DNA, 618 bp, Homo sapiens
atgttctcattaagtcatctaaatttgtccttaatgatcaactctttgaaaaatgaaatctgtaagcacaatctaccttattgttgtatcagaattccatggcacccaattttgctcttttctttagaagcaatgctcacctactcttaccgatctgctgcatgtacattttagcttaaccaagatattttccccactgagaagcatacaaaagaatttaaaaaaatcaagcaatttaaaaagcactgtgataaatgcactcattggcccccagttattcattaraagaaaaagaaaaagaaaaacatggctgcagtgtttatgtataggctgattaatgcccatggcatgaatgtaactaggggcactgctgtctcctgtggagtgctggagacaggcacgctgaatatacatgtcctttgctttcacccaaatcgatgaattaaaatgcttgtgagatcttgggctggaatgtgtttcaggagaggctggaaagagagcacagctagaggggactgaggagtacataagccaggatctgaatgacccggaaagagggccaatttaggactagaaattacccaggcagaaggtcccagcccttttaggagcattaaa

SEQ ID NO: 607419 - DNA, 544 bp, Homo sapiens
tcttactacttcagataacttaatgtactgggcaggataaattttacttcctaaagacatgaattgggttcccaaattactagctctatggcttttggcaaattacttagcatctctgaacctattttcgtctctgaaaaaggggaataataatgcctactttgtggattccttgtgaatattataaacagataatgtatgaaaactatgaagaaaagttcccaatgtatttggcacccataaataacataccattcactaaactactattwtaattttatctactatgtcctcatgatgaggttcatttatgctaaagttgattattatttacctttcagagtcattcattcattcaaaaaatggactaagagcctactttatgccaagtaccctgtcccaaccttggatcatggatatataaagacagacaacatacgcacactcaaggaagtttcactagagaaacagttatgagaacaatcgagaatatctaaaatacagatttgagagtaataaaagtaattactataagtaacaggga

SEQ ID NO: 607420 - DNA, 544 bp, Homo sapiens
tcttactacttcagataacttaatgtactgggcaggataaattttacttcctaaagacatgaattgggttcccaaattactagctctatggcttttggcaaattacttagcatctctgaacctattttcgtctctgaaaaaggggaataataatgcctactttgtggattccttgtgaatattataaacagataatgtatgaaaactatgaagaaaagttcccaatgtatttggcacccataaataacataccattcactaaactactattttaattttatctactatgtcctcatgatgaggttcatttatgctaaarttgattattatttacctttcagagtcattcattcattcaaaaaatggactaagagcctactttatgccaagtaccctgtcccaaccttggatcatggatatataaagacagacaacatacgcacactcaaggaagtttcactagagaaacagttatgagaacaatcgagaatatctaaaatacagatttgagagtaataaaagtaattactataagtaacaggga

SEQ ID NO: 607421 - DNA, 544 bp, Homo sapiens
tcttactacttcagataacttaatgtactgggcaggataaattttacttcctaaagacatgaattgggttcccaaattactagctctatggcttttggcaaattacttagcatctctgaacctattttcgtctctgaaaaaggggaataataatgcctactttgtggattccttgtgaatattataaacagataatgtatgaaaactatgaagaaaagttcccaatgtatttggcacccataaataacataccattcactaaactactattttaattttatctactatgtcctcatgatgaggttcatttatgctaaagttgattattatttacctttcagagtmattcattcattcaaaaaatggactaagagcctactttatgccaagtaccctgtcccaaccttggatcatggatatataaagacagacaacatacgcacactcaaggaagtttcactagagaaacagttatgagaacaatcgagaatatctaaaatacagatttgagagtaataaaagtaattactataagtaacaggga

SEQ ID NO: 607422 - DNA, 544 bp, Homo sapiens
tcttactacttcagataacttaatgtactgggcaggataaattttacttcctaaagacatgaattgggttcccaaattactagctctatggcttttggcaaattacttagcatctctgaacctattttcgtctctgaaaaaggggaataataatgcctactttgtggattccttgtgaatattataaacagataatgtatgaaaactatgaagaaaagttcccaatgtatttggcacccataaataacataccattcactaaactactattttaattttatctactatgtcctcatgatgaggttcatttatgctaaagttgattattatttacctttcagagtcwttcattcattcaaaaaatggactaagagcctactttatgccaagtaccctgtcccaaccttggatcatggatatataaagacagacaacatacgcacactcaaggaagtttcactagagaaacagttatgagaacaatcgagaatatctaaaatacagatttgagagtaataaaagtaattactataagtaacaggga

SEQ ID NO: 607423 - DNA, 542 bp, Homo sapiens
catgtcgactctagaggatccccgtcctgctaacctgcggactgttgtcattctggggcctaacgtccacgtgggttgtgctattcacctagggccttttgaccacttggggcttgagtgtaaccctggacctggcacccacataggacttgggtatcaaactggccccttggtgtccagttaagacatcatgtgaacctggcgcctgagtgtcacttggggccaaatgactactgggggcctgaatgtcaacctagaatctgaggtttactaggggcctaggtatccacctggggcccaatgtccacctgagcctgggtgtcaacctggggcctgrtgtaaacctctagttcagtgtccaccttgggcttgatgtcaacctggagcctgatgtccacctgagtactgatgttcacctttgacctgatgtccacctgtggactgtttatccacccatggcctgatgttcacctggggctgaatgtccaactgtgacctgttgtgcacctggaacctaggcatccgcctgcagcctgatgttc

SEQ ID NO: 607424 - DNA, 622 bp, Homo sapiens
atttaacaaagatattgaaataattttaaaaaatcgagcagaaattctggagctcaaaaatgcaattggcatacttaagaattcatcaagtccttcaagagcaaattggatcaagcagaggaaagaattaatgagcttctgaagaaaggctatttgaaaacacacagaggagaaaaaagaataaaaaccaatgacacatgcttacatgatctagagaatagcctcaaaagggcaaatctaagaggtattggccttgaaaaagaggtagagaacagggtgagaaagtttattttgagtaaaccttcaaataacagagaactacccaaatctagagaaaatatccaaatacaagaaagttatagaataccaagcagatttaacccaaagaagactacctcaagacatttaataatcaaacgcccaaaggtcaagaataaaataagaatcytaaaagctgcaagagaaaagaaacaataacatacaaaggagccccaatacatctggcagcagacttttcagtgaaaaccttatatgccaggagacagtggcatgacatatttacattgctgagggaaaaaaacttttaccctagaataacatatccagtgaaaatatcatttga

SEQ ID NO: 607425 - DNA, 622 bp, Homo sapiens
atttaacaaagatattgaaataattttaaaaaatcgagcagaaattctggagctcaaaaatgcaattggcatacttaagaattcatcaagtccttcaagagcaaattggatcaagcagaggaaagaattaatgagcttctgaagaaaggctatttgaaaacacacagaggagaaaaaagaataaaaaccaatgacacatgcttacatgatctagagaatagcctcaaaagggcaaatctaagaggtattggccttgaaaaagaggtagagaacagggtgagaaagtttattttgagtaaaccttcaaataacagagaactacccaaatctagagaaaatatccaaatacaagaaagttatagaataccaagcagatttaacccaaagaagactacctcaagacatttaataatcaaacgcccaaaggtcaagaataaaataagaatcctaaaagctgcaagagaaaagaaacaataacatacaaaggagccccaatacatctggcagcagacttttcagtgaaaacyttatatgccaggagacagtggcatgacatatttacattgctgagggaaaaaaacttttaccctagaataacatatccagtgaaaatatcatttga

SEQ ID NO: 607426 - DNA, 534 bp, Homo sapiens
caactctagaactcaccatcccaaagcagcagaatacacattcttctaaagtacacatagctgggctcagtggcttatgcctgtaatccsaagactttgggaggctgaggtaggaggatcacttgaggccaggagttcaaaactagcctgagctagcaagaccctgtctctgtaaaaaactgaaaaattagtcagacacagtagcttgtgcctatagtcccagatactcaggaggctgaggcaggaggatcacttgagcccagtatgtaaggctactgtgtgctaggactgcaccactgcactccagcttaggtgacagaaggagagaccctgtttccaaaaaatccgtacacacaaaacattcttcctggatagaccaaacctcaggtcataaaataaacctcaataaatttatgaagacagatataatacagagtatatgatctgtccaaactggaatgttggaaaccaataatatatgggaatttgagaaattcacaaatatgtggaaatacacacattcctaaataaccg

SEQ ID NO: 607427 - DNA, 534 bp, Homo sapiens
caactctagaactcaccatcccaaagcagcagaatacacattcttctaaagtacacatagctgggctcagtggcttatgcctgtaatcccaasactttgggaggctgaggtaggaggatcacttgaggccaggagttcaaaactagcctgagctagcaagaccctgtctctgtaaaaaactgaaaaattagtcagacacagtagcttgtgcctatagtcccagatactcaggaggctgaggcaggaggatcacttgagcccagtatgtaaggctactgtgtgctaggactgcaccactgcactccagcttaggtgacagaaggagagaccctgtttccaaaaaatccgtacacacaaaacattcttcctggatagaccaaacctcaggtcataaaataaacctcaataaatttatgaagacagatataatacagagtatatgatctgtccaaactggaatgttggaaaccaataatatatgggaatttgagaaattcacaaatatgtggaaatacacacattcctaaataaccg

SEQ ID NO: 607428 - DNA, 534 bp, Homo sapiens
caactctagaactcaccatcccaaagcagcagaatacacattcttctaaagtacacatagctgggctcagtggcttatgcctgtaatcccaagactttgggaggctgaggtaggaggatcacttgaggccaggagttcaaaactagcctgagctagcaagaccctgtctctgtaaaaaactgaaaaattagtcagacacagtagcttgtgcctatagtcccagatactcaggaggctgaggcaggaggatcacttgagcccagtatgtaaggctactgtgtgctaggactgcaccactgcactccagcttaggtgacagaaggagagaccctgtttccaaaaaatccgtacacacaaaacattcttcctggatagaccaaacctcaggtcataaaataaacctcaataaatttatgaagacagatataatacagagtatatgatctgtccaaactggaatgttggaaaccaatartatatgggaatttgagaaattcacaaatatgtggaaatacacacattcctaaataaccg

SEQ ID NO: 607429 - DNA, 582 bp, Homo sapiens
ctaaacataaaacaagcagaaagaaaaaaataaaaagaattatagaagaacttaatgaaatagacaataagaaaacaactgtgaaaacacaataaaatcaaaagccagttctttgaaaagrtcaacactactaacaagcctgtacctagactgattagcatattaatattattatctcaacagatacacaaaatgtctttgacagaaactaacactttttataagaagcattgaacaaactaggaatagaatggaacttctaactagcaagaaaaaagcatctataaaaaacctacagccaacaacatagtgcaatttgttgcaggacgtcagagcataagaagggtaggaagggtacgtaggagagctgcccagttcatgaagtcagaattccaaaaaagtgataaggcgtctacctgaaacaacaaggaagaggcaagtgggttgtgctttgacataaagtttctgagtatgtgcaaggtaaggaaggttaggtacactaaaggcttctctgtgtagagattcagagcctgaaaagggtgagaaggcttccgcctggaggagagggcaaaccatcggagg

SEQ ID NO: 607430 - DNA, 582 bp, Homo sapiens
ctaaacataaaacaagcagaaagaaaaaaataaaaagaattatagaagaacttaatgaaatagacaataagaaaacaactgtgaaaacacaataaaatcaaaagccagttctttgaaaaggtcaacactactaacaagcctgtacctagactgattarcatattaatattattatctcaacagatacacaaaatgtctttgacagaaactaacactttttataagaagcattgaacaaactaggaatagaatggaacttctaactagcaagaaaaaagcatctataaaaaacctacagccaacaacatagtgcaatttgttgcaggacgtcagagcataagaagggtaggaagggtacgtaggagagctgcccagttcatgaagtcagaattccaaaaaagtgataaggcgtctacctgaaacaacaaggaagaggcaagtgggttgtgctttgacataaagtttctgagtatgtgcaaggtaaggaaggttaggtacactaaaggcttctctgtgtagagattcagagcctgaaaagggtgagaaggcttccgcctggaggagagggcaaaccatcggagg

SEQ ID NO: 607431 - DNA, 582 bp, Homo sapiens
ctaaacataaaacaagcagaaagaaaaaaataaaaagaattatagaagaacttaatgaaatagacaataagaaaacaactgtgaaaacacaataaaatcaaaagccagttctttgaaaaggtcaacactactaacaagcctgtacctagactgattagcatattaatattattatctcaacagatacacaaaatgtctttgacagaawctaacactttttataagaagcattgaacaaactaggaatagaatggaacttctaactagcaagaaaaaagcatctataaaaaacctacagccaacaacatagtgcaatttgttgcaggacgtcagagcataagaagggtaggaagggtacgtaggagagctgcccagttcatgaagtcagaattccaaaaaagtgataaggcgtctacctgaaacaacaaggaagaggcaagtgggttgtgctttgacataaagtttctgagtatgtgcaaggtaaggaaggttaggtacactaaaggcttctctgtgtagagattcagagcctgaaaagggtgagaaggcttccgcctggaggagagggcaaaccatcggagg

SEQ ID NO: 607432 - DNA, 541 bp, Homo sapiens
gtgtggtggctcgtgcctgtaatcccagcactttgggaggccgaggcgggcagatcactggaggtcgagagtttgagaccagcctgaccaacatggagaaaccctgtctctactaaaaatacaaaattagccaggcatggtggtacatgcctgtaatccagctactcgggaggctgaagcaggagaattgctcgaacccgggaggyggaggttgcagtgagccgagatcacgccaccgcactccagcctgggcaacaagagtgaaactgagaaagaaacaaagaaagaaaaagaaggaaggaaggaaggaaacaagggggagggggaggaggaggaggagaaacaaagaagagaagaagaggaggaggaggaggaggggaggaaaggagaaaggaaggaaggaaggagaaatttgtgccattgactaactgaggccagtatcatggtggaaaagcctgttactagtgttgaggtgaagaagcttgaccatataagagatacttctgaatttattcaggtgaatattgggatatcactgatt

SEQ ID NO: 607433 - DNA, 571 bp, Homo sapiens
gtgagtggcttctgtgttccaaagagatgatgagaatagtggggaagaggcctgttggagattttaattaggatgatgtggctcttcacagtggtggtgatgtagggctcatgaattgcaggaggctattggatcacagtgcatgtgggttttatcctaaaaaaaataggcttgcaggtaaagaaagatgagaggggcattccaagcagaaggaacagagggatagaatctgtgtataggaccagactcagtttgaaattaccagaatgcagaattaaggaagcatgtggtaaaaggtaaagttggttgagaaacaagaactggggggcttttyaccttcctgcagacccaggttttattctaaaggcaatgaggagctaatgatggttttaggcaatagagtgctgtcatcaccagatttctagtctgagtgtctgggaaaatgttggtgccatttactgaaatagggaatatggaaggaagctgtcaagtttgtttctagacatctccagcatagagggcaaagggtaagccaaagtttatattttttcccagcctgttgaatatgtga

SEQ ID NO: 607434 - DNA, 473 bp, Homo sapiens
ctgagtgtctgggaaaatgttggtgccatttactgaaatagggaatatggaaggaagctgtcaagtttgtttctagacatctccagcatagagggcaaagggtaagccaaagtttatattttttcccagcctgttgaatatgtgagtcagggtcagggttaaaccaagagaatttcaagttgtaagcatagagttggtggttaaaactatgctggcattcaggaaatgccatttgacaataycattttcttttttgagatggagtctccctctgttgcccaggctggagtgcagtggcatgatctcagctcactgcgagctccacctcccaggttcacaccattctcctgcctcagcctcccgagcagctggggctacaggtgcccaccaccacgcccggcttatttttttgtatttttagtagagaagggtttcactgtgttagccaggatggtctcaatctcctgaccttg

SEQ ID NO: 607435 - DNA, 473 bp, Homo sapiens
ctgagtgtctgggaaaatgttggtgccatttactgaaatagggaatatggaaggaagctgtcaagtttgtttctagacatctccagcatagagggcaaagggtaagccaaagtttatattttttcccagcctgttgaatatgtgagtcagggtcagggttaaaccaagagaatttcaagttgtaagcatagagttggtggttaaaactatgctggcattcaggaaatgccatttgacaataccattttcttttttgagatggagtctccctctgttgcccaggctggagtgcagtggcatgatctcagctcactgcgagctccacctcccaggttcacaccattctcctgcctcagcctcccgagcagctggggctacaggtgcccaccrccacgcccggcttatttttttgtatttttagtagagaagggtttcactgtgttagccaggatggtctcaatctcctgaccttg

SEQ ID NO: 607436 - DNA, 591 bp, Homo sapiens
tgtcattttaagattgcttttgagataaacatgatttgacacaatttaaaataagaaaataagggaggcatatraaaggcagtattttaaaattgtaagtgtgtgacttgctgatatggagcccctttttcctatgggtattcactctcttgtgaaatccataattctgatgttgatcctgattttggactggggttgaaaaattcaaactaactacattatagcgataattcagggtcctgtgagccagtccatctcactgtgagggagtggggtcatggggtaaagatgggtgatcactcctgaactgacacttcaatcctcgtgtaagcttgtgtgcaattcccgcagcgtgtcatttagtcttggagtgcttactctaggctgagcaggtgaagtgtcattaaggaggctgcactggaatctaattttccacctcacctattcccctccaacccctcttccctgttttcctttttctcacattttcctttctttcataccctatgagattccacacagtgggtatggacaggtaggggtaggaagaggtgatggcacaattggctgtagtttgaacaagaaaacatc

SEQ ID NO: 607437 - DNA, 674 bp, Homo sapiens
tatcaaagacaattgcagataatatgagaacttttcattatttatgcttgttttctctaattgagattagattatattttgcagataaacaatttgaattcgttaataacgtgatttttgaaaatcactgacgcttgttaatgttaactaggataaatattattctctatttaaattgtgtgttttgatctttccctttaaaaataatttactacaaattttaaaatattaaatattaatatgataatgcaatccgaggtttataatttagcttgatcccatgacagagtaagctaatgttaactatataatcaacaacttgtaaaaaatgttcagagattaccttttaaggcccacagtaataaaactatctacacttttctctaaagtcataaaaatgtttgtgaaataaaatcaagtttcatatytttgtgtactgaaattagtttcttattcctacccaattatctaacatacaattgtcattttgttatgagatacatacacttctcattacacatggagaagcattatgtcattatttttataaaaggctgataaatacagttgttccttcatgtatggctcccatacagattcctggtaagatgattctataaaattatataactcaaatctcctgttgactttcatctgaggacaggcagtgggtt

SEQ ID NO: 607438 - DNA, 680 bp, Homo sapiens
gtttgttggtttttttttttttttgcatgatctttagaggataagtaaaaaactaaagaaaggctgcattgcttgctgacacattttttccccacccatctgaaggcacacaaataatagcactggcaaatttgaatagtttcccttgttaccaaatctacgttcttatttctaatatggaacgattatttctagtatggagagaaatatggaatttctaatatggaagatttagcatggtgtgtcattgtaaaaatttaggcagttcttggrtaagtatgtccagccttccagagactataagtgtagtaatattagtgcctgttagtcatattgtgtatcttcctgatacccaattagatctctgattgttttttctttttaattaaaaggagctgaaagatgactcagttaagaagctggaaaataaaaccaggtctctgtaactgtgctgtcttattctgaactgaaagtctttctgcaataataatgatggtgataataaagctaaccttcataggacattgtgtaccagactgatacacgtgctacaattctgttcgttctcacaccatccttcatgggggaggttaagagcattgctcaaaatcacacagctaataagtcatttttctcagattggcgttaaaattatatttaattgggtcctgtgtgtgcga

SEQ ID NO: 607439 - DNA, 534 bp, Homo sapiens
agcacatccagcagcacacataatcacagagttagaattttaattgcaattgcatagagtttactcataaatttgggagaatttatatttttgatcaatttttctactctaaaacttttttttcattttttcagatcttgttttatgttcttcataggaatttatgactcacktcatatttttcttaataaccttttctaagtgttttatgattgtgattgttactatgaatgtaatgtaatatttctcttatttccacttgtttctaattattgtcagtacagaatagagaaaaactatgtacttctttacattaacttaaaactaatgtgtgtaaccaagttcttctgttagttctgatttagttttactacattttattttgtttcctaggaacgtaatcttccatttagcagaatgagataattttacctttgcttttaaaatatttagatcaattatttaatttcctatgtgacaatctctatattttagtaggagaattcagtctgttcatatttattatgaccaaca

SEQ ID NO: 607440 - DNA, 534 bp, Homo sapiens
agcacatccagcagcacacataatcacagagttagaattttaattgcaattgcatagagtttactcataaatttgggagaatttatatttttgatcaatttttctactctaaaacttttttttcattttttcagatcttgttttatgttcttcataggaatttatgactcacgtcatatttttcttaataaccttttctaagtgttttatgattgtgattgttactatgaatgtaatgtaatatttctcttatttccacttgtttctaattattgtcagtacagaatagagaaaaactatgtacttstttacattaacttaaaactaatgtgtgtaaccaagttcttctgttagttctgatttagttttactacattttattttgtttcctaggaacgtaatcttccatttagcagaatgagataattttacctttgcttttaaaatatttagatcaattatttaatttcctatgtgacaatctctatattttagtaggagaattcagtctgttcatatttattatgaccaaca

SEQ ID NO: 607441 - DNA, 534 bp, Homo sapiens
agcacatccagcagcacacataatcacagagttagaattttaattgcaattgcatagagtttactcataaatttgggagaatttatatttttgatcaatttttctactctaaaacttttttttcattttttcagatcttgttttatgttcttcataggaatttatgactcacgtcatatttttcttaataaccttttctaagtgttttatgattgtgattgttactatgaatgtaatgtaatatttctcttatttccacttgtttctaattattgtcagtacagaatagagaaaaactatgtacttctttacattaacttaaaactaatgtgtgtaaccaagttcttctgttagttctgatttagttttactacattttattttgtttcctaggaacgtaatcytccatttagcagaatgagataattttacctttgcttttaaaatatttagatcaattatttaatttcctatgtgacaatctctatattttagtaggagaattcagtctgttcatatttattatgaccaaca

SEQ ID NO: 607442 - DNA, 591 bp, Homo sapiens
ctttttaatatttaaattaatatttagcacaaatatttggtacttttctagatatcttattgtgactattttatttctgttgtggtacgagaactacaatatttcaatcttttaaaatttcytgagacaggttttatggcccaacaaatgttctatcttgaaattgttctatgtgtacctaaaaagtaatgtttattctgcagttgttggatgtatcattctataaatgttaattaggtcaagttagtcgctggagttatttcagatcttctatatctttattgaattgtttttgactgcacatatcaattcttgatcaagatatattaagtctaatctctagttatgatggtgaattgttctacttctcactttagttctgtcaaattttggtttatgaattttgaggcattctaattatatctatacacatttagattgttctgtgttcttgatgaattgaccctttaaacattttcaaacttttctctatacttggtaatattctttttctttagtattattttctacctagtcagctaatacagccataagagctttataatgcctactgttatctttttccagttt

SEQ ID NO: 607443 - DNA, 591 bp, Homo sapiens
ctttttaatatttaaattaatatttagcacaaatatttggtacttttctagatatcttattgtgactattttatttctgttgtggtacgagaactacaatatttcaatcttttaaaatttcctgagacaggttttatggcccaacaaatgttctatcttgaaattgttctatgtgtacctaaaaagtaatgtttattctgcagttgttggatgtatcattctataaatgttaattaggtcaagttagtcgctggagttatttcagatcttctatatctttattgaattgtttttgactrcacatatcaattcttgatcaagatatattaagtctaatctctagttatgatggtgaattgttctacttctcactttagttctgtcaaattttggtttatgaattttgaggcattctaattatatctatacacatttagattgttctgtgttcttgatgaattgaccctttaaacattttcaaacttttctctatacttggtaatattctttttctttagtattattttctacctagtcagctaatacagccataagagctttataatgcctactgttatctttttccagttt

SEQ ID NO: 607444 - DNA, 591 bp, Homo sapiens
ctttttaatatttaaattaatatttagcacaaatatttggtacttttctagatatcttattgtgactattttatttctgttgtggtacgagaactacaatatttcaatcttttaaaatttcctgagacaggttttatggcccaacaaatgttctatcttgaaattgttctatgtgtacctaaaaagtaatgtttattctgcagttgttggatgtatcattctataaatgttaattaggtcaagttagtcgctggagttatttcagatcttctatatctttattgaattgtttttgactgcacatatcaattcttgatcaagatatattaagtctaatctctagttatgatggtgaattgttctacttctcactttagttctgtcaaattttggtttatgaattttgaggcattctaattatatctatacacatttagattgttctgtgttcttgatgaattgaccctttaaacattttcaaacttttctctatacttggtaatattctttwtctttagtattattttctacctagtcagctaatacagccataagagctttataatgcctactgttatctttttccagttt

SEQ ID NO: 607445 - DNA, 547 bp, Homo sapiens
aaacctggaaaaattaacacttgaaataaattttgaagaacaaggaaaagttattgacctaaaggctgacagggaggaattctggaaggaaggaacagctcacttgcttggaggtgagaacatgtgttgtgttgggaacatagtggtcttgtgtgtggcctttgcaggtacctggacacatcatactctctcacattcttggctctgctcattcctgggctccctctgcctggtaccacttyctccacctcttaccttctcttcctttttctggataattttactcagcctttagaactcagtggaagtattttcctcctcttgttgccagtgaatggtgaagatcacatgtttggagtccagtgggcctacgttcaaatcctgctcctgccattttggcaagtgaatgatcttgggcaaattatttaacctctttgagacccagttccctttttggacaaatgagaggttatatctgatggatatataatgtttatgtcccctgaaaattcatatgttatacccacaaggcaatggtcacaagcca

SEQ ID NO: 607446 - DNA, 517 bp, Homo sapiens
caattatctgttctactgttgatggacatttgaagtttcccagctttttgctattacaataaactaaactttctgaaacatatctcctaatacacatgtgcaagattgattctatataactaggtatagacttgcgggttctaggatataagcatattcctttttttaagtaacatgaaattgatttcaaagtggttataccaatttacagtcttattatcagtgaaggagcattcctattgccctctacccttgtcaatatttggtatcacytaacttttcaagtcttgtcagtctggtaggtgtaaatgatatcttgtggcagtctcactcgcattttgctgattatttatcatgacttccgcagggctggcttcttcttgtcattcaaatttgagcttaaacatctggagccaccttggtcttcttaactatatcaacctattttaattcccactatctgatattccttccttccttctcttttaaaaaaatgtttgttgggctatttaagttt

SEQ ID NO: 607447 - DNA, 533 bp, Homo sapiens
aggcaaaaatattactatcttctgaaacagtgaaaatcttttttgtgataccttttatgaaataygatctcgcattacttctatatttgaaattatgtaagacaaaagttccattttcatcatatatataaatatttttttaaaaaagattgttgtatgctgcataaccatggcaaactaaatgtgctttcacccaccctcctagaaccttaataaaatatctataaaggaagtaaaaaaaatacagaagtccaagaggacaaagtggattgaatatgaaacagcatctggtgagaaaaatttcaacaaaaaatctggttgatggaagatttgtaacaatgttggcgtctacagaggggaagtttgatgagaaatgagtgattcctcttcagaggcacaaaaaggcttaacacaggtgtgaggtgccatgaggcaaaggtgggaatggggcattttctggaaggctgtatgtggagtgattagacaacctcccctctcctcatgaagctaggcaagtgccctcccagagccca

SEQ ID NO: 607448 - DNA, 470 bp, Homo sapiens
ttgaagttggaggaagggagccatgagtcaaggaatgaggcagcttgaaaacctgggaatggccttcagcatacagccaacaagaaaacaagggcctcagttctacagccggaaagaactgaattctgccaacagcctgcatgagtaagaaaacagattctccctagagcctccagatagcaatgcagtcctgctgatgccttaattttagtagagtgagacctttgcagacttctgacctatataactataattaataaatctgagttgttgtacgccactgtttgtgttgcaatttgttaatggcagtaacagcaaactaaaayaaaaccagtcaaagatttcaactcttgtgggatcacattcccccaggaggagacagtcaatatatgtaataaataaattatatagtatgtgagaaggtaataagtgatatgaaaaagaacaaacagtaaaagggagtgagagtg

SEQ ID NO: 607449 - DNA, 470 bp, Homo sapiens
ttgaagttggaggaagggagccatgagtcaaggaatgaggcagcttgaaaacctgggaatggccttcagcatacagccaacaagaaaacaagggcctcagttctacagccggaaagaactgaattctgccaacagcctgcatgagtaagaaaacagattctccctagagcctccagatagcaatgcagtcctgctgatgccttaattttagtagagtgagacctttgcagacttctgacctatataactataattaataaatctgagttgttgtacgccactgtttgtgttgcaatttgttaatggcagtaacagcaaactaaaataaaaccagtcaaagatttcaactcttgtgggatcacattcccccaggaggagacagtcaatatatgtaataaataaattatatagtatgtgagaaggyaataagtgatatgaaaaagaacaaacagtaaaagggagtgagagtg

SEQ ID NO: 607450 - DNA, 481 bp, Homo sapiens
ttgttgttttgattcgcatttctctaattagtagtgcattcttctttctattagtaagtacaacaaagtttttacctcaatagcctcatggcccagtcaggactgctttatctcaaaaagcraagcagaaactacagctattatgaagtcaatgacagtagcattgtttacccccaggcaaatagatttcttattgctgagagcatacccacctcctccaacacacacacacacacacatacaggatatggattaagttgaatggttcaagtgttttatgttttcatagccacactccacttccaataacttacaaagtcctgtcagttctacctccacctcttacatgtctctccaatgtctctggttccactgccactattccattccaggccatcattatctctcatctggacaattgtgataatttactaagtggtatggccatatacatcaactcttcccccactctagctagctt

SEQ ID NO: 607451 - DNA, 636 bp, Homo sapiens
ggtggctcacgcctgtaatcccagcactttgggaggccggggtgggcgaatcacgaggtcaggagatygagaccatcctggccaacatggtgaaaccccatctctactaaaaatacaaaaattagctgggcatggtggcgtgtgcctgtaatcccagctactcaggaggctgaggcaggagaatcgcttgaaccaggggagttgcaggttgcagtgagccaagatcacaccactgcactccagcctggtgacagagcaagactctgtctcaaaaaaaaaaaaaaaaaaaatcttgtaaattatttttaaaatcctttcaattattttcacagattagtctcttttccttgacctaaatttctaaaataaaataaaatatgcaatatttttgaaattatgtaacaattgattgtttcaatatagggcaaattagaagttaataaagaaaaaagttctatttgagtaaagcacacatttactgaggcctacattttcgttcctaaggttttgctttgagcaacttagggcatactgtgtgaggcagcatggaggcaggaaagctcagcttctgtgggagaaagaacaggggcctcctattagtggccagtggatcaacactcccatgttatgcttaga

SEQ ID NO: 607452 - DNA, 636 bp, Homo sapiens
ggtggctcacgcctgtaatcccagcactttgggaggccggggtgggcgaatcacgaggtcaggagatcgagaccatcctggcyaacatggtgaaaccccatctctactaaaaatacaaaaattagctgggcatggtggcgtgtgcctgtaatcccagctactcaggaggctgaggcaggagaatcgcttgaaccaggggagttgcaggttgcagtgagccaagatcacaccactgcactccagcctggtgacagagcaagactctgtctcaaaaaaaaaaaaaaaaaaaatcttgtaaattatttttaaaatcctttcaattattttcacagattagtctcttttccttgacctaaatttctaaaataaaataaaatatgcaatatttttgaaattatgtaacaattgattgtttcaatatagggcaaattagaagttaataaagaaaaaagttctatttgagtaaagcacacatttactgaggcctacattttcgttcctaaggttttgctttgagcaacttagggcatactgtgtgaggcagcatggaggcaggaaagctcagcttctgtgggagaaagaacaggggcctcctattagtggccagtggatcaacactcccatgttatgcttaga

SEQ ID NO: 607453 - DNA, 595 bp, Homo sapiens
gtgggcgaatcacgaggtcaggagatcgagaccatcctggccaacatggtgaaaccccatctctactaaaaatacaaaaattagctgggcatggtggcgtgtgcctgtaatcccagctactcaggaggctgaggcaggagaatcgcttgaaccaggggagttgcaggttgcagtgagccaagatcacaccactgcactccagcctggtgacagagcaagactctgtctcaaaaaaaaaaaaaaaaaaaatcttgtaaattatttttaaaatcctttcaattattttcacagattagtctcttttccttgacctaaatttctaaaataaaataaaatatgcaatatttttgaaattatgtaacaattgattgtttcaatatagggcaaattagaagttaataaagaaaaaagttctatttgagtaaagcacacatttmctgaggcctacattttcgttcctaaggttttgctttgagcaacttagggcatactgtgtgaggcagcatggaggcaggaaagctcagcttctgtgggagaaagaacaggggcctcctattagtggccagtggatcaacactcccatgttatgcttaga

SEQ ID NO: 607454 - DNA, 595 bp, Homo sapiens
gtgggcgaatcacgaggtcaggagatcgagaccatcctggccaacatggtgaaaccccatctctactaaaaatacaaaaattagctgggcatggtggcgtgtgcctgtaatcccagctactcaggaggctgaggcaggagaatcgcttgaaccaggggagttgcaggttgcagtgagccaagatcacaccactgcactccagcctggtgacagagcaagactctgtctcaaaaaaaaaaaaaaaaaaaatcttgtaaattatttttaaaatcctttcaattattttcacagattagtctcttttccttgacctaaatttctaaaataaaataaaatatgcaatatttttgaaattatgtaacaattgattgtttcaatatagggcaaattagaagttaataaagaaaaaagttctatttgagtaaagcacacatttactgaggcctacattttygttcctaaggttttgctttgagcaacttagggcatactgtgtgaggcagcatggaggcaggaaagctcagcttctgtgggagaaagaacaggggcctcctattagtggccagtggatcaacactcccatgttatgcttaga

SEQ ID NO: 607455 - DNA, 615 bp, Homo sapiens
ggtaaaagttaatatgcttttctaatcagtctgccccaggttccagagatgagtgtcccagggagcacatgcccccacatgccttcaaagatgaggcagggaccccacggggtcagtttgtgtagatatggttttgagtatcattgctgtgaaatagctgcaaccaaccagccaaccttcagcagaaagaaaggacaaccaaggcacaggaaaaggtcaagttcttgagacagtcaccaggcaatgaaagaagactgaaacaaatacattcgggggaaagatttgcataaacatcatggtttcagcacagaaaggggccttaagatgacttctgatcttctttacaaaatcttgaacagtaggagcccatttcaagaagagtccaggcgtacggcttcactgatgtcttgggttgatccctatctcatcaatgtcaggggacagcctgagtcccgcacagggacttyggggaagcctagaggaaaggtggctgtgggagaaggagctacaaacctccctccagctttctccctcagagtaattgtcttacttttgttcccataaaaatctaggctcctgaggttattctcaatggaaaatatggtgtaagcgaat

SEQ ID NO: 607456 - DNA, 615 bp, Homo sapiens
ggtaaaagttaatatgcttttctaatcagtctgccccaggttccagagatgagtgtcccagggagcacatgcccccacatgccttcaaagatgaggcagggaccccacggggtcagtttgtgtagatatggttttgagtatcattgctgtgaaatagctgcaaccaaccagccaaccttcagcagaaagaaaggacaaccaaggcacaggaaaaggtcaagttcttgagacagtcaccaggcaatgaaagaagactgaaacaaatacattcgggggaaagatttgcataaacatcatggtttcagcacagaaaggggccttaagatgacttctgatcttctttacaaaatcttgaacagtaggagcccatttcaagaagagtccaggcgtacggcttcactgatgtcttgggttgatccctatctcatcaatgtcaggggacagcctgagtcccgcacagggacttcggggaagcctagaggaaaggtggctgtgggagaaggagctacaaacctccctccagctttctccctcmgagtaattgtcttacttttgttcccataaaaatctaggctcctgaggttattctcaatggaaaatatggtgtaagcgaat

SEQ ID NO: 607457 - DNA, 454 bp, Homo sapiens
agttggaatccagagtaatcaataagagaatcctctttttctccatagctggggaagcaaaggctaaataacataaggaatgtgcctgagtgaagacagcctcggttctggaattgggcacaaactctggctactataagtttccaaaggtcaatgtcattcttcccctgggaatgtcttcccagtgagttatttcaaatagcatgggcctgctccttctcacacaggtgcagcatcatcatccccagcaggtaacacttacgtggcactaagtattgcccagataggatgaggagtggaaacttaattctggatttggaactggaagactttcagatctgtcatacacgacagcgggcaagtcactgaacttctaagccttaagtgactccractctaagatggaaattataatttacctccaaatgttgtgggcataaaacatggaatccaa

SEQ ID NO: 607458 - DNA, 532 bp, Homo sapiens
taccctgttttgcactttactggccttatttgagaaggttttccattttcatgtcccatactgcattttacctctttttaatttctccctcaaacctgcctttagagttataccccaatttgatccctctaggggaaaaatgttccactttcatccactgtcaagtacttgcccttctaaaaaagaagcaaattgtttggaggttttgcctcagtgtttagcaaagtatctggcctagagtaagcgttggatgaaacctgttgtttgacagttgttaaacaattgtgatttaatgcagccwggttccaattggaagaataagtcatctgagtggttagtggctttaagtacgattgaggaaaagtcctgagaagaacaaagaccactaaaatataaaggtgaccttgggtgcttcattttgcttatccggattgtgttatttaataaaggagtcaatatcaacactattttcctgcaaggttgttttaaggattatatgcgtatgaatggacatgacagattaaaagagcaa

SEQ ID NO: 607459 - DNA, 532 bp, Homo sapiens
taccctgttttgcactttactggccttatttgagaaggttttccattttcatgtcccatactgcattttacctctttttaatttctccctcaaacctgcctttagagttataccccaatttgatccctctaggggaaaaatgttccactttcatccactgtcaagtacttgcccttctaaaaaagaagcaaattgtttggaggttttgcctcagtgtttagcaaagtatctggcctagagtaagcgttggatgaaacctgttgtttgacagttgttaaacaattgtgatttaatgcagcctggttccaattggaagaataagtcatctgagtggttagtggctttaagtacgattgaggaaaagtcctgagaagaacaaagaccactaaaatrtaaaggtgaccttgggtgcttcattttgcttatccggattgtgttatttaataaaggagtcaatatcaacactattttcctgcaaggttgttttaaggattatatgcgtatgaatggacatgacagattaaaagagcaa

SEQ ID NO: 607460 - DNA, 608 bp, Homo sapiens
acagcaacaaaatagagtgaagatatcagaatgtgtgggcgagagatagactttaaatctgaattgaattcaagttcaagcttccctgctatacccactaagggacctggctgtgtcatttacctgagtctattttcccctattacataatgaggataacagaacatatctcaagtggctgctgtgtgaattaaatgagctaatccatgtcactaccagtagtacagcacctggtacagtacatactcagcaattgggatcactcatgggagcatttgtactagtagaaatagtatttatgggacaggaaagtttttcctagaagctaatgtaatactttaaaaactttatttcttaaaatcaagtattaataaataaaatttcaatataatagratgtatatttcatttaatcatttaaatataaaatattaaaaattaaaactttcacactggttcaaaatatgttggctttattttatgacataaaatggatctgactgtctcacagtggggggtagaaatccaatgcatatagcaaatacaaccaactaaagatgagtaagataagaataaaaaaattaagaatttcttgcaggtttaggaaca

SEQ ID NO: 607461 - DNA, 608 bp, Homo sapiens
aattaatacaatataatagaactataggatataccttcataataaaatctagttaagagttatagtctctcttttaatccatgatagtaattagtcaccaacaaactctcaaacactcaagagataattttccccaattgtgcactgatgaacatggttatccattagggtgatgactagatagaatttggaaaggaygccactctgaaaatatgctccctgtgtattttgctctgaccattttcagatttgtgattgccaagcaggaaaaatctcctttctttcctcaagttcatctttccaagaattttaaaatataagaggaaatattagcattcctttatctttctctaagttaatattcttcattgctctcaaatctgtgacataggattctgcatttctcagaagctgaaggtagaaattcatagctttgacccaaggtgtgatgtgttgttgttgttgttgttcttctttttcttcttcgtcctcctcctcatcctcctccttctccttcttctcctcctccttctgtttcctctttgatccaaacttagtttcttattgcttttcttatatcttcagaaatttcatataaataccgtaac

SEQ ID NO: 607462 - DNA, 608 bp, Homo sapiens
aattaatacaatataatagaactataggatataccttcataataaaatctagttaagagttatagtctctcttttaatccatgatagtaattagtcaccaacaaactctcaaacactcaagagataattttccccaattgtgcactgatgaacatggttatccattagggtgatgactagatagaatttggaaaggatgccactctgaaaatatgctycctgtgtattttgctctgaccattttcagatttgtgattgccaagcaggaaaaatctcctttctttcctcaagttcatctttccaagaattttaaaatataagaggaaatattagcattcctttatctttctctaagttaatattcttcattgctctcaaatctgtgacataggattctgcatttctcagaagctgaaggtagaaattcatagctttgacccaaggtgtgatgtgttgttgttgttgttgttcttctttttcttcttcgtcctcctcctcatcctcctccttctccttcttctcctcctccttctgtttcctctttgatccaaacttagtttcttattgcttttcttatatcttcagaaatttcatataaataccgtaac

SEQ ID NO: 607463 - DNA, 629 bp, Homo sapiens
aaagttagcaatgcaatgcatttgaaaatgttggcttcaggtccaggggaagctgttgattgatcaactgtcctgagtcatccagtggtaccagtagtcacaccttctacaaggccacatgggactcttccatatacaggctagagcccaagagcaagtagctaattagtattgaaatgtgttgcaggacaggacagatagggcaagggttgagaggcccttcctagaaacttcacatttaaataaagctacctggcttctttgtactcatcttcatccaaacacatggctgcaaaaaatataaaaataaatataagtaaatacaaaaagagagtcatacagtctcctctattgcctctttctatgctcaccccagatttcacccttgcatatccttagaaccttatttctgatatgaattttgttaacaggctcctatactgagacatagggctctttttagaaggtgascagtgtctgactcatcaactcaggcatcagacaacctcacttgatttctccgtattatttcaagttcttaaaatacattaaaccagtcttaggatgagtttcattgttagtggataatggcgtgatggggtggaaacagcacagaagatggtattaga

SEQ ID NO: 607464 - DNA, 466 bp, Homo sapiens
ttttgctcttctctttctctggttttcttgcagtgctcttctctttattctttattctgttgacaaatccattggtttctaagttagatgttatttccttgacagtcgttcccaatctactccagatgaaattaggccttcattttaagtggacatcacttgtgatgtccctggcataggacttatgtccctgcaaggtactaccatataatgtaatgtaaatagtatatctctttatctatattcccagctccagagttaytcttacgggtgtgggatacacccatgttcttagaatgggcagtggacatgtggatcatttgatctcctaaccctcaagggtacctggcagaacttagggtctcatccctttattccagtaaaaatattatattttctgggcacccaggtgtgaaagtacatgatccaaaagtctctttgagcctaatgcttgctggttttcctg

SEQ ID NO: 607465 - DNA, 576 bp, Homo sapiens
tcatctccagctgaagcctctcatttatagtttcagttgattataggacayttccattggcattttctatcacagccaaattgtaagagtacaaaaaggagcattagttccctttgagatcagaggtgtagtgagcaggtgagctgagatcactatgagcatttgcatttgggaacacagtgataatgggagtcagggatgaaaactgagggtgaccaaaaagccagcgataaagggagaaagcaaaaagtatggactagataaagccagctcagaatatttccttgctggactgtttctctgctattcagatacctttttttcttttatagtaacaaaaatacatacttgtgaagaatatgtgaaaatcacaaaactataaatgaggccaatttacctgcaatattatcacctagagttaatggtcattaatattttggtgtatattcttccatacagcctctttacagatatttgcatcataatgtacctactttttgtactctgtttttaaaacaatataagcattttcacatgctgtgaaatgttctagaacatgagattttttttgttttt

SEQ ID NO: 607466 - DNA, 576 bp, Homo sapiens
tcatctccagctgaagcctctcatttatagtttcagttgattataggacatttccattggcattttctatcacagccaaattgtaagagtacaaaaaggagcattagttccctttgagatcagaggtgtagtgagcaggtgagctgagatcactatgagcatttgcatttgggaacacagtgataatgggagtcagggatgaaaactgagggtgaccaaaaagccagcgataaagggagaaagcaaaaagtatggactagataaagccagctcagaatatttccttgctggactgtttctctgctatycagatacctttttttcttttatagtaacaaaaatacatacttgtgaagaatatgtgaaaatcacaaaactataaatgaggccaatttacctgcaatattatcacctagagttaatggtcattaatattttggtgtatattcttccatacagcctctttacagatatttgcatcataatgtacctactttttgtactctgtttttaaaacaatataagcattttcacatgctgtgaaatgttctagaacatgagattttttttgttttt

SEQ ID NO: 607467 - DNA, 576 bp, Homo sapiens
tcatctccagctgaagcctctcatttatagtttcagttgattataggacatttccattggcattttctatcacagccaaattgtaagagtacaaaaaggagcattagttccctttgagatcagaggtgtagtgagcaggtgagctgagatcactatgagcatttgcatttgggaacacagtgataatgggagtcagggatgaaaactgagggtgaccaaaaagccagcgataaagggagaaagcaaaaagtatggactagataaagccagctcagaatatttccttgctggactgtttctctgctattcagatacckttttttcttttatagtaacaaaaatacatacttgtgaagaatatgtgaaaatcacaaaactataaatgaggccaatttacctgcaatattatcacctagagttaatggtcattaatattttggtgtatattcttccatacagcctctttacagatatttgcatcataatgtacctactttttgtactctgtttttaaaacaatataagcattttcacatgctgtgaaatgttctagaacatgagattttttttgttttt

SEQ ID NO: 607468 - DNA, 621 bp, Homo sapiens
tttttgtttcaataagtaccaaacattttcaaagaaaaagataaaatttaaccagcacctataacttctgcctcagtgggcaaatcacttctttactaagatctcaccaagtgctttcacaggtcatttctctctgaagttaaaggtcaaagaataaaacatccatctcatagtataaagtaatggtttcattgagctttcatgtttcaccttcactccatgacttgtagaccgtcattgtatcttgagacacaagcatttcatcaataaggagagtgacagaaaacacctcaactgcacagcagaatcactctttaaaaggctaaagggtccctcctcagatacagcctccagccactggaacttctatttagattcacagatagttaacccccagaagtaatcatagaattattaaatatgcactcctctgttcttggtctgatggttttaactgtctcctgtcttcagtaggactgtcacygtcgcaaaatgctgtttttgtggtctttatctattgtactgatttacttcagcatcttaagaaaagcaatctattgagaaaaaagatcttgaagtgcttagtaaacaaaatttctctctctttcctgataacaaaat

SEQ ID NO: 607469 - DNA, 671 bp, Homo sapiens
accaaggcaaccatcacaaatcaccttagccagattttataccaaggcaaccatcacaaatcacctctgtctaacaaagcaccttttacgttttaaatggacttcaaaaggaaaatattaaagtttattgaactttattcacacacattcatctaacaaatatttattgaagctcttagaccctatcgcggcgggggaggggggaacacaaagctacatgagacaatgcctatatgccaggaactcacaatattgaagggcagagatacatgtgttctagccccctcccctcccctctccatcctccctccttacttagatcaatgccccgggtcactcactcttccctagggctccgcgggacaggcacaggatgggcaaagtgtactttggtgggcaggatgaggggattactatgccagctccttcttttcttctttgtcccgtttggggttggatggttcatctctgtggaaggtacctttacctgcgagggactaagagtacctttgcctgctcaggccatgaaagagaatgatgtcttcagagaaagcaggtaaaaccctccataacctgtggccccaatcccatctctccagccttaaatcctactccrtttccgttatatccactcactcctttctgaatacactgcagtttgctttcattca

SEQ ID NO: 607470 - DNA, 590 bp, Homo sapiens
aacactgcaactctgatggtaacttattttacaatatgtttccgggttgtcattttcttttcagtgtcaataatcatattgctaaaagtcctttattctaggaatcatctatctcagtaagttttttwaaaaaaatgtaaaactttttgcagaaaaattttacaccatactgaacaactttaaaaggaagcatagaaaactagtttatttgaatcataagtttactttcatgtgctcagataaagttattttccttggcatttcagactccagcctttgaacttcattgcaaacaccatggaatttggcctttcagaaattgccagtgtcctggtgaataacaagccttctcctatcacggatttgtacagctatattaaaaattagtcaaatatcaaaaggaacaccaaagcttgtaggtaaaatgtcatcttagaattgcattttgaactttgggagcagtaaaaggcttgacaattaaaatgtcagagcggtcttatcaaaaaatatcttcagatattatttctttcctttttttgtttttcatagaatcaaatggagacctagccacatacacagacaggcaggca

SEQ ID NO: 607471 - DNA, 590 bp, Homo sapiens
aacactgcaactctgatggtaacttattttacaatatgtttccgggttgtcattttcttttcagtgtcaataatcatattgctaaaagtcctttattctaggaatcatctatctcagtaagttttttaaaaaaartgtaaaactttttgcagaaaaattttacaccatactgaacaactttaaaaggaagcatagaaaactagtttatttgaatcataagtttactttcatgtgctcagataaagttattttccttggcatttcagactccagcctttgaacttcattgcaaacaccatggaatttggcctttcagaaattgccagtgtcctggtgaataacaagccttctcctatcacggatttgtacagctatattaaaaattagtcaaatatcaaaaggaacaccaaagcttgtaggtaaaatgtcatcttagaattgcattttgaactttgggagcagtaaaaggcttgacaattaaaatgtcagagcggtcttatcaaaaaatatcttcagatattatttctttcctttttttgtttttcatagaatcaaatggagacctagccacatacacagacaggcaggca

SEQ ID NO: 607472 - DNA, 539 bp, Homo sapiens
ttctccgtcttgaagagctgagaatgcatgcctccgtgagcttgaagcagggtattaggtggttgataatgggactgaaatttgtaggcaaaactcaaatgtacagaagggtggctttatttctcccaaagtggaatctgtttcctaagtcagtttaaaatctcaatcaaggcatcttcccttttcaaatattcttccctcctcttcttccccacgacaacgtggggatggagaatgagaagttccacgggaacaaggaggaggtttctgctttgcagactgtccctgctccttgtgtccttcttgcctctgctgaggtgtatcctgtccctggggctgtggctatcaggttctttctcttatgcactccctgctgagggagccagcccattttttgttgctctgagtgaggatgccaggactattgcaggttgctgggccatctgctgaccaaatgccccatctcrgttctcagggtactctttgaagttcaatgacactatctacctgactcttggatttgaacttagtctgaattc

SEQ ID NO: 607473 - DNA, 518 bp, Homo sapiens
tgactttgtaagttcctgtgacagacttacccagaagttttcttttctatagactgtatctctccattttttttttttttgagatggagttttttgctcctgtggtccacgttggagtgcaatggtgcratcccggctcactgcaacctccacctcctgggttcaagcaattctcatgcctcagcctccagagtagctgggactacaggtgcacaccaccacacccagctaattttttttttttttttttggtatttttagtagtggggtttcaccatgtcagccaggctggtcttgaactcctgagctcagatgatccacccgcctaggcctcccaaagtgctgggattacaggtgtgagccaccatgcccagccttatctctccagttttttaaataaacttgtgctggttggaaatctaaagtgtttttcgcttgtgttcttgtgtgttttatgtcttaagttttaactaagtggccttatgctccatattggcacatttttctaggtcgagtct

SEQ ID NO: 607474 - DNA, 518 bp, Homo sapiens
tgactttgtaagttcctgtgacagacttacccagaagttttcttttctatagactgtatctctccattttttttttttttgagatggagttttttgctcctgtggtccacgttggagtgcaatggtgcaatcccggctcactgcaacctccacctcctgggttcaagcaattctcatgcctcagcctccagagtagctgggactacaggtgcacaccaccacacccagctaattttttttttttttttttggtatttttagtagtggggtttcaccatgtcagccaggctggtcttgaactcctgagctcagatgatccacccgcctaggcctcccaaagtgctgggattacaggtgtgagccaccrtgcccagccttatctctccagttttttaaataaacttgtgctggttggaaatctaaagtgtttttcgcttgtgttcttgtgtgttttatgtcttaagttttaactaagtggccttatgctccatattggcacatttttctaggtcgagtct

SEQ ID NO: 607475 - DNA, 622 bp, Homo sapiens
gccaaggcgggtgaatcatttgaggtcaggagtccgagaccagcctggccaacatggtgaaaccctgtctctacaaaaattaccaaaattagccaggcgtggtggtgggtgcctataatcccagctacttgggaggctgaggcaagagaatcaattgaaaccaggaggcagaggtttcagtgagccaagatcatgccactgcattccagcctgggcaacagactgagtaagactctgtctcaaaaaaaaaaaaaaaaaaaagaaaaaagaaaaaagaaaaagaaagaaaacttgatgtccttatgagtgtctagccagtgtgtacaagatttagttcccttagcctaatgggttgctttttcttttgaatcatgggtcattgaacactctgctttctttccttaraatgcccttctcttctttccatataattcacttggctaagcctacttgtctttcagtcctcagctatctccttctacagaaagccttttctcatgacttaagattttctgtgcaatttcttccatttaccccaatgcagtcctttttgcactgcattgtttaacaacctattccatgaagatatatattgcttccagtttattatcttagttgatag

SEQ ID NO: 607476 - DNA, 644 bp, Homo sapiens
tcacatgatataaggtggaagggcaagagaggaagtatactccctcttccaccttgagcctttttatgagtcctaatctcatctatgggagctctgactttattacttaattacctcttaaagaccccaccttttgatcctattacattgcagattaggtgattaggtttcaagctatgaattttggagaggatgtaaaaatccaaaccataataattatgtgtgcttatttatatataatatatagttgtaagcatacactacaaactctagggcaaccactaaaaataaaaatagaagtataactgatatgctaagaaaggagataaaatggcatcatgtaaaatgctcgattaaaaccacatatagcagaaaaaaggacaaaaataagaacaagaaaaagaactagagaactgttccaagtaaatcttaatctaaatatctaaatatcaataatcactttgaatgtcaatggtctaaatgatctacttaaagaaaaaagattgtcagaatgaattaaaaacaagacccaaccatatgttgtctacaagatacccacttwaaatataaagacacacatagattaaaagtaaatggatggagaaagatataccatgctacacacacacacacacacacacaca

SEQ ID NO: 607477 - DNA, 524 bp, Homo sapiens
tttacatttttaagtggctgaaaaaaaaatcaaaagaaggatagcattttgtgacacatgaaaagtatatgaaatttaaatttcagtgtccataaataaagttttattgaaaaacagccaggtccatcgtttacatattgcctatggctgcttttggactataaaggcagtcctgagtccttgtgacagggactgtgtgtggtccgtaagccctaaaatatttaatatcttgctctctgcagaaaaagtttgttgatccatgttctagattaacaaaaatgcccccttggggagggatatcagcaatttcctagtccagatctctcatgaggatatggaaacagagagaaaacaaaagtggattgcctaggtatacaccaccaggcctctggatttctttttttytttttttttttttttttgagatggagtttcgctcttgttgcctaggctggagtgcaatggcgagatctcggctcaacacaacctccgcctcccaggttcaaacgattctcctgcctcag

SEQ ID NO: 607478 - DNA, 492 bp, Homo sapiens
ttgttcctaatcttagaggcaaagcattcaatctttcaccattaagtatgatattagctgtgggttttttgtagatgccctttatcaggttgacaaatttttcttctgatcgtagtttactaagagattttraaaaatttttaaatcagaaatgggtattggatttttgcttttttttaggaccatataggtgatcacatttattttctttttagttttaatatggtgaattacattctttgatttttttaaatgttaagccaactttgcatttctttgaaaaattccacatggtcattatgcattgtccattttgttggatttggcttgttaaaattgaatttcaaatttttgcaaccatgtgtatgagaaatattggtttttagttttcttttcatgaaatgtctgtctgattttggtaatacaggcatttgtggcctcatagaaagtgttgggaaatcttacattgttttcaattctacggaaatgttt

SEQ ID NO: 607479 - DNA, 522 bp, Homo sapiens
ctgtgtgcctcaaccctcttatttgttcttttttttttttaatttttttagtatttattgatcattcttgggtgtttctcggagagggggatttggcagggacataggacratagtggagagaaggtcagtagataaacatgtgaacaaaggtctctggttttcctaggcagaggaccctgcggccttccgcagtgtttgtgaccctgggtacttgagattagggagtggtgatgactcttaaggagcatgctgccttcaagcatctgtttaacaaagcacatcttgcaccgcccttaagccatttaaccctgagtggacacagcacatgtttcagagagcacggggttgggggtaaggttatagattaacagcatcccaaggcagaagaatttttcttagtacagaacaaaatggtgtctcctatgtcaacttctttctacacagacacagtaacaatctgatctctctttcttttccccacatttcccccttttcttttcgacaaaaccgccatcgtcat

SEQ ID NO: 607480 - DNA, 269 bp, Homo sapiens
caggagccatctaggacaggtggtgcttggctatggcaaagaggagggaacttaagcccaacgggtcagtaaatgatggatttgagccttctcttctattggattagtagatcccaacagtcaatacagtggggggttggaaaaaccttcctgtgtttcatgatacccgaatgccaatgtcatgaatggcaaatgctagcatcccaataayggtgtgcccttcatgaaaccccatccaaagattcagccccttctcttaatgttcaagc

SEQ ID NO: 607481 - DNA, 555 bp, Homo sapiens
aatttatcagttctaatagtttttttttttttttttttgtggagtctttaggtttttccaaatctatcatatcatctgcaaacaaggataatatgacttcttcctttccaattcagatgtcctttatttctttctcttgtctgattgctctagctaggacttccagtattatgttggataacagtggtgaaagtgagcattcttctcatgttccaaatcttaaaggaagggctttcagtttttccctgtttctttgttgattttctgtctagatgatctgtccaatgctgaaagaggagtgttgaagtctccagctattattgtattgcgatctttctctgtctttagttctaataatatttgctttacatatctaggtgctctggtcttgggtgcatatatatatttagaattgttatatccccttgctgaattgacccctttatcattatataatgaccttctgtgttgctttcaatagtttttgtcttgaaatctattttgtcttatakaaccacatctattcctcctcttttttggttttcatttggatgg

SEQ ID NO: 607482 - DNA, 516 bp, Homo sapiens
tcaatgttggcttccttagctccgtgccactcagcattgcagcaccgaaaggaaaactgtttcctctctactctcccactactctcaattcttccaacaacagatgtgggttgttttcccccccaacagcaagcagttctccagttctctgcagatgctaatgccacgtcctgcaattcaattctgaccttatctacctggagttagtgcagacccaacaggttgaaggctgagtcccaaaagactgtccccacttcagatgccagtcgcacaagtgatgagtctccaggttatcctcaacttctgtccaactcaactacagatcagaggttcccatggccccctactcaggttctataatttgctagaagggctcataaaactcaagagaacagccgacttactagatgactagtttattataagaggatacaactcaggaacagccagaggagagagggatgggagagggtgcagaacatccatgccrtatctaggtacgccacccttccagca

SEQ ID NO: 607483 - DNA, 622 bp, Homo sapiens
catattctctaagtgcatatggaaaaaataaacatgatttatttttgttcagttgtayaagctcatttggctttggcatctacatggaatgggaacccagtaacattttgtaggtataaaaacctctgattattttttcaggtgcttttgagttaaaaaacaaacaaacaaacaaatatgctttgcaagcaacagtacttctgactataaagccacatgtaagtcaaataaaagtaatccacgcataccttctcaagggccaatttttacctacaagtcctattctaattttgatctattgatggaggacagggaagagaaatgtggcaatgattaatagaaaagaagtagcattgttctgattggttgattagatttttgtttttgctatcattctctgctttgttctccatgaacagactatccgagaaggctcaagtttatactttcttgccaaaatttctgggttagcaaagtatacttgaaatggcttctaggattttgttcaaagttgaaatgaaacagaagtttctaaacttctccaccaaagaggggaaaaactcttactggcaaactcatcattaatgaccataaattttaaatcaattaattcactatttgt

SEQ ID NO: 607484 - DNA, 538 bp, Homo sapiens
cccggctaatttttgtattttcagtagagacggttttgccatgttgaccggtctggtcttgaactcctgacctcaggtgatctgcccacctcggcctcccaaagtgctgggattactggcttgagccactacacctggccaccctttttctttaatgctttaaaaaatttatatactttgctgttttgatgctgtactctgctgtttcacagtcatctatattttcagcatcagtattttggagcattcttgtatttttctcttttaaagcccaaaagataagagttgtaagcctatttcatagcggcatcttggatcccaaattgtgttcttctctttctgtaggaaatctttatatgaagycttaaagccatgttcttgagcaaaatcaactttttatgaatccaaaggccagtctgattctagacaaagctataactcatcaaaatcctcaagattttagaccacctcctcatgcataggacgatgctgacccaatggcaaactcattgcttgctggtcaggcccacatatttta

SEQ ID NO: 607485 - DNA, 587 bp, Homo sapiens
attggctatagtcatcctgttgtgctaccaaagactaggtgttattcattctaactattttttggtacccattaaccatccccttgtcccccaatgcctgcccctaccacaacctttcccagtctctggtacatgcttctactctctatctccatgaattcaattgttttaatttttagcttcacacaaataagtggaagctagaacatgagaaatttgtctttctgtgcctagtttatttcayttaacataacgacctcaagtttcatccatattgctgcaaaggacagaaactgattttttatggctgaatagtactccactgtgtaaatgtaccacattttctttatccattcatctgctgatggacatttaagatgctgccaaatcctggctactgtgaatagtgctgcaataaacatgggagtgcaaatatctctcccaaatactaattccctttcttttgggtatatatccagaaattggattgctagatcatatggtagctttatttttagttttttgagcaacctccatctgttctctatagtggttagtaaaggtggtttttaatccagtgattaaat

SEQ ID NO: 607486 - DNA, 559 bp, Homo sapiens
ccatttttccctctggtctacttggcatctcttcatccactgactttctcctaagccttccctgttctggaaacttcagaggcaacacctcatgttcaaatcttttcttgctcatccagtgctctggttatagctttgtgaatcatctctgcaggcttttccacctcaatcaaaacagtactttatgtctttaatcactgtatagcttcttcttcctctaccattctatctatccctgatatgctgttaattataatattttttttctaaatcagtacagtgttacaatgcaatatgggagtgtgaaagagggaggctaatttatttattttgtttacatttgcttctattcctctacacaagtcttcaagatttcctcccacactgtattctctgtttttacatcttaactttgttttggaagtgtggaaatcagtattgtcttggagagagaaccggtacaagcaccaatgtcttcagtagagatctactggataaatacttcccccaaagcaaatcacatagcaactgcaytaataattctaacatcttatgcatt

SEQ ID NO: 607487 - DNA, 279 bp, Homo sapiens
tggcatttttgtttggtgttttctgcaaagtactgacgaaatattttgtaaagtgagctttgggtataacttagccccatcattatttagagaatagaggaagagaaagaggaaggattaaaggcagacaatgacagaccattcaggataggtagggttttaaagggagataaacacagtmtcatcaactaaggagagatttgctgcagtaaataggatgagggaaatagtctgtgggatgcaagcaaaggaagcagggtgccttagacactgagtgga

SEQ ID NO: 607488 - DNA, 589 bp, Homo sapiens
agaagttccacttcccccaattcgctgtacatgtaaacttgatttagacacctggtgatttgtagtaaacagtcttacataaaccgttggtttgttgacttagttggtctagggatggcagtagcgaagccaaggtgataggttatttctgtgtgagtcattagttttctctatacccctacctcatatgctcctttcctccaaatgtgtgttcaaaaacatcttccagaggaagtatgtatcctccctgagaatgtcagaagcctttttttctttttggtatatggtaaagcattaatttctggcttccactgccatgatttcataaaatttagaggaaacaagaatgtggtgagtcctatgttgaaaaagacatgttttgtgaaaagcttgtaatttctttaggttatataccttttgcaaaagtagtatatggaccttatgttaaatttttttttccagaaaattatgacttacctgtttgacttcccacatggccccaaggtaccgtatgtgactcaatagaccaytgctttaataacaatgaatgcatttaatcattctggaatattaagggggaaagaattgg

SEQ ID NO: 607489 - DNA, 589 bp, Homo sapiens
agaagttccacttcccccaattcgctgtacatgtaaacttgatttagacacctggtgatttgtagtaaacagtcttacataaaccgttggtttgttgacttagttggtctagggatggcagtagcgaagccaaggtgataggttatttctgtgtgagtcattagttttctctatacccctacctcatatgctcctttcctccaaatgtgtgttcaaaaacatcttccagaggaagtatgtatcctccctgagaatgtcagaagcctttttttctttttggtatatggtaaagcattaatttctggcttccactgccatgatttcataaaatttagaggaaacaagaatgtggtgagtcctatgttgaaaaagacatgttttgtgaaaagcttgtaatttctttaggttatataccttttgcaaaagtagtatatggaccttatgttaaatttttttttccagaaaattatgacttacctgtttgacttcccacatggccccaaggtaccgtatgtgactcaatagaccactgctttaataacartgaatgcatttaatcattctggaatattaagggggaaagaattgg

SEQ ID NO: 607490 - DNA, 257 bp, Homo sapiens
gaattcttttaaaatgggttatttttaggtttgaggttkgtaaatgaagtttcctaaaaccgcacatcatttggtgtttttgccacaaggtggcaccccagcatctctgtcgacctgcccgacctgttcgggctgcctcaggtattaatagcaagcgtgtgcgctctgccaagcagcgccatccccagaggccagcaagccaccaggtatctatctgtgttcatgtctgagagcacatctggctggctggcatcttg

SEQ ID NO: 607491 - DNA, 446 bp, Homo sapiens
tttgaggtttgtaaatgaagtttcctaaaaccgcacatcatttggtgtttttgccacaaggtggcaccccagcatctctgtcgacctgcccgacctgttcgggctgcctcaggtattaatagcaagcgtgtgcgctctgccaagcagcrccatccccagaggccagcaagccaccaggtatctatctgtgttcatgtctgagagcacatctggctggctggcatcttggaatcttgtgttcagagaactgtcaatcccccatggccacccacccttaactggctgactcgcctggccagctctccagacaagagccggccacaggcagtcagtatatagcaacaacctcattcgtcctcagaaacatgcaaattaagacctcccaaactgctaacatttaacagactcaacaataccaagtgctggatgcagagcaaccggaattc

SEQ ID NO: 607492 - DNA, 423 bp, Homo sapiens
cctaaaaccgcacatcatttggtgtttttgccacaaggtggcaccccagcatctctgtcgacctgcccgacctgttcgggctgcctcaggtattaatagcaagcgtgtgcgctctgccaagcagcgccatccccagaggccagcaagccaccaggtatctatctgtgttcatgtctgagagcacatctggctggctggcatcttggaatcttgtgttcagagaactgtcaatcccccatggccacccacccttaactggctractcgcctggccagctctccagacaagagccggccacaggcagtcagtatatagcaacaacctcattcgtcctcagaaacatgcaaattaagacctcccaaactgctaacatttaacagactcaacaataccaagtgctggatgcagagcaaccggaattc

SEQ ID NO: 607493 - DNA, 460 bp, Homo sapiens
tcagagctgaatccagaggcacaccctctgacacgtagygccagtcccaggtgcgcacccagcagaaatggacacacacgttcacccaaagacatgtataagaatgttcaaagccacatattgacagtagccccagacgggactaccccaatgtctatcagcaatgaaaggacacgtgcactgctgtgtattcacacagtggcatactagacatggcaagaggaaatagtgtgatcacacacagcaacagaggtgatgtgacaagcacgacacagagaaaggagccagcctctgtgtaacacacacagtgtctccatttatgcaaagttcaaaagcaggcagaattaggctgagaagtcaagaaagcagttactctgggggaccagtgactaaaagggagcgtgatgggagttctgtggggctggtaacgtcctgtctcttggtctgggtgccactttac

SEQ ID NO: 607494 - DNA, 580 bp, Homo sapiens
tatgagggcaagggaaacaggcccttgaaaagaaggtaatgtggagtgggtagcccctgtgttgattaaacaggggacggacttaccctccactgtgagagttacccaaagctcagcatccatgatggtccagggggcttccaaggtgatcaggcagcgtcagtcttcagctgccaagccaagcaaatctgggaagcagtcagtcagagagccttgggccagacctttaggggctctaggagtggctgccgggtgagctgggcagtctgatttccagtggstccctgcacagatgggacatggcttgggaggaatcctgggctgcaggcattccttggcccagtggccagatttctggcacttgaagcaacagcctgttggaggaggtcctgtaggaatgcttgactgctgcggcttaggcagtttgaagttcttgtgtgctggaggtgtggctgggttttgtctcacagcaaaggcaagtaattgtaactcagaaatgcgttgctgtctggctgcctcctctctattattgtacaccttgaaggtgaggttgattaattcctgttgtggggtttgaggg

SEQ ID NO: 607495 - DNA, 478 bp, Homo sapiens
aaaaataccaatattgaccttatttacacttctatatattatggaaaaacctggcttgcttggtagatggcagtggaatatttaatgctcttttctgtgtgtttaagtattgcaaatgatcatgaacttaatagaaagttaaagctcttttttgagcagctgaatgacagggtattttggcaacagagcatgtttccatgagcatgtttaccagtgtgctgaaggaaatagattttggacaacaggtccttctttaaattaaaaaaaaaaaaattctttatgacagaggtgtcattatgcttctaatagatgcaaggagagttacttgcctttttgaaacaataagaaaggaagaaatagttaatgtttgcagttgcacgaaagagtaaatgtggtaaatttcatgaagttaacacaaaaattatacatrtagaattattaaatttccagaagtcttaaccccaaggaagactagagc

SEQ ID NO: 607496 - DNA, 315 bp, Homo sapiens
catgctagattcattgaattgtatcaatgttctgattagactaaactgaacttgacaaggcctatggtgaatagatttacatagctgktaggttcattatttatagttttaactatgaagcaataaatgatgaatagactataaagactactgttatataggatttatactttactttttttccaaaagggatttgaggtgacttgcaaaattaagcacatataaaatgggtcaaaagactaattttttaaaataaagcacataagaaaatatgcttccaaatagatattatccttcatatagtcaccttattaa

SEQ ID NO: 607497 - DNA, 626 bp, Homo sapiens
ccttgggtttggcaaagatttctacgatgcaacacaaaatcatgccctaaattgttaaaatgttaataarttaatggaggaaatcaatgttaggagttgatttgaaatagcagcttatctactcatgtaataaaattaattttctatttgctaggcagagctctaggcagaaacaagatttcatagaaataaaaagtcttggttctttgaatacacagtttaataatatgaacagataagctccaactctggtgggaaggtttgaaaaatgcaaatctgatttattatcatcttaaaaaatagttatagcgtgatatagtttggatctgtgtccccacccaaatctcatgttgaaatgcattcccaatgttggaggttggacctggtatgaggtggttggctcatggttgtggattctcatgagtggttcagcaccatccccttggtactcttctctcaatagtgagcaagttctccctagatctagctgtttaaaagtgtggcacttcactccctctgtctcactcctgctctgccatatcacctgcctactccagcttcatcttctgccatgactgtaagtttcctgaggcctccccagaagctgagcagatgccagtatcatg

SEQ ID NO: 607498 - DNA, 626 bp, Homo sapiens
ccttgggtttggcaaagatttctacgatgcaacacaaaatcatgccctaaattgttaaaatgttaataagttaatggaggaaatcaatgttaggagttgatttgaaatagcagcttatctactcatgtaataaaattaattttctatttgctaggcagagctctaggcagaaacaagatttcatagaaataaaaagtcttggttctttgaatacacagtttaataatatgaacagataagctccaactctggtgggaaggtttgaaaaatgcaaatctgatttattatcatcttaaaaaatagttatagcgtgatatagtttggatctgtgtccccacccaaatctcatgttgaaatgcattcccaatgttggaggttggacctggtatgaggtggttggctcatggttgtggattctcatgagtggttcagcaccatccccttggtactcttctctcaatagtgagcaagttctccytagatctagctgtttaaaagtgtggcacttcactccctctgtctcactcctgctctgccatatcacctgcctactccagcttcatcttctgccatgactgtaagtttcctgaggcctccccagaagctgagcagatgccagtatcatg

SEQ ID NO: 607499 - DNA, 626 bp, Homo sapiens
ccttgggtttggcaaagatttctacgatgcaacacaaaatcatgccctaaattgttaaaatgttaataagttaatggaggaaatcaatgttaggagttgatttgaaatagcagcttatctactcatgtaataaaattaattttctatttgctaggcagagctctaggcagaaacaagatttcatagaaataaaaagtcttggttctttgaatacacagtttaataatatgaacagataagctccaactctggtgggaaggtttgaaaaatgcaaatctgatttattatcatcttaaaaaatagttatagcgtgatatagtttggatctgtgtccccacccaaatctcatgttgaaatgcattcccaatgttggaggttggacctggtatgaggtggttggctcatggttgtggattctcatgagtggttcagcaccatccccttggtactcttctctcaatagtgagcaagttctccctagatctagctgtttaaaagtgtggcacttcactccctctgtctcactcctgctctgccatatcacctgcctrctccagcttcatcttctgccatgactgtaagtttcctgaggcctccccagaagctgagcagatgccagtatcatg

SEQ ID NO: 607500 - DNA, 564 bp, Homo sapiens
gcacggtgactcatgcctgtaatcccagcactttgtgaggctgaggtgggcggatcatccgaggtcgggagttcaagaccaaactgaccaacatcgagaaaccccatctctactaaaaatacaaaattaacygggcgtggtggtgcatgcctgtaatcccagatacactggaggctgaggcaggagaatcgcttgaacctgggaggcggaggttgcagtgagccaagatcacgccattgcactccagcctggtaacgagagagattccgtctcaaaataaataaataaataaataaataatgctctaaatagaatgatttatttccaaaatcgatatagtagagcgatgcgaaaataataataaaagcgagatatttcgtggcagagttatttcagcgtaagctgcagccacaagcgcagctggagaatattctccaggccaaggggaaaagcattaactccgctgagaagaatcggcccaagaattccgtatcacagaagatgctgtctgagcattatccttcaccctcaagtcctggcatcagctgtccaggccgtgggtac

SEQ ID NO: 607501 - DNA, 564 bp, Homo sapiens
gcacggtgactcatgcctgtaatcccagcactttgtgaggctgaggtgggcggatcatccgaggtcgggagttcaagaccaaactgaccaacatcgagaaaccccatctctactaaaaatacaaaattaactgggcgtggtggtgcatgcctgtaatcccagatacactggaggctgaggcaggagaatcgcttgaacctgggaggcggaggttgcagtgagccaagatcacgccattgcactccagcctggtaacgagagagattccgtctcaaaataaataaataaataaataaakaatgctctaaatagaatgatttatttccaaaatcgatatagtagagcgatgcgaaaataataataaaagcgagatatttcgtggcagagttatttcagcgtaagctgcagccacaagcgcagctggagaatattctccaggccaaggggaaaagcattaactccgctgagaagaatcggcccaagaattccgtatcacagaagatgctgtctgagcattatccttcaccctcaagtcctggcatcagctgtccaggccgtgggtac

SEQ ID NO: 607502 - DNA, 564 bp, Homo sapiens
gcacggtgactcatgcctgtaatcccagcactttgtgaggctgaggtgggcggatcatccgaggtcgggagttcaagaccaaactgaccaacatcgagaaaccccatctctactaaaaatacaaaattaactgggcgtggtggtgcatgcctgtaatcccagatacactggaggctgaggcaggagaatcgcttgaacctgggaggcggaggttgcagtgagccaagatcacgccattgcactccagcctggtaacgagagagattccgtctcaaaataaataaataaataaataaataatgctctaaatagaatgatttatttccaaaatcgatatagtagagcgatgcgaaaataataataaaagcgagatatttcgtggcagagttatytcagcgtaagctgcagccacaagcgcagctggagaatattctccaggccaaggggaaaagcattaactccgctgagaagaatcggcccaagaattccgtatcacagaagatgctgtctgagcattatccttcaccctcaagtcctggcatcagctgtccaggccgtgggtac

SEQ ID NO: 607503 - DNA, 564 bp, Homo sapiens
gcacggtgactcatgcctgtaatcccagcactttgtgaggctgaggtgggcggatcatccgaggtcgggagttcaagaccaaactgaccaacatcgagaaaccccatctctactaaaaatacaaaattaactgggcgtggtggtgcatgcctgtaatcccagatacactggaggctgaggcaggagaatcgcttgaacctgggaggcggaggttgcagtgagccaagatcacgccattgcactccagcctggtaacgagagagattccgtctcaaaataaataaataaataaataaataatgctctaaatagaatgatttatttccaaaatcgatatagtagagcgatgcgaaaataataataaaagcgagatatttcgtggcagagttatttcagcgtaagctgcagccacaagcgcagctggmgaatattctccaggccaaggggaaaagcattaactccgctgagaagaatcggcccaagaattccgtatcacagaagatgctgtctgagcattatccttcaccctcaagtcctggcatcagctgtccaggccgtgggtac

SEQ ID NO: 607504 - DNA, 608 bp, Homo sapiens
ccaccgcataacagcctgagcaacagagcaaggcccggtctcaaaacaacaacaacaacaacaaaaacaaaaactacggtggctcacgcctgtaatcccaacattttgggaggccgaggtgggccgatcacttgaggtcaggagttccagaccagcctgggcaacacggtgaaaccccgtctctactaaaaatacaaaaaytagccgggcatggtcgtgggcgcctgtaatcccaggtacacgggaggctgaggcaggacactgcactccagcctgggtgaaagaaccagactctgtctcaaaaaaaaaaaactacttagaaatatgatgaaatgttataaatgatgaaagtatacaatataatacaactaggtaagaatgtatgcataaacaccggtaataagaaaaatgaaaaattctttaatgtagtggtagccaactatattttaaaatattctttaatgtttttatatcatcttttaaatacaccaataaaaagaaagaatagtagttagctagtagaatttctcaatactctgcttctattagggtagggcacggagtggtccttgctaagatgttgatgggtattagtaaatttatgagca

SEQ ID NO: 607505 - DNA, 608 bp, Homo sapiens
ccaccgcataacagcctgagcaacagagcaaggcccggtctcaaaacaacaacaacaacaacaaaaacaaaaactacggtggctcacgcctgtaatcccaacattttgggaggccgaggtgggccgatcacttgaggtcaggagttccagaccagcctgggcaacacggtgaaaccccgtctctactaaaaatacaaaaattagccgggcatggtsgtgggcgcctgtaatcccaggtacacgggaggctgaggcaggacactgcactccagcctgggtgaaagaaccagactctgtctcaaaaaaaaaaaactacttagaaatatgatgaaatgttataaatgatgaaagtatacaatataatacaactaggtaagaatgtatgcataaacaccggtaataagaaaaatgaaaaattctttaatgtagtggtagccaactatattttaaaatattctttaatgtttttatatcatcttttaaatacaccaataaaaagaaagaatagtagttagctagtagaatttctcaatactctgcttctattagggtagggcacggagtggtccttgctaagatgttgatgggtattagtaaatttatgagca

SEQ ID NO: 607506 - DNA, 608 bp, Homo sapiens
ccaccgcataacagcctgagcaacagagcaaggcccggtctcaaaacaacaacaacaacaacaaaaacaaaaactacggtggctcacgcctgtaatcccaacattttgggaggccgaggtgggccgatcacttgaggtcaggagttccagaccagcctgggcaacacggtgaaaccccgtctctactaaaaatacaaaaattagccgggcatggtcgtgggcgcctgtaatcccaggtacacgggaggctgaggcaggacactgcactccagcctgggtgaaagaaccagactctgtctcaaaaaaaaaaractacttagaaatatgatgaaatgttataaatgatgaaagtatacaatataatacaactaggtaagaatgtatgcataaacaccggtaataagaaaaatgaaaaattctttaatgtagtggtagccaactatattttaaaatattctttaatgtttttatatcatcttttaaatacaccaataaaaagaaagaatagtagttagctagtagaatttctcaatactctgcttctattagggtagggcacggagtggtccttgctaagatgttgatgggtattagtaaatttatgagca

SEQ ID NO: 607507 - DNA, 607 bp, Homo sapiens
tttactcttttcatcaacagaatgaacactttttgcccttgatttttctgtatctttgtgaaaaaaattgactttgcaaatgctatcactaaccccaagtgaatcagaacacactgaggggaaacagtttttaaaatatggctgttatggatggaatgtttgtgtcccccacagattcatatattggagcctcaactctccatgtgatggtatttggagatgggacctgtgggaggtgattggggttagatgtggccacaacggtggggtcctcatgacaagattattgtccttataagagacatgagagcttgctctstctctctctctctctctctctccccccccccacctccatctctctccccctctccctctgtctctctgccaggtgaagacatagcaagaaggcagccatctgcaagccaggaacagagctcttcccaacactgctggcaccctgagcttggacttccagcccccaaaactgtaagatgataaatgtctattgtataagccacaagtctatggtatttcattacagaagcccgagctgactaaggcaagggctctacaaaagaaagctatttttgaattcagggagccc

SEQ ID NO: 607508 - DNA, 537 bp, Homo sapiens
gggtttgttgtgccactttttyttttttaaattcttaacctagagaaagtgggatcctcctgggggaccccacagagagccagagagcagccagccatgctcaagaaggcagagtgcaactgactggcaaccaatgcctaaggacacgggcatctctgtgaacaacaaaggaaaatgagtgctgggccgcacacacactgccttctacaacctgctccatgccaacccacatgtgggagggtatccagtgacgtttcttatcaatagaggaaaagaattgtcaacacaacttgacaattcaagcaatgggcacacgacgcagtttgaaacccaagtccctgtgtgtccagtatgataaaatacataaaagtgtgccatttcctatcatttcttatctttaaccagccatacaaatattgataagccaggaaattccaaaatggtgctggtctagtatataaacactaattgctttcctcattgcactgtaccatttttgagaggaaaaacgtggaattttttaaaccttgatagaaa

SEQ ID NO: 607509 - DNA, 547 bp, Homo sapiens
ggtcttgattcagaattgatgaaaataataaaaattgtgaatattaccaaatcacagaagcaaattgtgcaacttacagtgtgctgtgcaaatcaatgcacagctggtctattttcccgcattgggcagtaaggtcctcactgggtttgaggtttggaaatgaaggatgaaacgaaaactttccttcatggcactaaaatgycattcatgacagtggtctgaaatttatttacttatttattacttaaaaaaatattttgagagtcagggttttgctctgtcacccaggctacagtgcagtggtgcaatcatagctcactgcagcctcaaactcctgggcttgagcaatcctcccgcttcagcctcccaagtagctgggactacaggtatgcaccactgcacctggctaattttttttatcttttatagatacagagtctctctatgttgctcaagctgctctcaaactcctgagctcaagcaatcctgccgccataactttcaaagtgccgggattccaggcgtgaaccaccacactcggatgttg

SEQ ID NO: 607510 - DNA, 547 bp, Homo sapiens
ggtcttgattcagaattgatgaaaataataaaaattgtgaatattaccaaatcacagaagcaaattgtgcaacttacagtgtgctgtgcaaatcaatgcacagctggtctattttcccgcattgggcagtaaggtcctcactgggtttgaggtttggaaatgaaggatgaaacgaaaactttccttcatggcactaaaatgtcattcatgacagtggtctgaaatttatttacttatttattacttaaaaaaatattttgagagtcagggttttgctctgtcacccaggctacagtgcagtggtgcaatcatagctcactgcagcctcaaactcctgggcttgagcaatcctcccgcttcagcctcccaagtagctgggactacaggtatgcaccactgcacctggctaattttttttatcttttatagatacagagtctctctatgttgctcaagctgstctcaaactcctgagctcaagcaatcctgccgccataactttcaaagtgccgggattccaggcgtgaaccaccacactcggatgttg

SEQ ID NO: 607511 - DNA, 547 bp, Homo sapiens
ggtcttgattcagaattgatgaaaataataaaaattgtgaatattaccaaatcacagaagcaaattgtgcaacttacagtgtgctgtgcaaatcaatgcacagctggtctattttcccgcattgggcagtaaggtcctcactgggtttgaggtttggaaatgaaggatgaaacgaaaactttccttcatggcactaaaatgtcattcatgacagtggtctgaaatttatttacttatttattacttaaaaaaatattttgagagtcagggttttgctctgtcacccaggctacagtgcagtggtgcaatcatagctcactgcagcctcaaactcctgggcttgagcaatcctcccgcttcagcctcccaagtagctgggactacaggtatgcaccactgcacctggctaattttttttatcttttatagatacagagtctctctatgttgctcaagctgctctcaaactcctgagctcaagcaatcctgccgccrtaactttcaaagtgccgggattccaggcgtgaaccaccacactcggatgttg

SEQ ID NO: 607512 - DNA, 616 bp, Homo sapiens
gtatttaaattctgtttacttctttaaccttttgacttacctacataaaaggtaatctttcaggaacaagttccaaacagaatcactgcctatttgctttcctcaaatcctcatggaataaacagaatctgtaacaagatccctttcaccattttttattctgctcatatttgcaatgattttataactgacggctgggccgcctctctcccatcatcgcaatcagtgcatcctgggattaaaaaccatttagggcccaagtcttaaacaaactccccacacagcagtataatgaacattatgcattgtttctttttattgttgctagctttatcggctcggccaagaagctggggagttcgtcctcatttttaagcagaggagtagcccgcttaccaacatggccagtggcatccagcgagattgcaaaggtggcagggcagtwatgcatgaaggcttgatgaccacctgccccgttttatcataaaacggtcacacactagatacttctccagagacttttcctgggaatattttctttacaaacatgaactggtgtctaaattgctcaagaacaaatatgttgagtagctgaaaaattgcattaagaagagca

SEQ ID NO: 607513 - DNA, 451 bp, Homo sapiens
gtgctttcaaaccattcttctctcattcaaccaactcttcagtctyctttggatatttttcttcctatagctgactctaaatatttgtcatttctcaggatccctccttggcactcttttcttttactctccaaatttgccctgggaaatcttatatgttctcatgacttctggtctcctatgactaccattgaatatgctataagcttcagatgtgtatttctgactgcattgaggatttctctatcagtatatcctttaggcacacaaaagtctttgtgaccaaaacttaacttataaattacctttccacttctactagacctggccctcctcctttgagacctctatttttggcaaattacatcactcttaatacagttacctgagccagaaatctggaagtcatctcaagcttctggcttttcctcactccacatagtttcttggc

SEQ ID NO: 607514 - DNA, 451 bp, Homo sapiens
gtgctttcaaaccattcttctctcattcaaccaactcttcagtctcctttggatatttttcttcctatagctgactctaaatatttgtcatttctcaggatccctccttggcactcttttctttyactctccaaatttgccctgggaaatcttatatgttctcatgacttctggtctcctatgactaccattgaatatgctataagcttcagatgtgtatttctgactgcattgaggatttctctatcagtatatcctttaggcacacaaaagtctttgtgaccaaaacttaacttataaattacctttccacttctactagacctggccctcctcctttgagacctctatttttggcaaattacatcactcttaatacagttacctgagccagaaatctggaagtcatctcaagcttctggcttttcctcactccacatagtttcttggc

SEQ ID NO: 607515 - DNA, 501 bp, Homo sapiens
tattaatcactttctatagggagacacgtgttacatcttcccttccttatttctttaattcattcatraagccaatagaacactgaccacagaggcaggccgtttgtcttgaggagctttctgggccagcacttggaatgatacccaggtttggtggagggtttgaggtctgccctttccttttgccatgggaccaccctgcctttgacactggaagagtccattcagcccacaagcaggtagccttaccttaaagagataatctatgttgtgccaataattttttaaaacgtggttttttttctatgtttttagaccacttaaaacccaactgttacctcagtcaggggcacattcatattcaagaagaacaatactgtctcataataaaattcagcccaagacttctctggttgctgagttcctcttgcaggcctggggaaggggagaaggctgtggttacatttcagtaacctaagactctgggataaactttctcac

SEQ ID NO: 607516 - DNA, 452 bp, Homo sapiens
atcattttttgttattctaacttttttctttctattgtgaatgcaatttttattatattttctatctttttattgttcttatataggaaaaaatacaaattttttaaacttattttttatctcatgatctctgacctatatagttagttgtaatagttcttcagttcattactttctctcctatgacagacaatccatgaataatgattcttttgtctcatattttccaatatatattcctatctttttctgtactaattgaattgaaagacatcagtgtttctgagtttgttggaaatttcttagggattttatcattaagtgcatgagtgtacatgtttattatatacacyaataattttattatgtacatgtttattacacacactaatgcacttaatgataaaatcccaaagaaatttatatccttttatgtttgcatatgcagtgca

SEQ ID NO: 607517 - DNA, 640 bp, Homo sapiens
caccatttagactttaatacacttatccacagtatctcaaacaagcataaaggaaaataagcagtctttgcgatccataactttcctggctgatagacttaaaccaccttaaatggaagacttgggatgcttttctacagttctgagattaaatagaatgcatgtatttaaacaaataaaataaaattgagaattcttgcctaaggcctttcatgaactaacttccatgcattaaatgaactcattcttgtatgcagtcattcatttatcaaaattgtattgaggacttgcttgtgctggttagtgtctagaggcaggggatacagcagagatccaggcagacacatttcctcacttatagaaagggagatggaccagaaacaagcaaacaaatacacatggcacttgcagactttctaagtgttatcaagaaataagtgggatggaataagaagaataacctgaaaagggagggaaggggaatagaaggggaagctagaaaagagagagtagccagttaaggcctctgtaagaacatgatgtttcrgcatgaaccatgcagagtgacctacacagagggaacaaatacagaagttcagatacggacaaaagcttaacgtgttaataatacagaaagggg

SEQ ID NO: 607518 - DNA, 607 bp, Homo sapiens
aagctaattaacatttctatcacctcaaatacttatcgcgttttgtggtgagaacatttgaaatttactgtcttaacaattttgaaatgtacaatacactattgttaactatatttaccactcagtgcaatagatctcagaaaacacccttattcctcctgtctagctgagattttgtacccatcaccttcccactccccccacagcctccgaaatcaccattctacagcacagaattagtttgyaagagaggtacattaagagagaggaaagtgaaagtataaaaaaggattttgaagaatggaaaactagaattgtgtgaaattaagtcaccacttgagttttgtggttccaaattcaaagcgaatttattcaacaaatatttgagtgcctgctctgggtcagaccctgtgctctgctggtgatttaacaagagagaagtctacccaagggatttgactttatatcaccaaacttgaccgtgtcatggggagtgtcctttctccccaacacctagaaaatatgccaacagcagcaacaggagtcgagtttacatgagttcaactctcattttcaaattacctataagatgcaaaacatgtattca

SEQ ID NO: 607519 - DNA, 323 bp, Homo sapiens
tgaaaaactctagtgagaaagaaacagtctttacaaatggaaataacctggctggcttaracatttattttcttttacctaccgttttcctctgacttaattaattatcttagagtatgcttttcttgtattcctgtcctttggttttgagcaaaaggtacatcttaaaaatatctaatcaataaggaagatgcaaccccattacgcttcactacctttaatagaatctattttaaacttggacttcctggaactaagatatccaatggcttatcagaaacaatcagacatttcgaataaagtatatttacaggtccacagct

SEQ ID NO: 607520 - DNA, 418 bp, Homo sapiens
ccatctgggaatgcagcccagtaggtctcagcctcattttacccagctcccattcaagatggagttgcactggttcacacacctcttacatttcccccctcccttttataaaagaacccttaatcctaagggttgcagaggracaaagattcatcttctgtaacttcttcaggctgaataggggtgatgatctattcctggctgactattagagtctcttgtgttaggggtagagaggagctcagtcagaaagcatcagtatggtaagggccattcataactcttaagttctgacaaaaggtgctatctgaaaaaataataagagttcagtttaagacaatgttgagtaagcttatcctgcattcctatacaaagagtacaatagcaatatattccacaacagtaaagcaaaatacgt

SEQ ID NO: 607521 - DNA, 418 bp, Homo sapiens
ccatctgggaatgcagcccagtaggtctcagcctcattttacccagctcccattcaagatggagttgcactggttcacacacctcttacatttcccccctcccttttataaaagaacccttaatcctaagggttgcagagggacaaagattcatcttctgtaacttcttcaggctgaataggggtgatgatctattcctggctgactattagagtctcttgtgttaggggtagagaggagctcagtcagaaagcatcagtatggtaagggccattcataactcttaagttctgacaaaaggtgctatctgaaaaaataataagagttyagtttaagacaatgttgagtaagcttatcctgcattcctatacaaagagtacaatagcaatatattccacaacagtaaagcaaaatacgt

SEQ ID NO: 607522 - DNA, 573 bp, Homo sapiens
actgagctatctatcgctccactgaaactcagcatgctatcatcctaaggaagagcacttcccctagaaattgttaatggaaaaatcaaactctgtaaagtattcagagttttatcctgagccaacaagagtacccatggcccagggaacagtcacagcaggtcatgagaaagcgtgcccaaggtggttgagttatggtttggttttatatattttagggagacagaaattacaaagacataactcaatacatgtaagatatacattggttcagcctaaaaaggtaggacttctcaaagtgggtcataaatggagtcaaaggttttctaactggcaattagttgaaagagttacattgtatctaaagacttgaagccagtgaaaagaaatgcttgaattaatatgaggtgggttatggaaaccaaggttcttgttatgtagatgaagcctccagagaatagatggtaaatatcttttttgggaccttaaaaagstgtcagactcttagttgctctcttttagatcttggaacggcctggctgcattaatggagattctctgcagatgcaaatt

SEQ ID NO: 607523 - DNA, 569 bp, Homo sapiens
gacctcatcttccttaagtgcccaaaccaggacattcttcaggaggataaatagatattgtcccatataaacactttgcttcatttttaaatgamtggcaatgagaacgatgtctataaattttgatttattgggtttttaaaagaataataatttggggattgtaaactacccagtcactcccctcctttaaaataatgttttgtaaaaaaaaaaaaagatgcaaagatgttatccaaacctcagtaacgtgaaccatagcattacgcttcaggcaatgagctaaaaagtagttttcagggaacagaaatgagttttcacttacagcagaaagaactctgtgaaactggggagaacaaagcccagaaaggatgggagacaggaatcaaggtgctcaaccttagcctgttgccaagcgtgaatgtctgtttcattatgaggacaagacagctttctgtaaatggaggctccaataaacttgcagagatgggtgttgaatggttaatgcttaacacctctgaatgtgacaggaccttccttcgaaaagataactcctcccagatatgaca

SEQ ID NO: 607524 - DNA, 586 bp, Homo sapiens
aaaaaaaaaaaaaaggaagaagagaaataaccatgtgagaagatagatatgttactttactagattattgtaatcactttcctaagcatatcaaagcatcatggaatagaactaagatgtagtaagaataagagaagaaaatagattcatgagatattgaagtaaaatttatatcacaagtggctaatgtagaaggaaagagaacacctaacacattgccaccaaaaagaccagactaccaagcacttttgtaatttaagatctattcaattctsaccaaagagaaaagatgtaggatttcatttctactcattgccactccctaactcaagctcagcttcaacacataccttcttgtggcaagggtaacaaaatatcattacacagggggcaataaattattttacctatttaaagagaaccctgtgaaaaacttggataaaaaaagaattctggaatctctgaactatttcaacaaaggaacaaaaagcccaaattcacttttcattttgcatatatatggtactcatttggtcctaagaatatcttgatgctatatacaaaaaaatgatgcttactgaattca

SEQ ID NO: 607525 - DNA, 620 bp, Homo sapiens
tctggctaactccaagaaatcctttccaaccctaaggttgattcactaccttatcattctctagctcagaattacccgaagggcttgtacaaacataaattgcgggccccactcccagaatttgagtcagtaggtctcaggtgaggcctgggaggccctccaagaggaagatgatgcagtggatccaggggccacactttgagaaccactgctctagctctgatttctgaattgctatccctgcacctgttcctgcattgactctctttcatcttcaaataatttttttaagagacagggcctcactttgttacccaggctgaagggcagtggtgtgatcataactcactgcagcctccatctccggggctcaagcaatcttcctgcctcagcctcccaagtagctgggactacagaagcaggtcatcacgcctggctaatttttgtattttttygtaggggcagggtcttctgtgttgcctaggctggtctcaaactcctggcctcaagtgatcctcccatcttggcttccaaaacactgggagtgcaggcatgagccaccacatctggtccttccaaatcttttagagatattatttctgctggtttaggatgaaact

SEQ ID NO: 607526 - DNA, 528 bp, Homo sapiens
cgcgcttcaattacctcccactgggtccctcccatgacacgtggggattattacaattcaaggtgagatttgagtggggacacagagccaagtcagatcagttgcattttctgccatgggaaatgggtgggcaaatgaaggcacgagtgccctgaatttgatgtccctggacctaggggcatacccaggggccggaaggagcatctcccagcagcatgggatgttttatcactgaccttgtgtagaattgccaacacatgttatgagagaaaggagatggactgtgagctggtgtcactacagtttctaaattctctataggcaaggcctgtctcattgmtgctccagggcaggccactcccactgcccctccccacttagtgcccgcacatgtgtgtgctctgccatgggtctccccaccggtctcccagagcctctgtgtccttgggggttctggctcttctcttccatgcctccacttttgagccttagaacttcagacactacagaggcccagagggaaggagg

SEQ ID NO: 607527 - DNA, 528 bp, Homo sapiens
cgcgcttcaattacctcccactgggtccctcccatgacacgtggggattattacaattcaaggtgagatttgagtggggacacagagccaagtcagatcagttgcattttctgccatgggaaatgggtgggcaaatgaaggcacgagtgccctgaatttgatgtccctggacctaggggcatacccaggggccggaaggagcatctcccagcagcatgggatgttttatcactgaccttgtgtagaattgccaacacatgttatgagagaaaggagatggactgtgagctggtgtcactacagtttctaaattctctataggcaaggcctgtctcattgatgctccagggcaggccactcccactgcccctccccacttagtgcccgcacatgtgtgtgctctgccatgggtctccccaccggtctcccagagcctctgtgtccttgggggttctggctcttctcttccatgcctccacttttgagcctyagaacttcagacactacagaggcccagagggaaggagg

SEQ ID NO: 607528 - DNA, 555 bp, Homo sapiens
tgggtcatagaaactaaaatcactttcttcccaagcaagccataaaacctagaaaggtcactctctcctttctcccttgaagactcattccagagaggtcctgccccatacccagaggaaggactagtacacagagaggccatgaagaacgtgaacaggcaagtcttgccggggttcgtccctcagtctgttaccacaagattctaccctttcgtccaaacacatttctacatggctatctgatatggtttggctttgtgcccccattcaaatctcatctacaattgtaatcccataatccccacatgccttgggagggtgggaggtaattgaatcatgggggtggtttccaccatgctgttctcgtgatgagtgaattcttatgagatctgatggtttgataggtgtctggcatttcccctgctggcactcactctctcctgccgtcctgtgaagaggtattttctgccatgattgtaagtttcctgaggcctcctcagccatgtggaactgtgagtcaattaaacctctttkctttataaattacccagtctc

SEQ ID NO: 607529 - DNA, 619 bp, Homo sapiens
aaactgacagaattgcaaggaaaaatatacaaatctatatttataatcagagatgtcatgccctgtctgtcaataattgatagatatagtagatagaaaatagaaagaatatggaagatgtgagcaggactgtcaagcaacttgacctagttaacagttatatagtactccacccgaaaacaacagaaacatatttattgcaagtacacaaggaacatgtgtaaaaataaaaagagccttagtacaagtcttaataactttaaaaagagtgaagttatacaatgtatgttctctgaccaaactagaattaaattactaaaaaaaaaaactaatatatcactggaatccccccctgaagtacttgcaaactaaacaatacatttttaagtagcacattgattaagaaatagatttaaaaagaattagaaaatatttggaaaygaggaaacatcaaaactgagaaattatgttaaaagagtaagtaagggggaatttatagcactcacctccaatgttagaaaagaaggctcaaagcaatagccttagatttcaccagtttaagaaatgattggatggtggtgtctgcaactgagatcaaggacataggaaaaggaagagg

SEQ ID NO: 607530 - DNA, 619 bp, Homo sapiens
aaactgacagaattgcaaggaaaaatatacaaatctatatttataatcagagatgtcatgccctgtctgtcaataattgatagatatagtagatagaaaatagaaagaatatggaagatgtgagcaggactgtcaagcaacttgacctagttaacagttatatagtactccacccgaaaacaacagaaacatatttattgcaagtacacaaggaacatgtgtaaaaataaaaagagccttagtacaagtcttaataactttaaaaagagtgaagttatacaatgtatgttctctgaccaaactagaattaaattactaaaaaaaaaaactaatatatcactggaatccccccctgaagtacttgcaaactaaacaatacatttttaagtagcacattgattaagaaatagatttaaaaagaattagaaaatatttggaaacgaggaaacrtcaaaactgagaaattatgttaaaagagtaagtaagggggaatttatagcactcacctccaatgttagaaaagaaggctcaaagcaatagccttagatttcaccagtttaagaaatgattggatggtggtgtctgcaactgagatcaaggacataggaaaaggaagagg

SEQ ID NO: 607531 - DNA, 619 bp, Homo sapiens
aaactgacagaattgcaaggaaaaatatacaaatctatatttataatcagagatgtcatgccctgtctgtcaataattgatagatatagtagatagaaaatagaaagaatatggaagatgtgagcaggactgtcaagcaacttgacctagttaacagttatatagtactccacccgaaaacaacagaaacatatttattgcaagtacacaaggaacatgtgtaaaaataaaaagagccttagtacaagtcttaataactttaaaaagagtgaagttatacaatgtatgttctctgaccaaactagaattaaattactaaaaaaaaaaactaatatatcactggaatccccccctgaagtacttgcaaactaaacaatacatttttaagtagcacattgattaagaaatagatttaaaaagaattagaaaatatttggaaacgaggaaacatcaaaactgwgaaattatgttaaaagagtaagtaagggggaatttatagcactcacctccaatgttagaaaagaaggctcaaagcaatagccttagatttcaccagtttaagaaatgattggatggtggtgtctgcaactgagatcaaggacataggaaaaggaagagg

SEQ ID NO: 607532 - DNA, 570 bp, Homo sapiens
gcttagcaaggccaagtcacttgcccaaggacacacagctaggaaatgtctgggatcaggaaatttaactcttatgacttgatcccagaatctacacttttgtcagaggcattggaagcagagcaactgcatctcaaattggggctgggtaaaataaggctgagctctactaggctgcattcccagggggttaggcattcttagtcacaggatgagacatgaggttggtgcaaaatacaggtcacaaaccccccgtgataaaataggacatactaaagaaacctgccaaaacctgccaaaactaagatggcaatgaaaataaccactggtcatcctcactgcttatcatacgttaattataaggcattagcttctgaaagacactcccaccagcaccatgagagtttacaaatgccctggcaatgtctgaaagttaccctatgtgatgtaaacgggagatgaaccctcarttccaggaaatctcctctcctttcccagaaaactcatgaataatccaccccttgtttagcatataatcaagaaatcaccataaaaaatagtcaaccagca

SEQ ID NO: 607533 - DNA, 570 bp, Homo sapiens
gcttagcaaggccaagtcacttgcccaaggacacacagctaggaaatgtctgggatcaggaaatttaactcttatgacttgatcccagaatctacacttttgtcagaggcattggaagcagagcaactgcatctcaaattggggctgggtaaaataaggctgagctctactaggctgcattcccagggggttaggcattcttagtcacaggatgagacatgaggttggtgcaaaatacaggtcacaaaccccccgtgataaaataggacatactaaagaaacctgccaaaacctgccaaaactaagatggcaatgaaaataaccactggtcatcctcactgcttatcatacgttaattataaggcattagcttctgaaagacactcccaccagcaccatgagagtttacaaatgccctggcaatgtctgaaagttaccctatgtgatgtaaacgggagatgaaccctcagttccaggaaatctcctctcctttcccagaaaamtcatgaataatccaccccttgtttagcatataatcaagaaatcaccataaaaaatagtcaaccagca

SEQ ID NO: 607534 - DNA, 619 bp, Homo sapiens
ttctgttgaaaataaacagaagtggaaatgtatattcagggcaacttaaactcatgctcttgacaaaatatttttttaaaaaaagcaaataaacaaaagtatttctcatgcccctcagttcatagacagaaactcataccaacaggctttttttttattttagtaagaactgccaaatggtgaaactattcacaaacactagaaatgcatgagagtgtcctcccgatattcttacctgaattttgcatctttttatctcttgtcaatctagctgggaaaacgatattaaaatctcattttgactggcatttccccaacttcctagatggcttcacatcttttcatgtttattaaccatttgcatcttctcttcagtaaattattatttatatcctttgcccaattttcttaggggtaatttatctttttctarttaatgtgaaagtagtctttgtatgtaagagatagtaactttacctatagcaaatattttcattctgtttttcttttaacttagttcagggtgtttttccatactaaattttggattgctcatcttgcttaagatctttccaccccaaggatcctaagttttcttctatttccatatgcatatttt

SEQ ID NO: 607535 - DNA, 623 bp, Homo sapiens
atccctgcagtacttgattctctgagtcctgagaagttgttgcctgttgtccttatttaagatgaacttttgaatttaattttgaaatctttctatagaggctgggtgctaaaacatacgctagcctctctggctgaawacattttttaattcacgctcacctccactaaaatccattctccacatagcagctagtgcaattatttaaaaatataaatcagattatattacacttctgctcaaaactcttcagtgtctcccattaccttttgaataaaagcccagttccttacccagccctgctaaactctagtcatctgatctcttctgctaactctccagcctccccttacaccatgcctctgccccgccccaaaccagactcgcatttgccatatgctcctctctgccccagggcctttgcaaccactgttccccctgcctcgggtctctacctcagatcttcctggcacatgctccttcttatcagcctccagcccaaatcctcagagatgccttccctgactgcgctctctaaaggaggacctcagtcactcacaccatcactgttttatcacagctcttattactattttatattttcttgttaatttatttgatta

SEQ ID NO: 607536 - DNA, 598 bp, Homo sapiens
tttctaccaggctgttaaccaaaagttraaagcatattaggacacggataaattcaacaaatggctgagtgagatttgtggctcactcctgtaatcccagcactttgggaggtcaaaataggaagactgcttggggccaggagttccagactagcctgggcaatatagccaggcatggtggcatgcacctgtagtcccagctacttgggaggctgaggtgggaggattgcttgacaagcccaggagttggaggctgcagtgagccatgattgcaccactgcactctagtctggggaacagaacaagactctgtctcaagaaaaaaaaatcaacaaatgtaagcacggacctctgacccaggggtttgcaactaatggcacagaggcaaaaggaaaatcttgaagccctagagctcccttctgattttgttgtccagtctctgaggtcaggcagacccatgttcaaatcctgcatcttttacttgctgtgtgatgatcactgaggttcagcctcctcacctgtaaaatgggataataatgaccatgcactttaaaacctgttttaaaaagcaaagtaaaatcaatgcaaaggaccccac

SEQ ID NO: 607537 - DNA, 545 bp, Homo sapiens
ggtgggaatgtaaatgagttcagccactgtggaaagtagtttggatatttcccaagaacttaaaacagaaataccatttgacccagcagtcccattaccaggtgtacatccaaaggaaacaaattgttctaccaaaaagacacatgcactcccacattcatcacagcactatacatgagagcaaaaacatagaatcaacctaggtgcccatcattggtggattggataaagtaaatgcagtatatatrtatacaccatggaatactatacaaccatgaaaatgaacaaaatcatgtcctttacagcaacatgagtgaagctgaaggccattatcttgaggaaattttaacacaggaagaaaaccaaataccacgtgttcttacttataagtgggagctaaacatcaggtcctcaacaatagacaatggggatgactggagggggcagggagtggggataagcactgaaaagctaactgttgggtactatgctcagtacctgggtgatgggattatttgtttatcaaacctcagcatcacacagta

SEQ ID NO: 607538 - DNA, 545 bp, Homo sapiens
ggtgggaatgtaaatgagttcagccactgtggaaagtagtttggatatttcccaagaacttaaaacagaaataccatttgacccagcagtcccattaccaggtgtacatccaaaggaaacaaattgttctaccaaaaagacacatgcactcccacattcatcacagcactatacatgagagcaaaaacatagaatcaacctaggtgcccatcattggtggattggataaagtaaatgcagtatatatatatacaccatggaatactatacaaccatgaaaatgaacaaaatcatgtcctttacagcaacatgagtgaagctgaaggccattatcttgaggaaattttaacacaggaagaaaaccaaataccacgtgttcttacttataagtgggagctaaacatcaggtcctcaacaatagacaatggggaygactggagggggcagggagtggggataagcactgaaaagctaactgttgggtactatgctcagtacctgggtgatgggattatttgtttatcaaacctcagcatcacacagta

SEQ ID NO: 607539 - DNA, 545 bp, Homo sapiens
ggtgggaatgtaaatgagttcagccactgtggaaagtagtttggatatttcccaagaacttaaaacagaaataccatttgacccagcagtcccattaccaggtgtacatccaaaggaaacaaattgttctaccaaaaagacacatgcactcccacattcatcacagcactatacatgagagcaaaaacatagaatcaacctaggtgcccatcattggtggattggataaagtaaatgcagtatatatatatacaccatggaatactatacaaccatgaaaatgaacaaaatcatgtcctttacagcaacatgagtgaagctgaaggccattatcttgaggaaattttaacacaggaagaaaaccaaataccacgtgttcttacttataagtgggagctaaacatcaggtcctcaacaatagacaatggggatgactggagggggcagggagtggggataagcactgaaaarctaactgttgggtactatgctcagtacctgggtgatgggattatttgtttatcaaacctcagcatcacacagta

SEQ ID NO: 607540 - DNA, 537 bp, Homo sapiens
gactcctcaccccaatgtagctccaaccctggaagtgggaggacattgctgggcacagggaccactcttgccctgaagactatgctagcctgaaaccttgtctttcattgtctctgtgggatcttgcaaagagcctaaagttgcaaatawcatttttatccccactttgcagtgagaaacagaagcctattaaagtgaataactttccaagattctgcacccattagatgaggccaggatttgaattgagctctcattctaaagcccatgtctctccccatccctgctgtccaaattggacctctcatacgtgggtctccacaaaacccagttgcctggcaaaccttctcccactccccatacccactatggtctactcagcctgaactcacgttgcctgtaccagcaagcttcaaagtggagtatgcataccatgaagactctggagtcagccttgaggatagttttgctgttgttgttttgttttggggtctttgagacacggtctctatattagtccattctcacactgctata

SEQ ID NO: 607541 - DNA, 545 bp, Homo sapiens
ccattccttgaagcacttgagcaaccatggccttgtatccagaaaaaaagataattaaagatttcccatctcaataaaggatctcaactttgttttgagacatggtctcgctctgttgcccaaggagtgcagtggtatggtcacagcttactgcagcctcaaccccatggactccagtgatcctccaacttcagcctcctgagttgttgggatcacagacatgcaccaccatgcctgactttttttttttttttgkatttttatagagacaaggcttcacgatgttgcccaggctggtcttgaactcctgggcttaagggatttgcccacctcagcttcccaaagtgctagaattacaggtgtgagccaccacgccctgcctctcaaatgtttttaaactcttgcctcctcaaagagtcattgcacccagggttagaccatatgtgacctggaagaagacttgatttagctaaagtagctgtaataatacagaagagaaagaaacaaaagcaagcacctccgcagggctcaaagcaccattcacg

SEQ ID NO: 607542 - DNA, 566 bp, Homo sapiens
aaactaatacatgtgcccttgagctgcaggagagatttccagatgtttctgtgaatctatgagttcccagtttgcagaggaggagggactgccaattgatgggatttgcctgggaggaagacagcctccctcaaattactgagctcaacaataatgagacataggcaggaaggcagccaccacaaccaggctgaaaattgaaaccacggagccacacagctgggccgatggcacaaggaaaattacaaactcggtccgtctttctcatacactgtccctgcactttgtttctttccttcataggactcatgagaatttacacacagatcatgtattttcttcttcctttattcacctctctccatcactaaaatgtaaacaccagtggtggacaggtcatgtctaccttattcaatatctactttcccagctccccagagactggggaggggaggggagaagtaaggaggagagaggttggtcaacaggtacaaagttataattacataggagggataakttctggtgtgctattgcgcagtgggttgaacagcaaggtacagtat

SEQ ID NO: 607543 - DNA, 325 bp, Homo sapiens
ttcctaacaacagaactgaggctaagtgaaatcacataggaaagctagaacctgaacataagtctccatggtctcaaagcctgaactcaccactacagcatatagcaattgtaccctcattatctgaggtttcaattttgcaatgtccatattttragttttacatcattttcctgctcctaattgcccagagtcatagtggactgcgtacaagcttcatttctccctccaaggttttgcagagaaaaattctattgtttggcccaggagccccaggtatcatttagggtgtgggaacaaagtgaaataggtacttcctttacaa

SEQ ID NO: 607544 - DNA, 611 bp, Homo sapiens
tcagcaggacctgggagttttgttatctgtatattggtattaatgtgatctcagttgtatcttcaggctggggaggtctgggagaatacttaatgaaatgctgattgttttcaataggaaaatacacttcaactggactacagtaaccaagaacctttcttctgtgttattaagacacaaaaggcaagatttcagctcatactcttttaaccaagccagaattaactttttgttataactgaagaagcaataaacctcaaggcttggatagtccctatctgtttgcatttactcttcaatttcctgcctgaatcacacctccaccttcccttaaaggtgaaagcctatggccaggcatggtggctcacacctgtaatcccagcactttgggaggtcaaggcgggtgggtcaaaggtcaggagttcragaccagctgaccaacatggtgaaaccccatctctactaaaaatacaaaattagctgggcgtggtggcatgcacctgtaatcccagctactcaggaggctgaggcaggaaaatcggttgattccagaaggtagaggctgcagtgagccgagattgtaccattgcactccagcctgggcgacagag

SEQ ID NO: 607545 - DNA, 611 bp, Homo sapiens
tcagcaggacctgggagttttgttatctgtatattggtattaatgtgatctcagttgtatcttcaggctggggaggtctgggagaatacttaatgaaatgctgattgttttcaataggaaaatacacttcaactggactacagtaaccaagaacctttcttctgtgttattaagacacaaaaggcaagatttcagctcatactcttttaaccaagccagaattaactttttgttataactgaagaagcaataaacctcaaggcttggatagtccctatctgtttgcatttactcttcaatttcctgcctgaatcacacctccaccttcccttaaaggtgaaagcctatggccaggcatggtggctcacacctgtaatcccagcactttgggaggtcaaggcgggtgggtcaaaggtcaggagttcgagaccagctgaccaacatggtgaaaccccatctctactaaaaatacaaaattagctgggcgtggtggcatgcacctgtaatcccagctactcaggaggctgaggcaggaaaatcggttgattccagraggtagaggctgcagtgagccgagattgtaccattgcactccagcctgggcgacagag

SEQ ID NO: 607546 - DNA, 530 bp, Homo sapiens
tgttggccttggaggactttttctcaacaggtcaggttgcctggcccagctacttatatatgattttgaaagcaaaacctttccagaaacctgcctgccaagctcctggcatctgctctccctcctcaagcccatttcccattatcctggtcagtctaaccaggaagctattgattatttttattcctgaacatatgaggctcttktgaatagtagacacaattagaaccctgcaaagagggacactgtgactctgtttcctgagggggtaacccagcttgagtgagagaacgcctccaaagagctgggcaggtacagcataccaaacgacatgttccctgacccatggaatgtccagagttcaaaaaacaaatcattattctttcataagctcaaatgctcaatccacccactacatactgcagtgaaattgcctcaaggctataaattgttgaaattaattggttaaggtaatccccataaccacttatgaaccacgttctcattgaggaaataaaaggcacaccgga

SEQ ID NO: 607547 - DNA, 607 bp, Homo sapiens
cttgtcagactcttaactgttggccttggaggactttttctcaacaggtcaggttgcctggcccagctacttatatatgattttgaaagcaaaacctttccagaaacctgcctgccaagctcctggcatctgctctccctcctcaagcccatttcccattatcctggtcagtctaaccaggaagctattgattatttttattcctgaacatatgaggctcttttgaatagtagacacaattagaaccctgcaaagagggacaytgtgactctgtttcctgagggggtaacccagcttgagtgagagaacgcctccaaagagctgggcaggtacagcataccaaacgacatgttccctgacccatggaatgtccagagttcaaaaaacaaatcattattctttcataagctcaaatgctcaatccacccactacatactgcagtgaaattgcctcaaggctataaattgttgaaattaattggttaaggtaatccccataaccacttatgaaccacgttctcattgaggaaataaaaggcacaccggatgcataatttaataaaagtggctccccttcaggtgtaggaacagctgtgcgatccagcga

SEQ ID NO: 607548 - DNA, 598 bp, Homo sapiens
gcacacgccaccacgcccagctaatttttgtattcttagtagagacagggtttcaccatattggtcagactggtctcaaactcctgacctcaggtgatccacccacctcagcctccaaaagtgctcggattacaagcatgagccaccacgcctggccaaacccattatcttttacagtgggatgatcaaccctgctgattcttcayggatcacagcagcagccctacaagtacaagagggaagaacacctgccccaactcagcactgcccctggccatctgaattccaaagcagcactgcaagaaccctgcaacacacgaaatcttggagaaacagctcaccaagcccctggctgtgcccttcagcatctaagctgtaaattattgcaagaggcagggccaggtaggacgctgatctcaagctgtcctcctattgtagcctccctcttttttcttttttctcaggggaggctctagatcactcttctcttctcctgaagccgaagagaaaaagccagctcaaaaagaaatccttcatgcatatcaactgtttcatgcttggacccatacaaaagggtccctgctgtcttccccacagt

SEQ ID NO: 607549 - DNA, 598 bp, Homo sapiens
gcacacgccaccacgcccagctaatttttgtattcttagtagagacagggtttcaccatattggtcagactggtctcaaactcctgacctcaggtgatccacccacctcagcctccaaaagtgctcggattacaagcatgagccaccacgcctggccaaacccattatcttttacagtgggatgatcaaccctgctgattcttcacggatcacagcagcagccctacaagtacaagagggaagaacacctgccccaactcagcactgccccyggccatctgaattccaaagcagcactgcaagaaccctgcaacacacgaaatcttggagaaacagctcaccaagcccctggctgtgcccttcagcatctaagctgtaaattattgcaagaggcagggccaggtaggacgctgatctcaagctgtcctcctattgtagcctccctcttttttcttttttctcaggggaggctctagatcactcttctcttctcctgaagccgaagagaaaaagccagctcaaaaagaaatccttcatgcatatcaactgtttcatgcttggacccatacaaaagggtccctgctgtcttccccacagt

SEQ ID NO: 607550 - DNA, 598 bp, Homo sapiens
gcacacgccaccacgcccagctaatttttgtattcttagtagagacagggtttcaccatattggtcagactggtctcaaactcctgacctcaggtgatccacccacctcagcctccaaaagtgctcggattacaagcatgagccaccacgcctggccaaacccattatcttttacagtgggatgatcaaccctgctgattcttcacggatcacagcagcagccctacaagtacaagagggaagaacacctgccccaactcagcactgcccctggccatctgaattccaaagcagcactgcaagarccctgcaacacacgaaatcttggagaaacagctcaccaagcccctggctgtgcccttcagcatctaagctgtaaattattgcaagaggcagggccaggtaggacgctgatctcaagctgtcctcctattgtagcctccctcttttttcttttttctcaggggaggctctagatcactcttctcttctcctgaagccgaagagaaaaagccagctcaaaaagaaatccttcatgcatatcaactgtttcatgcttggacccatacaaaagggtccctgctgtcttccccacagt

SEQ ID NO: 607551 - DNA, 598 bp, Homo sapiens
gcacacgccaccacgcccagctaatttttgtattcttagtagagacagggtttcaccatattggtcagactggtctcaaactcctgacctcaggtgatccacccacctcagcctccaaaagtgctcggattacaagcatgagccaccacgcctggccaaacccattatcttttacagtgggatgatcaaccctgctgattcttcacggatcacagcagcagccctacaagtacaagagggaagaacacctgccccaactcagcactgcccctggccatctgaattccaaagcagcactgcaagaaccctgcaacacacgaaatcttggagaaacagctcaccaagcccctggctgtgcccttcagcatctaagctgtaaattattgcaagaggcagrgccaggtaggacgctgatctcaagctgtcctcctattgtagcctccctcttttttcttttttctcaggggaggctctagatcactcttctcttctcctgaagccgaagagaaaaagccagctcaaaaagaaatccttcatgcatatcaactgtttcatgcttggacccatacaaaagggtccctgctgtcttccccacagt

SEQ ID NO: 607552 - DNA, 407 bp, Homo sapiens
gaattccctttttcaggtttccctggagtccccttggccaggaggagcatctgttcaattggatggggagctcacaattttatttttggtgaattgtgtcccctcaaaattcctatgctgaagccccgactcccaggacctcagaatgtgaatgtattgggagattaggcctttaaagaggtgattaagtaaaaatgaggtcgttaaggggggccctcatccaacctgactcaagtcctcacaagaagaagaaatgtgaacacacagagagacaccaaggatatgcaggcacatacaaaagaccaggggaggacatggccagaaggtggccatctacaagccaaggagagaggcctcagaagaaactgaggagagcaaakatccagcagaccagccagaggcaaaac

SEQ ID NO: 607553 - DNA, 452 bp, Homo sapiens
ctgctgaacccctctggtcccacaaaatcatcctgatgcctcttaaccctgcggaggcctcaggaaacactgtgagsgtgtccaaggcacaaaagcctagatgagccggaccggcatgcttttactcctatgcattgtaggaccatatccccaggctttgccaagggatagggaacaagcgtatctctggtctcagacacaccaaggtcatctttgatatttaccatgtctctactccctcactgggatcagtgtagctgagggataaggacacaggagttgagcatatttaattgcatacaggtttagctgctggacccagagatccaaaatagcagtggcatatgaaagagagaggtttcttttttcccatgtgaaaatgcagggagaagcctggcacagtggctcacgcctgtaatcccagcactttgggagcctgaggcagaaggatc

SEQ ID NO: 607554 - DNA, 488 bp, Homo sapiens
cccctctggtcccacaaaatcatcctgatgcctcttaaccctgcggaggcctcaggaaacactgtgagggtgtccaaggcacaaaagcctagatgagccggaccrgcatgcttttactcctatgcattgtaggaccatatccccaggctttgccaagggatagggaacaagcgtatctctggtctcagacacaccaaggtcatctttgatatttaccatgtctctactccctcactgggatcagtgtagctgagggataaggacacaggagttgagcatatttaattgcatacaggtttagctgctggacccagagatccaaaatagcagtggcatatgaaagagagaggtttcttttttcccatgtgaaaatgcagggagaagcctggcacagtggctcacgcctgtaatcccagcactttgggagcctgaggcagaaggatcacttgaggccacgagtttgagaccagcctgggcaacatagcaag

SEQ ID NO: 607555 - DNA, 452 bp, Homo sapiens
ctgctgaacccctctggtcccacaaaatcatcctgatgcctcttaaccctgcggaggcctcaggaaacactgtgagggtgtccaaggcacaaaagcctagatgagccggaccggcatgcttttactcctatgcattgtaggaccatatccccaggctttgccaagggatagggaacaagcgtrtctctggtctcagacacaccaaggtcatctttgatatttaccatgtctctactccctcactgggatcagtgtagctgagggataaggacacaggagttgagcatatttaattgcatacaggtttagctgctggacccagagatccaaaatagcagtggcatatgaaagagagaggtttcttttttcccatgtgaaaatgcagggagaagcctggcacagtggctcacgcctgtaatcccagcactttgggagcctgaggcagaaggatc

SEQ ID NO: 607556 - DNA, 398 bp, Homo sapiens
ttcagagaactgttacttttttccatgtctggaaagtccctggaaaacccattctcagggtttgttgttrtttgatatgattcagaccttggtcagtgccagtagccttttccatggaacttttgaccaacgcagtcagcagcaattgtttaacctaatgctgcctaaaacagtaacaccagtaaataagagcctggccaaaaatttctgaaagaaaaaaagctgtggttggatacatgacagggatgccctctctcaccactcctattcaacatagtgttggaagttctggccagggcaattaggcaggagaaggaaagaaagggtattcaattaggaaaagaggaagacaaattgtccctgtttgcagatgacatgatcgtatatctagaaaaccc

SEQ ID NO: 607557 - DNA, 604 bp, Homo sapiens
caccacaataagccaatatttagtgctcattcgattgagaaaatttttataagtacattacttccaagtcttacagacaacattaagcaaaaggtattcaacattgtgtattacagttataatttttttaaaaaattaatccatatccatctaaacaatggataaataaaacttgaaaaacatatgtagtagaagatgatgtagtgatgaaaatgaatataaccattagcaataacatgaaagtatctcagagacattatgttaagtcaaaacattaaacacagaagactgaagatggcatgaaacaattttgaaaatgctaaaaaacaaagttaagcattgttcagagatatttatgtaaaaacttttttaaaagcaaggaaacaacgaagagaaagaacctgggaggaacaggcaagaagttttaagggctcagagatgtgtgcttgcttcggcagcacatatactaaaattggaacaatacagagaagattagcatggcccctgcacaaggatgacatgcaaattcatgaagcgttccatatttttatgagctaaaggagcatgttytaacccaatgcaaagaagctaagaaccttgataa

SEQ ID NO: 607558 - DNA, 565 bp, Homo sapiens
tatataagggttgttttgcggcctaccaagtggtctatcttgttttatgtgcactaaagaagaatgtgtatcttgctggaaagttctatatatatgtgttaagcctatttctccttccatattcatttttatagaggcagattctcactgtgttgctcaggctggggtgcagtggctatttgcaggcataattatagcacactgtaacatcaaacttctgggctcaagcaattctctgccttagcctcacaagtagatgggcctataggmatgcccctctgtgcctggctccattaatttttgctttgtatatttaggtgcatcaatgttggatgtatatatatttataattgttacgccctcttgaggaatagagccctctatcattaaataatgacctgttacgtttcttgtgactttaagacaaagaaatcattacctattttctggtgtctttaattcaaagtctattttatttgatataagtagagtcatccttgttctcatttggctaggatttgcatggagtatcttccatctcttcactttcagcctatttgtgtcc

SEQ ID NO: 607559 - DNA, 425 bp, Homo sapiens
gggaagcccatcaggctagcagcagaactttcagcagaaaccttacaagccagaagagattggggatctgttttcagtgcccttaaagaaaataaattccaattaagaattttatatctcaccaaaaagcttcataagtgatggagaaataaaatcctcagagaaacaaacactgagggaattcatttcaactagaccagccttgtaagagatcctttaaaaagtgttaaacatggaattgaaagaacctgctaccacaaaaacacatttaagcacatagcccataggcaaaacagagcaaccacacaaacaagtytatacaacaaccagctaacaacatgatgacaggatgaaaatctcacatatcaatactaaccctgaatgtaatgggctaaacaccccacttaaaatgcaaaaaatgacag

SEQ ID NO: 607560 - DNA, 402 bp, Homo sapiens
aggtctcactttttgagggactttgctcatgttagaagaaaaagyttaatgtttgtatgcatccaaaaaaaaaacttgtaaaaatttccgtcaaatccaaagttcactctatcaaaatccattaaatgttttgcattgcaagtatgtagaccagaggtttaatttcctgttgccttgctggacttaaagagttattccatccagttcacatttgaagaaaagattaggactggatgtaacaataactatcaattcatgccacatataatcatagccacttcttcaattctgacctaaacatttaaaaaatattttgtccttttgtattgaagagtatggttgatacaaaaaaaaaatcccaatttttcaccatcacaaaacaaatgctacttatagtgaaga

SEQ ID NO: 607561 - DNA, 402 bp, Homo sapiens
aggtctcactttttgagggactttgctcatgttagaagaaaaagtttawtgtttgtatgcatccaaaaaaaaaacttgtaaaaatttccgtcaaatccaaagttcactctatcaaaatccattaaatgttttgcattgcaagtatgtagaccagaggtttaatttcctgttgccttgctggacttaaagagttattccatccagttcacatttgaagaaaagattaggactggatgtaacaataactatcaattcatgccacatataatcatagccacttcttcaattctgacctaaacatttaaaaaatattttgtccttttgtattgaagagtatggttgatacaaaaaaaaaatcccaatttttcaccatcacaaaacaaatgctacttatagtgaaga

SEQ ID NO: 607562 - DNA, 402 bp, Homo sapiens
aggtctcactttttgagggactttgctcatgttagaagaaaaagtttaatgtttgtatgcatccaaaaaaaaaacttgtaaaaatttccgtcaaatccaaagttcactctatcaaaatccattaaatgttttgcattgcaagtrtgtagaccagaggtttaatttcctgttgccttgctggacttaaagagttattccatccagttcacatttgaagaaaagattaggactggatgtaacaataactatcaattcatgccacatataatcatagccacttcttcaattctgacctaaacatttaaaaaatattttgtccttttgtattgaagagtatggttgatacaaaaaaaaaatcccaatttttcaccatcacaaaacaaatgctacttatagtgaaga

SEQ ID NO: 607563 - DNA, 545 bp, Homo sapiens
tcgaccctgaaagatgctttctgctgcctctgctcagaattaatacagaactgggcaacagaacacttttaaggtggatcttaggatcataagccctttttggctgccaaaaccatctctcctgtaacaccttacagttattctcactgttgcttactgagactttttatgagggttaggttttccaggcatgggtggagacaaggaggcaggctgcagcagggcttggagatggaaacactcagcatgacggcgatcgcccagggagttacttcttagcatggagacatatgtacttcttgtgaaatgttcactttctcagttcagcaaatctccttcctatggatgaatttttaggcagaaattcatatagtgcctccaggtgtccaggagcctgccacactactcctttaaagtcaaaatgagttgctgcaccctatataataagcaagattcttgaaaaatcackggaaagaggcttattttagatatctgggcctgattcaagatactgtgcaataatgtctggcgtgagcatcttttgg

SEQ ID NO: 607564 - DNA, 646 bp, Homo sapiens
cactcttgttgcccaggctggagtgcaaggtgcaatttcagttcagtgcaacctccgcctcctgggttcaagcaattctcctgcctcagcctcctgagtactggaattacaggcacccaccaccacgcccagctaatttgtattttttcataagagtatgcagcgagctctgagagtgcagagaaagcatgccacacactggagagggagagctagagagtgagacagcaggggagctgagggtgaatggctgctgttagaagccctggagacagcctgaggtcagagcccagccccactcctggctgtgtgatcttgagcagggctgttaacttcactaggacttggtttcggtttctcatagagaataggtacagtgtgaattaaatatatatagcttgaataaagtgcccagcttgtgggtagctgctgccatcatcatcaccatcaccatcatcaccatcaccatcaycatcatcatcatcatcatcatcatcatcatcatcatcatctcaggcacaggggctttaaggacaacatgcccagtttaagaagaacacaactctcttcatttatagcgcccctccatcagtgagtagacgcttgggatttgtggctaatttttaagctgcaaaacagacatctc

SEQ ID NO: 607565 - DNA, 577 bp, Homo sapiens
acaatgtccatatttaatgagtaatacacctggaatttaaaaaagcataaagatctctcctttaaaatctttgcagtttaaaaggaatccagataagggctctgtgtagcacagtggccatttcaagtgagtgtggagaaatacttccctctgggctagtgctgaagatctgagacagtcctttaggaagctaggcctgttctctcctgtttggaaatggctcttccccagtaggtccccatctaatttcagcatctggggaaccagcttggacattccttcattaaaatgggtttcatgtgtgtcccactctcctttyggaactccagtactcacggcccctatgcagtgaagagagggtcccaaatgtttggaggtaataaacaacacacacctgccttcttattgaatgatttccagcacttccagcagtaactaggtcataaccacacaattagcccttcatcctgataaagtagttttctgaagaaaccaggattctatgaagtaatcatagttttaaaactagttatgggccgggcgcggtggctcgtgcctgtaatcccagcactttcgg

SEQ ID NO: 607566 - DNA, 577 bp, Homo sapiens
acaatgtccatatttaatgagtaatacacctggaatttaaaaaagcataaagatctctcctttaaaatctttgcagtttaaaaggaatccagataagggctctgtgtagcacagtggccatttcaagtgagtgtggagaaatacttccctctgggctagtgctgaagatctgagacagtcctttaggaagctaggcctgttctctcctgtttggaaatggctcttccccagtaggtccccatctaatttcagcatctggggaaccagcttggacattccttcattaaaatgggtttcatgtgtgtcccactctccttttggaactccagtactcacggcccctatgcagtgaagagagggtcccaaatgtttggaggtaataaacaacacacacctgccttcttattgaatgatttccagcacttccagcagtaactaggtcataaccacacaattagcccttcatcctgataaagtagttttctgaagaaaccaggattctatgaagtaatcatagttttaaaactagttatgggccgggcgcggtggctcrtgcctgtaatcccagcactttcgg

SEQ ID NO: 607567 - DNA, 405 bp, Homo sapiens
gatttccagaattttttgctgcaaaaacaaccaaagctagaaacgctcatccctgaaagtctgtgcctgtggctcatttaacaatggggtgcacgtagtcactctgaaacccattcgctcatggattgttcttttctctgtcagcactcaccttgcttttcaaaatacgtcccaccttagacccaacccktgtgaggctgcctcttggtcaaacactgcattctttgaaataaaaactgaactgctctcacctttccttcgttgttgcatctctctaaggcacactctcttgcagcttcctcagttacagctcctcgccatgtgtaagtttttatagtgagggagcttttatagtgagggagcacttacatctaccttagaactattgagtgattgagttgaaat

SEQ ID NO: 607568 - DNA, 559 bp, Homo sapiens
tcctttcaacgaatgaggctaggaaaactggatatccagatgcaaaataatgaagttggacccttacttaacaccatatgaaaaagataattcaggacagatgcagtggctcacacctgtaattccagcamtttgggaggccagggcaggtggatcacttgagccaaggaatttgcgaccagtctgggcaacgtggtgaaatcccatctctaccaaataaaaatacaaaaattagccagttgtagtggcgcattcctgtagtcccagctactcatggggatgaggcgggtgctgaggtgggaggatcacctgagtcctggggaggctgaggctgcagtaggccgtgattataccactgcattccagcctgggcggcagagtgagaccttgtttcaaaaaaaaaaaaattaactccaaatgaatcaaagacctaaacgtaagacctaaaacaataaaactcttagaagaagacataaggggacagtttcatgacattgaatttggcagtgtttacttgaacaccaaaaatataggcaacaacaccaaaaaatagacaaat

SEQ ID NO: 607569 - DNA, 559 bp, Homo sapiens
tcctttcaacgaatgaggctaggaaaactggatatccagatgcaaaataatgaagttggacccttacttaacaccatatgaaaaagataattcaggacagatgcagtggctcacacctgtaattccagcactttgggaggccagggcaggtggatcacttgagccaaggaatttgcgaccagtctgggcaacgtggtgaaatcccatctctaccaaataaaaatacaaaaattagccagttgtagtggcgcattcctgtagtcccagctactcatggggatgaggcgggtgctgaggtggraggatcacctgagtcctggggaggctgaggctgcagtaggccgtgattataccactgcattccagcctgggcggcagagtgagaccttgtttcaaaaaaaaaaaaattaactccaaatgaatcaaagacctaaacgtaagacctaaaacaataaaactcttagaagaagacataaggggacagtttcatgacattgaatttggcagtgtttacttgaacaccaaaaatataggcaacaacaccaaaaaatagacaaat

SEQ ID NO: 607570 - DNA, 559 bp, Homo sapiens
tcctttcaacgaatgaggctaggaaaactggatatccagatgcaaaataatgaagttggacccttacttaacaccatatgaaaaagataattcaggacagatgcagtggctcacacctgtaattccagcactttgggaggccagggcaggtggatcacttgagccaaggaatttgcgaccagtctgggcaacgtggtgaaatcccatctctaccaaataaaaatacaaaaattagccagttgtagtggcgcattcctgtagtcccagctactcatggggatgaggcgggtgctgaggtgggaggatcacctgagtcctggggaggctgaggctgcagtaggccgtgattataccactgcattccagcctgggcggcagagtgagaccttgtttcaaaaaaaaaaaaattaactccaaatgaatcaaagacctaaacrtaagacctaaaacaataaaactcttagaagaagacataaggggacagtttcatgacattgaatttggcagtgtttacttgaacaccaaaaatataggcaacaacaccaaaaaatagacaaat

SEQ ID NO: 607571 - DNA, 591 bp, Homo sapiens
aattctggctttcatttctctttagggtagcttcagtttgtaacaatgacctcttcctatttgtctctttctttgctatattagacatcttattgtaactttcgttgcaaagaaaattcactttttcattagctctcttagtctcaccaagaatgtttgagattttcttcrgccgtgtggcttgttctcctggaaagattatttcatgtgcgtttgtcatatcctcttatttttttctataatatttttggaagatgtctaggggaaaggggattccaagttgtcttggagcacttcctgctctggtctcctatcactttgcaatcataagcacctcccttgctgttgtttctttcccttaggagaggaggcctgtatgccctagaggaaatttctgtgtgttataggtttctcttggatgattctgcattttttttcttttcagttcaccttgaaacttacttgatcagtgtctgccaagttgattgtcatttatattttctatactgccctgctgtcttccctgattgattcctgaaaaaaaggagggaaaaagcatattgcccttcagctttaatttgcctgctgtgt

SEQ ID NO: 607572 - DNA, 505 bp, Homo sapiens
gtgtgttataggtttctcttggatgattctgcattttttttcttttcagttcaccttgaaacttacttgatcagtgtctgccaagttgattrtcatttatattttctatactgccctgctgtcttccctgattgattcctgaaaaaaaggagggaaaaagcatattgcccttcagctttaatttgcctgctgtgttgaatccatccaggattcaacctctgcctctgcttgccctgacctctatattttatctattttatcctctaaattagagttggtttggctatttcttgcgttgtttcacctatttctttgaaaactttttttacttggtttaatctgtagattcggtctgctgtgggcattctctcttgatttggtctaatctgatcatatttgtttgcatctattgtatatcatttgtagttttaattaaagctactcatagtttcattgtgtatgtgtttgctttttttttttttttttttttttttttttgagacag

SEQ ID NO: 607573 - DNA, 638 bp, Homo sapiens
  misc_feature 590: n = A,T,C or G
catagctcagttaaaaattttagatgggaaatagtgaaagaagtctaatgggattttccctccagggtttcagaattgcctgggacccgtgarcccttttttccttcccctttctctcttttggaatggattgtctaccctatgcctgtctccccctccaacccccggtcttttagaagtggattaactcgtctcgcttcacaggatcacagatggagagacattttgccacacgatgaatcacacagtaagtctcctctgtagcttatttaaatgatgtagatggtgagaggagttgatgcggaaagtgttaagacttttggtaatgttgacatggtgcgaaaatgtattttgcacatgagaaggaaatcaattttgggaaccagagggcagattgggttgaactgtgtctcccaaaatagatgctgaagtcctaaccctcggtgcctgtacatgtgaccttatttgaaaatatggagtttgcaattatgattaagatgggtcatactagattagggaagctgttcttgtaagaagagaaaaattttgctgatacaggaggaggacagccacctggagatggagggcgngactggagtgatgctgccaccagctgcccgaagctggaagcagcaggg

SEQ ID NO: 607574 - DNA, 546 bp, Homo sapiens
atgactggaagaataagatgggtgaatgttaaaacacggttattaagaaataaaacgtatacaagcatacatagggattcatttgaaaacagtttggtatggtacctggaatataatcctaaaatgagatttcattgttgactaaataatgtmtttgttccccaaaaattcctattgttgtttcatatggcacatgagccagtgttttcagaattcgtatacacaggacttgttaagtattgacagtggcaagaaacctcatggtttgggtttaggttaaccaccattatttatttccttagtcttttatttcactcaaaaggagataacttaaattgaagagagggcaggaaacttaaaactgtataaaagattatctggaaaatacaaacatagtgtttgtggtgaactaaaatacatatgaaagctctgtacacataagtcagtgataaaaagtgctacattcagaaatacttgcaaaacatttcctcttgtgggaaacggtgataattctactgcactgcctttatgggtttgtaaattatg

SEQ ID NO: 607575 - DNA, 589 bp, Homo sapiens
ctaagatatattcttaaaatctcaagcgcattcacataatgaaatacagatgttttgtgttttaaactattcaaaaaatgggctctcacagaaggactttttttttgatgtgagaaatctcatgctttgttagtataggattagtgatcttggtagttttaaatttttaaaaattaacctttattatgaaaactttcaaaataaacaaataggaaatggatggctcagtcaaaagaaaaagaacaaagaaaaaattgtttaagaaaaaaatgaattaaacaaacagaagtagagcaatataagtaacctctgcatattgatctcccagattctacaaaaaaaaaaaaaaaaaaaattagccyggctaattttttgtatttttagtagagacgaggtttcaccgtgttagccaggatgatctcgatctgctgaacttgtgatccgcccacctcggcctcccaaagtgctgggattacaggcgtgagccaccgcgcctggccaattaccaagatttttctatgtttgcttcatttgtctctttttcagttttgttctttctttggtcttcttttccttcttccttccctcc

SEQ ID NO: 607576 - DNA, 566 bp, Homo sapiens
aagcatcttaccaccccatgaacataatggccctctctggattctatgtctttgtacattttcttcctcttgccctcatttaattttcaagacagcttaaggtatcatccattcagtgaaggccaccctgattctcccagtttttgcctctgtcctctgttcttccacagcactactttgtgtcaatcaccccagtaaaactataagtaacttaagagaagggcccatgtatttccaagtccaagcacagtgaccatcacaaaatatatggccacttcaatgctatccacattgacaccctgggttwccattctgtttccaactctgacgcccatcatgtcagtcccctacactgtaactcttcatatacttttctccattcttgcacctgggccctaaaagccatgcttagaaaaataaacaactagaattctaattctagttgtaagtactcaactcaattctagtagtaagtactcaacagttagataattagattgtctttaatactctgcttctcgagtttgtcaaaagaagctatagaaatatagttctaataaaatgtt

SEQ ID NO: 607577 - DNA, 566 bp, Homo sapiens
aagcatcttaccaccccatgaacataatggccctctctggattctatgtctttgtacattttcttcctcttgccctcatttaattttcaagacagcttaaggtatcatccattcagtgaaggccaccctgattctcccagtttttgcctctgtcctctgttcttccacagcactactttgtgtcaatcaccccagtaaaactataagtaacttaagagaagggcccatgtatttccaagtccaagcacagtgaccatcacaaaatatatggccacttcaatgctatccacattgacaccctgggttaccattctgtttccaactctgaygcccatcatgtcagtcccctacactgtaactcttcatatacttttctccattcttgcacctgggccctaaaagccatgcttagaaaaataaacaactagaattctaattctagttgtaagtactcaactcaattctagtagtaagtactcaacagttagataattagattgtctttaatactctgcttctcgagtttgtcaaaagaagctatagaaatatagttctaataaaatgtt

SEQ ID NO: 607578 - DNA, 440 bp, Homo sapiens
cctcctggaacactggggaggaggaaagaaaaatggaaagagtaaaaatacgggtaaatatgatcaactttccttctcttgagctttccaaattatgtttgagggttgaagcaaaaattataacattacggcctgttgtgtggctcacgcctgcaatcccagcacttggggaagccgaggcaggtggatcacttgaggtcaggagttcgagatcagccaagccaacagggcgaaaccctgtctctactaaaaatacaaaaattatctgggtgcggtgttgggcacctgtaatcctagctactcgggagtctgaggcaggagaattgcttgaacccggaggcagaggttgcagtgagcctakatcgcaccactgcactccagcctgggtgacaaaagcaaaactccgtttaaaaaaaaaaaaaaaaaaatatatatatata

SEQ ID NO: 607579 - DNA, 650 bp, Homo sapiens
gacataacaattcaatttatgaactctttctttctttctttcttctttttttgagacagggtctcactctgtcatttaggctggagtgcagtcgtgcaatcatagctcactgtagcctcaaactccccctgggctcaggtgattctcccacctcagcctcctgagtagccaggactacaggcgtactccaccacatctggctaattttgctctttttatttttttgtagagatcaggtttgccacgttgcccaggctggtctctaacttctgggctcaagtgatcctcccaccttagcctcccaaagtgctaggattacaggcatgagccaccgcacccagcctgaactctatcttaaaggcataaaaatgcrcttttaattaaaaagatttttatacatggatgcttatgcaaagcatttggaacaacccaattgttagcagtaaaggaaaggttaaacaaaattagtagagtcatttgttgtaatattggtcactcattaaaaatcatgttgtcagaaattattcaatgatgctggaagatacagtataatagtaagtaaaaatgtagaatatgaaaattgaagtaggataaaaagtgtataaatatgtaaataatggaagaaaatactccagaatatatttagtaat

SEQ ID NO: 607580 - DNA, 650 bp, Homo sapiens
gacataacaattcaatttatgaactctttctttctttctttcttctttttttgagacagggtctcactctgtcatttaggctggagtgcagtcgtgcaatcatagctcactgtagcctcaaactccccctgggctcaggtgattctcccacctcagcctcctgagtagccaggactacaggcgtactccaccacatctggctaattttgctctttttatttttttgtagagatcaggtttgccacgttgcccaggctggtctctaacttctgggctcaagtgatcctcccaccttagcctcccaaagtgctaggattacaggcatgagccaccgcacccagcctgaactctatcttaaaggcataaaaatgcgcttttaattaaaaagatttttatacatggatgcttatgcaaagcatttggaacaacccaattgttagcagtaaaggaaaggttaaacaaaattartagagtcatttgttgtaatattggtcactcattaaaaatcatgttgtcagaaattattcaatgatgctggaagatacagtataatagtaagtaaaaatgtagaatatgaaaattgaagtaggataaaaagtgtataaatatgtaaataatggaagaaaatactccagaatatatttagtaat

SEQ ID NO: 607581 - DNA, 650 bp, Homo sapiens
gacataacaattcaatttatgaactctttctttctttctttcttctttttttgagacagggtctcactctgtcatttaggctggagtgcagtcgtgcaatcatagctcactgtagcctcaaactccccctgggctcaggtgattctcccacctcagcctcctgagtagccaggactacaggcgtactccaccacatctggctaattttgctctttttatttttttgtagagatcaggtttgccacgttgcccaggctggtctctaacttctgggctcaagtgatcctcccaccttagcctcccaaagtgctaggattacaggcatgagccaccgcacccagcctgaactctatcttaaaggcataaaaatgcgcttttaattaaaaagatttttatacatggatgcttatgcaaagcatttggaacaacccaattgttagcagtaaaggaaaggttaaacaaaattagtagagtcatttgttgtaatattggtcactcattaraaatcatgttgtcagaaattattcaatgatgctggaagatacagtataatagtaagtaaaaatgtagaatatgaaaattgaagtaggataaaaagtgtataaatatgtaaataatggaagaaaatactccagaatatatttagtaat

SEQ ID NO: 607582 - DNA, 550 bp, Homo sapiens
tgccccagtgaaggaattacttccctatcccaaagagctgcaggaccgctctgtccctctccgtcaacaatgtccctcgcagctgttctctttaggcaacgatcgtgtcctggccacagaagctctgagcatctccttgccacggctgtgtcaggacccctgtacaccatatgtgcctctacaatcctgcccttcctagtgcttctgcccacacactcaacacacttctcctctgcccttattctatttcatcattagtctctgttcgtctttttcatcccgtatcagtgcctgatcctagttttttattctcttctaaaacacctcctcctggcctcacggtgggctagctttcaggacctgcgaatgagcgtgggcgacgcggctagtggattggcatacatcctgtagaagcatgtgtgtgtgtggtgtgtgtggcctcaggttagagtgcatcattttggtggtgccaatgcaatatgctttcctgcaccctcctccatccytgacttccaaacagtaggcacacaggtggccttctgccacctga

SEQ ID NO: 607583 - DNA, 580 bp, Homo sapiens
tcctaggtggttaagtatacaacactgaaataaaaatctacaaaatctataccctcataacacttatatactaattgatggagacagaaaagagtaacaaaacaaaaaaactaaaatttattatgctacctagagaatgttcattactattgggcaaagtaaagcaagtaaggagtgtccagcagttgaggaatgaatgctattataaaatgggtagtcagggaaagctttattcaaaagatattttggaaaacacccgaaggggctgagggagtgagttatacaaacacttaagagatgaacgttttagacatagaggaaagtaagtgcaaaagccctgaggcaggtgcatacgtctggcacattcaaagaycacatcctgctattttggctagggtgaattaactgaggaggagacagataacagacaatgtcaaaggtgcaactaagggcctgtttgtgtagagcctcaaaggccactgtaaagattgtgactttgagtgagattggaagccaggtttgagcagaggaacaacaggctctgacttaatcttttaatggcttactttgggtgttgtgc

SEQ ID NO: 607584 - DNA, 422 bp, Homo sapiens
actgtttctcaccaactatggagctaatggggacggtggctttaagccaactaccacttaaggggaaaaaaaaacttaccattcaacaagtgaaatagttagtgtggaatggatagcatctttgaaatttgattttcagcagtctcyccaagtgactgaatacattttttcaaactatttacttttgtatcatgtcttctcatggtcaaattcaggatgaattttatgacaggatttggtctaatgctgctgaattgtctcataaatatcttgacaagtcatttgaaacatgctgggcctctaaagaggctgactgacatgaaagcactaacttggaatcatcagggcttaagggtaacttatggaccctaaggcagagccccaaatcaagatcataaaattacagacagtgagttgaaatt

SEQ ID NO: 607585 - DNA, 553 bp, Homo sapiens
tataactatggaatttttctttattattgatggaatctgatgtatttagttcaagggcaagaaaagtatttcccattgactggttctgcattttggacttaaagtagaaacctaaaattaaacccacagtttttcatagaacagtcactgctgaattctacttttataatgaaaacataccttatgttcaataagagacagctggtttttctgatttagagataagcctaatgaaataaagtgggatctaaatatccaaaacttaaaaggtgcagttattcattactgtactgattaaaggataattattcaatcatgtatagtattgggtcaagaaaagcctagggcaattttgtaatgactgatgttacttggaaattgcaaatagcattccattatttaatttaccttattaggtagtttgacagtggatttaaagaaacactaccatgctgattaagagcagacattttacttcattctctttctaaaggtctttctttaaagtaaaatttatattgggtmtatcagattttttatttgtattaagaaa

SEQ ID NO: 607586 - DNA, 517 bp, Homo sapiens
acctgttgtcatttttatgtcttcttttgagtgatgatcatgccaacccattgcccattttttatttgagttatttgttttttactattgagttgtttaagttccttgtgtattttggatattaaccctttatcagatgtatggtttgcaaatattttctctcactctagtaggttgttatatgactcttttataagtagaagcagatctaggtttgaccttctggtaacctgaagagtccattgctatttgcctgagaaagtatagccaaatggttaaaggaggagttctgcagtcataccagtgttgcatcatacaagctatttaattttgttaaattaattsccacttctccagtttctccattattaaaagacaataatgaaggacctaattcaccgggttggagtgaggtttaagtcagacacacacacacacacacgcatatatatatatacacacataaatatatataatgtttcataataaagagctttgacaaatcaataagaaaaag

SEQ ID NO: 607587 - DNA, 559 bp, Homo sapiens
ctatgcttcaatcgctattgatttattgtatataatgttcagaacattataaatattttgtgacctaacaaaaagcagaaaaatatgactcctagtggacagaaaacacagtaaataaaagcagacctgtttatgacccaagtgttgaaactagcagataaggattttaaaactaatgtgaatatattaagtaacttataggaaaagatacacacaaaaggtatataaatatttatatgccatatataggtattaatatatacatatctgccatatatacatctgtcatatatrgatcaatacatatatgtatataacatatatataaaaatatatgtattgttagatatgagttctaaatttcttttcaaagaatcaatatgtcagtattgattctttgccttctacttttaaacttaacttcctcataaagcaacccttttcaattacctgttccaccctgactcattctgattacctgctccaccctgactcattccaattacctgcttcaccctggctcattctgattacctgcttcatcccaactcattccaat

SEQ ID NO: 607588 - DNA, 559 bp, Homo sapiens
ctatgcttcaatcgctattgatttattgtatataatgttcagaacattataaatattttgtgacctaacaaaaagcagaaaaatatgactcctagtggacagaaaacacagtaaataaaagcagacctgtttatgacccaagtgttgaaactagcagataaggattttaaaactaatgtgaatatattaagtaacttataggaaaagatacacacaaaaggtatataaatatttatatgccatatataggtattaatatatacatatctgccatatatacatctgtcatatatggatcaatacatatatgtatataacatatatataaaaatatatgtattgttagatatgagttctaaatttcttttcaaagaatcaatatgtcagtattgattctttgccttctacytttaaacttaacttcctcataaagcaacccttttcaattacctgttccaccctgactcattctgattacctgctccaccctgactcattccaattacctgcttcaccctggctcattctgattacctgcttcatcccaactcattccaat

SEQ ID NO: 607589 - DNA, 527 bp, Homo sapiens
agaatgctttattaaagccaatcataagaaatgcatagaggggaacaaaaataaagttatatgtgatttctgagaaatccaaacttagctcttattatatgtcttctctttacaaatataatcagtactatcctgtcccaatgccttacccagacattcacaactctccattcagctttatcttcaagtaatcacctagtatacagtttcttgtatcagaaatgattattgtactattgtcacaatttccccttcacaattttagcttgtacagcatctttcttgtctgatagctcctgaaaaccatcttaatcaatgtttaaatacctcagaaatgctactttctccaaacagctttttctggtcctcaaaaccagaagtgacctggtcatactgtcatatttttgttatattatttttaccttcctstgcagcacttttcacactctgtcttaacttattgtcatttgtgtacacgttcttctagaaaacaaatgaaaaaaaagaagctgccacaggatgtctgt

SEQ ID NO: 607590 - DNA, 498 bp, Homo sapiens
tggagttagcattttagcttactgtcacctatgggcacaccacaastttagcaaagttgatttttcttgtatttacacaagtgttaaagttggtcaaggtcatcaaggttgtccctgctttggatgttgttataatataagcaaaggtaaattcaagagcctgctgtcagagtcttactttaagtctaagtgggcaggcagaaagaatggatgcctggaaggcttgggctctagtcctgtctctactttttcccaggtgagagacattatttaggctttcatgtatgaaaccagaaaaacagctcttgtcctaacaaggaagatggagtgaagaataatgtacgtttgagacgatgctttcaaaattgtaagttgtatgcaaatgcaacatattgtttgtagtaatggcaaaaatcataatcaggagagaaaacttacattttacacaaggtaccccttctttctatagtctttgcctaacaccaggatgtttatcaa

SEQ ID NO: 607591 - DNA, 498 bp, Homo sapiens
tggagttagcattttagcttactgtcacctatgggcacaccacaactttagcaaagttgatttttcttgtatttacacaagtgttaaagttggtcaaggtcatcaaggttgtccctgctttggatgttgttataatataagcaaaggtaaattcaagagcctgctgtcagagtcttactttaagtctaagtgggcaggcagaaagaatggatgcctggaaggcttgggctctagtcctgtctctactttttcccaggtgagagacattatttaggctttcatgtatgaaaccagaaaaacagctcttgtcctaacaaggaagatggagtgaagaataatgtaygtttgagacgatgctttcaaaattgtaagttgtatgcaaatgcaacatattgtttgtagtaatggcaaaaatcataatcaggagagaaaacttacattttacacaaggtaccccttctttctatagtctttgcctaacaccaggatgtttatcaa

SEQ ID NO: 607592 - DNA, 559 bp, Homo sapiens
agagaattcacaaaatatatactcattcaaaggctttcaaatgctgaccaaagctttccttttgaccttacctatcactcctgccttcacagatcctgcactgccagtgactcagtgggtgtgcccccgtttacaccattgcatatgatgtgccgttggcattgtatgcctctcaaggtgcagtttgatgccatctcttccaagaagcccagatgtcattctctagctgtttctctggccaatgagtagtcatttccttatgagagctcatctygtgtcatgagtcctgtatgtgtcttatctctgattatttcgtaaacttcttttgggcaagaactatatctaatagattttactttccttaaaatacctaggatagaacctggcccatggtaggtggtaaataactgcctggtcaattagtaaataaaaatatgaatgaagtttgacagcctatacaatatatatataaagtaatctgatacaatgttactaaatagatagatagaagataggtaggtaggtaggtagatagatagataatagaatttagcagcat

SEQ ID NO: 607593 - DNA, 272 bp, Homo sapiens
caaaagagcaaaggaaattcctcccacagtcagtagaaacagctggtgggcaactcctcagttccttccccttttcctcttgattcattatggttatgctcaaagaacagaaaaagagtacagttcacccatggcactgttgctatcatcttttccctgtgactactaaaatattgagtttctggtattagagagaggtaygcagggaaataccctcaatctaatgctaatgatcctgagaggggtgagccctggattgtgccacatttcaa

SEQ ID NO: 607594 - DNA, 472 bp, Homo sapiens
ggtaccctgtggccttatgacagtggggctggactagttggctggatagggaaggcttccttaaagcactgagcttcttcaggagtttggcagccactccacttaaaggtctgtccctagcaatctctcctttcatatcacagtttgtagatgcctgacctatgaaatcaagctctaagtctctatactagtgaaatgaataaccattaagttgtctctaattagagaaggggagagtgctgcaacgggcgcaaaacatctggaagatgatttgaaatgatgyaggtaagcaaaggtgggaggggaaaggagaaactgaaagggaaggagagtcccagcctctgtggagagaggcaagtagcagtggtgaatgcagacctcctaacaagcagcagctcatgcacaccgagcagaagcagaaggacgtgggcggagcatgctaggcactgtgggccacatcaagagttgtaaa

SEQ ID NO: 607595 - DNA, 637 bp, Homo sapiens
tccaaagggaaaatccatatgcaatcattttaatataatatgcacaggaatcaattataggaatatcatactgcatacaacaaaacaagagttactcaaactataagtggactatacataagatacacttactctacaaaaagaaaaacataatggccattacattttttttttttttttttttttttttttttgagatggagtctygctctgtcgcccaggctggagtgcaatggcacaatctcggctcactgcaacctccgcctcccaggttcaagtgattcttccacctcaccctcccgagtaactgggattacaggcacccaccatccatcatgcctggctaatttttgtatttttgtagagatggggtttcaccatattgtccaggctggtcttgaactcctgacctcaggtgatccacccaccttggccttggccattaacattttacctagatatgcaatgttttcatgtaccaagaaaatcactacatgcactatatgcgggagcaagtaggacaaaataaaccgagacccatctctcaactgaatacacataggttaagtcatatcactcatagcatagtaagaacatgtgtttattattgtcatagtatttacgatacttttactta

SEQ ID NO: 607596 - DNA, 637 bp, Homo sapiens
tccaaagggaaaatccatatgcaatcattttaatataatatgcacaggaatcaattataggaatatcatactgcatacaacaaaacaagagttactcaaactataagtggactatacataagatacacttactctacaaaaagaaaaacataatggccattacattttttttttttttttttttttttttttttgagatggagtcttgctctgtcgcccaggctggagtgcaatggcacaatctcggctcactgcaacctccgcctcccaggttcaagtgattcttccacctcaccctcccgagtaactgggattacaggcacccaccatccatcatgcctggctaatttttgtatttttgtagagatggggtttcaccatattgkccaggctggtcttgaactcctgacctcaggtgatccacccaccttggccttggccattaacattttacctagatatgcaatgttttcatgtaccaagaaaatcactacatgcactatatgcgggagcaagtaggacaaaataaaccgagacccatctctcaactgaatacacataggttaagtcatatcactcatagcatagtaagaacatgtgtttattattgtcatagtatttacgatacttttactta

SEQ ID NO: 607597 - DNA, 496 bp, Homo sapiens
ttgcttttaataaaaagtctagacatttttataatctgggaaatcaattattttcttgattaactctgtagtctcttttgcatcttgtgtatacacttacacaatatgaaaataaaactgaccagcaaagagactgtcatcctgttttattatgtaatgtcttctatgcctttaacatggtaatcagtaccatgagatggaggggcaaaaaaaaaaaaaaaaagaaaaaaaaaacggtttcacagagagaagagaagaaaaaggaggaggaggtagagaaggaggaggggatgaggaaaagaagaggaagaaaaggaaaaagagaaagaagaggaggaggaggagagggagaagaggaagaaaggaggaggaaaaaggaaggaaggaagtaacgggaggggaggggagggaagaagaagaagaggaggaggaggaggaagaggaacaaggaggaggaggaagaggaataaggmgtaggaggagaaaaggggaaagg

SEQ ID NO: 607598 - DNA, 564 bp, Homo sapiens
agaaggtaatgtggaagggggatgaggtgagggctgaaagttgggaaaagcctaatgcaacaaaacggatagtagaagttccatgaaggcagagatggcattgatctggtacatcattayatccccagccctgagtaggtgttccccaaatgctactttgaaccattcaatctgtcagtgagaggtggtgaagactcaagacaggagccatggggtgaactgagagggtgtttttgacaaacacttctgagatagaattgacagaatattgtaattgattgaagtgttaactagaatattatcagatctttttatctgtatttgaaaagaaagattagatataccgaagacaaaaaaggttattttatgacatcttcaaattacttcaaaaccctatcttatttctgaattaaggtagaggagttaaaggaatcatcaagaaaaatatttctagggttttgatcaaagaagtagaggcaaatggatagttttacctaatttgaacacactcttccatttgagacttcattaaatggcaagggctgacccatatatgctatataa

SEQ ID NO: 607599 - DNA, 671 bp, Homo sapiens
tgtgtggggagagcattagggaaaagagctaatgcatgctgggcttaatacctgggtgataggttggtaggtgcagcaaaccaccatggcacacgtttgcctatgtaacaaacctgcatatctgcacatgtgccccagaacttaaaaaatattattatttttaaaaaatgtaacaacaaacaaattttaaaaattaaatttaaaaaattttaaaagtctcccaataaagaaatgcccagggctggttagattcatagccaaattctacaaaacatacaaagaagtaataccaatcttcttggaactattccagaaaatcaaagaggagagagttctccycaactcattctatgaggccagcatcactctgattttaaaaccagacaagcgcacaacaaaaaatgaaaacttcaagccagtatccctgatgagcatagatgcaaaaatccataacaaaatactcgcaaaccaaattcaacagcacatcaaaaaggtaatgcatcataatcaagtgtgatttataccaagaatgcaagggtgattcaacatacacaaatcactaaacatgaaacatcacatcaacagaagaaaggacaaaagccatatgattatctcagtagatgcagaaaaagcatttgaaaaaattaaactatattaatcagggacagaac

SEQ ID NO: 607600 - DNA, 617 bp, Homo sapiens
caaaaaaagaaattatacagtattaaattaaaaatctacagcagaaatagaaaattccctaaatatatggatattaaacaacacatttctaagcaactcaataagtaagaaagtaatcacaatgaaaattagaaaacacctcaaactcaataaaaactatgatgtgtctacattctggcattttacttgggaaaaaatatactaggtgtcaaaatttgaggaatacaattaagtactgaaagggaaattgtttactttatattcatatattagaaaaatgaaaagtggaaaaaactgtttccattctcaagaaaacagaaaaagaagagcaaattaaaccgaaaaaaaactttaaaaaaaagaaaataatgaagacaagaataaaagtaaattaaaaagcaggcgtacaatagaagtaatccatagaaatraagttagttcttgggaaatgttttaaaattgataaccccttctaagactgatctagaaattgttaaaaatgataaaatacaggttacactatcaaaaatggaaaaaatgcaatcacaattaaaagggaaccattctaaatgcatttattagaaaattatagaataattataaatttagtggattgc

SEQ ID NO: 607601 - DNA, 561 bp, Homo sapiens
aaacataagtttggtcttttcacatagtcccatatttcttggaggctttgttagttcctttgcattcttttttctctaatcttgtcttcgtgctttatttcattaagttgatcttcagtctctgatatcctttcttctgcttgattgatttggctattgatacttgtgtatgcatcacgaagttctcrtgctgtatttttcagcttcatcaagtcatttacattcttctctaaactggttattctagttagaaattcctctaaccttttatcaaggttcttagcttctttgcattggataagaacatgctcctttaactcggaggagtttgttattacccaccttctgaagcctacttctgtcaatttgtcaaactcattctccatccaattttgttcccttgctggcgaggagttgtgatcctcagttggaaatgaagaaatcacccacctcctgcattggtcttgctgggagctgcagactggagctgttcctattcagccatctcgcccgggaaatccttatccaaactctttaacacaaaagagcaaaaggaaagcc

SEQ ID NO: 607602 - DNA, 508 bp, Homo sapiens
tttttcaaaacgtctacagatgaactcataatatgctatttttaaaatgtgccacagggtaaatatcagccctggtatgaacagaatgagatttcttgccccaaacgagctttgtaaaccagggagcgtgggctcccccagaagtgtttctggctccttcactgcctactgtctgaaagcaagaagatgtacagagcaagggctccacaggcccagaaaaagaaatagctttgcagggagctctcatggtttatttctttcaaagctatcaggcccctctgatttgtataactccagagaaaggaaatactgaaaagtgaaagttataaaagatgaaacccttaawatctaccaaagcagactcatttttctttatttcaagatgctgctcggtagtattttctgtgaaatcagatggattagagaaaaataaaagttgatagaaaaatattctgcataaatgcaaaggttttctgaataaaccactgcagtggaagaacaaattttt

SEQ ID NO: 607603 - DNA, 328 bp, Homo sapiens
tatatatacacacatacccatatatgggtatatggatgggtaatttggactttttttacatatatatcctatatatatatattttacatatatgtgtatatgcataatagtatatatatattgtgtgcatatatataatatacatatatatatatactattgtcctactgctatatcttacattgctatttcatagaccttcctaaaggaggctatttgtagaagaaaggataattcatccttcttcctgattggcayggcatgacttataagatcacaaaaaatagtggtcaataccagcaacttttttgacaaaaagcactttttc

SEQ ID NO: 607604 - DNA, 646 bp, Homo sapiens
caaaaatatggaaccatcccaagtgctcatcagctgactgggttaaaaaatgtgttatatatatacaccatggaataatactcagccataaaaaggaaagaaataacggcattcacagcaacctggatggaattggaggacattattctaagtgaagtaattcaggaatagaaaaataaatattgsatgttctcactcataagtgggagccaagctgtgaggacacaaaggcataagaatgatacatagagtttggggacttgggggaaagggtgggaggaaggtgagagataaaagactacacattgggtacagtgtacacttctcaggtataccaaaatcacagaaatcaccactaaagaacttatccatataaccaaataccacctatttccccaaaaaaccaattgaaataaaaaataaaaataaagaaatgaagaaacaaaataaagaaaaaatgaagaagaaaataaaaataaagaaatgaagaaacaaaaaaaaagaaagaatgggggcttggactctgacaaaataggttatgggaagggcaagaaggggaagtctctcaagaggaaacaaatgattactaggagaattcaatgggcttgaagaacacacaatggtctaggacaatgtttggcccaca

SEQ ID NO: 607605 - DNA, 608 bp, Homo sapiens
taattcctgtttgctgaaagcttcaaagtctgacattttgtggtggttcatttgttgaatggtttaagtgaacattcccaaataattttcaataaggtataccaaaatgtaccaaatttacaataaaatactgtaacatttttaaatttgcaaaatttatcaaaaaattatgaaagaagtttttcctgttataaggcatttagattgacttttaaagtaggtcttctaatgtgcaacatttaaaaaatccttttggtgattgggaatagcgagattgcctattattttgaggaaatttacattgtatttatcattggcttcatcacaaaattatttaggttggttactctaattgtgtgtatggggtgaatcagagcaatacacaaaytataaaaataatagatattgctctaattgtattatatacctataaattatataattctataaattataagttactaataaaatattgacaacttctatttctatcaggctaatcaagctaatcagcttgttcaaatacaaatgtaaattacatttgcactttcatgcgtgtgaagagaccaccaaacaggctttgtgtgagcaacatggctgtttatttc

SEQ ID NO: 607606 - DNA, 501 bp, Homo sapiens
agaaaaccaaacacttataagtgggagctgaacaatgagatcacttggacacagggaggggaacaacacacactggggcctgctgggggtggtctggggggagggagagtattaggaaaaatagtcaatgcatgctgggcttaatacctaggtgatgtgttggtaagtgcagcaaaccactatggcacacgtctacctatgtaacaaaccaacacatcctgcaaatgtaccrcagaactaaaaataaacattaaaatgaacaaacaacaaaaaaattctgagtataaggatataattgaaaattataaaataagtggtgcagtataaaacaagccatcatgagtgagtgacaataaaaacaacaaagagcacaattcaacctggaaatattccaaataaacttaagttctgcttaaaaacataaaagtaagataaaaataaaagatgggggttttatgctcaatagtggtacagtagttatgatcagataaattctccccc

SEQ ID NO: 607607 - DNA, 473 bp, Homo sapiens
tgattcccaaacctgcctgcatgttgaaattacccaaggattttcaaaatttgctgatgcccgtattctacgcagagattatgatttatgggtctagtgtgtcgctgggtgagccaattaatctataaatttcctcccttcctggagattctttcctaagaatgtacctctgcccaagaggaaccagggcactctgagacttctcaaagtgacaggaatatgtgttcccaggcggactttctccaccctctacaatattgagggacttttatgctttacagcaagatttaaattgctcttcagctatcctgcttggattccccttttatcacatttcagaagatatgggtttgagagccttccctagtaaaatgggattataaatctctataagccccatgtttggagtctcaagaggccatagtaagaggtcccaactgttcatcggtawttttttttttaatggtagaatg

SEQ ID NO: 607608 - DNA, 561 bp, Homo sapiens
gatggtttgaaggctgagtaaggcagggttttattgggtggaaaggaagaaaagggggaagcagggacactcacctaactagactgcttgccacccacagcttgaatcccaggttccgcaccaaacgaggatgggccaggctcctcctcgctgcaaatgtcatgaacttccagaggctctaccccagtggacaggctggatggagtttttccagggaccccctccccacttggctgtctcattccccactctaaagaagtacatctaacagttgttggattaagaataaagacaaagaccaatcttaactgcttcctgctgacaggggctgctgatttggggaaaagcagtcagagcttcctcagaggcctatttaaggattcccagcagaaggggccattgtccgaggctctggttgcatgackgtttggagtctgatggccctttttgccagcatgttgggcttctgggttcctttcccctgagcccaatcctaagacaaccagtttaaggcttgggaaattaactctttccagtttggaggatgcatctcaggggagc

SEQ ID NO: 607609 - DNA, 561 bp, Homo sapiens
gttccaggcagccaatgagcagggctgagaacttcttgcaggctacaagcctccccaatgagaaagcaagcagggctttcaggtttcgcacctccctgcctgctgtggattctgtgctggtatctgcactacctgtttgcacccyaccccagattctgtccaggaaactacttattttgtcaaaattgttacaatgttcggttggaagtttccttcttcctgcagtctttccccaattccactggcagggctccccaaggtcccctgtgagacaaggtcagaaatgacttccctggggaccgagagtacccacagggctcttcctgctgccacctctacctctatattttctgtggctctctaaatttatctcagctctagttacagttaaattcttctcgtgatctgtattttaaggtttcccagtgaggatgtgtgtttgggggcagaactttcccccttacacactttgggcactctcagttttttggctgtctggcagagctacagtgacaagccagttccttcaaaaggtctttggattctttcagctttactgtt

SEQ ID NO: 607610 - DNA, 577 bp, Homo sapiens
tcttggcatattgtaccatgacaaatttcttggggaagtaggcagaatataaattatcaatagacaaatgacttcagtcattgtgcttctggaaggcacattctaaaattcaaaaatattactcaaaaaagtgatagtagtataattctgtcaccttttaattctcatagcatgatcctaartttgacaaaagtttattttagaagcaggttgagcagatattcataactctggaagtaaaaagattcataggaaggattgctcagcagtataaaagtactgggaaaaggcagcacagaagaacaggagaggacttcattatcaaataaaatcatttgcttgtttgttaaagctcttgattgaggaaatgtcattgaatattacataagattttactatgagaaaattgttgtcactcatttgagatctcagaattctcggcgaaagagtaattcccttactctactttgctattccctcctgctactgtcctctctcctttgtttcatgttgatttcagcacttacaccaaatgctgtgatacttgcctacacagagtttctcattcaataccata

SEQ ID NO: 607611 - DNA, 577 bp, Homo sapiens
tcttggcatattgtaccatgacaaatttcttggggaagtaggcagaatataaattatcaatagacaaatgacttcagtcattgtgcttctggaaggcacattctaaaattcaaaaatattactcaaaaaagtgatagtagtataattctgtcaccttttaattctcatagcatgatcctaagtttgacaaaagtttattttagaagcaggttgagcagatattcataactctggaagtaaaaagattcataggaaggattgctcagcagtataaaagtactgggaaaaggcagcacagaagaacaggagaggacttcattatcaaataaaatcatttgcttgtttgttaaagctcttgattgaggaaatgtcattgaatattacataagattttactatgagaaaattgttgtcactcatttgagatctcagaattctcggcgaaagagtaattcccttactctactttgctattccctcctgctactgtcctctctcctttgtttcatgttgatttcagcacttacaccaaatgctgtgatacttgcctacayagagtttctcattcaataccata

SEQ ID NO: 607612 - DNA, 598 bp, Homo sapiens
ctgtggcccattttttcatttattatactcataaaccttgacaacatttaatatctgcttgctatttaataacatatacaatttttcatgatattaaacctgtaatctggattctccggccctgacatctgaaacctaagtgcttagatacctggtgttatatggatacagtgaaaaattgaacacagcttcttgaaagatctatcaaaaaaggattcattttgaaataagtagttatggcatggcagataggaagaacatcaacttttgcctctttaatcttggcatgaaataatataattaaagtgataaagtacaaaatgtaattctcttgctttctttaaaagtattatttttgttggaaacaccacaaaacaaatgtttataagataattatgtgttcaccaaatgttcatacgctcattaaatatctgcctctgtggaggagtataaacatgtgccgttctcatggataactgcccattttagccctcacttggcaaacagaatacaaacaaagtgtttcatgcttagcasgcaaaacaaaaaagaacagaaagttatataggcctacaagcaatggatttaaccttttagt

SEQ ID NO: 607613 - DNA, 614 bp, Homo sapiens
attctgtgaccattccactcccactgggctccacctcaaccacaattaccatraataggtgtgacatccttgtccttttatactgaagaatcaagcttcttggccacaagggtaaggcagggcagagaccgcagtgggaagggcaggcacagcagacttctgatttttcactccaaccccttgtcttgactgtagaaagctccttggtgcaggaataataaaggtaactttgaagagttcaagccccactcctagtcgtccaacagtcccttttgtaaatgctctgggagttttcttgttattcatgcctccaataagctttcttctctcctagaatataagcatggtacatcttttctttttttctgagcctgcatgggtaagaagtttactctctgagaggatagattagagctcagcaagcaaatggccgcttattctttgctaaagacagtaatcgcaaaaagaaagcttcctgtggcactggaaagagaatggtgaaagaggtggttaaatttaggaaaaggggtataaatagcaaacaaccaactgcaatataacaaaagattaatatgcttttcagcaatgtaactattagattatatacatatcaa

SEQ ID NO: 607614 - DNA, 601 bp, Homo sapiens
aactcactctgcacctctgccaacatagggctagctagggtgatgtcaggcagggtggtaacaatcccttagcattctgtgaccattccactcccactgggctccacctcaaccacaattaccataaataggtgtgacatccttgtccttttatactgaagaatcaagcttcttggccacaagggtaaggcagggcagagaccgcagtgggaagggcaggcacagcagacttctgatttttcactccaaccccttgtcttgactgtagaaagctccttggtgcaggaataataaagrtaactttgaagagttcaagccccactcctagtcgtccaacagtcccttttgtaaatgctctgggagttttcttgttattcatgcctccaataagctttcttctctcctagaatataagcatggtacatcttttctttttttctgagcctgcatgggtaagaagtttactctctgagaggatagattagagctcagcaagcaaatggccgcttattctttgctaaagacagtaatcgcaaaaagaaagcttcctgtggcactggaaagagaatggtgaaagaggtggttaaatttaggaaaaggg

SEQ ID NO: 607615 - DNA, 429 bp, Homo sapiens
gaattcttatggcaaaccatctgcttttagactgaatagctaggtgttttctgtcagctaaatttgagagactaaagattactgtcagaaaccaattactcaacctgactgtggcctggtaatagtcaggttgctgctgaccttgaaataaccacatattaatacatactcttcaccttactctgtttaacaaaatgcaacatcgaatcattttygaaattttaaaattctaatttattttttcactgtctccttccccatctcccttgctctctccttccctcttatcctcactctctctttctctctcttcccaagaaaagttgtggctaggattaagaatgattttgaaataagttttaaacttgccaaaatctccaaccagcttccataaattaatgactcttttagtaatcaataacaagacat

SEQ ID NO: 607616 - DNA, 608 bp, Homo sapiens
tacagcctactactcacctaggctgtgtggcatagcctatttctcctaggctacaaacctgtacagcatgtgaccgtaccaaaaacaatagacaactataacacaatggtaagtactaaacatatctaaacatagaaagggtacagtaaaaatacagtataaaagataaaaaatggttcacctattcagggaagcttcattataggcttataagaccacagtcgtaaatgcagcccgttgttgaccaaaacatcattatgcagcacatgactgtagagtggaccaattgagagactggtaattggtgatactgagtgttggaaatccagaggattggaagctacattgccacccagatcacagcagatattgaatttagggcaacgagattttaagcctcaaactaagtctcttgctacattttctgccttggtcaagtttaggtccaggactgaagttgccctgggacctctgrattaacattaatatatacagctggcctgttatcagcatagaactggctggggatcccaagaatattggaataagatgagattgaaagattaactgggcatgatgcttttaaccagaaacctagcagttagaag

SEQ ID NO: 607617 - DNA, 540 bp, Homo sapiens
tgctggatatatagtttgcaaatattttctcccactctatgggttatctttttactctgtcaattacttgttttgctgtgcagaagctttttagtttaattaggtcccatttatttctatttttgttgcacttgcttttggagtcttaatcataaattcttttcctaggcaaatgtctagaagagtttttccagtgttgtcttatataattttttttatttcttctaaaaaaatgtgatacatgtgcagaatgtgcaggtttgttacataggtatacgtgtgccatggtggtttgctgcacctaccaacccatcttctaagttcccttccctcaacccacacctccagtgtgtgttgttcccctctctgtgtccatgtgtgttctcattgttctactcccacttatgagygagaacatgcagtatttggttttctgttcttgtgttagtttgctgaggatgatggcttccagcgtcttccatgtccctgcaaaggacatgatcttattcctttttatggctgcatagtattccacagtgt

SEQ ID NO: 607618 - DNA, 553 bp, Homo sapiens
attctacttttgaagagtttttacttgtcattaaaacaaatgcaaatacagtcatacagcccataatgtttgggtcaatgacaaatcacatatgtgatagtggttccttaagattataatgaagctgaaaaattcctgttgcctggtggcattgtagctgtcaaaatgtcatagtacaaaacattgccatgtacttatggtgatgycagtgtgaacaaacctactgtgctgctattcatatagaaggacagcacatacaattatgtacagtgtacaatacttgataatgataataaacgattacattacaggttaatgtatttattactattaatactatactatactatactatacctttatgattagagtgtactccttatttagaaaagagttaactgtaaaacagcccaggcaggtccttcaggaggtattccagaaaaaagacattgttatcatagaaggtggaagctccatgtgtattattgcccccaaaggccttccagtgggacaagatgtggaggcagaagacagtgttattgatgatcctgac

SEQ ID NO: 607619 - DNA, 553 bp, Homo sapiens
attctacttttgaagagtttttacttgtcattaaaacaaatgcaaatacagtcatacagcccataatgtttgggtcaatgacaaatcacatatgtgatagtggttccttaagattataatgaagctgaaaaattcctgttgcctggtggcattgtagctgtcaaaatgtcatagtacaaaacattgccatgtacttatggtgatgtcagtgtgaacaaacctactgtgctgctattcatatagaaggacagcacatacaattatgtacagtgtacaatacttgataatgataataaacgattacattacaggttratgtatttattactattaatactatactatactatactatacctttatgattagagtgtactccttatttagaaaagagttaactgtaaaacagcccaggcaggtccttcaggaggtattccagaaaaaagacattgttatcatagaaggtggaagctccatgtgtattattgcccccaaaggccttccagtgggacaagatgtggaggcagaagacagtgttattgatgatcctgac

SEQ ID NO: 607620 - DNA, 606 bp, Homo sapiens
gttattaatattattgttatgtcagtattatcactattattatttttaaaaatctcccttgatctcacattctctttcattagctgcctcttttgtctgctccttttcacagtaaacttctcaaatgattttccttcacttgttatctttacttcctctcctyccattttatcttttcatgttaatataatgtgagacctactaaaaatacaagaataatacaaagaagtaccttgtcttttctatcctttacccagattcaccaattattaacataacattgttgccagatttgttttatcattcttcatatagtgtacacacaaacacacacattttttttcaaaccaccattgttcattaagttgccaacattctgtccttttatcccaaactacttcaatatgcatttcctaagaacagagacattctcatatatgaccacaatacaattatcagaacaagaacatttaacattataaaataccattttctaatgcacagtccatattaaaatttcatcaattggctcacaaacatcttttataggtgattcttctctccatcccaagatccaatcctggatcttatattgtatttagttgt

SEQ ID NO: 607621 - DNA, 606 bp, Homo sapiens
gttattaatattattgttatgtcagtattatcactattattatttttaaaaatctcccttgatctcacattctctttcattagctgcctcttttgtctgctccttttcacagtaaacttctcaaatgattttccttcacttgttatctttacttcctctcctcccattttatcttttcatgttaatataatgtgagacctactaaaaatacaagaataatacaaagaagtaccttgtcttttctatcctttacccagattcaccaattattaacataacattgttgccagatttgttttatcattcttcatatagtgtacacacaaacacacacawtttttttcaaaccaccattgttcattaagttgccaacattctgtccttttatcccaaactacttcaatatgcatttcctaagaacagagacattctcatatatgaccacaatacaattatcagaacaagaacatttaacattataaaataccattttctaatgcacagtccatattaaaatttcatcaattggctcacaaacatcttttataggtgattcttctctccatcccaagatccaatcctggatcttatattgtatttagttgt

SEQ ID NO: 607622 - DNA, 514 bp, Homo sapiens
aaattatccaaaggtataaaaatcactggtaatagtgagtatacaggaaaacacagaatattttaacattttaatttgatgtgtaaactactcttaccctaagtagaaagactaaatgatgaacaaatcaaaaataataactataacaacctttcaagacatagtaaaataagatataaaaagaaaaamcaaaaaattaaaaagtggagtaatgacgttaaggcatagcactttaatgagttttgtttttgattgtttgtttatgcagtgtcaagttgttatgaggctaaaataatgagttataagatagtatttgccagccaatatgtcaaagtcttacagaattcctacccaaggaatcttgtgtaaaggtgtttaacctagtgcttcctaaggttagagaaacatgaaacagcttgttccccacaatacagtagttgccagaacaccagtttagaacaacgttgatgtcagcacagtctcttttctgttccaccaacctaacacaggccaa

SEQ ID NO: 607623 - DNA, 541 bp, Homo sapiens
agtagttgccagaacaccagtttagaacaacgttgatgtcagcacagtctcttttctgttccaccaacctaacacaggccaattatgcaattttgggtttgtgtgtgtaccctaaaatcaattaggtatagcacattcaacatcaggagctgcttgttaatcactaaaacagtttaagacaaattgaaaatatcttagtcttctatcattctgttttagaaaaccctgaaagtaattaatttgcttttagagaggttgtgattcttccacagcaaataaattctccgacaacctcattrgtgccttatttcaagaaactgccatggtcatccccgccttcagcaaccacgatcctgatcagtcagcatccatcaatattaaggcaaaaccctctaccagcaaaaaggttacaactcattgaagactcagataatcctcagcactttttagcaatagtttttttttaattagggtatgcacattgctttttaagacataatgctattgccaacttcatagcctacagtatagtgcaaacata

SEQ ID NO: 607624 - DNA, 600 bp, Homo sapiens
tagaactcctgggcaaatttcttctatcatgtttttttaatcacacttaaatgatctagtgtttttataaaagcatatgcatttgtctttcttacccatgtcatgtttgatacatacagtattctttgcacttaccaggaagaacatttagccagagggaccctctcatctcactgtatggcattcctgtgtccttcatttaaaaacccaaagtagaattgcatcactcactccaaactttttgaagtcaattytgtttcatattgccattacagggaatttttaagcattgccttaaactgtcaagtttacaggcaccttcttcaacagaatagactatttcaaagtgggattataaatgtttaatgacagagattgccctaagagataccctattattaatatgatttgaaatggacctgaaacacatttatttgggcctttacaattctatttcccccaaatcttcagaatggccaattaaaactacctctaagtgaaacattgataaaaatatgatgcagtaagaaaaaaattaaatctatggggttttaaaaaatacattttcaggcacagaactgtatcggctaatttggtcaa

SEQ ID NO: 607625 - DNA, 486 bp, Homo sapiens
tttgccagggtttaggggtgagggaggaatcaataggttggagcacaaaattttttttaatggatcwtggaattaagctaaaagaagctgaaaagagagatttagaggaagaaaaggataagaaagagaagataaagaggaagagacaagtacacccagcagctattactcacaaaagctttcttggagaaatattttcactatttcaccttttatgaaactgtggcaaaatctcagactcacgttgtatttccacatctgcatacatgagtggagataatatccctcaaagtttgccttgtagaccaagtcagagaatattagtcctggcataaaaggaatgtgaaatccagaatacaggccaccggaggacctgaaaaaagtctacatttggaagtacctgcctgagtttgcatactggcgccatctcctttagttgttgactgtgacaaaaattacttagcctttctgattctccataccctc

SEQ ID NO: 607626 - DNA, 632 bp, Homo sapiens
ctgttctatcagggtttctatacagaagaattattttttatcaagatggcatacccatgtggtgaatacttygtatacattttgtatcaacttcccttgcatgggcttcccacagaggcatcaaaaatctctggtgctttttaaattgcattatatgtttctgaaaccaaataattaaacatttttatagcttttgtccttacaaattctttccaaacaggtgaaggacaggaaatgattcaaccaactaagggacttgttcatagaaactgacacagacagaagtatcagccaattctttttcttggaactaagttctcaacattgcgttttggagatattccaaggggtcttatgtctggaatctggccttcatgtccaaggatgatcccattttaaattcaaaagtgaaatcaaagtaatatagtttgcctttacatgtttgcaaactttcacagaccttacctgatttattgaggaaagggaacttggaagcccatgaaaagtttacccaaggctttctttgcaatgtaaaggcactttcatggttgttttagatttactcttgaaactctataatagtatttaaaactttcccaggtaaagcattccaagctggaagagaatttatt

SEQ ID NO: 607627 - DNA, 610 bp, Homo sapiens
ctttcctctttcctgagcatcatttctctcatagcaagtttccttctactttttacaaatctgtagtaacttattttgacagacaagtcaaagccaaaaaaggaatggacccagtcagttttctgtgtcaaattagctacatggcaattcagtgaatcctcatcttttgctcttactttaagcatggattctagttttgaaaattaacaagtatggcactgatactgaatcatcggaatagtccctagaatagtttctgtaagccaaaatggctgtacctgtgcttggctccaagtacaaccaaaacaaacaaaaaatagtattttctacgtttaatattttttaaacctttggtgccactcttttgtatttgtccttatatatgagcatttcctccaatttagaaaaatattttttaaaatagaagctcattgtaagtttttctgcatagatacataacttccttctttycttctttactaggatcaatagaaaaagtgttgtattttatggctgtcttgaagagaatttctggacacctgttctggcatgcttccacccatctttaaggaatgtgattctcagtttgaactggttaaaactttgaagc

SEQ ID NO: 607628 - DNA, 635 bp, Homo sapiens
cacacacacacacaaatcaccaaatgctcacggcaaatcttcctagactcttccaaaaggtcagaaatctcactctttgtatttaccactgaatgtacaacatatagcaaagtccctgttacaaagtacatactatgtaacatttattccatatttttagataaactaaatcattccacttctcctacagctactatttggtaatgattgatgatcmtgttgattaaattgttatgaccccataatcctgagatctatctaggaagtaatgttgaagcacctaatgcagtcagtaatacagtcactccattcattcaataaatactaactgagaacctataatatgtgaagccctctgctaagtatcaaagataaagcattaaacaagagatgcacagtgctttcccttatggagttgacattatagtgaatggaacacgcagaaacaagaaagcattgttagagtgtttaactaaaattgttgtaaagttgtgagggatatgaaaaagagggctaaattggggaataagagggaaaaatacttgaaattgggtggtttaagaagtcatgctaagatttggggtagaggattttggctgatgattgcatacatgcagtgagggttgttagtacaa

SEQ ID NO: 607629 - DNA, 440 bp, Homo sapiens
aaaccattgatactttgggaaaaaaagaaagcctaattcaagaatcagagaagagagtaaatgttcaccacttgtctaaagtaaactggagtaatcctttatgaaaaattatatctgccacttttgttagtcaaagcatcacattcttatgatatgcttcttcaaccagaatgtctttaccagggatcaactttataaataacatagcagtgtatgttgacctcacaaatacaagggtttatatttggatatattaaataataggcaaatggtttgtaaaatatccagtgtgcatttgggagtttagggaagaggacttggaagtgttggctttatttgacttacagttggtgttgtttaccctgaattggaaatggacaaacataatctatayaatagtgttttggctatgcttggcttccagagcacagaaatgaatt

SEQ ID NO: 607630 - DNA, 523 bp, Homo sapiens
gcaaattatttatttaatcaattaaataattaataggcaaattaactgtttacttataataggcaaatttattatttataataggcaaaaaactagaacagctcaggtgtccttcaaatggtgaatgattaaacaattgttatatatctatatcacgaaatactactcagcaataaaaaagaacaaatttgatacaatcaacaattggatgatctttatggaattgtgttgagtgtaaaatccagtgctgaaaggttaccctactatatgatttaatttacatagtattttcaaattgatgaaattatagaaatggtgaacagatttttggttgtcagaggttaaggacatagaatatgtagggatattggcatggctataaaaggccaacgtgaaggatcsttatggtaaagaaagtgttccatatcttgactttggttatagatgcataaacctaaagatatgataagttgtgttggatcaagtatacatacatacaccaataagtagaaataaaactgga

SEQ ID NO: 607631 - DNA, 443 bp, Homo sapiens
ccaggtgtgttggcacacgcctgtagtcccagctactcggggaggctgaggcaggagaatcacttaaacctgggaggtggaggttgcagtgagctgatattgcgccactgcactccagcctgggccacagaatgagactccatcccaaaaaaaataaataaaaaggaaaaaagaagaggcatctgaragaggctttgaagaatgtccaggattccaacagacagtgacaggcaagaggtgtccccaggagcactgaggaaggaccagcatgagaagtgtggagccggagcagcaggggttcactagtggcaggttatgagcaggatgcgatggaagatcaggcgtgaaagctaagtggaggccgtactatagaagactttctggcagggtaaagagatttgggagagcccctgacgtctttgagcataagagtagcccgagtc

SEQ ID NO: 607632 - DNA, 417 bp, Homo sapiens
cttaagcttggcaagctgaggctgcagtgagctttgattgtgccaatgagccccaacctgggcaacagagtgagaccttgtctcaaaaaaaaaaaaaagatagggttgtggaggggtacaaagagtcttcaattatatctgtaatgttttatttccttaaaacatgaaggtggatgggaacactaaagcaaaaaaaatactgaagcaaatatggcaacatcaatatttactaaatctgggtagtagacacatgctacctgggtgcttgttatataccacaccgaatttttctgtgtgtttaaagtatctctctctctctttttttttttttwaagggggctgaagcagcacaacatccaaagcaaaacaaacaaatgcttagcttattgttgaacttctgaagagcctgcatttagg

SEQ ID NO: 607633 - DNA, 427 bp, Homo sapiens
ctcttactgctcattaggcatcagcaacacaatctccaagttctktccatcaaattttttttctttcctctccatgaccaccatgtctcctgttccccctttatatacaaagctgcaggaatttttacagttaaaggaaataatcctgtcagtcaacatcagcaaatgccacagtaaaactgggaatatagcttaaaggattgccttttttgtgatttttctaggaacaagggttctcctctcccccacccagtgaaggtctttttctctatcctttgtctggaaagtacacagtatttcaagacctacagtgccacctagcagaataggaatcctctccaagatgtaccttgtcagacctttgctggaacactgtattttcccaatcctattccccttttgcacccctcaactataaaccaagctt

SEQ ID NO: 607634 - DNA, 330 bp, Homo sapiens
cctttatatacaaagctgcaggaatttttacagttaaaggaaataatcctgtcagtcaacatcagcaaatgccacagtaaaactrggaatatagcttaaaggattgccttttttgtgatttttctaggaacaagggttctcctctcccccacccagtgaaggtctttttctctatcctttgtctggaaagtacacagtatttcaagacctacagtgccacctagcagaataggaatcctctccaagatgtaccttgtcagacctttgctggaacactgtattttcccaatcctattccccttttgcacccctcaactataaaccaagctt

SEQ ID NO: 607635 - DNA, 604 bp, Homo sapiens
attcacctagtgatgcttctcatagtaatggatttgttgtctccagatgtatttgagtcactgcatttttggaatgacttcagatgtaaagtgtaattctacctgagcagagtgacaaggggcctctccatctgcacctcctgcctcctgagtactctccaggccatcaccatcaatcctagcacctcctggytggcaagagttaaacataaatccacaaattacattatccatgttttcttctctttttggttcctcaatttattttccagaagtaacatgatcatgtacaccgtagcttatttcaagtgacacagaccaggcaactgacaaataccgacaagtaaatattgttcattttcctaggtaatctctataatcaaggggactgatttttattctggaattttccccaaatgttttctttgtagaaattatgttgctctcaattgtgtgcatggtagtactcttgtttaaccatcagaggtgatcccatcaccttcacagccccagcctctgctccagtccctccccagcgaaaagggccgcccatgccatcctgctgctggtgatttgctttgtggtcatggactcagtggacatc

SEQ ID NO: 607636 - DNA, 547 bp, Homo sapiens
gtaggtttttaactcagttatcctggatatccaaaggtttgtggtccatctttargcttccgtttgttctttggtacagatcagtgtgtcctttggtacaaatcaattgataaaggaataatcaatgttctgcaaaaaataaattcaaagaggcatcatttttaataagatcataacagaaaaataatcctctgaaaaaacagatttttccttcaacagttaaattactgaaggtagcacaggattttcatctgacttaagtacaatgtgtaaaattgtaatttcatatctaaatatttttgaatttcatgctaccaagaattatttggtttctttagttcaaagtccaccagattttgatcttcccaaatcaagtctcttactctttaatttttaactgtattcacaaaaagcatttctttcttcttgaagtgtactcttaagaagctcctatttgtaaccaaaaaacatagtgttttttcttttgaaagtattttagtctttttttgactaaggcattttagctaagtatctaattgttgcttta

SEQ ID NO: 607637 - DNA, 583 bp, Homo sapiens
tagtctgtgtcaacagaatacttattttagaagaaaaattcatgatttcttcctgaagcctacagacataaaataacagtgtgaagaattacttgttcacggttagttatattatctktcttcctttgtttttcagatttctgatgcaattcttgtttttaagtaggtgaaatactgagttaattgactcacgtgtgttaaataatggtcaacattacctgcgttaacaaagaaagaaaacagaaattttacaattttctaaaagtccctggagctctcattttcatgaaatacccatttgttaacttcattcaataaacttaaaataacacattttgaattgctttaaaaactgcatttaagttacattttagaaagggaatattatttcctagtaactaaatatatactttgagatgttttggcttattttctgattggtttgagtttggctgtgcttcataacacttctaatgttttcctgtaccatctcaagttttgcacccctaatcagaagtgaatgtttgacatccaaacacttaatcacatgtagatgttcattatttaaagtaatctaaaataa

SEQ ID NO: 607638 - DNA, 606 bp, Homo sapiens
tcactctggttctattttctggagcagactgtagagaattgttataatttcttccttaaatgattggtagaatttattagtaatcttgtctggacttggtactttctatttggtaaggttattgattattgactcaagatttctttttctgagayagagtctggctctgtcgccaaggctggagtgcagtggcgtgatctctactcactgcaagctctgcctcctgggtttgtgccattcccctgcctcagcctcctgagtagctggaaccacaggcgcccaccaccatgcctggctaatttttttgtatttttagtagagacggagtttcacagtgttagccaggatggtctcgatctcctgacctcgtgatctgcccgccttggcctcccaaagtgctgggattacaggtgtgagccactgcacccggccaaaatttctttaataagtataattgctattcaaattatctctttttgcttgagttctgataggttatttcttctaaggagttttgctattttatttagattgtcaaatctgtgggcataaagttgttcataatattcttttatcatgctttaagtcttagtgagatcagtagtg

SEQ ID NO: 607639 - DNA, 602 bp, Homo sapiens
ctgcaacactttttatatacctggcaaggatccataatatctaagtaggctctgtgaacatctatcctgtatgactcatttggataaagtttcaaagcttgcgaaactagtttatgatgttggaggtcaggagagtagttatgcctgggttgagggacaatgagtgagaagtggaaagggcatgaggaggcaccttctgactttttaaaaatataaatgctgcccatatgtattcatattttgaaaatggaacaccatttgagatgcacacatttgatctgtgcagtttttatatgtatattctacttctaaaacgtttacactaaaaataacccataagattgtaaaaaaaggttttctcagtccaacttttattaatactaaactcaaacaagaggaggaaagaaagaygacaaagctaagtactacatgtcttccatatgcaggctctgagacagaagcttgcttcacatttgccctgtgagccctttaggttataattacatctaagttttgatttgtttattgataattcccagtttgttctttttattttgttttctttaacagaccaataataatcatatcaatatgtttttgac

SEQ ID NO: 607640 - DNA, 591 bp, Homo sapiens
ttcagaccaatgttggagggaatctgctacagttcttgcctctgcatttaagtgtataagtgtttcacagggatggccaaagtgtcccactctgggaaaagaagaaaaaacaggccaaagaagattttcttttgtctgatacatttttaaaattccaacataatatatttaacagatttgttgtactgaattgtttttgtgtatgtgtgtggtttgcttgattttgagactccatagtcttttaagaagatggaggtgtgtgaccttcaaaacctttttctcatttytattagtaggtgttgtcagcttgagtaccttccgtgcagagcctgtcttgcataccacttactaatctctttggttatgagacatttaatttggctttaggggtggaattttcttgatgcctatgaaaaagaagttaaaagacaatgccaacaacaaatggaaactttcacctctctctgtctttctctctctctctctctctctctcacacacacacacacacacacacacacaaattagtcatctttttttcctccacctgtttcacacagatattctagggcactgtgtatacagagtgta

SEQ ID NO: 607641 - DNA, 571 bp, Homo sapiens
agggctgaaagcataaaaagttatcacatagtgttaagtggctggtaatattagatagacccgagtttgagactgttttcttaaaacatactggacatatcaataaaatacggttttagtataagtccagggaagtttattactgacaagcatggctgcacgcgtgcattggttcctagtctgaatgctggagctctatagagccagggcagcttatgatgacctgccagtgtgccctggmaattctatattagaggagctgttctttctgctccttgtagtgtgacatgccacagtacatgtaatctcctgagcctgggtatgtctgacaaattgaggatatagggcttaatttatttagagttttgccaggtaacacataaatgtgtctggtatactcccctgaaaatatactacggttatgtcgagaattacaatagcgagggactgtgtacttcctgcagatcatggagatcatggaagcctcccaggggaggcaccatctcggtagtgacctgagtgaggaacggagctggtgctgcccatgccaggggaggccaagctgagccaa

SEQ ID NO: 607642 - DNA, 571 bp, Homo sapiens
agggctgaaagcataaaaagttatcacatagtgttaagtggctggtaatattagatagacccgagtttgagactgttttcttaaaacatactggacatatcaataaaatacggttttagtataagtccagggaagtttattactgacaagcatggctgcacgcgtgcattggttcctagtctgaatgctggagctctatagagccagggcagcttatgatgacctgccagtgtgccctggcaattctatattagaggagctgttctttctgctccttgtrgtgtgacatgccacagtacatgtaatctcctgagcctgggtatgtctgacaaattgaggatatagggcttaatttatttagagttttgccaggtaacacataaatgtgtctggtatactcccctgaaaatatactacggttatgtcgagaattacaatagcgagggactgtgtacttcctgcagatcatggagatcatggaagcctcccaggggaggcaccatctcggtagtgacctgagtgaggaacggagctggtgctgcccatgccaggggaggccaagctgagccaa

SEQ ID NO: 607643 - DNA, 611 bp, Homo sapiens
cttgtggggaaaccacacctccattctagccatatcagttgctaatgtaggtgataccaagaaacagcagagcrcccatgagtgttttcataatgtttggatcatgatgggataaaatactatgcgtttggtacaagagaagccagggggtggtataattagtgcttaaagggggactgtggggtggcttcattgctgtagtgaggaaggaggagcagaaggtaaacaggtggaagaggcaaagcaactggttaggtttgtgtaagtacactccaggatgttcccataataataaaatcccctaaggatgcgtttctcaaaatgcatctccattgttaagtgtatgactctgtattttgtaagctgctgatcccctctggtatgatttgaagactaatcttacttttactttattggtatcaaacttaataagacttgtcctactaaggaatagtgaggaaccatgaaatccagtataatgtgatggactttttagattcccaatcttctatttatgaatgagctttgtgttgcttattaactgagcagcaagatacagcagcttttgctttatgaatgatgcatgactggttgctcacatagcacaactg

SEQ ID NO: 607644 - DNA, 611 bp, Homo sapiens
cttgtggggaaaccacacctccattctagccatatcagttgctaatgtaggtgataccaagaaacagcagagcgcccatgagtgtyttcataatgtttggatcatgatgggataaaatactatgcgtttggtacaagagaagccagggggtggtataattagtgcttaaagggggactgtggggtggcttcattgctgtagtgaggaaggaggagcagaaggtaaacaggtggaagaggcaaagcaactggttaggtttgtgtaagtacactccaggatgttcccataataataaaatcccctaaggatgcgtttctcaaaatgcatctccattgttaagtgtatgactctgtattttgtaagctgctgatcccctctggtatgatttgaagactaatcttacttttactttattggtatcaaacttaataagacttgtcctactaaggaatagtgaggaaccatgaaatccagtataatgtgatggactttttagattcccaatcttctatttatgaatgagctttgtgttgcttattaactgagcagcaagatacagcagcttttgctttatgaatgatgcatgactggttgctcacatagcacaactg

SEQ ID NO: 607645 - DNA, 611 bp, Homo sapiens
cttgtggggaaaccacacctccattctagccatatcagttgctaatgtaggtgataccaagaaacagcagagcgcccatgagtgttttcataatgtttggatcatgatgggataaaatactatgcgtttggtacaagagaagccagggggtggtataattagtgcttaaagggggactgtggggtggcttcattgctgtagtgaggaaggaggagcrgaaggtaaacaggtggaagaggcaaagcaactggttaggtttgtgtaagtacactccaggatgttcccataataataaaatcccctaaggatgcgtttctcaaaatgcatctccattgttaagtgtatgactctgtattttgtaagctgctgatcccctctggtatgatttgaagactaatcttacttttactttattggtatcaaacttaataagacttgtcctactaaggaatagtgaggaaccatgaaatccagtataatgtgatggactttttagattcccaatcttctatttatgaatgagctttgtgttgcttattaactgagcagcaagatacagcagcttttgctttatgaatgatgcatgactggttgctcacatagcacaactg

SEQ ID NO: 607646 - DNA, 611 bp, Homo sapiens
cttgtggggaaaccacacctccattctagccatatcagttgctaatgtaggtgataccaagaaacagcagagcgcccatgagtgttttcataatgtttggatcatgatgggataaaatactatgcgtttggtacaagagaagccagggggtggtataattagtgcttaaagggggactgtggggtggcttcattgctgtagtgaggaaggaggagcagaaggkaaacaggtggaagaggcaaagcaactggttaggtttgtgtaagtacactccaggatgttcccataataataaaatcccctaaggatgcgtttctcaaaatgcatctccattgttaagtgtatgactctgtattttgtaagctgctgatcccctctggtatgatttgaagactaatcttacttttactttattggtatcaaacttaataagacttgtcctactaaggaatagtgaggaaccatgaaatccagtataatgtgatggactttttagattcccaatcttctatttatgaatgagctttgtgttgcttattaactgagcagcaagatacagcagcttttgctttatgaatgatgcatgactggttgctcacatagcacaactg

SEQ ID NO: 607647 - DNA, 586 bp, Homo sapiens
gcaggcacccagttcagcagtttgatgtgcagctatgtgaacaacacttctcatgagcaatcatcaccccccctttctcttgtctatttgggcactaagttgctggtgaacatccttcatgatcaaagagcaacatctgagtgtgtcctgagtgaagttctgtaaagataagaagcaggacttgccaccgcattgtaagagaaagtttaccagcatcaattaattaaaatagaaggcagccaatcggcattgggcacaagggaatgatgcttgtattggagcatgatgaagagatgtcagctttgtctcagcaccaacatcactattaacacttgctatctgtcaccaatcagcaatctgttcctgatgtaatcgagagttccaaagcacagctcaattcttccacctctctgagaagagtggtgtgtaggccttctgacagtgggagaaagttgcactctttgggactcagtttcttctcaraactcattcagaaatcatcacgtgtcactgttagctaggtccaggatgtttgaataagaattgtggttatattatagtaaattgtgtaaaaaatcagttagtt

SEQ ID NO: 607648 - DNA, 571 bp, Homo sapiens
ccatgtcccaaaaaatcgatgtcatggcattactatcttaaggtggaaagatgtaggtttagtaatattgttggggaaaccagccccacaccacccggcgggtaccccaagtccagcggagacaaaggaattatagagacagaataagcatttaaaaggtggatccaggggaccagagcatcggaggcttgctcatggcccagagctctctggcttcacccaatttattggtttacaagatctttgttcttagggcagatgggaggggtaggaagggatgaggaaaaggattaatcagtggagaactcttgagtcattcaataagatatatagcagtggcagtttctgtgaatttccttgagcaaagttgtgtgtgtaaactacttaagatctttaacttattgggactgaaacaggaggragcaggtttcaggaggagccaagatgtttgattatactccactgcttcaagggagtgttatctccctgggcaacctgtggaatgccgctgagtgtttatgctttcggggcataaagacatgaaggcaataaggagacttttctcctcaga

SEQ ID NO: 607649 - DNA, 622 bp, Homo sapiens
gagaaaatgaccatcaggagaattattttgattactttaaatctcttcaaagtttaattattggaatagaattgtatatctgaacacatataaaactatactatatagaaggtattctattttgtgtgtgtgtgtttttttcttgttcagctttaacatacaacatatgggggaaactttttttttcrtaggatttaccaaatactatttcattttgtacattttattagaagtggcattcataacagaagctgtaggattgaaggaaacataatagttttgggagattgtctgcctctaaattttttaaaattctggctgtgtattaaacatatgctgaaaacaaatacaaaaactactttttttgttacatattatatattctagaatttacccttttcattgtgaaattccaaaagcagttagaacaaaataaatattatgaaaaaagtgtatcaaccgtattgagaatgtttgcattaaaaagtatttgtgtattttgcattgttctaagatgatgtaatcacattagtgtagattataaactttgtaatcctggaatggactgccatactttgtaatatagtgattttagaagttttcttttcgtttttttgagacg

SEQ ID NO: 607650 - DNA, 622 bp, Homo sapiens
gagaaaatgaccatcaggagaattattttgattactttaaatctcttcaaagtttaattattggaatagaattgtatatctgaacacatataaaactatactatatagaaggtattctattttgtgtgtgtgtgtttttttcttgttcagctttaacatacaacatatgggggaaactttttttttcgtaggatttaccaaatactatttcattttgtacattttattagaagtggcattcataacagaagctgtaggattgaaggaaacataatagttttgggagattgtctgcctctaaattttttaaaattctggctgtgtattaaacatatgctgaaaacaaatacaaaaactactttttttgttacrtattatatattctagaatttacccttttcattgtgaaattccaaaagcagttagaacaaaataaatattatgaaaaaagtgtatcaaccgtattgagaatgtttgcattaaaaagtatttgtgtattttgcattgttctaagatgatgtaatcacattagtgtagattataaactttgtaatcctggaatggactgccatactttgtaatatagtgattttagaagttttcttttcgtttttttgagacg

SEQ ID NO: 607651 - DNA, 290 bp, Homo sapiens
gaattcatcaacagagaggccaagcatcactgacactcagtatcgcttctgcattgctcatttctcttacagcacaggtgagaagaaaataaaatgcagcttctagttgcacctacataaggagtaggaaagtggaagacagaagccagaggtttaaccctcagctcactcgttatcttagtgactcttgggcgcatgagttgaaacttgaggtttaagcamtggcctctagggaaaatggcagaaaagaatgagaggactctggccagaagggccaaaaagggcaatgt

SEQ ID NO: 607652 - DNA, 607 bp, Homo sapiens
tgtgagggctccgttatgtctttataaaaattcaaagttatacaatagtttgtaatcacatgtttttttttttwaaatcttcaagagctttccctgcatcatctggaagtgtgttcagtagtgttggaagcaagctgtgtggcaaatgtaaatcctcctgcttttaggttttaaatgcacaagccaggttctgttgtagcagaagctcccagtgggagggccacccaaaaaccctgtagcatgaaatacttcattttatcttgaaggaaatctgcttgttgcatgctctccaaaggatctggctcctgcctgtaggtttagttttagactgatgtattccataattttctttgtttctatctttaaatgctggagaacaggctaggaaagagggaggaataattgtattgactcctcaaactacagaagacttaaaaaaaaactaggttgtgtttaaattgcatcttcatcttgatccaaggtgaccatttatctttgtcaccagcaacactcaggtctaccctctgccaggacagtggcttccagatgactagtgtgcccattggactattggactctacacacaatggtctcagatctctgtatt

SEQ ID NO: 607653 - DNA, 596 bp, Homo sapiens
aactctgctcctcacatacttagggagactgatttgagtaataataaaaatccagtcttctgcacagccagctctgcatgaattactctttctctaatgcaattcccctgtcttgatgaatcagctctgtctagccagcaggcaaggtgaaccgcttgggtggttgcaataacatggcataaaggtttgtagcctaggagcaataggttacaccwtatggcctggctgtgtagtaggctatgccctctaggttagtgtaaatacactctatgatgtccacctaataaggaaattgtctaatgacatggctctcagaatgtgtttcaatcattaaggtacacatgacggtacttaaaaatgtctctggcagtttctgatgcaaatacagggaggttcaacttttctctctgaagcttcaagtctaagtctggtgaaatgaattgacaatagacagattagcagaaaaaaaggcaatttgattactgtgttgataacccagcaactcaaccaggtagaggtgtgaatatgccttctctatagggtagggaggagatagggaatgcaggcaattctttggaggggtagtaaataattat

SEQ ID NO: 607654 - DNA, 596 bp, Homo sapiens
aactctgctcctcacatacttagggagactgatttgagtaataataaaaatccagtcttctgcacagccagctctgcatgaattactctttctctaatgcaattcccctgtcttgatgaatcagctctgtctagccagcaggcaaggtgaaccgcttgggtggttgcaataacatggcataaaggtttgtagcctaggagcaataggttacaccttatggcctggctgtgtagtaggctatgccctctaggttagtgtaaatacactctatgatgtycacctaataaggaaattgtctaatgacatggctctcagaatgtgtttcaatcattaaggtacacatgacggtacttaaaaatgtctctggcagtttctgatgcaaatacagggaggttcaacttttctctctgaagcttcaagtctaagtctggtgaaatgaattgacaatagacagattagcagaaaaaaaggcaatttgattactgtgttgataacccagcaactcaaccaggtagaggtgtgaatatgccttctctatagggtagggaggagatagggaatgcaggcaattctttggaggggtagtaaataattat

SEQ ID NO: 607655 - DNA, 596 bp, Homo sapiens
aactctgctcctcacatacttagggagactgatttgagtaataataaaaatccagtcttctgcacagccagctctgcatgaattactctttctctaatgcaattcccctgtcttgatgaatcagctctgtctagccagcaggcaaggtgaaccgcttgggtggttgcaataacatggcataaaggtttgtagcctaggagcaataggttacaccttatggcctggctgtgtagtaggctatgccctctaggttagtgtaaatacactctatgatgtccacctaataaggaaattgtctaatgacatggctctcagaatgtgtttcaatcattaaggtacacatgacrgtacttaaaaatgtctctggcagtttctgatgcaaatacagggaggttcaacttttctctctgaagcttcaagtctaagtctggtgaaatgaattgacaatagacagattagcagaaaaaaaggcaatttgattactgtgttgataacccagcaactcaaccaggtagaggtgtgaatatgccttctctatagggtagggaggagatagggaatgcaggcaattctttggaggggtagtaaataattat

SEQ ID NO: 607656 - DNA, 372 bp, Homo sapiens
aggagacagaaatcatcttgtaaataattctttttggaatttgaatgagctcaggaggcagacattatcttgtgaaaaagtccatcaaggtgtggttatattccttccttctcactcttcttttcttcaatacatgatgggatttcagggaggggatggaaggtgattgtgttctattttcttaaggtagaaaagcgcatatctgagtagaccaatttcagcatctgctgaccttcaggggcctttaatttaaaataatcagcataccaggatgccatatgttggggtgaaattccctgggttccttcacaaatataccagaaagatatctttcttccacccccccsccataaatacactcaacgtgtgtca

SEQ ID NO: 607657 - DNA, 551 bp, Homo sapiens
gaaatttagtttttaaagttttctggagtctacttggctaagactggtctgttcagtcagtcagggggcttaggattttattttaatttcataaaacaatttacaaatataaaagccactcttacctcagagcaatacaaaagcaggcaccaggctggatttgccccggtgctatttcaaggggacactttgaggaaaaaactcaatatgttccctatcgcaaagagtaactaggagtgtgctgaccattatcccaggaagtaggggttgtgaaaatgaagatcaggccaaacttagagagggcttyctggaggagctatgctgctgcgtgggctgagtggggctgggaggaagcttcaatggggaggatgcaggcaaaataagcaggaagaggaaggctctgcatggttcaaatttgtgggctgaggggtgagtgtggcctgagaggaggcagaggcctgaagtctcagagccctgtgggatgtgccagtgatttggggttagaaggcaatagggagcagctgaaagagttaagcagggatgagcattct

SEQ ID NO: 607658 - DNA, 550 bp, Homo sapiens
ggagtctacttggctaagactggtctgttcagtcagtcagggggcttaggattttattttaatttcataaaacaatttacaaatataaaagccactcttacctcagagcaatacaaaagcaggcaccaggctggatttgccccggtgctatttcaaggggacactttgaggaaaaaactcaatatgttccctatcgcaaagagtaactaggagtgtgctgaccattatcccaggaagtaggggttgtgaaaatgaagatcaggccaaacttagagagggctttctggaggagctatgctgctgcgtgrgctgagtggggctgggaggaagcttcaatggggaggatgcaggcaaaataagcaggaagaggaaggctctgcatggttcaaatttgtgggctgaggggtgagtgtggcctgagaggaggcagaggcctgaagtctcagagccctgtgggatgtgccagtgatttggggttagaaggcaatagggagcagctgaaagagttaagcagggatgagcattctccaaccttggctgcagaggggca

SEQ ID NO: 607659 - DNA, 484 bp, Homo sapiens
aagcttgtccagagacaggctgtgcagggacgcaagagggagaggacagggctgagacttctccactgatcttgaagwttgtctgggagataccaagcctcctctttacagaggaattgcttggggaggggaagggggactttgagattatcctgggctgttccacctttcccacagcccctggaccttccaaagatgaaccaagtctccatctagtgtgtcaggtgccatcagcctggttatgctaactcttaggcagggagtgcccttctcccagcagagcttccattggccgccgcctgatggaaaagaggcccgagttctcatgggcagagcttctgcaagcatctcaccagggtcagttcctttgctgtttttatggcctctgcaggagtgtccatgaccatgacctcagtctcctgttggcttcactttctagtcaggtcttgggggtgcctggccacagcaggtgtcatctaatcgc

SEQ ID NO: 607660 - DNA, 484 bp, Homo sapiens
aagcttgtccagagacaggctgtgcagggacgcaagagggagaggacagggctgagacttctccactgatcttgaagtttgtctgggagataccaagcctcctctttacagaggaattgcttggggaggggaagggggactttgagattatcctgggctgttccacctttcccacagcccctggaccttccaaagatgaaccaagtctccatctagtgtgtcaggtgccatcagcctggttatgctaactcttaggcagggagtgcccttctcccagcagagcttccattggccgccgcctgatggaaaagaggcccgagttctcatgggcagagcttctgcaarcatctcaccagggtcagttcctttgctgtttttatggcctctgcaggagtgtccatgaccatgacctcagtctcctgttggcttcactttctagtcaggtcttgggggtgcctggccacagcaggtgtcatctaatcgc

SEQ ID NO: 607661 - DNA, 572 bp, Homo sapiens
tcccaaatgctggagcgactcattaaccaagcccagctaragagacaagagctactggatgataatgactctcattcattattgagtgatagtaatgattcaagtgaaacgaatgacaattttttccctcaaacagaaactttgtgccaaacttctcgttgatgatgcttgaaagatagtaagaggtcattaaggagcttctcccaattttgtgttcctattgtataacacttttaaagaaacagttaggtttgtagtcaataaaaccccataaacttctaggtcttacttaagtcagttatctatttatgaagaaatgttcaaaatgatgcaatatggttcagctgagccttccttgattatgcttttcacaaatgtgttctctccaaagttacaggattgtcagtctgatactaaactggggcctgggtggaggataagctcaatgcgacttcctactcgactttcacattcagggtggaggaagatgaccaattttcgtgactttcctggaaaaatcaagatcctaaatgcagaggcaaattctctggctgactgggacaaccagagag

SEQ ID NO: 607662 - DNA, 489 bp, Homo sapiens
ttaaagactcttttctcccgttgctggtcacaggcttcttccatggaagtgcttagcagtgggcctgggatgaaggtgctgcccaataacatgtgcagagaggacacagtgatgactcagacacaccttgattaaaagaaaatggaagtgtcaggtaagataagtacaaagtaaacccttatagaatgtattttggacatcaggaatggtgtgacatgctggggttgcagagaagtggaaattccagactctttccacaaaaagtaaacatgcaaacaaataatgaaatcccaatatggggcatacacaccagaggcatgtgtgtagagtgcaaagggagtcatggggaagcggctattgggtctgattggtggggaaaatgtctatcccaaggggaggcccagaggagrtgacccgacgtgatatgtgatattttagagatgagaccagaacacaaggacgttgcctcagtgtggctacgggaacaac

SEQ ID NO: 607663 - DNA, 571 bp, Homo sapiens
ttggtcactgttggtgtacaccagagctactgatttgtatacattaattttgtatcttgaaactttgctaaagtcatctaccagatctaggagctttagggttttctaggtatacaatcatatcatcagcaaacagcaacagtttgacttcctctttatggatttggatgccctttatttatttctcttgtctgattgctctggctaggacttccagtactacgttgaatagaagtgataccaggaaatcttaagagaattttcagtcatgttgsaaatgggttgattgcttgtatgttcagttctgctttgtgttatatgaccatcattttcaaatgcctaactgcaaataaagcttggggggtatacaactaagttatattccagttagagctgccagatttagcaaataaaaatagaggaggatgccccccaaaatttgaatttcagatacacactttttttagtatgtcccaaatagtgaataaatattcaaatttaattggagtcctaaattttaactggcaattccaacttcaatacaagctcaagttaaaaaaactacccttaa

SEQ ID NO: 607664 - DNA, 611 bp, Homo sapiens
gatccttttactgaggcttgaaggacgactaggcgattgtcctggaagtgggaggcggaggatattctggcccctgtcctggggaattctctttgagaactgctgtttgaaccagtttccaggccacacaggaaaacagcccccttccttgagagccttgtccccaagtaacattccacaactcagtcacagtcttggttctgaatcggctgattccaaaggctaaataaatctacctgcaagaaggttttcttccattcaggctgctaccttgggcttctgaggcaattcctaaacctgttttgagaatggtcacatgattgaaatagrtaaacagtcttctatagtaagtaggaactgtttctaacctgcagttaggtttctaaattagtttttgttatgctgtaacatagaactcaattggaacaatattatcaaaggaaggttaagatcccaagatggtctccattttgcaactaagaatctatatattaataaagcctttgaaactaatttccatgttttactctgtttctatggagaatgacagttatggaagttggagatgtggagaacgtggttacatccatgcatgggatgtgacgaagcaa

SEQ ID NO: 607665 - DNA, 610 bp, Homo sapiens
gcatttctctgactctagcccccttggatattcttgtctaagaaagggcataaagattattaagaaatacttgtgaagatcacaacccagggacacaggccaattaagatgctgagatgtaatcataagattgtagaatgcttcccttcctgcatacctcaccaccacaccaacagggagtcagtaaaatcacaatggattccagctgaaagagctgcaagacacaggctstctttcaggaggaagatttaggtaagcccaaagtcagcaggggagccaaaaacaaggactctaggggaatttgaagcctctggcacctacagctatagcaaatattaaacacagccaaatccccagccgaataaatatacaagctcacactaaggttctatttatttgaattcccaagacattatagttggctttttacaaaaaactacaatgcatactgaaaggcaaaaacaaacaaacaaacaaaaaaacacagtttgaggacacaaagtaagcatcaaaacaagactcagatatgacacagatgttggcattatcagataggtgatttaaaatactatgattaatagtttaaagactctaatggaaaatatagatg

SEQ ID NO: 607666 - DNA, 621 bp, Homo sapiens
attctgcccctctctgcttgacactaggatttagacccaaataagggacctattcttgcccttgcctggacccttggtgatagtccccagaacttttagggctatttagtcacctccttttatcattcaccgctatattcctctatgccgtcccttctaaatccttccttcactccctctcatacttaacttctattacctgcaattacttttatgccaacctaatacctctcaacaagtaacttcaccttatgcttctcagagaaaggcagagcctcasatgggagctcctccaccattgctggaggtggtgactgcatccttctagccccttccctccagtgaaaaaggaggaggtggccttctcctcttccagctcagccccttccctgggttctaagctgcctcctgctctcccaggtctttctctatctaggattccccgtcttgtctctattttttacttttcctttccgttggtcctttatcctctaaatttaaacttgctcactctacacaccaagcaaaattcaaacaaactttgaactcgttttcctccatcttctttgggatcagcacttaaaatacttgtccacatcctcagaccccaccccactgcct

SEQ ID NO: 607667 - DNA, 621 bp, Homo sapiens
attctgcccctctctgcttgacactaggatttagacccaaataagggacctattcttgcccttgcctggacccttggtgatagtccccagaacttttagggctatttagtcacctccttttatcattcaccgctatattcctctatgccgtcccttctaaatccttccttcactccctctcatacttaacttctattacctgcaattacttttatgccaacctaatacctctcaacaagtaacttcaccttatgcttctcagagaaaggcagagcctcagatgggagctcctccaccattgctggaggtggtgactgcatccttctagccccttccctccagtgaaaaaggaggaggtggccttctcctcttccagctcagccccttccctgggttctaagctgcctcctgctctcccaggtctttctctatctaggattccccgtcttgtctctattttttacttttcctttccgttggtcctttatcctctaaatttaaacttgctcactctacacaccaagcaaaattcaaacmaactttgaactcgttttcctccatcttctttgggatcagcacttaaaatacttgtccacatcctcagaccccaccccactgcct

SEQ ID NO: 607668 - DNA, 559 bp, Homo sapiens
tgctgtatgaatgagcctgtgtgaaatctgagctcgagagtgggtccctcctgccaggtcagaatgtgcgagcatccatcttaccagttacttgaaaatgtatggctttttcctgttataaatctcattttaattttgttcctgcagtgaatgcggagatatggttatgcgtactaacagccttacacattctaaacctgaaaatgaagaaaatattctcaccaatgataacaaaaataaacttgccrataaaagagtattattgttatggattcttaaatttttatgtctcaaattttctttcgcatactatgtatattaactagggcattgtagagaaattaaagcaacagtgaatgacagaaagaaaaagactacgagcaaagtatctcttaagaactgcatagcaaatgattatttaagttttccctcttcctccccttgcaattcctttcttagatgttgcattatttaaacagtaaaccaaactgtctttaatttcctccaattgaaatatacaacgtagtgtattctttttagcaaaaggaaaaaaaaattt

SEQ ID NO: 607669 - DNA, 624 bp, Homo sapiens
gcttgggtcatcttttgcaatgtaaaggaattttttcaaaaaagacggcagctccttccacattctcttgaattttaatagcctttctttctgtaaatactataactctgtaacactcgtgagtttcaggacctctaagaaaatcaaatgaamcttcctgtaatttcctttaattatactttacagaaatcattaaaatttgtgccatggatatatgtgtccatatctttttcacccttctttgctctctgagcccaatttccatcttccatctccactgtgatagttttcttatctttcaacagactggactcataaaatgaatttcagtagagggactgcagtcattttgggggaaaatgtgttaacccttaaatggtcttgcatggaactttgatgagaatttttctaagagaaaaaaaaaatatcgggagagaaatcacaaggacaaagactgtgccctgtctgggagtcctgctggggttctctaaacagagcagccctccacacccctctcaggcctctgatccattttcttctcctttattctcaaaagtgacccccgctgcctacatggaggataagtctccccaacctcccacctttcaaattgccaagcccacc

SEQ ID NO: 607670 - DNA, 624 bp, Homo sapiens
gcttgggtcatcttttgcaatgtaaaggaattttttcaaaaaagacggcagctccttccacattctcttgaattttaatagcctttctttctgtaaatactataactctgtaacactcgtgagtttcaggacctctaagaaaatcaaatgaaacttcctgtaatttcctttaattatactttacagaaatcattaaaatttgtgccatggatatatgtgtccatatctttttcacccttctttgctctctgagcccaatttccatcttccatctccactgtgatagttttcttatctttcaacagactggactcataaaatgaatttcagtagagggactgcagtcattttgggggaaaatgtgttaacccttaaatggtcttgcatggaactttgatgagaatttttctaagagaaaaaaaaaatmtcgggagagaaatcacaaggacaaagactgtgccctgtctgggagtcctgctggggttctctaaacagagcagccctccacacccctctcaggcctctgatccattttcttctcctttattctcaaaagtgacccccgctgcctacatggaggataagtctccccaacctcccacctttcaaattgccaagcccacc

SEQ ID NO: 607671 - DNA, 611 bp, Homo sapiens
ctccccaacctcccacctttcaaattgccaagcccacctccagctgcacctacacctgttgctgggggcacctcttctccttctccatcatcaggccagtctctcctgggcaggactgggactcaggtgcacacctgggatgcagcacttaggggacactcrctgcttgggcctggaagagacgttgtgcccttagttctcttctcacacttttctcaggggcctcactctgtgatctcctcctctctcttcttcccatcagcatttgcagatctcaattctctccgtggcaacaaatcccttcagcccacatcccttttgaggtgtctccaggtcttcagaagcctggtctctggtggctgttgccccaacctcctctctcaagagcacactcttcactcagcacagacagccgtccacccccacgactcaactgaaactgctcaggcacagcctctggtggccttggtcaccctaaatccaatgatggtttttactcctcattttgcttgactcgcagcagcccttgacacccgccagaatcaacacctctttctctgcctgcttttcaacactgttcatctggttgacctccccttctctggcttctt

SEQ ID NO: 607672 - DNA, 611 bp, Homo sapiens
ctccccaacctcccacctttcaaattgccaagcccacctccagctgcacctacacctgttgctgggggcacctcttctccttctccatcatcaggccagtctctcctgggcaggactgggactcaggtgcacacctgggatgcagcacttaggggacactcactgctwgggcctggaagagacgttgtgcccttagttctcttctcacacttttctcaggggcctcactctgtgatctcctcctctctcttcttcccatcagcatttgcagatctcaattctctccgtggcaacaaatcccttcagcccacatcccttttgaggtgtctccaggtcttcagaagcctggtctctggtggctgttgccccaacctcctctctcaagagcacactcttcactcagcacagacagccgtccacccccacgactcaactgaaactgctcaggcacagcctctggtggccttggtcaccctaaatccaatgatggtttttactcctcattttgcttgactcgcagcagcccttgacacccgccagaatcaacacctctttctctgcctgcttttcaacactgttcatctggttgacctccccttctctggcttctt

SEQ ID NO: 607673 - DNA, 611 bp, Homo sapiens
ctccccaacctcccacctttcaaattgccaagcccacctccagctgcacctacacctgttgctgggggcacctcttctccttctccatcatcaggccagtctctcctgggcaggactgggactcaggtgcacacctgggatgcagcacttaggggacactcactgcttgggcctggaagagacgttgtgcccttagttctcttctcacacttttctcaggggcctcactctgtgatctcctcctctctcttcttcccatcagcatttgcagatctcaattctctccgtggcaacaaatcccttcagcccacatcccktttgaggtgtctccaggtcttcagaagcctggtctctggtggctgttgccccaacctcctctctcaagagcacactcttcactcagcacagacagccgtccacccccacgactcaactgaaactgctcaggcacagcctctggtggccttggtcaccctaaatccaatgatggtttttactcctcattttgcttgactcgcagcagcccttgacacccgccagaatcaacacctctttctctgcctgcttttcaacactgttcatctggttgacctccccttctctggcttctt

SEQ ID NO: 607674 - DNA, 612 bp, Homo sapiens
tgctggcttaaatatggaggccacaggaggaatgtgggcagccttcagaagctgagagtggtcccagctaacagccagcgaggaaacagggacttcaatctcacaaccaaaagaaaatgaattctrccaatcacaagaataaccttggaagaagaccccaagctccagatgagaacacagtgtctgacactttgacttcagtctgagcagagaactcagacatatcctgctagacttctgacctacagaactgtgaactaataagtgagtattgctttaagccaccgaatgtgtagtaatttgtcacaaagcaatcaaaaactaaaaaagaaatcgggtcatgcaccctccaggacagacactccccttgtctcagaagattcccacttctcagtgtgactgagcctccccaggacacggctctgtccctatagcctgtgttctcatcatccccagtgtgggatcccaagcaaggtgtgtttgctgaaatttacagctgttgtgcaggaatcaacttggctggaggagtctacttagtattttcaaactttcaaaatctagagagagctcaagaggcttttgtcttagaagggataatttgcaacatcctca

SEQ ID NO: 607675 - DNA, 612 bp, Homo sapiens
tgctggcttaaatatggaggccacaggaggaatgtgggcagccttcagaagctgagagtggtcccagctaacagccagcgaggaaacagggacttcaatctcacaaccaaaagaaaatgaattctgccaatcacaagaataaccttggaagaagaccccaagctccagatgagaacacagtgtctgacactttgacttcagtctgagcagagaactcagacatatcctgctagacttctgacctacagaactgtgaactaataagtgagtattgctttaagccaccgaatgtgtagtaatttgtcacaaagcaatcaaaaactaaaaaagaaatmgggtcatgcaccctccaggacagacactccccttgtctcagaagattcccacttctcagtgtgactgagcctccccaggacacggctctgtccctatagcctgtgttctcatcatccccagtgtgggatcccaagcaaggtgtgtttgctgaaatttacagctgttgtgcaggaatcaacttggctggaggagtctacttagtattttcaaactttcaaaatctagagagagctcaagaggcttttgtcttagaagggataatttgcaacatcctca

SEQ ID NO: 607676 - DNA, 612 bp, Homo sapiens
tgctggcttaaatatggaggccacaggaggaatgtgggcagccttcagaagctgagagtggtcccagctaacagccagcgaggaaacagggacttcaatctcacaaccaaaagaaaatgaattctgccaatcacaagaataaccttggaagaagaccccaagctccagatgagaacacagtgtctgacactttgacttcagtctgagcagagaactcagacatatcctgctagacttctgacctacagaactgtgaactaataagtgagtattgctttaagccaccgaatgtgtagtaatttgtcacaaagcaatcaaaaactaaaaaagaaatcgggtcatgcaccctccaggacagacactccccttgtctcagaagattcccacttctcagtgtgactgagcctccccaggacacggctctgtccctatagcctgtgttctcatcatccccagtgtgrgatcccaagcaaggtgtgtttgctgaaatttacagctgttgtgcaggaatcaacttggctggaggagtctacttagtattttcaaactttcaaaatctagagagagctcaagaggcttttgtcttagaagggataatttgcaacatcctca

SEQ ID NO: 607677 - DNA, 476 bp, Homo sapiens
taacatcaaagtacaacgtgaagcagcaagtgctgatgtagaagatggagcaatatatccagaagatctagctaagaccatttgtgaaggtggctacactaaacaacagatttccaatgtagacaaagaagattccatctaggactttcatagctacagargagaagttgattcctggcttcaaaactttaaaggacaggctgactgtcttgttaggggataatgcagccgggaactttaagttgaagccaatgctcacttaccattctgaaaatcctaggacccttaagaattaggctaaatcttctctgcctgagctctataaatagaacaacaaagcctagataacagcacatctatttacagcatggtttgctgaatattttaagcccactattgagatctactgtttagaaaagaagatttctttcaaaatattactgctcattgacaaaacatctagtcactggagaacg

SEQ ID NO: 607678 - DNA, 476 bp, Homo sapiens
taacatcaaagtacaacgtgaagcagcaagtgctgatgtagaagatggagcaatatatccagaagatctagctaagaccatttgtgaaggtggctacactaaacaacagatttccaatgtagacaaagaagattccatctaggactttcatagctacagaggagaagttgattcctggcttcaaaactttaaaggacaggctgactgtcttgttaggggataatgcagccgggaactttaagttgaagccaatgctcacttaccattctgaaaatcctaggrcccttaagaattaggctaaatcttctctgcctgagctctataaatagaacaacaaagcctagataacagcacatctatttacagcatggtttgctgaatattttaagcccactattgagatctactgtttagaaaagaagatttctttcaaaatattactgctcattgacaaaacatctagtcactggagaacg

SEQ ID NO: 607679 - DNA, 476 bp, Homo sapiens
taacatcaaagtacaacgtgaagcagcaagtgctgatgtagaagatggagcaatatatccagaagatctagctaagaccatttgtgaaggtggctacactaaacaacagatttccaatgtagacaaagaagattccatctaggactttcatagctacagaggagaagttgattcctggcttcaaaactttaaaggacaggctgactgtcttgttaggggataatgcagccgggaactttaagttgaagccaatgctcacttaccattctgaaaatcctaggacccttaagaattaggctaaatcttctctgcctgagctctataaatagaacaacaaagcytagataacagcacatctatttacagcatggtttgctgaatattttaagcccactattgagatctactgtttagaaaagaagatttctttcaaaatattactgctcattgacaaaacatctagtcactggagaacg

SEQ ID NO: 607680 - DNA, 336 bp, Homo sapiens
agctgccatagacagtgattcccctgatggagctgggaaaagtaaattgaaagccttctggaaaggattcrccattctagatgccattgggaacattcataatccatgagaggaagtcaaaatagcacattaacaggagtttggaagaattgaatttcagtgctcatagatggctttgaggagttcaagacttcaatggaggaagtcactgcagatgtggtagaaatgacaagagaactgtagatagaaatgaagcctgaagatgtgactgaattgctgcaatctcatgataaaacttaaacagatgagcagttgcttcttacaaatgagccaaga

SEQ ID NO: 607681 - DNA, 617 bp, Homo sapiens
gtccatctatttggcaaactttattgttgtctcattttaagaaattgccacagccaccctaacctttagcaaccaccaccctgatcagtcagcggccatcaacattgaggcaagaccctcccttagcaaaatgattaatgactcacggaaggatcagatgattgttagcattttttgaaagtattttaaaattaaggtatgtatattgttttttaaagacgtaatgatattgcacacttaatagactacagtaaagtgtagacaaaacttttatacatactggaaaaccaaaaaattaatttgactcactttattgtaatattacctttattacgatggtctggaaccaaacccccaatgtctctgaggtatgcctgtccatatcctgtttccttaccactccctggtaatcataactaaaatttgcttcaaactctcctcattgagaaaaactatattaaagcaacattaggcctaygtagactctcaggaacttttctcagctggtgaatttctcagttctaattacaggtagacctgtagtcaaatcttggctctagtttcaagcagctaagtgggtaaactgctagtccctacaagtctcagtttcttcctct

SEQ ID NO: 607682 - DNA, 528 bp, Homo sapiens
ttgatttcaaaactattttaaattatatatatttgaacttatattctaaaaagtctagacattaaatttaaattcgtaaataattgctatatttacttcatttctgtttatatatgtattttgttgttggagcctttaagaatataaacttttaaatttttacccttaaacacttcggcatccatctaaaaaaagggaagacattctcgtacgtgatcacaactaacacattagctgcaatccctaatattatcttatacacatctcatatttccattttttcaattttctctaaataacttcttgcctttttttccaaatcagaatccagtgtatttatgagactgctcatgtmtttgtcatgttcattatgtttcttttattctagaagagctcttcaccccacctcaaattttttatttaaaaaaatgttgtgggtacatagcaggtgtatgtatttatggggtacatgagatgttttgatacaggcatgcaatgtgaaatcagcacttgggtaatggggtatca

SEQ ID NO: 607683 - DNA, 528 bp, Homo sapiens
ttgatttcaaaactattttaaattatatatatttgaacttatattctaaaaagtctagacattaaatttaaattcgtaaataattgctatatttacttcatttctgtttatatatgtattttgttgttggagcctttaagaatataaacttttaaatttttacccttaaacacttcggcatccatctaaaaaaagggaagacattctcgtacgtgatcacaactaacacattagctgcaatccctaatattatcttatacacatctcatatttccattttttcaattttctctaaataacttcttgcctttttttccaaatcagaatccagtgtatttatgagactgctcatgtatttgtcatgttcattatgtttcttttattctagaagagctcttcaccccacctcaaattttttatttaaaaaaatgttgtgggtacatagcaggtgtatgtatttatggggtacatgagatrttttgatacaggcatgcaatgtgaaatcagcacttgggtaatggggtatca

SEQ ID NO: 607684 - DNA, 403 bp, Homo sapiens
ttgcatttccctgatgattaatgatattgagctcctcttaataagcctccttgccatttgtatgtcttcttttgagaaatgtctattcaaatcttttgtccatttaaaaaattagattattagacttttttcttatrgagttggttgagctctttatatattttggttattaattccttgtcagatgaatagttggcaaatattttctcccattctgtgagttgtctcttcactttttttattgtatcctttgctatgcagaagctttttaacttgatgtgatcccatttgttcatatttgctttggttgtctgtgcgtgtggggtattgctcaaaagatctttgcccagaccaatgtcctggagattttctccaatgttttcttgtagttgtttcacagttt

SEQ ID NO: 607685 - DNA, 623 bp, Homo sapiens
ttcttccaattcattaacatggaaaattttccccattgtttggtgccctattcagtttctttcatcagtgttttatagtttctattatagagaactttcactcctttggttaagttaattcctaggtatttaattttatgtgtggctgctgtaaatgggattacttttaaatttctttttcagactgttcactgttagcacatagaaatgctactgatttttgtatgttgattttgtatcctgcaactttactgaatttgtttatcagttctaatagttttcctgtggagtctttaggtttttccaaaaataagatcatatcttctgcaaacaaggataatttgacttcttcatttccagtttggatactttttatatctttctcttgcctggttgctctagagaggacttccagtactatgttgaataacagtggtgasagtggacatccttgttgtgttccagatcttagaggaaaggctttcagtttttccccattcagtaagatactatctgtgggtctgtcatatatcgcttttattatattgagctatgtgccttctatccccagtttttgaaggtttttattatgaaggaagttgaattttatcgaatgctttttc

SEQ ID NO: 607686 - DNA, 623 bp, Homo sapiens
ttcttccaattcattaacatggaaaattttccccattgtttggtgccctattcagtttctttcatcagtgttttatagtttctattatagagaactttcactcctttggttaagttaattcctaggtatttaattttatgtgtggctgctgtaaatgggattacttttaaatttctttttcagactgttcactgttagcacatagaaatgctactgatttttgtatgttgattttgtatcctgcaactttactgaatttgtttatcagttctaatagttttcctgtggagtctttaggtttttccaaaaataagatcatatcttctgcaaacaaggataatttgacttcttcatttccagtttggatactttttatatctttctcttgcctggttgctctagagaggacttccagtactatgttgaataacagtggtgacagtggacatccttgttgtgttccagatcttagaggaaaggctttcagtttttccccrttcagtaagatactatctgtgggtctgtcatatatcgcttttattatattgagctatgtgccttctatccccagtttttgaaggtttttattatgaaggaagttgaattttatcgaatgctttttc

SEQ ID NO: 607687 - DNA, 543 bp, Homo sapiens
cctccttccaggatctgactccggttgttagcctgggcccccaggatgaggacagtgtaaggagccaggagkttgggaccagactggcctcctagcctagctgaagagatgggtcctggccttatgagctcccatatgactggaagcttccccaaccctggaaccacagacagttcctgggctctggtcctctcagcccagtggtgcaggggcggcccatcctgagagttcctgcggggaagaggggcctgtggggacaaggggatgctacagtgagtgactttgaggacaaggacacacacaagcacagccctttcggccaccccatgggccctgggttgccaggagccttaccaagccccagcttgcctggtccccacctccatgaggccacgagccagcctggccgccctggagctagtgctggagcccatcacgggatctgctatcccaccatgcagcaagaagaggaactgagagccaagacacttttagagccatttgaccgagtgtctgcctgttgaatctaatgatgtaatttgc

SEQ ID NO: 607688 - DNA, 543 bp, Homo sapiens
cctccttccaggatctgactccggttgttagcctgggcccccaggatgaggacagtgtaaggagccaggaggttgggaccagactggcctcctagcctagctgaagagatgggtcctggccttatgagctcccatatgactggaagcttccccaaccctggaaccacagacagttcctgggctctggtcctctcagcccagtggtgcaggggcggcccatcctgagagttcctgcggggaagaggggcctgtggggacaaggggatgctacagtgagtgactttgaggacaaggacacacacaagcacagccctttcggccaccccatgggccctgggttgccaggagccttaccaagccccagcttgcctggtccccacctccatgaggccacgagccagcctggccgccctggagctagtgctggagcccrtcacgggatctgctatcccaccatgcagcaagaagaggaactgagagccaagacacttttagagccatttgaccgagtgtctgcctgttgaatctaatgatgtaatttgc

SEQ ID NO: 607689 - DNA, 608 bp, Homo sapiens
cttccctgcccccagctgtgacaagcagagatgtctccagacattaccaaatgctccccatggagcaaaatcaccctgagtgagatccactggagtagagacctgtgtggggacagggtggtggcatttgtgtgtgtgtgtacacacgtgagctgtgcgtgttactggtaatggaaaattgagcttaagtggccaacatatttagagagtcctcggtggagctgaccccagccatgtggtacttttctaagggatgctggtttcatagtagagcaggttctttgtttaccttctggaagagacggcagccagtgtctttaggaaaatgagtctgatgcgttgtggaaaagctgtcctcacctggctttcagggttttgccttcggccccatctgcccagctgttctcctggaccccctcttggtccttaaggttctttgggacaatatcctaaaatgcacaggacagtccccataacacagcattgtccaggtgacagggagtgtggatttgagaagatgcctgtgggccactctcaaggccctgtgtctgygcccgtagccatgtccgcaggctgcctggccactctcctgatcactgagggagagt

SEQ ID NO: 607690 - DNA, 281 bp, Homo sapiens
catggaacatgggcatggggtaggttagccctttgagaacagattgggtgaaactggttcccggtttcatgagaagccggtgggcaaccaggaaaatgttttaaaggcaacggaatggatctgaccttctttacagtagaatattttcccagaaaatcactttgagaatcttttgagcttgactatttcacaagttagccaggttgaacactgatagggttctgaaacgatcaccttgygtgtcttcatgggaccatggccaaaaggagcagaattccctg

SEQ ID NO: 607691 - DNA, 552 bp, Homo sapiens
tccacagggtgggggcggcctgagcaaggggctcaagagccaggttacagaatttcctggggtttaaatatcctctagaggcttcccattggttacttggtgtattctctatgcaaatraagaggctgagggaggttacagtgatttacttggtgtacaccctatgtgagtgaaggagatgtttcctgtcatagctgaagcagaattacaaagttctatactcagttgtagaaagttggggttctactgtttcagttctaggaagcccttaggctccctgtccacagaccctattctcctgcttcagctatgggggtgtttctggaatgccgagctggtcagccagtcttcctccctccccacacataatgcccttgtatttctcttacgagaagatttgttagtaagcccctgagctgggaatctgcctgggccctctccctaccctcctgtgtctcattttccctccctttctatgccccagttgcagtgccctctgagcctctgcatcctccactctctgttctaccccagggacttagcatatgctgt

SEQ ID NO: 607692 - DNA, 552 bp, Homo sapiens
tccacagggtgggggcggcctgagcaaggggctcaagagccaggttacagaatttcctggggtttaaatatcctctagaggcttcccattggttacttggtgtattctctatgcaaataaagaggctgagggaggttacagtgatttacttggtgtacaccctatgtgagtgaaggagatgtttcctgtcatagctgaagcagaattacaaagttctatactcagttgtagaaagttggggttctactgtttcagttctaggaagcccttaggctccctgtccacagaccctattctcctgcttcagctatgggggtgtttctggaatgccragctggtcagccagtcttcctccctccccacacataatgcccttgtatttctcttacgagaagatttgttagtaagcccctgagctgggaatctgcctgggccctctccctaccctcctgtgtctcattttccctccctttctatgccccagttgcagtgccctctgagcctctgcatcctccactctctgttctaccccagggacttagcatatgctgt

SEQ ID NO: 607693 - DNA, 552 bp, Homo sapiens
tccacagggtgggggcggcctgagcaaggggctcaagagccaggttacagaatttcctggggtttaaatatcctctagaggcttcccattggttacttggtgtattctctatgcaaataaagaggctgagggaggttacagtgatttacttggtgtacaccctatgtgagtgaaggagatgtttcctgtcatagctgaagcagaattacaaagttctatactcagttgtagaaagttggggttctactgtttcagttctaggaagcccttaggctccctgtccacagaccctattctcctgcttcagctatgggggtgtttctggaatgccgagctggtcagccagtcttcctccctccccacacataatgcccttgtatttctcttacgagaagatttgttagtaagcccctgagctgggaatctgcctgggccctctccctaccctcctgtgtctcaytttccctccctttctatgccccagttgcagtgccctctgagcctctgcatcctccactctctgttctaccccagggacttagcatatgctgt

SEQ ID NO: 607694 - DNA, 489 bp, Homo sapiens
cgtcaggttctactttggttttatacatttcagggagacagcaattgtgggtaaaatcaatacatggaaggtatacattggtttgcccagaaaagatgggacatctcaaaatggggacttaaaggtcataggtgggtttagggattctttattttattttaaaatatttattgtttattatktttatttttgagacagggtctcactctgtcacctgagctagagtacagtggcatgatcatagctcactgcagcttcaatctcctgggctcaagcaatcctcctgtctcagccccccagtacctgggactacaggtgtacaccaccacacgtggctacttaaaaaaaaattttataatagaatagaaaaggtctcactatgttgcccaggctggtctcaaactcttgagctcaagcaatcctcccacctcagcctcccaaattgctgggattacaggtttgagccaccacaccctgctgggtttagga

SEQ ID NO: 607695 - DNA, 489 bp, Homo sapiens
cgtcaggttctactttggttttatacatttcagggagacagcaattgtgggtaaaatcaatacatggaaggtatacattggtttgcccagaaaagatgggacatctcaaaatggggacttaaaggtcataggtgggtttagggattctttattttattttaaaatatttattgtttattatgtttatttttgagacagggtctcactctgtcacctgagctagagtacagtggcatgatcatagctcactgcagcttcaatctcctgggctcaagcaatcctcctgtctcagccccccagtacctgggactacaggtgtacaccaccacacgtggctacttaaaaaaaawttttataatagaatagaaaaggtctcactatgttgcccaggctggtctcaaactcttgagctcaagcaatcctcccacctcagcctcccaaattgctgggattacaggtttgagccaccacaccctgctgggtttagga

SEQ ID NO: 607696 - DNA, 539 bp, Homo sapiens
gggattcctacaaaaaactggagtgggttgtgcaagggtcaggctgcctgaagtgagaaacggcctgatctctgtcactcaaatgggagtggggtcaatggcctcaacccagagaaactgctccttggtaagtcagggtgacaggtacacactttacggttgtcaggacctgcgtgggagatgaatgagtgtcgtcgcagggtgtcaggaggtaattagcagcctgtcgactgtctgtaaacaaacacttttgatgcatgccatgaagagatgaagctattttggtgaccaattttgcactcacaggaagcagaatttaattgcttgtctgatctacagagccctacatcatgccagcatgawctgtgggcaaaacatggccctacctgcagaggtggcagctctctgatgtgagggtctttattttgttgatcactcatctacaacaaaccatccatttccactcatttttatgtaagggctattttatttttgtctctagagtgagtcaagaaagccccaaacatcattgaaaagca

SEQ ID NO: 607697 - DNA, 644 bp, Homo sapiens
acttttctgtttcttctttgtccactaggggatcatctagttacatggaacagaaattcactcaaattagcttaatccagaagagatcactttgctcatagtgtgacagtatggatgttgctatagaaactggtgatggtggctatggtggtggtaatgatggtcgtgatgggcatggttgatggtgatcgtggtcatggttctggtgtcatggtgatagtgctgatggctttggtgatgatactgattggtgatggtgatgayggtggaaatggtgatggtgatgatagtgctgaaagtagtgctggtgtgaaggtggtgaagatcatactgatgatggtaaagatgatggtggttatgacactgatgggggaggggatggtatctttgggattccatggtggaaaggagaatcaggtcgtacaaggggctagacctgggacatgggaagtcaaccagtgaggctacttttttttgtctctctggaggctcatggtttctcatctttgcttctttctgctctgttgctgcactgtcttgtgtcaagtgctgaaaactaaccaccgtggccctgggtgcacatcaccatccagttaagagctgggtatcttcaagttttccagagtgaacagattggactgccc

SEQ ID NO: 607698 - DNA, 644 bp, Homo sapiens
acttttctgtttcttctttgtccactaggggatcatctagttacatggaacagaaattcactcaaattagcttaatccagaagagatcactttgctcatagtgtgacagtatggatgttgctatagaaactggtgatggtggctatggtggtggtaatgatggtcgtgatgggcatggttgatggtgatcgtggtcatggttctggtgtcatggtgatagtgctgatggctttggtgatgatactgattggtgatggtgatgatggtggaaatggtgatggtgatgatagtgctgaaagtagtgctggtgtgaaggtggtgaagatcatactgatgatggtaaagatgatggtggttatgacactgatgggggaggggatggtatctttgggattccatggtggaaaggagaatcaggtcgtacaaggggctagacctgggacatgggaagtcaaccagtgaggctacttttttttgtctctctggmggctcatggtttctcatctttgcttctttctgctctgttgctgcactgtcttgtgtcaagtgctgaaaactaaccaccgtggccctgggtgcacatcaccatccagttaagagctgggtatcttcaagttttccagagtgaacagattggactgccc

SEQ ID NO: 607699 - DNA, 577 bp, Homo sapiens
gacctgggacatgggaagtcaaccagtgaggctacttttttttgtctctctggaggctcatggtttctcatctttgcttctttctgctctgttgctgcactgtcttgtgtcaagtgctgaaaactaaccaccgtggccctgggtgcacatcaccatccagttaagagctgggtatcttcaagttttccagagtgaacagattggactgccccagtccagctgataacttgcctggagtctgctgtggatatatggggaggagaagcccagtccttgctataacctgagcacctaggactgagagaagcagattctcccaaagtctgtaggacagaggagaagctgaggaggaaatgaccagcatttctcgcacctgagtatctggaataggaggagtaagggtgaagatctgataagaggagtsacatgagcaaattgttgaaatttaagaggagacaggtttaatggtaaataccttctcattttcaaaccattctttccaactcttgagaagttccactaggggagaaattgttttcaacagtataggttcaaccttttcagtttatacctgttc

SEQ ID NO: 607700 - DNA, 547 bp, Homo sapiens
aacactggctgaagaacggagggctgcttagcagaaagcatgtgtggatgatggaggtggcattttaaaaatgcagatggagaagacccagtgggagcagtagtggaaatgtcccaaatcaatcaatcaactccaggacattgaccaaggatagaatatggcattattgcttaggattaaaatgaaaagagaagacagtgctcttgtccagaaggagaagaaacttttatagtgtaatgttttcaacaagttcaaacaatactacccagataatgcagtacagtgtggggcacggagtgggtggtgtttggaacgcagttctgatgktgcaccagcccctccagacaggacagttggggagaagtagctttctgtggttgccaggagacaagccaatgactgagcagaaagcatgacagagggagctggtcgggagtctgcctagagcctttggagggagcctctgaaggccccacctgggccagggctctggcgggtctattggtttttgcgtatttttctggtttgctggaatctggaataaatg

SEQ ID NO: 607701 - DNA, 547 bp, Homo sapiens
aacactggctgaagaacggagggctgcttagcagaaagcatgtgtggatgatggaggtggcattttaaaaatgcagatggagaagacccagtgggagcagtagtggaaatgtcccaaatcaatcaatcaactccaggacattgaccaaggatagaatatggcattattgcttaggattaaaatgaaaagagaagacagtgctcttgtccagaaggagaagaaacttttatagtgtaatgttttcaacaagttcaaacaatactacccagataatgcagtacagtgtggggcacggagtgggtggtgtttggaacgcagttctgatgttgcaccagcccctccagacaggacagttggggagaagtagctttctgtggttgccaggagacaagccaatgactgagcagaaagcatgacagagggagctggtcgggagtctgcctagagcctttggagggagcctctgaaggccccacctgggccagggctctggcgggtctattggtttttgygtatttttctggtttgctggaatctggaataaatg

SEQ ID NO: 607702 - DNA, 477 bp, Homo sapiens
tgtttgggatggatggaggatgcgggatggatggaaggtgtgggctctcgcaggctgataggarggaagctaatttgcctgagcctttcttccacaggacagagggtgcaacagggcatgtggcctccctgggcacaacttgcagtgagaaacctctgttccaatcctgaaaaacatggtccccctcatcccttaggggtatctttcctccttacgtttttcctagcttggcttctaaagcagacccatctggtcccataattcggagacatgttttaatcattggtaatttatcaaccagctgacgtacttcatagataaaagaattttacagacaaccttgcctagatctctctgttttctaaataaagattcagagatgtcaacttttagttctagtcacaaagctagtggatggtagagtcagaacacagccccatgtcacaagcctcttccaggacttgcttaaccatgcca

SEQ ID NO: 607703 - DNA, 528 bp, Homo sapiens
attgatttggtgtgaaattttaaggaaaagcaaatatccaccattacaacgacgtaggaattctcaggaagaaggatgtctaatatctttgacttatgaagacactagcgaattttctccacgatagcaaaggatttctcctagtttcccagaacccctgaaaattaaaaggctgcgctagaagagaaagccaataaatggccttgaaaaaagtaaatctggagtttttcaaagacaagagtaactaagctccactcttggcataagtgcctatgggcatcaaatttcagttgaaaagtatcaataaataacatgtgctttgtaggtaaataccagtttaggagcctgaggagcaacaactagtttkccctggttgcatgcaaattgttagtcaaagtcaagcccattgctctgaggggtcaaaccctgccagcatcacagagctgaacttcctctgaggctgtatgcctgtgtgtatatgtgtttgtatgcatgcacgcatgtgtagttggtggggtggacagagtt

SEQ ID NO: 607704 - DNA, 571 bp, Homo sapiens
agtacaggggttccacaaactcatctgagtcccaggttctttccacctttctgctctgctgttctcaggggtcctccycatcctgatgctttcagaacagttcctagaattccagccgtgtctgcttacaagcaggaggaagacaaagagcaaagggcacaaagccagtatgcaacccaaatacgcacacccttatcatgattttaagatttgccaaatcctcaccaaacagcttctcattatatttcattggccagaacttagtcactgggctgccatatttgcacaggatgatgagaaatgtaggtttctctttttttaaaaaaaacaggtacattgcctccacccacagtaatagtgagatcttgtagatacagtaaaaaagaagggagactagagtttcaaaaattgttacctatttccctgcttgtttagagacagagtcttgctctgttccccaggctgtagtgcagtggtgtgatcatagctctctgcagactcgaactcctgggctcaaaagatcctcccacttcaatctcctgagtagctgggactacagacatgtgacacc

SEQ ID NO: 607705 - DNA, 571 bp, Homo sapiens
agtacaggggttccacaaactcatctgagtcccaggttctttccacctttctgctctgctgttctcaggggtcctccccatcctgatgctttcagaacagttcctagaattccagccgtgtctgcttacaagcaggaggaagacaaagagcaaagggcacaaagccagtatgcaacccaaatacgcacacccttatcatgattttaagatttgccaaatcctcaccaaacagcttctcattatatttcattggccagaacttagtcactgggctgccatatttgcacaggatgatgagaaatgtaggtttctctttttttaaaaaaaacaggtacattgcctccacccacagtaatagtgagatcttgtagatacagtaaaaaagaagggagactagagtttcaaaaattgttacctatttccctgcttgtttagagacagagtcttgctctgttccccaggctgtagtgcagtggtgtgatcatagctctctgcagactcgaactcctgrgctcaaaagatcctcccacttcaatctcctgagtagctgggactacagacatgtgacacc

SEQ ID NO: 607706 - DNA, 600 bp, Homo sapiens
  misc_feature 63, 68, 89, 90: n = A,T,C or G
gtctcaaggagaagagagtactgcacagcatggtgactgtgcttgatgaaataaataatgagnttggngtttcctttattagaaaaatnnccttgttccttcaacctcggcatggaagcctcttgatgcaatcgtcaaggctgcagtgcatggctccaagcagatctttttgccccagatgctataacaacaggtgctgcacatagatgtgcagatgtaattgtatcccagttcattaaaatgagctgtcataaagtcagaataaaatgagaagaaatcaattggaaaaggatgaattgttttaaaaccaatcaggtgatattgttgagtatttttaaaaagaaaatattgatttaaaaaacaaagaagctggtgaggtcaggagttcaagaccagcctggccacgtggtgaaacctcatctctactaaaaatacaaaaacttagcctaacgtggtggcgggcacctgtaatcccagctacttgggaggctgaggcaggaaaaatygcttgaacccaggaggcagaggttacagtgagccaaggtcacgccattgcactccagcctgggcaacaagagcgaaactctgtcttaaaaaaac

SEQ ID NO: 607707 - DNA, 547 bp, Homo sapiens
agaagctataataccaagtttttaaaaattcacacttgcttttctttcagctaatctgagcaatgatgttttcttgaacagagaatgcattctcatgacacacagtgtttaaaactccacagacatgcaccgagtgcctggccacacactgtgctgagctctgggaatacaacagtaaccaaagaggggcccttgctctgcaggagctggttgcagggaagacagataagcaatggactgaaaggctctggaaatgaggaacctgttacagaaaagctccgtacaacaatgcagaagcctccagatgaatgccagtgccctacttccttgcaaagaaaatggtcccaagtgattctytgtggcccatgctctgtgtggcgaatggcttattcaccatgcacaagtgctttcatggcacctcactcaaagctgatggaaccagagttggtgcttgagcaggaagcagcccgacatggaggtttcctgccagaacgctgcagcaagccaagcctctttttcggaagttgtatgagagggaggagggtag

SEQ ID NO: 607708 - DNA, 578 bp, Homo sapiens
aatctttaaaaaatgggttaaaatagaaaaaccaactctttaaagacactaggaagcatccaaaaacaaatagaagccaagggagtttaatttcaaaagattgcaaagggaagtggcagcaattttgagtttgtggctcatgagcaccagaaggatgatcaaccccaattatggctcttaggaatgatggctggacaaaacatggccttcctgccagaagtcagagttcagagctgaaaaaacagctgaaaattgaaagtggaaattatggcaataccaacacctcagaaaaggtaagacccaaaktcaggaataagctccaaaactctggctgatgctaaatatgccattgtagatgagaccacaagggaccccataaaaagcaacaagaggatggagagaactagattcttgaaagataatccacacatctatgtagaaacacagaagtgagtttgatacttttaaaaaactgtctgtattctccagttatgaggagactgagtgacagctgaagttgagtgggcttgaaatgttacaatgcagagcccaaatccagcagagtaactgaaaatgag

SEQ ID NO: 607709 - DNA, 507 bp, Homo sapiens
ggaaatcattattttatagattcaaggatctcaacaaacctcttgcagtacaaacaccaaaaagttgtttctaaacatacatagtcaaatgctgaaagccaaaaagacagaggaacaatattgaaagcgttaagaaacaaagaaacatatcacagatagaggggcagtgacaagattaagggctgacttcttttcaaaaccttgggaactagaagacattggaaaaaaatattcaaagtgctgaataaaaccaaaccaaaccaaacaaacaaataaaactctctcaattaaaaatttgatgtccagtggaatcatctgtcaaaaataaaggtaagataaaaacatgttcagataaacaaaaaactgagagaarttggtagaagcagacacgtacaacaacaacaaattggtaaggcaaattcttcaggctgaaggaaaacagcacaaataacgctgatttaccagaggcatgaagagtaccagaaatgttgagtatgtggctacatg

SEQ ID NO: 607710 - DNA, 532 bp, Homo sapiens
tgaaaaataaacaaataagacaaactctaaaaatagtaaaatagcaatcttaaatacaataatattaataattgaaatgaactagatacttttcaaaagacagtatagaaattcaagaactattaatatatactattacaagatatttactttgaatataaaaacaaatcgactgaaagttacagcctggttaaggataccctatgaagactttgaacgggagttgctacattgataccatacaaaatagatttaaaggctggacatattactacaaagaggaacattttgyacatcaagacaatataactacattttgctatgaaaagaaattgtgtatatgtgagatcaaatctatcaatcctttttctttttttctttttttttttttttgagacagagtctcactctgtcgcccagattggagtgcaatatcctggtctcagctcactgtaaccgccacctcccaggttcaaatgattctcctgcctcagcctcctgtctcagcctcctgtcccagctgggactatag

SEQ ID NO: 607711 - DNA, 527 bp, Homo sapiens
attcttgcccaaaacatgagaagtagaaggaatgtgagagaaaataatgtagattccgtccaggaagtgctaggtgctttcctggtgggtacatttacaaattagrgacattttaattaatctactggatttgtgattctgtctgctactatcttctttttcttgaccttatgaaagatttatagatggcttcaactgaaactacaggaaatgactcatggttatccctgaagatattagagccagatttccattccttagggctgatgcatagcagctctttgataaatatttgctaaataaatgacaaattttagaatgtctttttattattattgtactttaacttctagggtacatgtgcacaacttgcaggtttgttacatatgtatacatgtgccatgttggtgtgctgcacccattaactcgtcatttacattaggtatatctcgtaatgctatctctcccccctccccccaccccacgacaggcccgagtgtgtgatgttccccttcctgtgtccaagt

SEQ ID NO: 607712 - DNA, 527 bp, Homo sapiens
attcttgcccaaaacatgagaagtagaaggaatgtgagagaaaataatgtagattccgtccaggaagtgctaggtgctttcctggtgggtacatttacaaattagggacattttaattaatctactggatttgtgattctgtctgctactatcttctttttcttgaccttatgaaagatttatagatggcttcaactgaaactacaggaaatgactcatggttatccctgaagatattagagccagmtttccattccttagggctgatgcatagcagctctttgataaatatttgctaaataaatgacaaattttagaatgtctttttattattattgtactttaacttctagggtacatgtgcacaacttgcaggtttgttacatatgtatacatgtgccatgttggtgtgctgcacccattaactcgtcatttacattaggtatatctcgtaatgctatctctcccccctccccccaccccacgacaggcccgagtgtgtgatgttccccttcctgtgtccaagt

SEQ ID NO: 607713 - DNA, 527 bp, Homo sapiens
attcttgcccaaaacatgagaagtagaaggaatgtgagagaaaataatgtagattccgtccaggaagtgctaggtgctttcctggtgggtacatttacaaattagggacattttaattaatctactggatttgtgattctgtctgctactatcttctttttcttgaccttatgaaagatttatagatggcttcaactgaaactacaggaaatgactcatggttatccctgaagatattagagccagatttccattccttagggctgatgcatagcagctctttgataaatatttgctaaataaatgacaaattttagaawgtctttttattattattgtactttaacttctagggtacatgtgcacaacttgcaggtttgttacatatgtatacatgtgccatgttggtgtgctgcacccattaactcgtcatttacattaggtatatctcgtaatgctatctctcccccctccccccaccccacgacaggcccgagtgtgtgatgttccccttcctgtgtccaagt

SEQ ID NO: 607714 - DNA, 527 bp, Homo sapiens
attcttgcccaaaacatgagaagtagaaggaatgtgagagaaaataatgtagattccgtccaggaagtgctaggtgctttcctggtgggtacatttacaaattagggacattttaattaatctactggatttgtgattctgtctgctactatcttctttttcttgaccttatgaaagatttatagatggcttcaactgaaactacaggaaatgactcatggttatccctgaagatattagagccagatttccattccttagggctgatgcatagcagctctttgataaatatttgctaaataaatgacaaattttagaatgtctttttattattattgtactttaasttctagggtacatgtgcacaacttgcaggtttgttacatatgtatacatgtgccatgttggtgtgctgcacccattaactcgtcatttacattaggtatatctcgtaatgctatctctcccccctccccccaccccacgacaggcccgagtgtgtgatgttccccttcctgtgtccaagt

SEQ ID NO: 607715 - DNA, 615 bp, Homo sapiens
aatgaaacatatacaagtaaaaatgtaaaaggaacaataagaaacattaagaatgaaaaatatagaaaacaaaatacatacctcagtggatagactattctagccgggcttagtaaaaactaacagttaatttaaaaagagtaatgagaaatttcctaaaatgcaacatacggagacaattattgttttaaaaaaaattaagagacctagaaaataactcaagaagcttcaacarataataacaacagtttcagaagaagagaatgagaatggtaaagaaacactatttaaagagaaaatagctgggattttttccagaaatgatgaaagccctgcctttctaattaaatcttattaaatagattaagtaaaaataaatacacattgaaagtcattgttgtgaaactgcagaacacataggaaagtagtaggggaagctttaaaaattaccagaggaaaaaaaattacagattacctacaaaggaatgatatttacaccaagagcagacataatcaacagcaacagatgttaagaaaacatggtttaatatttttaaagtgctgaggaaaattacaaatggccttgtatagaattctaaacccaaacaaattacc

SEQ ID NO: 607716 - DNA, 606 bp, Homo sapiens
tgctctgagttcaccaaagtggaatagggtgttctctaacttaatcttgtcttgcaaagtagaacttgcacttctggccatgaagaataactagtacctaacttgccctacttctgtctagaaatagaaaactggagagcagacagcacagactatgatggctcagaaaagagaaattaatgagygaaccctgtgatcactcagactttctgcctaaagacactttccagaccataacacaggagggaaccctaagcaaagcacaactatcttaccgacatgcttacatgttgaaatgctaatactttgggactcatgggttaaatagaatatattactagcattaaattgcagaaaagaaaggtggcccactggccagcatgtagctagaatggataatatgcaggaaagaatatttcaaaatcctcatttggctttcttaataataaaacctaccccttgaaatgtatactttcttatccacattccagtatctggaatacgaaactgtttgacgaataatcatgtgctgtttggaagaggtcttcttggcaatagcaacctatggaaataattatttaactactaaaagggttaaggttaaaa

SEQ ID NO: 607717 - DNA, 669 bp, Homo sapiens
tggcgattgcacaacattgtgaatgtgctaaatgccacgaaattgtatactttaaaatggttaattgttatgttatgtgatcttcatctcaattgaaaacaaaaagaggaaaaggagaaagggactttccgcattctaagttcttaagaaagtcctttctcagtgaaaggatgactaaggtgttatgcataggtcagttgagtgctgagtgggcagggggcggggtggagaaaaggccacaggcacaagyagaatataggaggatgaggtgtagaaagtgctgcagtggggacctttccccatactgatttagggtcccactaattcagcaaatgctcttctgcagctctccacactgcaattgactccagcatgcatactatacccacttctcgtgaattatctcttttcccaaaggggtgcccattccctgaaggctagaccttcagctctttcctgtggcacaacctcccccaaggctttatcctatcctgaggccaatccattcgagcctctggtgcaagcaaaacacaatattcgtccttgaggatacaaagataccttcagcaaaatccttgtcctccagtaggaccaagtctatgtggtctggattcccgtgatctccctgagctcatccactgcagctgcactggcatctttgctatgcct

SEQ ID NO: 607718 - DNA, 579 bp, Homo sapiens
ctaagttactgaaagttggtgtgaccctgtagttgatgaatgacttaaagggatttttctagactaattatgataatatctaattttggcttttctactgactctactaagtcacctttgtataacatgtgtccccatagtattttaagttaagaaggagaaataattaaaaacaagcaattaggccgaggaagaggaggcagtgaagtacaagtttttaaagtgttccctgcaatgtgtttcctgggaatgcctttgcttcttgtgttctctttttgcatagggagatctcaatgaatagtgaagaattrcttctgatttttggccaattctgctgctgcagagaacacctgttcataggaaggatgagaataccactcaatgccccaaaactgttgctcagaaactagctgaggaataatttcatttgttcttatcagtcagctctcaaggctgcattcaggggcaagaaattaacaatacataaatctaccaaagtggtagctttttataggtaagaatgaggcaaatctttgtgaactacttcccaagttatttcaatctgcagtttgaacaaag

SEQ ID NO: 607719 - DNA, 586 bp, Homo sapiens
tatttcttaagcctattagatgaactcctaaaagcttcccaagatgacttacaaggcaggttctctaactttgggtcaaaaccaacctctttagcctaaaagacaaggcccttcatgattcagccctgaacgcttctcagtctttcctacactccagccaggtattctgttttcctgagcttcctttgtctctttgcagctgctgtttccctgcctataatgtgcattccatccatgtgcacctgttaatgctctttcttttctttcttcaagattcaagtcatgagacacattcatgtcttcacctccatctcctcaggcagagttgaaaagtttttctgtataatttgtaacacctggaacataagtctcttctgatgytattctcatgctgttgaaacacaataaccattgctttccttgactgtctgtgcttctggactgataccttgatgccaggcatatgtctggctcatatctttagcttaagtggccagcaaagtgtcacctacacaggaagttcaccagtgtttaaatgagcaaacagtcatctagttgcttggaggcaaagcaggactagaaccct

SEQ ID NO: 607720 - DNA, 564 bp, Homo sapiens
gtttttgttgttgttgttttgttttgttttgttttagacggagtcttgctctgtcacccaggctggagcacagtggcacaatctagatcttggctcactacaacctctgcctccggcattcaagcaattctcctgcctcagcctcccgagtaggtgggattacaggaatgcacactatgacggctaattttytgtatttttagtagagacggcatttcaccacgttggccaggctaatctcaaactcctgacctcagaagatgctcccgcctcagcttcccaaagtgctgggattacaggcatgagccaacgcacccggccaagaggattttacctctaggcaaagcccccacaagggaatttcttcaatatgaccattgtgctcagctactgcagaaaaaaatgccctattgatgagggggtataacggtggtccagaaaattcaacagtagaaggttagggattaagaaaatgaaaagtgaaagaaaagagggacatttcaagaaaaaaaaagtttcagcagcatattatcttttaacacacagaaattttaatggtgctta

SEQ ID NO: 607721 - DNA, 564 bp, Homo sapiens
gtttttgttgttgttgttttgttttgttttgttttagacggagtcttgctctgtcacccaggctggagcacagtggcacaatctagatcttggctcactacaacctctgcctccggcattcaagcaattctcctgcctcagcctcccgagtaggtgggattacaggaatgcacactatgacggctaattttttgtatttttagtagagacggcatttcaccaygttggccaggctaatctcaaactcctgacctcagaagatgctcccgcctcagcttcccaaagtgctgggattacaggcatgagccaacgcacccggccaagaggattttacctctaggcaaagcccccacaagggaatttcttcaatatgaccattgtgctcagctactgcagaaaaaaatgccctattgatgagggggtataacggtggtccagaaaattcaacagtagaaggttagggattaagaaaatgaaaagtgaaagaaaagagggacatttcaagaaaaaaaaagtttcagcagcatattatcttttaacacacagaaattttaatggtgctta

SEQ ID NO: 607722 - DNA, 564 bp, Homo sapiens
gtttttgttgttgttgttttgttttgttttgttttagacggagtcttgctctgtcacccaggctggagcacagtggcacaatctagatcttggctcactacaacctctgcctccggcattcaagcaattctcctgcctcagcctcccgagtaggtgggattacaggaatgcacactatgacggctaattttttgtatttttagtagagacggcatttcaccacgttggccaggctartctcaaactcctgacctcagaagatgctcccgcctcagcttcccaaagtgctgggattacaggcatgagccaacgcacccggccaagaggattttacctctaggcaaagcccccacaagggaatttcttcaatatgaccattgtgctcagctactgcagaaaaaaatgccctattgatgagggggtataacggtggtccagaaaattcaacagtagaaggttagggattaagaaaatgaaaagtgaaagaaaagagggacatttcaagaaaaaaaaagtttcagcagcatattatcttttaacacacagaaattttaatggtgctta

SEQ ID NO: 607723 - DNA, 564 bp, Homo sapiens
gtttttgttgttgttgttttgttttgttttgttttagacggagtcttgctctgtcacccaggctggagcacagtggcacaatctagatcttggctcactacaacctctgcctccggcattcaagcaattctcctgcctcagcctcccgagtaggtgggattacaggaatgcacactatgacggctaattttttgtatttttagtagagacggcatttcaccacgttggccaggctaatctcaaactcctgacctcagaagatgctcccgcctcagcttcccaaagtgctgggattacaggcatgagccaacgcacccggccaagaggattttacctctaggcaaagcccccacaagggaatttcttcaatatgaccattgtgctcagctactgcagaaaaaaatgccctattgatgagggggtataacggtggtccagaaaattcaacagtagaaggttagggattaagaaaatgaaaagtgaaagaaaagagggacatttcaagaaaaaaaaagtttcagcagyatattatcttttaacacacagaaattttaatggtgctta

SEQ ID NO: 607724 - DNA, 513 bp, Homo sapiens
aagggtggtaactgtatttcaggcatgaacattagaggatttttcatyagtctaactatagctggtagtgggggtgctgccatttatcaatttaatttttgcttgcaaacctggccatcatttacaaatttgtgtttttccatcctggttgctaatgtcttaattcatattttatcattttattgtatttgtaagacttctcaagtcctttgtgatgtaaatatggcccattaaaaatgaaaataaacagcccaatatgttcgttaggttggcttaagaaaaattattaaattacaaattaagctacaaaaataaataaatattccattttatgctctttgggttggtttaagaaaaatgattaaattacaaattaaataactgttctttattttccccacaaaactattctgtatgactgcttgtaaatacacagctttattttccaaaggccctctccctttcctttgaccataagataaccattctacaaaatgtaaaggagagcaaact

SEQ ID NO: 607725 - DNA, 513 bp, Homo sapiens
aagggtggtaactgtatttcaggcatgaacattagaggatttttcatcagtctaactrtagctggtagtgggggtgctgccatttatcaatttaatttttgcttgcaaacctggccatcatttacaaatttgtgtttttccatcctggttgctaatgtcttaattcatattttatcattttattgtatttgtaagacttctcaagtcctttgtgatgtaaatatggcccattaaaaatgaaaataaacagcccaatatgttcgttaggttggcttaagaaaaattattaaattacaaattaagctacaaaaataaataaatattccattttatgctctttgggttggtttaagaaaaatgattaaattacaaattaaataactgttctttattttccccacaaaactattctgtatgactgcttgtaaatacacagctttattttccaaaggccctctccctttcctttgaccataagataaccattctacaaaatgtaaaggagagcaaact

SEQ ID NO: 607726 - DNA, 413 bp, Homo sapiens
cacaaatgggcattcctgtcccggggcgttcctgcagtggctggcatgctcacttcaggtgaggacctcgagagccggcctcctgccctttctaaaggcttctgctgtagttcaacctgggaagttggggaggtcttgaaggagaatggagctcagagcgcagaggtcctgcctgggtacaggagccttggctaattgctggagtcactcagagaaagacttgcggggcatttgactgggctgtccatgttgtggctgcaacatgagaggctcacagacgttyctggaatggacagttaaccatatgaaaaagtacagatgttgcgccatagggctctgaaaagggagggccccttagtttttatttctcaagaggaaaacaaagctaacaacttaagccaaatcgcatagcc

SEQ ID NO: 607727 - DNA, 517 bp, Homo sapiens
ggaatatgtgctttgtggggagacatatgtttcatggtcaaataatcttagaaaattctgggttactttaayttgaaaactttctgaatccaaaacttctcagggcccttagtatgctaatgtcaaagggttgggtaattatatatactgttccccaaacttctttgcctttggaatcctttgaagaatctattgaatgaacacctaatgaatgctggtgttctggggaaaacagtttgggcatctctaaaggttatttttattttaccagcatattcctgagagtcctcaggccttcaagggcaaagaaataaaattttaataatagaatttcaggcactccaacagatgttggagatattttggacaaccatccttattcaaaccataccatataagttaaagcttctactcaaaagatatcctggtttctgaacattctgaataacacttaaacaagaatcttgactatgtaaaaaaacaggaagagttaagataaaaaacaaaacaaaaaaaa

SEQ ID NO: 607728 - DNA, 517 bp, Homo sapiens
ggaatatgtgctttgtggggagacatatgtttcatggtcaaataatcttagaaaattctgggttactttaatttgaaaactttctkaatccaaaacttctcagggcccttagtatgctaatgtcaaagggttgggtaattatatatactgttccccaaacttctttgcctttggaatcctttgaagaatctattgaatgaacacctaatgaatgctggtgttctggggaaaacagtttgggcatctctaaaggttatttttattttaccagcatattcctgagagtcctcaggccttcaagggcaaagaaataaaattttaataatagaatttcaggcactccaacagatgttggagatattttggacaaccatccttattcaaaccataccatataagttaaagcttctactcaaaagatatcctggtttctgaacattctgaataacacttaaacaagaatcttgactatgtaaaaaaacaggaagagttaagataaaaaacaaaacaaaaaaaa

SEQ ID NO: 607729 - DNA, 585 bp, Homo sapiens
caattaatagaaatatgtatgggttcttgggaaaggaagagagaggacggagatcttagatttggataggtaatctgtgaatctaatcatatagacattgtcacctcctggagaacatattatttcctacaggattaaagaaatgacatatgcaaatcacctagtacacacaataaatactaatttttamttttacattgcttttcctaaatgaagtgacttcacaagacaaattgataatttgggggtcacagttcagatgaaaaaaagtaagttaaatggcttacaaccacttttcctgtactacttccttcctccactacttccttcctatacttcttccttcctgcactacttccttcctgtaccacttccttcctgtaccacttccttcctgcactacttccttcctgcactacttccttcctgtattacttcctttctgtactacttcctttctgtactacttccatgctcacattcctgaagcctaagaaaagtgtcctaaagcctaactgaccagggctggaaaacttggccaccaagatatgcagcaaattattaagtctcctaatttttcccact

SEQ ID NO: 607730 - DNA, 585 bp, Homo sapiens
caattaatagaaatatgtatgggttcttgggaaaggaagagagaggacggagatcttagatttggataggtaatctgtgaatctaatcatatagacattgtcacctcctggagaacatattatttcctacaggattaaagaaatgacatatgcaaatcacctagtacacacaataaatactaatttttacttttacattgcttttcctaaatgaagtgacttcacaagacaaattgataatttgggggtcacagttcagatgaaaaaaagtaagttaaatggcttacaaccacttttcctgtactacttccttcctycactacttccttcctatacttcttccttcctgcactacttccttcctgtaccacttccttcctgtaccacttccttcctgcactacttccttcctgcactacttccttcctgtattacttcctttctgtactacttcctttctgtactacttccatgctcacattcctgaagcctaagaaaagtgtcctaaagcctaactgaccagggctggaaaacttggccaccaagatatgcagcaaattattaagtctcctaatttttcccact

SEQ ID NO: 607731 - DNA, 585 bp, Homo sapiens
caattaatagaaatatgtatgggttcttgggaaaggaagagagaggacggagatcttagatttggataggtaatctgtgaatctaatcatatagacattgtcacctcctggagaacatattatttcctacaggattaaagaaatgacatatgcaaatcacctagtacacacaataaatactaatttttacttttacattgcttttcctaaatgaagtgacttcacaagacaaattgataatttgggggtcacagttcagatgaaaaaaagtaagttaaatggcttacaaccacttttcctgtactacttccttcctccactacttccttcctatacttcttccttcctgcactacttccttcctgtaccacttccttcctgtaccacttccttcctgcactacttccttcctgcactacttccttcctgtattacttcctttctgtactacttcctttctgtactacttccatgctcacattcctgaagsctaagaaaagtgtcctaaagcctaactgaccagggctggaaaacttggccaccaagatatgcagcaaattattaagtctcctaatttttcccact

SEQ ID NO: 607732 - DNA, 593 bp, Homo sapiens
catagtaggcactcaataaagttaatttcctccctctttaattaagtactttctttttttttccctcctccccataacttactggctagctgtttggccagtattgagtcatrtggaaacgaccttgttctgttgggagaagctccagaacctatacctttgaacttggcttagacttatactggaagttgagagttagagaggcccaaagccccagacagggccaacccaagtgtatctacctagagaagtccatttcaacatcaacctcttctctttcatcctttgtccagagctctccctttcctcagccatctggagacactctgttcacctgagcctgctaacacagcagacctatgcccaattcctggggcatggcctccttgccctcccccaccaagtctttagtttaaggttaaataagtcaagtaagaactaaagtgttcatgacccatagtggttaaatgtcttcacattctttaatagcatttgtatttcagcaaaataaattatgataacatttgtattttaccaacatatgataccccaaagcagtgaaatactatgtaccaaaaaagaatattattgta

SEQ ID NO: 607733 - DNA, 648 bp, Homo sapiens
gtaattcacagattcagcccattttccttgtattggtctttaccagacatggcttacagtaacaaaatcatgaaacaaaatattctattttatatgttcatcttctgtctttgaaagttcaagaaacaagggctctgatacctgatttggttagtgtttgaaggttgccaagctgcgttgcakgtaataatttgggcttaggtaacgtggattgtcataaaatgcatgtaagcatgggttagtgctgaggaatagaatattgaaagtcaccagaattcagtattccactgtattctcgcatctgtcctcatcgccacctgatgaagcaggtgttacatccttctcattttatagatgaaaaaactgaggtgagatgctagatgatttgccaagggactcaaaataaattgttgaaaactgggatatgaatccaacctacctccagagtccatactcttgcccctacctgatgatgccttttatcataggtaataagagtcttgtcctgttccaactatctcaaattccaatcaggtttaaagaactgggagctcttcagtataaaattaccctatagggtctcaattttgttggaaaaggaagtgaatgctttgaattccaagttgcagcttttaaaattcttgatgc

SEQ ID NO: 607734 - DNA, 602 bp, Homo sapiens
tgtgtgcgtgtgtgtatgaagtgattttattatcttgaataatagtattatatttatcctgcatttcaaaaaggtagattagtttagaaagaaactattttgtgggtatgaaaagcaaaacttgatccttctgttgatactaatttatttaacaccaagtttgtgcaaggtgctgtgatatatatgatgtatatgatgtcatatgatatatgatatatgatgtatatttagatatatgtgtatgcatgtgtgtgatatacatgatgcttacaaatatatgaattatatatacaggttaatatacaaaagtttattgacttatttacgtacatatatatggattgatcttcaaaacatcatattgagtggaaatatcatgagatatgttaacatacaatcaacctgggaggtggaggttgtggtgagccgagatcgcaccactgcactccagcctgggcaacaagagcaasactccatctcaaaaaaaaaaaaaaaaatgtaggtacacaagacagcaataaatagttcacattactacacacaaagagaaacgtgcattttaaatacattagaatggctacctattaggaatgccaatagaa

SEQ ID NO: 607735 - DNA, 521 bp, Homo sapiens
gttggtgaggaggagaaaggcatagatatagtcatggtaacacaagtcatatgtggtaagatctactgagcatggggctatcagagaaagcttcatgagggtgacatggaaagggagccctgagggactggtaaatttccatcartgacattccagggagagaggccccaagacacaggggcagcaggtggtccactgtgctcctgccctggacagggagggcggggtcctctgctgtttgtttgcttgtgtaggaattttcccctcaagcaatgtccttgtctcccatgggagaagttttacatgagtgggaacctgtttctcttctctatcccaggccattccctgagagaagagaaaggggaatcttttttttttttggacagtttcgctctgtcgcccaggctagagcacagtggtgcaatctcaactcactgcaaccttcagctcctgggttcaagtgattctcctgcctctgtctcctgagtagctgggattacaggtgtgcaccaccatgcctg

SEQ ID NO: 607736 - DNA, 479 bp, Homo sapiens
cacttcatttacatgtatcttattttaaatttaatttaaatgaattatttcggactgactaaaaaactattatattggggttctatttccatttattgatatttttaacttagactgatgtttaatacagattgctcayatagagaacaaataggcatgatgaaattgtttcaaactggttagatggaattggatgtaagttggaaaaacatatttctgtcacaatttaagcagtcagcaaataatcagaacaccttttggtctacttacaggagaggtcacataagtgattccttaactggcactcttgcccccccatccctgtcgtatctatctgtacacttctttcaggacccttttcctaaagcaaatgggtgattatattaccttctttctcacaaattcctaactctctgttatcaactaaatgaagtccagattgggctctagttgggccttccttgttgcctatagttgtt

SEQ ID NO: 607737 - DNA, 568 bp, Homo sapiens
attttactcttagctgcatttttccccatcgaaaactctgttatgattacaatttccctcttccttaaggttgcagctttagctttcatggagccagtgaggctacacagggctacaggacaattgtgttgtgtggtctgtgctctgcacataggccctggcctagtgaggcaaggggctgaaatagagcctgcattccatgtgccaagcccagtgtattagggccagttgggacaactgtgtctatcttttttttaattgttcaatttttttwaatttttttatttttttgagacagcgtctcactctgtctcagtctggaatgcagtggcatgatcttggctcattgtaacctccgtctcccgagttcaagtgattctcctgactcagcctcccgagtaggtgggactaacagtcatgcaccaccatgcccgactaatttttgtatttttagtagagacgaggtttcaccttgttggcaaggctggtctcgaactcctgacctcaagtgatctgcctgccgcagcctcccaaagtgctgggattacaggcgtgagccaccgttctc

SEQ ID NO: 607738 - DNA, 359 bp, Homo sapiens
gagcctggcctcaggtgcttccactcaattagggagctgcaatatatgttcccccaaacctaaccagaataaaatcagggaggaaagcaccccccaggaaggwcatgaaaatgttcatatagtacttttttttttttttttttttttggacagggtcttgctctgtcacccaggctggagtgcagtggagggatcatggctcactgcagccttgacctcctgggctcaagcaatcttcccatcttagcctcccaagtagctggggctataggtgcatgtcaccatgcctagctaatttctttattttttgtggagctagggtcccactacgctgcccacgctggtctcaaactcctggc

SEQ ID NO: 607739 - DNA, 359 bp, Homo sapiens
gagcctggcctcaggtgcttccactcaattagggagctgcaatatatgttcccccaaacctaaccagaataaaatcagggaggaaagcaccccccaggaaggacatgaaaatgttcatatagtacttttttttttttttttttttttggacagggtcttgctctgtcacccaggctggagtgcagtggagggatcatggctcactgcagccttgacctcctgggctcaagcaatcttcccatcttarcctcccaagtagctggggctataggtgcatgtcaccatgcctagctaatttctttattttttgtggagctagggtcccactacgctgcccacgctggtctcaaactcctggc

SEQ ID NO: 607740 - DNA, 470 bp, Homo sapiens
ctatctcacactctgtaatacatttaggttcacctagtttatacatcacagtcccagcttagtgcctgttaagtgctgacaattcaagaatgttgcttaacaatgttttctcattttggctttcaaaaaataagtatgctgggtatggtggctcatgcctgtaatcccagcactttggaagkccaaagcaggaggactgcttgagcccagaagttttgagaccagcctgagcaacatagcagactctgtctctactaaaaataaaataaaacaaatagctgtgtgtggtggtgcatgcctgtgatcccacctacttggaaggctgaggtgggaggattgcttgtatctgggaggtcaaggctgccatgtgatctcaccactacactccagcctgggtgacagagagcaatcttatctcaaattttatatatatatatacatacacatacacacacacatatatatatgta

SEQ ID NO: 607741 - DNA, 573 bp, Homo sapiens
gggtgactgtgagtccagccctaaatgtgtgaaatattgacaggctgaatggttttctaaaaattcattcttatagttgtcatccttctttaatatatggaagttgagctttgcatataacattttaacgtgacaattctctagatgtactttggtcattctaggtttttaaatggactacaagttctaattcctaactaatgccctttaaagagcttttgggtacaagctcaatcaatacaacagtagaaagacattttaataaaaggttcttagcattggaagkgtgaaaactcattacatttcaggaattagattttctttctgaatataattggaatggaaatattttatttggctgatggcagcactataaaccagctccgtagtagactttgacatctatatttactactagatgatgtttgtgcagacctttaatttggcttgaaatgtaatcatgcctagatgtgtttaactaggatcctaatctttgaatctactatccaatactaagtagaatgtgaacgctatgtggcattaaaaatttaaacacacacacacatcatctag

SEQ ID NO: 607742 - DNA, 543 bp, Homo sapiens
tttctgattctaaacctagtacaagccctggctctgccaatttcaattcaacaaatatttatgccactctctaatctaagtcaggtcaatttatctctgtcctcgttttgctcaaccatgatgtgtacgtgcttaaaagggaaattattcatttaaaaatctctatccatctaaatgctggctctaaggtagttttgagctggatagatgacaccactggtccaacttgaacaaagttgtgcttctagatgtctcttcatgtttgcagaggcagatgctaacacgtagaatgtttttataagaatattcttttttctttcttattgaagaaagagctcttagaagaaatattaatcttattaatatacaaccaaataatccaacttttaaaagccaaggctatttgcattaggtgttgaggcaacatatgacaygaatgataatttgcaattgatctagaaaatcaccagtgaaagataagatgattaagtccaaattagctgatgtaatgttctaagctaatccagttaatcagaaagcagg

SEQ ID NO: 607743 - DNA, 543 bp, Homo sapiens
tttctgattctaaacctagtacaagccctggctctgccaatttcaattcaacaaatatttatgccactctctaatctaagtcaggtcaatttatctctgtcctcgttttgctcaaccatgatgtgtacgtgcttaaaagggaaattattcatttaaaaatctctatccatctaaatgctggctctaaggtagttttgagctggatagatgacaccactggtccaacttgaacaaagttgtgcttctagatgtctcttcatgtttgcagaggcagatgctaacacgtagaatgtttttataagaatattcttttttctttcttattgaagaaagagctcttagaagaaatattaatcttattaatatacaaccaaataatccaacttttaaaagccaaggctatttgcattaggtgttgaggcaacatatgacatgaatgataatttgcaattgatctagaaaatcaccagtgaaagataagatgattaagtccaaattagctgatgtaawgttctaagctaatccagttaatcagaaagcagg

SEQ ID NO: 607744 - DNA, 180 bp, Homo sapiens
atcttttaattatctcaaaatgtgggaaatgtgttaaaactgatggtatataaatttccttgaaccagtaattagtctgtttctcttaaattacctattatgtcttcatttctccctaagaaaagctcccatttccatttacctaktagtagaagactttaacaaggttatatcctatta

SEQ ID NO: 607745 - DNA, 635 bp, Homo sapiens
gtttaataaataaaaacaatttaaaccacaaataaacaaaaaaatacttaaaaacttgacttttctattaggctatggaatatttaatgtctgaatccgtattaggaatgaatgaatctctatccaggcctgaggtcattccaaatttgttagaatagaagtgggcagccatattccgagggataacatgctggatctctgttaygccaccaatttaaatacatgccagggaggtgtagaaaagtttcctggggcactcagaataatcctatccctggtgtcactcaactgcctttggaggcattgcagcataggttcttgtgctcagtttcatcaagtgccagctctgaggagcacaaattgctatctgaacacatctaggttatatatgaaaataacatttttctgtcattagagagctgtatcttgagctgtttgctgatacaaggaatgagtctatgtttatttccctacattcttttgtaccagttccctagggttcagaaaatgtataggatttgaagtgagaagaactaaaatcaatttaagcttcactaatttaatagtggtgtaaccttgggtgaaacatataagcactctgagctttaattccttagtctgtgaaatggggataa

SEQ ID NO: 607746 - DNA, 538 bp, Homo sapiens
ctgatatattttattattaataataaacatttaatgttgggcatatggtrtgaagtcatttttaaaattaaatccagttttttactatctaaattaagaatgtcagctttgaagttagtgggttgactgacaatgatatttttgttttttcatttatttcttaaagtgtttaacatttaatgttctaatttaagagttgaagaaatgatgtggtatatttttgaaacttacttttatcaaaccctaaaatacatttttgtttcaagccatatataagaccgttactatgagttggtgttttgaattgggacactttcttttcattagtaatgtatattcccccttttattttaaagtgttccctatagccatcacatattgccacagtttgggggcatatgtgaagacatctgatctgactctcttacttctgaggtaaagaaaccgagtccagtgagactagctcaaatagtgacagatcaaagatcagatgcaaaccccctgaatttaagtccaggactcttttattacaccacac

SEQ ID NO: 607747 - DNA, 502 bp, Homo sapiens
tattgtatctatttcactgaggcaaagagaagttaagcaatttgcccaaggtcataaggccagtaaggaacagaaaagagaaccagaactaaacttttggtctatctttagatgatttataaattttttaacctctgtgtggtattctgtcctgtctctcattcttgagtggtagatgaaatttctaggggcataggtttgccactgaaaaaaaggaaggaaaatgccatgggaactatctgaagcttatgaaaagatgaatttaccggactgattttgatggggaagaattttctttcctacagtcaagaagtgaaccatgagaaagctagaatatttggccgtacctgtgtaagcaagtctttttaaaccttttgagttgttgaatttgttcattcctgactaatttctttacatacagaggggcatgcatacaccagtcaaaaataatgaggagatttttatggatttttattmtaattactgcagaattctctcttca

SEQ ID NO: 607748 - DNA, 212 bp, Homo sapiens
cagtgacacatgttgaactcagagtayttttgcctgtaaacattaaattgaagccctacttctcttactttgagtttcagctctcagtgcctccagacctttggtcatgtactattcaaatggtctcattcaactaaactccaatgaaacccaataaaaagcacttttcaggaaaacatcttggtgcctggtcaatataatcaccacagaaa

SEQ ID NO: 607749 - DNA, 575 bp, Homo sapiens
gttaagaaatataaacataaaagcaaatttagctaggtatatgagggactggagaatgggggaggtggtggtggtatgagtctaggaaataccaaagcacatgggtgtatctacaaataaaggaaatcaaacaaaatatgagccatacatataatgtctgctgtatatggcatttaatgaaactcatacacagtagaattaatctatctttctgaaaaaagtcaatttgctataaaggaatattaccgagaaaaagaaaaatgaaggaactttgactatttctttagcatgaggctattttactcttcagtctctccctccttccctccctcyctccctccctcctttcgttccttccttccttccttctttcttgctctctctgtctctttctgtctttctttctttctttctcactctgtcacccaggctggagtacagtggcatgatctcagctcactgcaatctccatctcacaggttaaagcaattctcgtgcctcaacttcccaagtagctgggattacaggtgcccaccaccatgcccagctaatttttgtatttttttgtaaagaca

SEQ ID NO: 607750 - DNA, 575 bp, Homo sapiens
gttaagaaatataaacataaaagcaaatttagctaggtatatgagggactggagaatgggggaggtggtggtggtatgagtctaggaaataccaaagcacatgggtgtatctacaaataaaggaaatcaaacaaaatatgagccatacatataatgtctgctgtatatggcatttaatgaaactcatacacagtagaattaatctatctttctgaaaaaagtcaatttgctataaaggaatattaccgagaaaaagaaaaatgaaggaactttgactatttctttagcatgaggctattttactcttcagtctctccctccttccctccctctctccctccctccyttcgttccttccttccttccttctttcttgctctctctgtctctttctgtctttctttctttctttctcactctgtcacccaggctggagtacagtggcatgatctcagctcactgcaatctccatctcacaggttaaagcaattctcgtgcctcaacttcccaagtagctgggattacaggtgcccaccaccatgcccagctaatttttgtatttttttgtaaagaca

SEQ ID NO: 607751 - DNA, 396 bp, Homo sapiens
tgagatatgcccaaccaccgcccttcccatcatggcccgaactagtttttcaggtttactttggaatgcccttggccaagagaggkgtccattcagtcagttgggggggttagaattttgtcttacagaactgtgctttactcatttttataacagtccagccaaaagtctgctcttaaagccaatagaaaaagaaagaaagacttaggagtgaatcagtaaacttcaggcatttgtagcagttcatattagacatttgaggaagatctaaacaaatctggggaagatgagaatgaggaagaaaagctggccttccaataggaacttataaaagagtacatgaaataaggctcaaaccacagaagcttaaaagtcatgaaaaatgctaatgaattc

SEQ ID NO: 607752 - DNA, 557 bp, Homo sapiens
agaatcgcgaggtcagaagatcgagaccatcctggctaacatggtgaaacctcgtctccactaaaaatacaaaaaaaaattagccaggcatggtggtgggtgcctgtagtcccagckactcgggaggctaaggcaggagaatggcgttaacccaggaggcggagcttgcagtgagccgagattgcgccactgcactccagcctgggccacagagcaagtctgcatctcaaaaacaaaaacaaaacaaaacaaaaaaataagaaaagtgtcagaaaagccagaggaagaaaaaaacatcaccccaatccatgatccagctattaacattttggcctaaagtttctagttttgtgtgtgtgtgtccaaatagccatttaatttttagacaaaattataaccgcctgaaatgtaccatttaatccctgcccttttcacctaacgatagataatgaacatttgtctcacatcattaaatgatgtcctacaaagtgattttaatggttaaattaaatcactttgtgttaatgaataattatttgattatttgtttaattagc

SEQ ID NO: 607753 - DNA, 505 bp, Homo sapiens
tcagtttcttgataacatatgctaaaattttagatctttttcttctacaacatagcagtattgcaaagcccttatctatctctcctgagaatctaatgctacttcttaacttgccctgtacatgctgtgaaaccaaactgctataatactatgttttttttttaatgtaatgtttggataatcctacattctcattaagaagtgtgctttaacagacatcaaatctcaagcacctacatcctcttcatcaaatacttttctacttgccatttataatataacttacatacagccttatctctgggctcctggaacaccatttgcttacctctctcataggaaaaaatatattacactgacattatctgcttctgtacctgtctcaactttttgaaagtaggttcttcagtaatagagactggacttattaatttctatattccaagcactaagcaaatakttgttcaatatacatttgctgaactgaattatacatttgaatctt

SEQ ID NO: 607754 - DNA, 354 bp, Homo sapiens
catatatgggacattccatcaaacagcagcagaatacaggttcttctcaaatgcataaggagcattctgcaggatagatcatacgttggaygacaaagcaagtgtcaattaacttaaaatgatggaaatgatatcaagtatcttttcctataattttatgaaactagaagtcagttacagaaagaaaattggaaaattcacagataagtggaaattaaacaacgcatgatggaacaaccagtcaaagaagaaataaaaaagattttaaaaaccctcaaagcaaataaaaatagagacacaacatgtaaaaaacttacgaggtgctgcaaagaagttctaagagggaagtttata

SEQ ID NO: 607755 - DNA, 454 bp, Homo sapiens
tcaaatgaggaacctaattttaaaccacaaggaacaagaaacataagaacaaactaaacccaaagttagcacaaggaaggaaataataaaaattgaagcagaaataaatagggaataaaaataagaaaaattaagaaaacctaagagttgtttttttgtaaagataaacacactcaacaaaccttttttaagaaaaaaaataagaaaacacttaagtaaataaaatgaaatgaaagaggagatgcctcagagatttttttagataaaaggttaacaagagactattaygaacaattatatgccaacaaattggatagcttagaagaaattgataaattcctggaaacatacaacctaccaagactgaatcatgaagaaacagaaaatctaaacagaccaatagcaaatgagattgaatcagtaaacaaaaacctcccagcaaagaaaagccata

SEQ ID NO: 607756 - DNA, 469 bp, Homo sapiens
  misc_feature 82: n = A,T,C or G
acaactcaagctgacatatgccacagtgacttacataaaagcaactcgtgcacagatgaactgctcttgaatacagaagacngatttcagttctggacagtcagggtggggattgtatatgtgataataatgacacaaggcagacagaagctatttttaaaagaactgcctggaggccagagggttattcccaaggggagaaaaaaatcagcattactgttttcacttctaagtgtggagctttgactttcccagccctgcaaacagtaaaagctgaacccaacgtagattagtaaaatatgccatagagaataacagggaaaayatggccatactattctgcatagtccattacctatatatctgtggttaatatctctgctacttcatgtggcaaaaagaaatctcaatggatagaaagagaaaatgtacctagttaccttcagtctattacgttgttatcagttag

SEQ ID NO: 607757 - DNA, 486 bp, Homo sapiens
  misc_feature 414, 466: n = A,T,C or G
tcttaaatatttattgaacataaattatgtgccaggacctgtgatgggctccaggggtacagaaatgagatacacttccattcctttaaagagttcacagygggcaaggtgggaaaagaaaaacataagcacatacttacacacatagataaatgggtaactgcaatacagtgcaataagtaaaatagcaaagaaagatgcagaaaaaaagagggaaatctgagtcctgagaaactttgcaaaaaagataatgtcctaacccaacgaagatgaggatttttttccatttgaggaaataggaacatagtattacagacagaagaaaaggcagctcaaagatcataatgtcagtaaagcatgacgtattgggaactgcaaattcctcattatcgatagaacttagctcacagtagnagagaggtagagatcagttttcagagacaagtgagaagatcaaacatgtagnctgcaagactagtgttccca

SEQ ID NO: 607758 - DNA, 602 bp, Homo sapiens
tatgaaatattaataaagtccatagtttagttaatcatatcataccaatcaacattcatttatatatgttgctatttgtactatgggatacaagattttataattatgggacactgggtgaaggggtatatgggaacccccagtgtattttttcaatgtttttgtcaatctaaaattatttcaaaaataaaattcaaagaagtagacattgttatgatataatttgatgagaaagcagggtattagctaatgttgctcattatgtatataccaatgcaatactctttctgtgagattaatgggtttgttacaaggagctaaargacagttttaggctactttggttctcttttgggtagagaacactgcagtgaattgtgggatggtgtaagcctgtggatcctcaagggtagagtatgactagctcttcttggcatccttaggctcctttagattcatcagggctggtcatgtagttgaccgcccaaacatagaaaggatacaaggaatggtatttatggacatgagcttggggtgagactgcttgtgcctgaattcagcttcatcacttgatctgtggtcttgggcaaattaatcactcc

SEQ ID NO: 607759 - DNA, 591 bp, Homo sapiens
gatgggcacttgggctggttccatatttttgcaattgcgaattgcgctgctgtaaacaactttatatctttttatataagtgtctttttcacataatgacttcttttcctctgggtagatacccagtagtgggattgctggatcaaatgatagttctacttttagttctttaaggaatctgcacactgttttccatagtggttgtactagtttacattcccaccagcagtgtaaamgtgttccctttttgccacacccatgtcaacatctatttttttttattgtggccatttttgcaggagtaaggtggtattgcattgtggttttgatttgcatttccctgatcattagtgatgttgagcattttttcatatgtttgttggccatttgtatatgttgatattttgacctaccatgaatcacaaatgttcttaatggcatctagaatagtgaatcctttccacaggttttcagcttactttgcacagaaccatgagtgggatcactatctatggcagttataaccttacaaagtgcatttgttaaataacttgaacgtcaaaattactccttaatccatgggctgtagga

SEQ ID NO: 607760 - DNA, 478 bp, Homo sapiens
tgttggccagactggtctcgaactcctgacctcaagtgatcctcctgccttggcttcccaaagtgccaggattacaggcttgagccaccrcacccagccacacattaatttcttttaaaacatttattgtgtgtttaataagaataagatattgccttgctggtaggaaaaagtacccctaatgcataaaccactgaattaaaatttttaccaaaattaatgctaactttgttcttcatctttgaagtccatatatgtatgtagtttttgaatggctgagactcattgtaaaatgtggtaataacatgtcttagaacgtgatatagccagctaaggagtaaaacgtaggtaccttatgttttcctgaatattctagtcataagctttcctcacctaatataataccacttcatatcaattttacgcaaaattaaaattttcatctctacattccagtagcagtgagtgtgtggttttg

SEQ ID NO: 607761 - DNA, 600 bp, Homo sapiens
ctctgcattacaatattatctaaatttcttgagaaaatatgtatgaatgggaatctttctaaatcctttaatattagagcaagacgttattttccttcaaatttaaattataattttgttgggtatataattattgttacagaaaaacttgccatgaaaaaatcattccgtattacaaagtgaaaaatctgattactacatgattctcatttcttctgttgtaaactttatttttatatctgagcatttggaatttattcattcttgaaagatagatgataggtaggtaggtagacagacagacagacagatagataggtagataraaaaactgtacatatagttttattctgtcttggagaacttgatccacagaacaaaagcatctgtatatgccttttcataaagagcatcgagtaatctgtccttagtttctttttttctgaaattatcttacttaacacttaatgtgtcttaagttatccttttattctaaagacaaaaatttttaactaggcaaatgttcttatatgtcatgttttactatttgttctcttcagtattttctgccttctccttctggattttattcaaatgttt

SEQ ID NO: 607762 - DNA, 449 bp, Homo sapiens
ttaaatggggctcacccacctaatccaggtaatctctatctgaaggttctttactttaatcagatttataaagttccttttgtcatgtacggtaaaatattcacaggttccaaggattaggacaggaacttctttggcgggacattattttaattacgagagtacacctggatttccagatttatttcctctactcatggtgtctgctgggttctgcctaaattgctcttcattgtactatggcctggaaactctctcaaggcatcaagctagggaaattatagatcttatgtcatttacgtctttcagagatttctgttcttcattgtttgatgtcttgtgtcttgaaaaacgttgtattttgtatttttygtttgttcattgtttcaagtggaataagcctggcccagattacccccatttatttggaagagaaattctgtgctaaa

SEQ ID NO: 607763 - DNA, 505 bp, Homo sapiens
tccctcaatccctgtcagcagtggtccagtgatagttctgtccttccagtggtctgcagagagacctggcagaagycctcccaggatacagtgggagctatacttgcccttagagctggtaacagatcaactgtttgagcatcctgaagtggacccttgtcccagtgccactactactgaccagaatactggaggcagtcccatcatgtccaggtatgaggcaggatccacacttcccaagcctctagtaactgaagacatactgtgaacccagaagcaaccacgtgacccagctccaacatcactttactgcaattccagagaaattcctgttgtctagggggattgagtgtcgatctttacctgtcttatatagagactggaagagatgtctgctctttcaaatatatagacacaaatggcaggatattcaaatcatggggaatcaagcaaatataacaacaccaaaggaaactaataaagctccaataacctaccccaaaag

SEQ ID NO: 607764 - DNA, 413 bp, Homo sapiens
atccagtggtcttgtaccactgagaagtcaactgtctttccagttaatattctattgaagtaactagtctttttatctgactacttttaaaataatcacttgtttttacagatccttagtatcactaaaatatatccatgtttgaattttgtttcattcacattgttggcaatagttttacagatccttaatatcactaacatatatctatrtttgaattttgtttcattcacgttgttggcaatattttaagatagttccaatcttctttttagaggacatgggacttcaagagctattgttaaaatctacctctttagcattatgcattgctaggaactgactcaccttatatctaataataacaaacaaatttctcaaaatatatcttcatatcatatcttcataggtgt

SEQ ID NO: 607765 - DNA, 399 bp, Homo sapiens
acaactgacatgtaatttcatgaagcatgaatgtctccaaatagttaagtgtaaagatatctgcataggggcatagtatagtcaaattgtcaaaagtcaaaaacaaagaggaaagttggaaagtggaaaaaaataaaagcaactcctcacatgagccctgcataagactgtcagtggatttctcagaagaaaccctgcaggccaagaaagastgggatgaacactcttccccagacaaacaataattaaagaagttcatcaccactagacctatgttaaaggaaaagctaaagggagtttttcaacttgaaataaaaggacactaattagcaacatgaaaacctatgaaatgataaaactcactggcaaaagctaagtattatatatgactaaatacag

SEQ ID NO: 607766 - DNA, 568 bp, Homo sapiens
ttgtatatgattaaagttgctatcagcttaaaatagactattataactagatgatattttatgtcagctctctggttaatacaaataaaaaacctgtaatagagagacagcatatgaggaaagagaaatcaaagtatatccctccaaaaataatcacataatcacaaaacaagacagcaagagaggaataaagccaaygaaggaactacaagaaagtcagaaaataattaacaaaatgaaatttactttaaatgttaatgaattaaatttcctaattaaaatacatagagagtagctgagtggatttttaaaaaccaactatatgctgcctacaagactcactttaattttaagaacacatctactgaaagcaaagggatgaaaaactgttccatgcaaatggtaacgaagagagagccaaagtggctattcttatatcagacaaaatagatcagtcaaaaactgtcataaaaggcaaaaatgttactatatattgataaaaatgtcaaacaaaaggatatagcagttataaatatatatgtagccaatattgtagcacctaaacatg

SEQ ID NO: 607767 - DNA, 568 bp, Homo sapiens
ttgtatatgattaaagttgctatcagcttaaaatagactattataactagatgatattttatgtcagctctctggttaatacaaataaaaaacctgtaatagagagacagcatatgaggaaagagaaatcaaagtatatccctccaaaaataatcacataatcacaaaacaagacagcaagagaggaataaagccaatgaaggaactacaagaaagtcagaaaataattaacaaaatgaaatttactttaaatgttaatgaattaaatttcctaattaaaatacatagagagtagctgagtggatttttaaaaaccaactatatgctgcctacaagactcactttaattttaagaacacatctactgaaagcaaagggatgaaaaactgttccatgcaaatggtaacgaagagagagccaaagtggctattcttatatcagacaaaatagatmagtcaaaaactgtcataaaaggcaaaaatgttactatatattgataaaaatgtcaaacaaaaggatatagcagttataaatatatatgtagccaatattgtagcacctaaacatg

SEQ ID NO: 607768 - DNA, 580 bp, Homo sapiens
ccatgctgtgagtgttgtaggttgaaagttaaaaaaaaaataggaggtttgaataagtctccaaaatttcacgtgttagaaacttaatcccaaaattaatatgttgatagtatttggaggtggggcctttgggaggtaattatgattagataaagtcatcaggttatggcctcgtgatgggactagtggctttataagaaaaaggagagagacctgagctggcatactctttccctcttaccatgtgaggccctccaccatgtatgttatattccagcaagaaagccctcaccagatgcaggcccttgatgctggacttctcagcctccagaactataagaaataaatttattttctttgtacattattcggtytgtggtactctgttacagtgacagaaagcagactaaaacaattatattaaggacacaggagcacagttgtttcggtgaggaaagtatattgttttgaatgtgtttgtttgctttcaaagcacttgagtatagccaatgaagctctaattaaatggttagattaatagatggtctgaatttgggatcatcaaactattaggaaaaat

SEQ ID NO: 607769 - DNA, 597 bp, Homo sapiens
ccagcctggccaacatggcgaaaccctgtctctactaaaaatacaaaaaattagctaggcatggtggtgaacacctgcattcccagctactccagagactgaggcaggcaggagaattgcttgaacccagggaacagaggttgcagtgagccgagattgtgccacttcactccagcttgggcgaaagagcgacactccatctcaaaacaaaacaaaacaaaacaaaaaaaacacaaaaataacctatggtgtaaggaatcaagatagtggggtgatgtttggtggtgggagtcatttggaaggaacacaagcggggctttgaagtgttaataatgttctrtttcttgatttgggtatttcttgatgtaaaaattaactttgtgttaactttataaaaataatctttttttctttgcatttttccatatgtgtattacatattaattacatctttaacaaaaaacatattggtgactagttgggtgccttgtttaaaggaacatacattattcaacatcagcatattattgtcatgctaagaatgtggactctggtgttgtacaatatccttgtttttaaagggaagtttatataaat

SEQ ID NO: 607770 - DNA, 585 bp, Homo sapiens
cttaaaataatttattattattatatctgatgattcttggggctaagaatttagatagtacccagtgcagatgactcatcttgttctgatgctcgggacctcagctgagatgacataaatgtccataggctggaacaattgagggctggctgagtatctcttttctctcgttttctctctcattttctgccaaaasccatctgcagcctgtggttgtgcagaccacaaacaaaaaggttttcaaattttttaatgtttaaacaaatctaaagaagaagactgcttcttcatgaggtgtgaaacatatgaaattcaaatttgtgtctataaagatttattggaagatagccacatatgtttgtttaaataccctatcatctctgtaattgcagggttgaaaagttgcaacaaaaaccatatatgatgcaaaacctaaaatacttaccatttggccctttacagaaaaatttgctgatctctactttacatgacttctccttgtggctatcttgggctccctcacagcgtggaagccacagtgtagttggatttcttagttgaaggttcaaggcttcaagaatgagt

SEQ ID NO: 607771 - DNA, 510 bp, Homo sapiens
actccttagtgaatctaatgccaccgctgatctgacaggaggtggagctcaagcagtaatgcgcaatggcttgcaactcacctcctgctgtgtggcctggttcctaataggccacagatggataccagtccacagccctggggttggagaccccttatctagaggacaggcttgtgttcttggcagggagttggatatgaacatacagatatatcccagaatttggagaaaacaaacaaggttctgagaaagaaagtaacttagagaggcttcttttatgtaggatggtcagggaaactccattgaggaagtgacatttatgctgttaccagaagraagttatgtagagtggttggtgggggtgaaccagaaaagcatcttgggaagaatgaagagctaaagccctgaaataggaaagcatgacatttctaggaatagaaaaaaatcagtgtggccagatcataacgtgaaccaggtggaagtgtattaaatgggttgagaaataataca

SEQ ID NO: 607772 - DNA, 510 bp, Homo sapiens
actccttagtgaatctaatgccaccgctgatctgacaggaggtggagctcaagcagtaatgcgcaatggcttgcaactcacctcctgctgtgtggcctggttcctaataggccacagatggataccagtccacagccctggggttggagaccccttatctagaggacaggcttgtgttcttggcagggagttggatatgaacatacagatatatcccagaatttggagaaaacaaacaaggttctgagaaagaaagtaacttagagaggcttcttttatgtaggatggtcagggaaactccattgaggaagtgacatttatgctgttaccagaaggaagttatgtagagtggttggtgggggtgaaccagaaaagcatcttgggaagaatgaagagctaaagccctgaaataggaaagcatgacatttctaggaayagaaaaaaatcagtgtggccagatcataacgtgaaccaggtggaagtgtattaaatgggttgagaaataataca

SEQ ID NO: 607773 - DNA, 438 bp, Homo sapiens
cgccaagaacatcttaagtcacagaaacattaktttttggaagcagggtttgctgtaactatagtagaaatgacattctgattccactcctagcttcacaaggatatctgtgaaagatttggggcaaaactgttaagctgtctgaaagtgcttttgcataagaaatgggttttactgctaaaactgtcatattgctgagttttgaatgccctaatggtaaatgatactgggttgccaaaaataaccagattagtagttttttcattcatttggccgtctcagtaagtcaaatattgatactttctactaagtcatcttgccaacacccattttgttatacttatgctgaatctgtttgtcatctcttaagtaagaaaattattgattattttgtggggatttaatttaaaaaaaatggtaatggatactgtaaaggag

SEQ ID NO: 607774 - DNA, 513 bp, Homo sapiens
aaatgttccttctttactaaagatagagaaaccattttctgatgtacaaagggatgaagagctggcccaatatgaattttcccaaagaagttaaatgaaaaggatctcatgatccttttcaggatttattatttacgaatgttaatatattattttaatattttctatcttatgaaataattatttggtcaaaacataagacaattgataggaatatacagcatggaaaatggttaccaactagagctgcagggtatcagggaatgtgacaaggcagcaaaatgtttctacacatgtctgttttttcaggcattatctttcwtgagactatcaagtgtgtatttaaggagccattcaacttacttcagtgcatttgcttgcaaagggtgcaatgtgatgtttcctactggtagggtcgtatttcatatgtggtgatagtgttgctgaacaaataggaaatatccttgcctagactatattttatcatttcattatctagtggtaaaggaatgt

SEQ ID NO: 607775 - DNA, 499 bp, Homo sapiens
tcttcccctccttaaaccctggcattctccaggatcctatcttctggttcttcctctgcacactctcctggctgctgttctctatcctccctgaaccccaacccctttgccccagtaagcaccacacctacaaatcacaaacctgcatctgccccaggaaaaggcacctccatctcctaggagtcacccttcacatttcctgggtcctccgggctttaaaatatagactttgctggccgggcgcggtggctcacccctgtaatcccagcactttgggtggctgaggtgggcggatcacctgaggtcagaagtttgagaccagcctgatcaacatggagaaaccccgtctctacttaaaatacaaaattagccgggcatggtggtgcatgcctgtaattccagcyacttgcaaggctgaggcaggagaatcgcttgaatccgggaggcagaggttgtggtgagccgagattgtgccactgcactccagcctgggcaacaa

SEQ ID NO: 607776 - DNA, 573 bp, Homo sapiens
tccctgcagctcaaccattccagtttcackgtaattcttttctctcttcttgagaagcaataagcacagctccttccatgacaatgtccaaagtaaataggggtgggcgcagtggttcatgcctgtaatcccagtactttgggaggccaaggcaggtggattgcttgagatcaggagttcgagaccagcctgactaacatggtgagaccctgtctctactaaaaatacaaaaaattagctgggcatggtggtgcatgcctgtagtcctagctactcagggggctgaggcaggagaattgcttgaactcggggggaggaggttgcagtgagccaagatggcgccactgcactccagcctgggcaacagagcaggactctgtctcaaaaaaaaccaaccaaaccaaaacaaaccaaaacaaaacaaaaaccaaaacaaagtaaatagggagtgcagggaacttttttttttctcccaaaactttttttttttgtttttttggagaaaggcagaaaatctttctcataaactctccagaagacatctccttcatatcaccagccagaactaggtcc

SEQ ID NO: 607777 - DNA, 435 bp, Homo sapiens
agaatgtcactacccaagctatggggcctataggacctcatgtgctccttcccagccacagcagctttttctrgatctcagccctccatgtctactccatttggggtttgccatgatgacaatttcctgtgtgcatcggaaagcaagaaaagtggaaagagagtaagacaagtgcaccaaggcagtatcctggagtctctcttcgcccaccctggataagccgtggccagacctgtcagagctggccctactaattgctacttccatgtcgggaggtcaccaagtgggagtgtgaggctgcattccagtggtggtagaaggccccaccagccacacctgcccaacactcccacagacactgagcctgctgaagtacacttggcctgttctaccatggacagcaaggtgagcaattaggcccaggaatcagaaaac

SEQ ID NO: 607778 - DNA, 598 bp, Homo sapiens
ctgctcagtcaggatggctgggagcctgaagagaattctcaacccaaaaaaagggtaatggagagatccccagggattcacatcccttctgcagactcctgcaatcctagccatgggagaacctctcaatgccctcaggccctgagactaacgtagggagctgcctggagaccatgaaacagcaccactccagagatgaatstcacactgtatcccacacacccccaagtcataagcagctaagcaaggcaccatagtgagagtctagtcccccctagactacctcctaccctcaggcccaaccacccctgcatctccacctccctggagtcccattgacatgcttcatctagagccatgactgcagttgcctgcagccaccatagctgaaacacaagccattggcaatgacacactgccccagcagcagcactgccatgcatttttacatgccccaaagtcagactcccctgcctgcagtgaccaccactgctggctgcctccactgaagcatgggccactggccgtgactccactgcctccagtactggaattgccatgcattcaaaagtgtcttgaggaaagaatctctcaccca

SEQ ID NO: 607779 - DNA, 308 bp, Homo sapiens
ccactggccgtgactccactgcctccagtactggaattgccatgcattcaaaagtgtcttgaggaaagaatctctcacccacaactaccatctggggcaaaagtgcacacttttgagccasctacctacagttgttgccacagaaagcagcccagccctccccagtagcagggctatagcacattccaccagggacctgagaatcacctcgcccctgtgcaccacagctagcatgtacatggactaccagggagcctgaggacatgtccttctcacctagctccaccctgtcccccgtgtggctaagc

SEQ ID NO: 607780 - DNA, 572 bp, Homo sapiens
aagatcttcttcacaatgaattatcattaaattatcaaaggacaaagataaagagagaattctaaaaacagcaagagaaaaggatctagtcacttataaggcaatccccatgaaagtaacagtggattgctcagcagaaaccttacaggcaagaagacagaggatgatatattcaaagtgctggggaaaagaaacaaggatactataccccctaaagttatcctttataaatgaaggagaaataaagtctttctcagacaatcaaaaactgagggacttcatcatcactagcccagtcctacaagaaatattaaagggagtcatgcctggaagaaaaaaaaatggtatccatgacgatgacaacacacgggagtataaaacccactggtagagcaaacacagaagagaaagaactgaaatgttaccactatagaaaatcaccaaattacaatgataaacaataagagacaaagataggaccaaagatacacaaaataaccaaaaacyaattaataaaatgacactaataagccctcacatctcaataatgaccttgaatgtaaatggattaa

SEQ ID NO: 607781 - DNA, 512 bp, Homo sapiens
aacaaaatggacctaacagatatttgcagaatatttcatccaacaaccacagaatgtacattcttctcatcagcacatgaaaacttctccaggacagaacatacgttaggatgccaaacaagtctaaaaaaagttttaaatattgaaatcatatcaagtatcttcttggaataaaaccagaaactgatcacaatgggataaaactataaatcaataatgaggaattttggaaaccgtacaaatacatggaaatagaacaacatgctcatgaatgaccgttaggtcatgaaaaaaaataaaagaaggaaataaaaaaatttyttaaaacaaatgactattgaagctatggattacataaaaacagtgctaagtgagaattttacagcattaaatgcttacatcaaaaaagcagaaagattttaaataaacaatgtcacccaagaaactaggaaagcaagagcaaaccaaacccaaaattggagaagaaaagaaataatgaagaccagagcaaa

SEQ ID NO: 607782 - DNA, 535 bp, Homo sapiens
tgaaatcaacaaaacatccaaagattatataccatgattaagggggatttatcccagggacacaaggatggtttaatacacagaaacctataaacataaatcaccacatcaataccataaaggaaaaaacatacaattattttgatagatgaagaaaaagcatttgataaaattcaacatctcttcatgatacaaacactcaacaaactaagcacagaagaaacatacttcaatgtgataaagtccatgtatgggaaacacacagtcaacatcattctaaatgaggaaaacctgaaaacctttcctctaagaactgaaacaagacaaggatgcccacgttcatcactcctgttcaataaggtactagaagttctagtcagracattcagacaagagaaaaccatccaaattggaaaagaagaggtcagatttttactctttgcagatgacatgatcttgtatctagaaaagcagaaagacaccaccaaaaaactcttagattttataaataaattcagtagttacaagatacaac

SEQ ID NO: 607783 - DNA, 537 bp, Homo sapiens
aagtccatgtatgggaaacacacagtcaacatcattctaaatgaggaaaacctgaaaacctttcctctaagaactgaaacaagacaaggatgcccacgttcatcactcctgttcaataaggtactagaagttctagtcaggacattcagacaagagaaaaccatccaaattggaaaagaagaggtcagatttttactctttgcagatgacatgatcttgtatctagaaaagcagaaagacaccaccaaaaaactcttagattttataaataaattcagtagttacaagatacaacatcaaaataaacatcaatagcatttctatacaccaataatgcattagctaaggaagaaattataaaggcaatcccatttacaacacctacaaaaaaraagaatacccaagaataaatttaactaaggagatgaaaagttttagaaggaaaactacaaaacactgatgaaaaaaattaaagaacactaaaacaaattgaaagatattccatactcatgaagcagaagaactactattgttaaa

SEQ ID NO: 607784 - DNA, 388 bp, Homo sapiens
gaattcagtgatggaaaagcctaataattctaataattcaataggaatgaaaaggaacattcacttggtgtagttaacagaagaggttaaagacacgaaatgcaaacaaaagcaatgtgggcttgaccatgaaacatgtgctttattggggagaagcaaaagaataaacacacttgctctcaggataggaaccaccatctacatcacagacagcaaagcgagattaggcartgatctggctgctcatcttccaacaacatatcggttttcagaactaagccttttctctgtcaacgctcaagccagacagaggttagggaagatgcagcctcccactacagctgaagggaagatgatggagtcctgggagtaagaagagccactggat

SEQ ID NO: 607785 - DNA, 524 bp, Homo sapiens
taggcagtgatctggctgctcatcttccaacaacatatcggttttcagaactaagccttttctctgtcaacgctcaagccagacagaggttagggaagatgcagcctcccactacagctgaagggaagatgatggagtcctgggartaagaagagccactggatcttgttgtttcatggtcctgatgaattctagtgatgttacttgctcttgggtggatacttctgctggcagggtgggtatggttgcacaggagggcatttatcctggcatggtggaggtgggcaatgctcaggtggacaaggaggaggcaggtaaggctcagggcacttcgggggtggacatggctctgggcactttggcgtggggcacacaggaggtggctggcagggctgcttgcactgctgctgctggtaagacatctctcctcagtctcagagaatctgaaagatacatacgaaacagtgctcataagagagacagtcctgttggtggagcaattagctaggacatcaaatctccag

SEQ ID NO: 607786 - DNA, 524 bp, Homo sapiens
taggcagtgatctggctgctcatcttccaacaacatatcggttttcagaactaagccttttctctgtcaacgctcaagccagacagaggttagggaagatgcagcctcccactacagctgaagggaagatgatggagtcctgggagtaagaagagccactggatcttgttgtttcatggtcctgatgaattctagtgatgttacttgctcttgggtggatacttctgctggcagggtgggtatggttgcacaggagggcatttatcctggcatggtggaggtgggcaatgctcaggtggacaaggaggaggcaggtaaggctcagggcacttcgggggtggacatggctctgggcactttggcgtggggcacacaggaggtggctggcagggctgcttgcactgctgctgctggtaagacatctctcctcagtctcagagaatctgaaagatacayacgaaacagtgctcataagagagacagtcctgttggtggagcaattagctaggacatcaaatctccag

SEQ ID NO: 607787 - DNA, 643 bp, Homo sapiens
aggcctatctagtgaagatcctttccctgcatcccccattcttctagctgtagtcactactaattagacggcatgggtaccatagcacctacagggtcggcaccttgttttcctgagaaagcccctctcagggaagatttttgccttgtgctctttacccagaagaatgctgtgttgtatctgcaatgtttcaaacttgattgggttggtacagtagagaaacaaaaaaaactgaggacctaacatgggaatttgaagaggtaggaacgtctttgagttgagccctactattaaattctttctcagcatctcagaggaacaayatgaggctagttatccctccctagtactctgaaactaaacaatttagtcatctaagttactatcaggaaactgacacacttcagggatgccagaaggaacagggatgctcctgggatgggtgaggcactttcacagcgttctttctcatgttgaaatcctaggaaccatagctgatgcatgctgaagaattagctaaggattacgtgacttaaaacagttctatcaacacaattttagacctacttttctttgcctcatgaattactaatagattccaaagttatttttaccaataaattatttggtttatcatttatgc

SEQ ID NO: 607788 - DNA, 630 bp, Homo sapiens
gatgctcctgggatgggtgaggcactttcacagcgttctttctcatgttgaaatcctaggaaccatagctgatgcatgctgaagaattagctaaggattacgtgacttaaaacagttctatcaacacaattttagacctacttttctttgcctcatgaattactaatagattccaaagttatttttaccaataaattatttggtttatcatttatgcttgataaactgaaggaggattgggcttttmagaaaagaatgcttaatgaggtttgccagcttcacaaaggacagtttttttatagagagagaaaatagctaaaggacagatgatcctcatttttcacaaataatgggcacttgaagcactctgtgcaaattaaacctctgaaactcacatagtatctacatgagggtttgctggagtttacttataaactagtaaccgtggttatctcaggagaatagttaagtatctagggaataggagtgggggagagactaacttttcactgcatgaccattttcttctcttttgaattttggtatcatgtatattttttgcttattcaaagtgtttaaatatttaaatgttcaaagatattttaaaattgaaataaataaatctgtgag

SEQ ID NO: 607789 - DNA, 547 bp, Homo sapiens
agctttgcattaagtgttaagtgcaacccatcygcattaagtggattccccacccatatccttttcccttgagcttgcgagcactttgagtagtcagactgcaacttcacctacactcaggacatgatccaatacctgaaacagagtacgtgctagataaatagttgttaaaaaaataatgattttagtttctaaattgtgttgccttacatgagtgtcacaacaatcttgtgagttctgagggaaagaatatgctattacctctgtgactagaaaaaaataacatttaatattctactgaattactctgtgatttcatgattttccagacatctcatctttccactacattagccctgccaaaatccacacacctacctatagcaattggaattacagataatagagccttgactatttagatttggggctcctatatttggatactccatgacaatttgttccaatgcatgtgattgctgaataactttgtaaacaccatgtatcttgccaatggattacaaaaggaattgtctaaagaatttta

SEQ ID NO: 607790 - DNA, 573 bp, Homo sapiens
agggaggggaacatcacacaccaggacctgtcaggggtggtggaatacaaggggagggagagcattaggacaaatacctaatgcatgtggggcttaaaatctagatgatgggttggtgggtgcagcaaaccaccatggcaaatgtatacctatgtaacaaacctgcatgttctgcagatgtatctcagaactttaagtataataaaaaaaaaaagtcatgacaaaaaccacgataacttttgcaccaacctaataaaaaaattcttaaaatataartattatattttgggtatgcaggaactcaaacaacagcaaaaaaccaaacaatcctgttaaaaagtgggcaaaggatctaaacagacatttctaaaaagaagatatacaaatggccaacaagtatatgaaaaattgctcaacatcactaatcctcagggcaatgcaaactaaaaccacagtgagatatcctctcactccagcaagaatggctatgatcaaaaagatgaagaataacagatgcttgagaggatgcagagaattctcatacaccattggtgggtatgcaaattaatacag

SEQ ID NO: 607791 - DNA, 573 bp, Homo sapiens
agggaggggaacatcacacaccaggacctgtcaggggtggtggaatacaaggggagggagagcattaggacaaatacctaatgcatgtggggcttaaaatctagatgatgggttggtgggtgcagcaaaccaccatggcaaatgtatacctatgtaacaaacctgcatgttctgcagatgtatctcagaactttaagtataataaaaaaaaaaagtcatgacaaaaaccacgataacttttgcaccaacctaataaaaaaattcttaaaatataagtattatattttgggtatgcaggaactcaaacaacagcaaaaaaccaaacaatcctgttaaaaagtgggcaaaggatctaaacagacatttctaaaaagaagatatacaaatggccaacaagtatatgaaaaattgctcaayatcactaatcctcagggcaatgcaaactaaaaccacagtgagatatcctctcactccagcaagaatggctatgatcaaaaagatgaagaataacagatgcttgagaggatgcagagaattctcatacaccattggtgggtatgcaaattaatacag

SEQ ID NO: 607792 - DNA, 552 bp, Homo sapiens
tctttttctttttcttttttgtttttttttgagacagagtttcaatcttgttgcccagactgggtgcaatggagtgatcttggctcaccrcagcctctgcctcccaggttcaagcgattctcctgcttcagcctcccgagtagctgggattacaggcatgagccaccacgcctggctaattttgtatttttagtagagatgggatttctccatgttggtcaggctggttgagaactcctgacctcaggtgatccgcctgccttggcctcccaaaatgctgggattacaggcatgagccaccacgcctggccagagattttattttttttccaaaacaaagggtctcttatttatttcttcagatcattaactgcagtatggcatgccaaggttattaggatccaaatatctcatatatattttgagccttctgtgatggtggtggtggaatcaaagtagattgcatcagggtccattctgattatgccatggttctggatctcgggccctcttctccattccaacttatgttccctttatagacctttgtca

SEQ ID NO: 607793 - DNA, 552 bp, Homo sapiens
tctttttctttttcttttttgtttttttttgagacagagtttcaatcttgttgcccagactgggtgcaatggagtgatcttggctcaccacagcctctgcctcccaggttcaagcgattctcctgcttcagcctcccgagtagctgggattacaggcatgmgccaccacgcctggctaattttgtatttttagtagagatgggatttctccatgttggtcaggctggttgagaactcctgacctcaggtgatccgcctgccttggcctcccaaaatgctgggattacaggcatgagccaccacgcctggccagagattttattttttttccaaaacaaagggtctcttatttatttcttcagatcattaactgcagtatggcatgccaaggttattaggatccaaatatctcatatatattttgagccttctgtgatggtggtggtggaatcaaagtagattgcatcagggtccattctgattatgccatggttctggatctcgggccctcttctccattccaacttatgttccctttatagacctttgtca

SEQ ID NO: 607794 - DNA, 311 bp, Homo sapiens
ctagcctgaggagagtttataggttccttaaacatacagctgttactccatgtctgtgggttccacatttgtggattcaaccaactgtgggtcaaatgtattcagaaaaaaaattccacaaagttgcaaaaagygaaacttgaatttgcagtgtgcagagttctatgctgaacccaccccacacaatgaagtgatgtttaggaatcgtattaggtattataagtaatctaaagatgatttaaattataccagaggatgtatataggttatatacaaacactatgtgattttatataagggacttgagcatc

SEQ ID NO: 607795 - DNA, 473 bp, Homo sapiens
tattttaaaatcatgtaaaacctgttacttgaaaaacgcagttgagaacgaaaatatttcataacttagtgtgagataaattatataaaaggaagttctctttctaattgtattgytattattgatattactatatattagtatgaaacggtattgataccatttggtgaggactgagaaatatgagggtattttagatgactcaaaatcttagactttggaagacagaataggtgatgttgatatagagttttggtcctccagaagagcagcaaggttatgaagaatgggatgggttttgttttggatacactgtgctcaagagctgtgataatctaggtcgaaatgttaactggctgtttaggaatatcattcctatggcctcccaacagggctgagacacagatgccgtgcacagaagttacatggatggggtgaagactcgggaaaggaagagagcagtcagagggaca

SEQ ID NO: 607796 - DNA, 573 bp, Homo sapiens
actcaaaatcttagactttggaagacagaataggtgatgttgatatagagttttggtcctccagaagagcagcaaggttatgaagaatgggatgggttttgttttggatacactgtgctcaagagctgtgataatctaggtcgaaatgttaactggctgtttaggaatatcattcctatggcctcccaacagggctgagacacagatgccgtgcacagaagttacatggatggggtgaagactcgggaaaggaagagagcagtcagagggacaaagtgagtaggaaggactgagctgagaacagaatgccaaggttaagaggattgagagctgcatttttaggctccaaaaagaggatgggacaccyctcttgctttgaaacttgctttggaattggtatgcactgctccccagctaacattttgaagacctcttacccttttcttatgtgtccccaaatataggagccccaaatacaaatagtcaagtctctatcacccataattccaattgctataggtaggcgtgtgatgtttggcagggctaatatagtggaaagatgagatgtttaga

SEQ ID NO: 607797 - DNA, 573 bp, Homo sapiens
actcaaaatcttagactttggaagacagaataggtgatgttgatatagagttttggtcctccagaagagcagcaaggttatgaagaatgggatgggttttgttttggatacactgtgctcaagagctgtgataatctaggtcgaaatgttaactggctgtttaggaatatcattcctatggcctcccaacagggctgagacacagatgccgtgcacagaagttacatggatggggtgaagactcgggaaaggaagagagcagtcagagggacaaagtgagtaggaaggactgagctgagaacagaatgccaaggttaagaggattgagagctgcatttttaggctccaaaaagaggatgggacacccctyttgctttgaaacttgctttggaattggtatgcactgctccccagctaacattttgaagacctcttacccttttcttatgtgtccccaaatataggagccccaaatacaaatagtcaagtctctatcacccataattccaattgctataggtaggcgtgtgatgtttggcagggctaatatagtggaaagatgagatgtttaga

SEQ ID NO: 607798 - DNA, 573 bp, Homo sapiens
actcaaaatcttagactttggaagacagaataggtgatgttgatatagagttttggtcctccagaagagcagcaaggttatgaagaatgggatgggttttgttttggatacactgtgctcaagagctgtgataatctaggtcgaaatgttaactggctgtttaggaatatcattcctatggcctcccaacagggctgagacacagatgccgtgcacagaagttacatggatggggtgaagactcgggaaaggaagagagcagtcagagggacaaagtgagtaggaaggactgagctgagaacagaatgccaaggttaagaggattgagagctgcatttttaggctccaaaaagaggatgggacacccctcttgctttgaaacttgctttggaattggtatgcactgctccccagctaacattttgaagacctcttacccttttcttatgtgtccccaaatataggagccccaaatayaaatagtcaagtctctatcacccataattccaattgctataggtaggcgtgtgatgtttggcagggctaatatagtggaaagatgagatgtttaga

SEQ ID NO: 607799 - DNA, 560 bp, Homo sapiens
agatctctaagagatagctgcattctcatgttcattgcagcattattcacaatacccaagatatggaaacaatctaaatgtctatgagcagatgaatgaattgaaaaattgtggcayatatatacaatgtaatattattgaaccttagaaaagaaggaaaccctgtcatttgcaaaaacatgtttgatccttgatgatattatgctaagtgaaataagccagtcatgtagaaggaaaaatactgcatgattctattatgtgaagtttctaaaatatccagacctatggaagcagagaaaagaatggtggttgccagggtctggggtagaaggaaatagaaaatttgtttttcagtgggtataaagtttcagttatataagataaattctagagacctgctgtgcaatataatacctatggttaacaatctggttgatatggtttggctctgtgtacccacccaaatctcatttcaaactgtaattgccacatttcaagggagggacctgctgggaggtgattggatcacggaggcaatttcccccaagctgttcttgtga

SEQ ID NO: 607800 - DNA, 592 bp, Homo sapiens
aaattctagagacctgctgtgcaatataatacctatggttaacaatctggttgatatggtttggctctgtgtacccacccaaatctcatttcaaactgtaattgccacatttcaagggagggacctgctgggaggtgattggatcacggaggcaatttcccccaagctgttcttgtgatagtgtgcgagttcttatgagatctaatggcttaaaagtgtttggcagttcccctcaacctctctgtctctcctgccactatgtaagacacgccttgcttcccctttgccttctgccatgattgtaagtttcctgaggcctccctagccatgcaaaactgtgagtcaattaaacctgctttctttttacccagtttcrggtagtatctttatagcagtgtgagaacaaactaatacagagaattggtaccagcagaatgggtactgctataaagataactaaaaatgtgaaagtgactttagaagtgggtaatgggcagatattgtaacagtttggagggctcagaagaagacaggaagatgtgggaaaatttggaacttcctagatacttgctgaacggttttaaccaaaatg

SEQ ID NO: 607801 - DNA, 551 bp, Homo sapiens
tctgtgcactctcaggctcaacaccacatggaagctgccaaggtctgaggcttgcgccctctgaagccacagcccaagctctatgttcgcccctttcagccakggctggagtggctgggacatggggcacaaagtcccttggctgcacacagcatggggaccctgggcccagcccagaaaaccactttttcctcatggcctgtgatgagtgggactactgtgaagacctctgacaagccctgaggacatttttccccattgtcttggggatttacatttggctcctaattactcctgcaagtacctgcagccagcttgaatttttcctcagaaaatgagattttcttttctattgcattgtcaggctgcaaattttccaaacttgcgtgctctgtttcccttttaaaactgaatggctttaacagcacccaagtcacctcttgaatgcttcactgcttagaaatacccttaatcatctctcccaagttcaaagttccacagatctctaggatggggcaaatgccaccagtctctttgctaaaatatagcaa

SEQ ID NO: 607802 - DNA, 532 bp, Homo sapiens
ctggcatgtgagaatgagtgcctccttaaactttgtgccctggatatctttcttgccttgcactagtcccagtcttgcttctcaggttccctgtaagcttatctccatatgtgacccagcttctgctaagacagtgcacctttggagatttagaagtaagaagtgatgcaggatccctgckgctgggaatttttttgttactactggaaagcaaggatgagaaatttggtgtttgggttttattagcatcatcagaggtttcagtaattggtccccacgtatgtaggcattgaaaggagaattcaaggaaggacattcatttgctggcatgaaacaaagatgtgctgagtagtggggtcttagagctaagagtttgatggcaacatcttgatcttcagacttcagcagagctgggatgatcctggaaccaggaactaaagaagcagctcctgactccagaagcttcctgatcagacaggcagcaactcccttagtggcctttctatgttggtgttcaggaattaatcttaga

SEQ ID NO: 607803 - DNA, 532 bp, Homo sapiens
ctggcatgtgagaatgagtgcctccttaaactttgtgccctggatatctttcttgccttgcactagtcccagtcttgcttctcaggttccctgtaagcttatctccatatgtgacccagcttctgctaagacagtgcacctttggagatttagaagtaagaagtgatgcaggatccctgcgsctgggaatttttttgttactactggaaagcaaggatgagaaatttggtgtttgggttttattagcatcatcagaggtttcagtaattggtccccacgtatgtaggcattgaaaggagaattcaaggaaggacattcatttgctggcatgaaacaaagatgtgctgagtagtggggtcttagagctaagagtttgatggcaacatcttgatcttcagacttcagcagagctgggatgatcctggaaccaggaactaaagaagcagctcctgactccagaagcttcctgatcagacaggcagcaactcccttagtggcctttctatgttggtgttcaggaattaatcttaga

SEQ ID NO: 607804 - DNA, 518 bp, Homo sapiens
tttaattgtagaaaaatttatttcctttaaacatttgtagctaatctatggaacacatctattctctggcgactggctgcccctccaatttgtgtttcatacagaaccccctcttcagtcatttttctaccatcacagatataaatcccacatagccatgcaccacacccttaaatcaccaggctctttcactggcaagtcctttgctccaactgctccattttcctggagtagttttctamcccccacttttatttatctagcaagcacatactcatggcttaagactttaagctataggtacaacttatttatgaagtttcccatacttcatcccctaatatgtagtaataacagcttcttacttataaccacagtttcctaaacatattaacactgtactgggaaaatacttttttatatccatgcccattttttagtaattatatacatttatatgattatcttgaaagtaaccactgtacataacactgacactaaccaatggccacagctaa

SEQ ID NO: 607805 - DNA, 577 bp, Homo sapiens
tataataaaatagttaatggttattgttttaagacactgagttttatagtaatttgttacacaataataaatagccaaaatatctccaattataagtaaggaaacagactaagaaaggtcaatattttcccaagaaaacctgtttaacaaatggacaagaataatatccttataaagctgacctactaaaaaggggaatagagataataaacaagataaaggataaaggagaaaaaataaagcaaggagtggatagaggttgaaatataagaagtggtggccaagaaaggctgaactgagaagttgactattgagtaatgagctcaaggaattgtaagaaaaaaacatatggaatccaggagagaatattctmggcagagggaaaagaatatgccagaggcacagacaaaaccaatattttcaagtaaactttgtattattttgttcacatgtatgaaagattatcatgcacattattagtaatatgcagtaaagaattaaaatgaaggtggcttagaccaagctagtaatagagcagatgttgttgagaagtacaaatattttgaagggaaagtta

SEQ ID NO: 607806 - DNA, 604 bp, Homo sapiens
atccacagtgaagaaaatatcaaaatgttaaataaggacagaagttgtctacaaaagtaataaacttgctgcagtgaatgactgtcttgtgtattcaggtactttacatacgttagagcattaactcctcataaccccataagaaaggttatgattagctastcttaggaaaattcttgacataaaattgcatttcaatctattcttggataaaaaagcatttattggtgaagttaaatgtaaggtatcagaaactccatagagactcctacaaaaaagtaaccatattctccttttttaaaacatctttttctcttttcccagtatgcccagttcaaccatctaacttgcttagaaaaacaagacttttccaagagaaacaacatttaaatcaaataaaatccttacaacaacagtgtttttaaacgtgattgtttcaagattctgatatgcccgacaggctgagttttgaaacttcgagttgggacgctttatcactcaggggaccgcttcttcaggggaattttatagctgcactttgaaagttgcagggagagggttttttgcctttgagctgtgatatctcttcaacaaaaagggggtt

SEQ ID NO: 607807 - DNA, 604 bp, Homo sapiens
atccacagtgaagaaaatatcaaaatgttaaataaggacagaagttgtctacaaaagtaataaacttgctgcagtgaatgactgtcttgtgtattcaggtactttacatacgttagagcattaactcctcataaccccataagaaaggttatgattagctagtcttaggaaaattcttgacataaaattgcatttcaatctattcttggataaaaaagcatttattggtgaagttaaatgtaaggtatcagaaactccatagagactcctacaaaaaagtaaccatattctccttttttaaaacatctttttctcttttcccagtatgcccagttcaaccatctaacttgcttagaaaaacaagacttttccaagagaaacaacatttaaatcaaataaaatccttacaacaacagtgtttttaaacgtgattgtttcaagattctgatatgcccgacaggctgagttttgaaacttcgagttgggacgctttatcactcaggggaccrcttcttcaggggaattttatagctgcactttgaaagttgcagggagagggttttttgcctttgagctgtgatatctcttcaacaaaaagggggtt

SEQ ID NO: 607808 - DNA, 476 bp, Homo sapiens
aagtagaaaacctgaataggcctgtcaggcctctgagcccaagctaagccatcatatcccctgtgacctgcacgtatatatccagatggcctgaagcaactgaagatccacagaagaagtgaaaatagccttaaccgatgacattccaccattgtgatttgtttctgccccaccctaactgatcaatatactttgcaatctcccctgtccttaagaaggttctttgtaatctcccccacgcttaagaaggttctttgkaattctcctcacccttgagaatgtactttgtgagatccaccccctgcccccaaaacattgctcctaactccaccgcctatcccaaaacctgtaagaactgatgataatcccaccaccctttgctgactctcttttcggactcagcctgcctgcacccaggtgaaataaacagccatgttgctcacacaaagcctgtttgggggtctcttcacaggaac

SEQ ID NO: 607809 - DNA, 476 bp, Homo sapiens
aagtagaaaacctgaataggcctgtcaggcctctgagcccaagctaagccatcatatcccctgtgacctgcacgtatatatccagatggcctgaagcaactgaagatccacagaagaagtgaaaatagccttaaccgatgacattccaccattgtgatttgtttctgccccaccctaactgatcaatatactttgcaatctcccctgtccttaagaaggttctttgtaatctcccccacgcttaagaaggttctttggaattctccycacccttgagaatgtactttgtgagatccaccccctgcccccaaaacattgctcctaactccaccgcctatcccaaaacctgtaagaactgatgataatcccaccaccctttgctgactctcttttcggactcagcctgcctgcacccaggtgaaataaacagccatgttgctcacacaaagcctgtttgggggtctcttcacaggaac

SEQ ID NO: 607810 - DNA, 310 bp, Homo sapiens
taagtgaaagagataaacctatacaatgtaacacttagaataaaaagggccaggtacaatcccagcactttgggaggcaagggcaagaggattgcttgagaccagaagtktgagaccagcctaggcaacaaagtgagaccctgttgctacaagaaattgaaaaaaaaaaaaacaaaaaaaaacagctagtcaggtatggtggcatgtgcctatagttccagctactctggagactgaggtgggaggataaattgtttgagcctgggaggctgaggctatggtgagccaggattgccactacacccaagct

SEQ ID NO: 607811 - DNA, 595 bp, Homo sapiens
caaggttgaaggactcatattttctgatttcaaagtacttcaaaactacagcaatcaagacagcattttactggggcataaagatagatatatagattaatggaatagaattgagagtagagaaataaatccttatatttatgatcgattgatttttgacaagtgtaccaagacttttttctccaatggggaagaaatagtcttccacaaatggttctgtgaaaactggacatccacatgcaaaagaatgaaggtgaatctcttccttacaccatacacaagaattagctcaaaatggattatagaactaagtgaaagagataaacctatacaatgtaacacttagaataaaaagggccaggtacaatcccagcactttgggaggcaagggcaagaggattgcttgagaccagaagtttgagaccagcctaggcaacaaagtgagaccctgttgctacaagaaattgaaaaaaaaaaaaamaaaaaaaaacagctagtcaggtatggtggcatgtgcctatagttccagctactctggagactgaggtgggaggataaattgtttgagcctgggaggctgaggctatggtgagcc

SEQ ID NO: 607812 - DNA, 595 bp, Homo sapiens
caaggttgaaggactcatattttctgatttcaaagtacttcaaaactacagcaatcaagacagcattttactggggcataaagatagatatatagattaatggaatagaattgagagtagagaaataaatccttatatttatgatcgattgatttttgacaagtgtaccaagacttttttctccaatggggaagaaatagtcttccacaaatggttctgtgaaaactggacatccacatgcaaaagaatgaaggtgaatctcttccttacaccatacacaagaattagctcaaaatggattatagaactaagtgaaagagataaacctatacaatgtaacacttagaataaaaagggccaggtacaatcccagcactttgggaggcaagggcaagaggattgcttgagaccagaagtttgagaccagcctaggcaacaaagtgagaccctgttgctacaagaaattgaaaaaaaaaaaaacmaaaaaaaacagctagtcaggtatggtggcatgtgcctatagttccagctactctggagactgaggtgggaggataaattgtttgagcctgggaggctgaggctatggtgagcc

SEQ ID NO: 607813 - DNA, 594 bp, Homo sapiens
ctgggtgccatgaacagtggcaggagcctggacagaaaggagaaggtctccagtgaaactccaccttcaagccagggatggcctgaagcttgggggctgggctgccagttctgtggactggagtgagcacttatcatgttttttctggccctgcccwtggccgcctatggaccaatcagcacacatttcctcccctctgaagcccatacaaaccctgaactcagccagactcaggcagatattgggatgacctgcctgtggaaagaagctaaccactttgggtcacttgagagcttctccatcgctcagtgaatctcctctcttccttgcacaccctccagttgtctgcattcctcattgttcttagatgcaggacaagaacttgagagctgctgaatggtgggactgaaagagctgtaacacaaacggggctgaaacatgcccccacttgccatgtttcaggcaataagaaggaaagaactgtggccctttggggatcccaaacctaggggctccctgaaccagggctgtgacaccctctttggggttctatggttcctggcatctccaagcttctaggtaccaaagcattcc

SEQ ID NO: 607814 - DNA, 583 bp, Homo sapiens
tggcaggagcctggacagaaaggagaaggtctccagtgaaactccaccttcaagccagggatggcctgaagcttgggggctgggctgccagttctgtggactggagtgagcacttatcatgttttttctggccctgcccttggccgcctatggaccaatcagcacacatttcctcccctctgaagcccatacaaaccctgaactcagccagactcaggcagatattgggatgacctgcctgtggaaagaagctaaccactttgggtcacttgagagcttctccatcgctcagtgaatctcctctcttccttgcacaccctccagttgtctgcattcctcattgttcttagatgcaggacaagaacttgagagctgctgaatggtgggactgaaagagctgtaacacaaacggggctgaaacatgcccccacttgccatgtttcaggcaataaraaggaaagaactgtggccctttggggatcccaaacctaggggctccctgaaccagggctgtgacaccctctttggggttctatggttcctggcatctccaagcttctaggtaccaaagcattccccggtg

SEQ ID NO: 607815 - DNA, 491 bp, Homo sapiens
tggaccccatgcttgctcacccacccctcacttctctgcacctggcccaccctggcaggcatgggatccaggccagtagtgctcccaggggaagcctgccaggccaagtgggcagaatgagaccagtgggctcaagcaaaacttgggtaaaggtgccacctttcacagatttctggctggaaaagttacacactacagatcctatgacactaccagttggtatgctcagccatgggtggggtggctgttctgtggtcstgagccaggggctctgtttggtgaagagtgtggggtagggcctgggaagagagacttggctcccctccatctggtggctgcagtgtgctggagttgccagcacagccaccaggccctttgttccttccccagcccgagggcagttagggcagtaccacttcagctaaagtgatggagggactgtggattgtctctgggatttcctccagagagaaaagcagagctgccaccca

SEQ ID NO: 607816 - DNA, 564 bp, Homo sapiens
tggtcctgagccaggggctctgtttggtgaagagtgtggggtagggcctgggaagagagacttggctcccctccatctggtggctgcagtgtgctggagttgccagcacagccaccaggccctttgttccttccccagcccgagggcagttagggcagtaccacttcagctaaagtgatggagggactgtggattgtctctgggatttcctccagagagaaaagcagagctgccacccactgaagttttcagacagaggcagcgtagttgtgctggagtctaggtcagaaggccccactaagtgaggagaagcagggaagggaactatgtggaaaacagtctggccacttttccrtgaggtggcttcactgtgctggagttccgtggcagtccctaatcaccatgcaccatccagagcctgagggcaacagggtgagggctgtggggcagcaaagctcgtggccagcctctatctctggaagctccatcccagggaagtacagagatgctactggtctgagagcctaggcagttttggtgtggccatgctagagtcccaggcca

SEQ ID NO: 607817 - DNA, 395 bp, Homo sapiens
tggaaacatgtcctatcttccagctattttgaaacatacaatacattgtataaataaaggttttgatcttttgggatttcaacattcaggawtgtcaatagagattgtgtgtttggggatcatgatccaaatctgtgaagtaagatagttataataagctataggctaactttgtggaatatagtgagcattcaatatcagtagctgttactagtggccatggttgttattttcatgtgtttgctggagggaatacttgaaattcttcccagctaagtaaattagaagaccagtctttatcagtaacttattttgctggcccacaaaatgctaaagatctcagataggaaaaatgtcactttttctcatttgttagagaaggtaattctggattg

SEQ ID NO: 607818 - DNA, 551 bp, Homo sapiens
aactagcagtgtctttttaatcaataccaaagtcctgggacaaagtaataaatggggaaaaatcaatacctgaaggaatatcacagtatttctgtcctatcaaaaccaggctctgagccactattgtctgtgcaatttatactctagaaacaggtgttacgattagtttccagacaccactattacaagcacagatgacctctaccatccctattaccaggaaagctatttacagaggcagagtcagastttccttctgggttattatttgaaaggtgcataacggactcccttctctggccaaaaatgtatttcttccgctgacctgtcccagctgatttcatataacctctcttaaaagagctttcaggaatcaactaagtacttttgatgagttaaattaaatagatgttttattatatggtaggaagagtcagaaacacaggaatatcctggattcctatctcttttaggaagttaagtagtcattagcggtcttaaattacattttgtaagttttgtttcagacaatgtaaactagtttattttta

SEQ ID NO: 607819 - DNA, 551 bp, Homo sapiens
aactagcagtgtctttttaatcaataccaaagtcctgggacaaagtaataaatggggaaaaatcaatacctgaaggaatatcacagtatttctgtcctatcaaaaccaggctctgagccactattgtctgtgcaatttatactctagaaacaggtgttacgattagtttccagacaccactattacaagcacagatgacctctaccatccctattaccaggaaagctatttacagaggcagagtcagactttccttctgggttattatttgaaaggtgcataayggactcccttctctggccaaaaatgtatttcttccgctgacctgtcccagctgatttcatataacctctcttaaaagagctttcaggaatcaactaagtacttttgatgagttaaattaaatagatgttttattatatggtaggaagagtcagaaacacaggaatatcctggattcctatctcttttaggaagttaagtagtcattagcggtcttaaattacattttgtaagttttgtttcagacaatgtaaactagtttattttta

SEQ ID NO: 607820 - DNA, 551 bp, Homo sapiens
ttaagctgttaaattaaggcaatttattacattgcaatagaaaactaatacagattttggtacccaaaagccaggtgctactgtaacaaatacctgaaaatatggaagggctttggaactaagcagtgagaagaagctggacatttgagaacagtgttgagaagcatgccagagaaagcctcaattgccttgaacacactgctagtagaaatatgaatgttgaaaatgctactgatgagggttcacgaggagaagartatattattgaatatgggagcaagcaggttggatccttgttctatagtggtggaaactgtgtcctacagttatgtataaagctgaatttatatgtgatgaacttgggtacagagctaagaagatctacaagcaagtgattgaagattctgcctgatttgtggcttatagtaaaatgagagaagaaagatgagagattgagggaagaactgttaaactaagaaattcactgtctggaagcatattctagagaaaagactgacccttttgctgaaacttcaaaaagccttttttgc

SEQ ID NO: 607821 - DNA, 551 bp, Homo sapiens
ttaagctgttaaattaaggcaatttattacattgcaatagaaaactaatacagattttggtacccaaaagccaggtgctactgtaacaaatacctgaaaatatggaagggctttggaactaagcagtgagaagaagctggacatttgagaacagtgttgagaagcatgccagagaaagcctcaattgccttgaacacactgctagtagaaatatgaatgttgaaaatgctactgatgagggttcacgaggagaagaatatattattgaatatgggagcaagcaggttggatccttgttctatagtggtggaaactgtgtcctacagttatgtataaagctgaatttatatgtgatgaacttgggtacagagctaagaagatctacaagcaagtgattgaagattctgcctgatttgtggcttatagtaaaatgagagaagaaagatgagagattgagggaagaactrttaaactaagaaattcactgtctggaagcatattctagagaaaagactgacccttttgctgaaacttcaaaaagccttttttgc

SEQ ID NO: 607822 - DNA, 504 bp, Homo sapiens
cctactttttttttttgtttaagaaattccagaattgtatgctttatgctcccaaaaaccttgtcacagtttctttagcagattatgacctcctgtgctgtaactgatgacagtatatcctggatttataatgtgaataaatcttctagactctctgttgactgtggagttttctgaattttagcagaaacattgaaccatagtcccaccaattaatgagaaatcagctgcaataataggkcattttcacagaaattttggcataggcctgagtgatctagaaaccgtgtcatatgaggaatgactagagaaattagggacatttaatcaggtggaaatgatgcatacttagcgttcactaaagggactggtagcaatgggagaacattaaatacaaatcactatttggaagtcatacctaaaaccttgattttttttccagaaaaatagtttctcctaaatgatctgtgaacattttctaggacagctaattgatagcctatc

SEQ ID NO: 607823 - DNA, 504 bp, Homo sapiens
cctactttttttttttgtttaagaaattccagaattgtatgctttatgctcccaaaaaccttgtcacagtttctttagcagattatgacctcctgtgctgtaactgatgacagtatatcctggatttataatgtgaataaatcttctagactctctgttgactgtggagttttctgaattttagcagaaacattgaaccatagtcccaccaattaatgagaaatcagctgcaataataggtcattttcacagaaattttggcataggcctgagtgatctagaaaccgtgtcatatgaggaatgactagagaaattagggacatttaatcaggtggaaatgatgcatacttagcgttcactaaagggactggtagcaatgggagaacattaaatacaaatcactatttggaagtcatacmtaaaaccttgattttttttccagaaaaatagtttctcctaaatgatctgtgaacattttctaggacagctaattgatagcctatc

SEQ ID NO: 607824 - DNA, 440 bp, Homo sapiens
ttgtgaggagaatttgtgaatctgtgctttttttcctttcctaagattcccaggattagtctccrtggctgattcactacatttaacaatcagtctggaaagttcctttcacaaagcacttcataaaccattgtcttaagtggattattttttttaaattatggaacaatatgaactcaaacagaggcacatatggacacatatctatctttggagatttagaatagtttcattaaaaacttgtaatcatgttcaatttttgcatctgtgggtataaaaaggcaaatcatcttctaatatcagttttaaggactagattaaataggttgatggctcggttcaacttcacctccagggagctcttcccacctcttcctccacctgacttcagcaggtgactaaagctatccgcatttttcagaaggtaaatgaacacacca

SEQ ID NO: 607825 - DNA, 433 bp, Homo sapiens
gagaatttgtgaatctgtgctttttttcctttcctaagattcccaggattagtctccgtggctgattcactacatttaacaatcagtctggaaagttcctttcacaaagcacttcataaaccattgtcttaagtggattattttttttaaattatggaacaatatgaactcaaacagaggcacatatggacacmtatctatctttggagatttagaatagtttcattaaaaacttgtaatcatgttcaatttttgcatctgtgggtataaaaaggcaaatcatcttctaatatcagttttaaggactagattaaataggttgatggctcggttcaacttcacctccagggagctcttcccacctcttcctccacctgacttcagcaggtgactaaagctatccgcatttttcagaaggtaaatgaacacacca

SEQ ID NO: 607826 - DNA, 437 bp, Homo sapiens
gagaatttgtgaatctgtgctttttttcctttcctaagattcccaggattagtctccgtggctgattcactacatttaacaatcagtctggaaagttcctttcacaaagcacttcataaaccattgtcttaagtggattattttttttaaattatggaacaatatgaactcaaacagaggcacatatggacacatatctatctttggagatttagaatagtttcattaaaaacttgtaatcatgttcaatttttgcatctgtgggtataaaaaggcaaatcatcttctaatatcagttwtaaggactagattaaataggttgatggctcggttcaacttcacctccagggagctcttcccacctcttcctccacctgacttcagcaggtgactaaagctatccgcatttttcagaaggtaaatgaacacaccaaaga

SEQ ID NO: 607827 - DNA, 523 bp, Homo sapiens
aaactttaaatgtagaacgtcattaatattatactactctcaaattcctatggacttttgttgtttattttgagaattatctataaaacaaagacaagatgatgaatgcaacggataaaatgtgtgggttttaggctatgattataaaggtaactttttctatggtaaaaatctgaatttttattagatgagcatgttcatagagaaaatttatattaatatacaaatatattattataccttttaaagaagagtgttacatttgtcatatgttaccccaaattttaatgaattatttttcttttatagaagatctaaattttagagataagttacttgccataggacacaattgcaagcaataaaagtttaaaaaataatatgatckgcacacttactcttggagttaaccattttaaccatctgatggccaagaagcaattttagcataataagctttttctatagaagattacagtagaaattctagcctagaggatccttaattatgatgaattaagaa

SEQ ID NO: 607828 - DNA, 539 bp, Homo sapiens
taacacaggcttccttagtgaaggcttcagtgatgtttgaatgagtagaggaattgcaatcctcccttcctgagccatgtttgaattatttctatggagaaatggtgggtgaagtggataagggtgcagagcctggactcagcctgcctgaatttgaatcttttcactggtacttaattgtcatgcaatctagaaaatctggatgtaggacaacttcgctaacatttctaagactctgtttcatggaaaagaaatgaaacacagacaaaaatattccctccctcatagctgttgaaaggattaaataaggagatatgtgtaaagcattcaacaacacacacagatatgtgcattaatgcacacatgcttttataaaacgcaagttaccaaaacaaaaamactcattgtcattccaggctcctttctccgctcagcctccatatccagttgttcacagcatttagccaattataccttttaaataccttccaaatctttttcctccctactttagtttaaaccctcaaaaacatctcctg

SEQ ID NO: 607829 - DNA, 581 bp, Homo sapiens
aattcagacaataagtgtcaggtaagtgtagccatatcaataaattcatctcagtgtaaggtgatttcatcctccttgttctggtacaatcctatgtaagtttcttagtctttgctgatacaaattgtcaaaatcttgcaaaatttttagtggctagattatctcctcaatgctgagactttatatttgttgtgctgggactatctgaggtatctgatgctaattaaatggaaatgaaggctagtgggatgacaattgaggaaaatgggcatcgttagataaggtcattgatgctcttcaagcaagagatgactaatttcctcaaatagagaagaaagggttgctcttacagtcaagggaggctctgattctatgggagttcaaagttctctaatccatcaaatccacctgaatataattstcattctcacggtctcactcctttacagtcattgatttaatatcagagacatcgaaaagctgaattcaacttatgttgtaattctataacctacataaaagtctttgtatccccagtgtagtagctattcagcatctcaagaagtctttcatcattgacc

SEQ ID NO: 607830 - DNA, 611 bp, Homo sapiens
agttttcttgagagtaatttcatgataaaaggaagaagtctggccttcatcctctctgactcatgtacttgcttgcccttctgctttccaccatggaatgatgcagcatgaaggcctttgccagaattaggtgccatgctcttgaacccctcagcctccataactgtgagccaaataaacttctattgtttatacattagttagtctttgatattctcttacagcagctgaaaatggactaaaaacagaaaatcagtactgagaataagattgttgccattaagaaaacaaaacaaaaggtaaacctgaaaatgtggaagtggctttgsaactggaaagtggatagaggctgggagaatttggaggagcaagctagaaataggctagatttctggtgagtggagctttaagggcaattctggtgagggcttacaagaagagaagaactgtaggaagagtctgaaacttcttagaggttacttaagtggtcatgaccagaatgttggtagaaatattgacagagaaaccattccaatgtggtctcagttgggaatgaggaagaagatactggaaattggagtaaaggtattcttgtcatacagttgcaaaga

SEQ ID NO: 607831 - DNA, 546 bp, Homo sapiens
gagctaggcactgttcatcagaaccatgggagaaagactccaaaggcatttagatcttggaggccrtctctcccatcacaggtccagagctctaggagggcagaatgttttgggagaatgggcttggggcaccctctgtggactcactacccaaggctgcctcaggattcttcttcctgcatcccagcaccatgccccttaggcacccccagccatggctcaagcaggcccaggtatacttcaacccactactctggaggttacaagctataaatattggtggtgtccatgtggtgctaattctgcagtaatgcagaatgcaagacctgtgcaggcatggctactttcaccctatatttcaaaggatgctgtggacagcctaggggcccagagagtcttcttatagagatggagccactgcagagacctcctaccctactagggcaatgctgagtggaaatgtgaggtaggagtcaccacagagagtttccactaaggcaattcctaatagagctgtgggagtggggccatcactaagacctcaga

SEQ ID NO: 607832 - DNA, 603 bp, Homo sapiens
aattatttaaatctttgtctaaaatgacttaattttacattacttaataattaataattttgctttgtgtagaatctgaggtaggcagttacttctcttcagcactttaatggtgccatttcttatttttggttttaccatttctattgatgagtcaactgtcattcccgttgatgttcctttgaaaataatacatcttttctgtttgttcttgcagaaaaagttgtagatttcctttgtgtttttaagcagattttaccattatgtgcctagaaatggttttcttcacactttttcttagaattcacaraaattcttgaatcacactgacttgacatggttcattagttttggcaaattctcaaccactattttttcaactattgccttttccccagttccttttcgtcttcctactgtgactccaattatatttatattaaatcttttcatgcctttttcattcatgtaattttatttttgtctgtgcatcaacttgcagactttttattgacctgtcttctaatttactattattctctcctataaggtctaattagttgctcaaataaatatacaaagttttttattttccattattaa

SEQ ID NO: 607833 - DNA, 566 bp, Homo sapiens
ttataggccactaagtttggagccatatttcacatagccatactagtacagaagcaaaggagaagaaaccataaatataaattatccattgaaaagccttagcacagaagaattgcaggatgaaaagaaactaataaccagatgagcatagagtcaagaatgttgaggaatctttagaattttgttattaaaataaggtcaacatgaaccctagaagatgtaacatgaaaatgcatgttagaaagaggaaagaatcattggtgtaaattctatttcctggtggatgcaagggatatcacatagagagcatacgaaatgtgatagttttgaatagggaaactgacatttgtacataaatagatgcttacagatgtggacacacgaagttaaagaagatcattctcaatattctaagttgtctctatgaaatcagaggcaaatcatctgcactgaaaaagaagtagtgacgtaratggtagggggaaggggtatggtgtgcagagtagtagatttttttaaataagggagcatgtagaagaaaaacaaaagaaggagataatcaataa

SEQ ID NO: 607834 - DNA, 501 bp, Homo sapiens
caaattttgttacaaggacctggtaagtacccagaaatacatgttattattttcctgacattttcccagggcctggaaagtgactttgattgaccaaagattgtctcaagggtgctttaaatataaaaagaattcatcagcctatacagatgtctatcacgtacaggtaaaactaggtacattgctttgcttatgctcatcaggaaacaatctaaccttggtctctattttttattrgcaagagtgatatacaatcctatggacacatgttctggccttttcttgaatcaaatcaacaaacagcatgattttggtagttgaaaaagaatcaatgaagtttgaaatattatgctaatggtcccattacattatgaataatggccttattttcttcaaactagaaagaaaataattttctctagatggggaaaaataatttactatttaggaaaaatcacaaaccacaaattcctggtttccagtcaggcatataaagagctt

SEQ ID NO: 607835 - DNA, 592 bp, Homo sapiens
gagttaaatcctgcatcataggagaatactcccatatcagtatgctctccatggcaggagactctaggttggccccctgatcccaccttctagtgtttacattcttgtgtaatccccccacagagcgcaatccagacacatgctgagttctatgtggttacttgtatgtgagtaacatttgtcttgctaggaggactctctcttgctggcttccaaggagcaagaygccatgtcatgagttgccttaaggagagggccacgtggcaaggcactgaaggtggcctctggcagacagccagcgagaaacaggccttcagtctgatagtctgcaaggccctgaatcctgccaacaactgtgtaaacttagaagtgggtccttcttcacttgagctttcaggtaagatctcagctcaggctgacaccttgattgcagccttgcagaggacccaggaaatctgtgctggaactcttgacccagtgaaactatgagaaaataaatgtgtgttcttttaagccacaaaatttgtggggtactgtaatacagaaatagataactaatacagttatgttctgtccatcccctgccttgatc

SEQ ID NO: 607836 - DNA, 592 bp, Homo sapiens
gagttaaatcctgcatcataggagaatactcccatatcagtatgctctccatggcaggagactctaggttggccccctgatcccaccttctagtgtttacattcttgtgtaatccccccacagagcgcaatccagacacatgctgagttctatgtggttacttgtatgtgagtaacatttgtcttgctaggaggactctctcttgctggcttccaaggagcaagatgccatgtcatgagttgccttaaggagagggccacgtggcaaggcactgaaggtggcctctggcagacagccagmgagaaacaggccttcagtctgatagtctgcaaggccctgaatcctgccaacaactgtgtaaacttagaagtgggtccttcttcacttgagctttcaggtaagatctcagctcaggctgacaccttgattgcagccttgcagaggacccaggaaatctgtgctggaactcttgacccagtgaaactatgagaaaataaatgtgtgttcttttaagccacaaaatttgtggggtactgtaatacagaaatagataactaatacagttatgttctgtccatcccctgccttgatc

SEQ ID NO: 607837 - DNA, 589 bp, Homo sapiens
acctgtaaaatcaggctgggagtgtcccgtccccaggagctggcaaaacaacaggctccaagggcctcagtctcatcctcaccatcccagagcagcttgagaaatgatcctatgtggccctacgatgttcagtgaagagaacaggagaagaagccactgggaaagaaacaggtcctttcccttttgctcagtgggctgcagaatgccaggtcagtatatgatctcacttaaccatcacagcaaccgtgagctgaaaattgttctctctgctttcccagtgaagagtctgagcgtcagagggattagtaatgtgggtgccagtctttctgtagcacttgctctctctgtcttctttgctgccccttcctcatcctgcccctaagtactggaatcactcacttatgagggagtctcaccccactcwatggctttaagtaccaactttgcactgatgattcttcagctttgtatcttcagctcagactgctccccagaactcccagcctggatattcatttgccttctcagcatcttttcttggatatcaaagaatgaacttaatagttcaaaacagagttcttggttttct

SEQ ID NO: 607838 - DNA, 601 bp, Homo sapiens
tgacatgtggttctttctctggtgtaaaataccttaaaacaatttttaaaaataaaaaaagcagtttatgaccttgaagtatttagtgaacctagtatctgacccacataattgagacgaaatgtttacatttttgaagatattcttattttaccaataatctttaaaactgtctttatttcccaaagattagttaagtgacatgaactaaataaaaactattatgctttttacttttctgacaaaatatttaattgaagttcttcttattaaaccaattaattaaagcttttttacacaacacatataaatacatagacagacagatgataaagaactcattccctaagccaggaatctaaccctaaasccaggctgccattgtgaaaagagaaaacacagccacatggtaacaaggtccagatctcaaggatacggctgaccagtttgctgggccatcttaaacagtgggcctatggcgtcctaggtatgcattttatcctaagatacccctctttatgacacaataatacagaaagacacacaaagcacaccagattcactacagcttaagaccagcctcaaaattcttttttgcatt

SEQ ID NO: 607839 - DNA, 606 bp, Homo sapiens
cttccagccttatgttcttctttaaaaaatgctttttcctttctctcactaacatttacattttttaaacatgtagacctcttccagatttatatttatcaacattaattttgcacagggattgtgacttctatatatctggagccagagctgcttattttctttaagccctgcagctttcttccttacctacgtatagatgattaaaacatctcaccacttgtagggatggatgccccttgtaacatcattgtaaatgcagacttcaaatctcctctgatgaaaatgccttaaatgtcaactcacagataaaagyatcaggcattgaaactgtatcagagatttgatcgttctctctttaaaggcagttttcgtatgaattattttatatattcacagtataataaaagataagaaagtattttaggttgcaaacatgtttgtcaattacttaatggtgaagatgatgttggtaataaaatgtaactacaaaatttggcaatgaaatataactacaaaatacctgatagattagttaacacaataatgttcaataattctcaaatgatgtatattaaatgcgtaaaatcattccttttatgtggt

SEQ ID NO: 607840 - DNA, 538 bp, Homo sapiens
atgtgtgttcttgttattatcacacaaagmcagaaagtgcagtcgtaacaatagatattcactttatttttaatttttattttaggttcaagggtacatgtgcaggtttgttatatgataaactcgtttcatggagctcattgtacatattatttcatcacccaggtaatgaacatagtatccaataggtacttttcagtcctcttcttcctcccacgctccaccctcagataggccctagtgtctgtttttcccctatttgtcttcatgtgttctcatcatttacctcccacttataaatgagaacatgcagtatttggtattttgctcctgtgttagtttgcaaaggataatggccttcagctccatccatgttcctgcaaagaacataaccttattctttcttatggctgcatagtattctgtggtgtatatgtaccacattttctttatccagtgtaccaatgatgggcatttaacttgattccatgactttgctattgtgaatagtgctccaatgaacatacatgtgcatgtg

SEQ ID NO: 607841 - DNA, 538 bp, Homo sapiens
atgtgtgttcttgttattatcacacaaagccagaaagtgcagtcgtaacaatagatattcactttatttttaatttttattttaggttcaagggtacatgtgcaggtttgttatatgataaactcgtttcatggagytcattgtacatattatttcatcacccaggtaatgaacatagtatccaataggtacttttcagtcctcttcttcctcccacgctccaccctcagataggccctagtgtctgtttttcccctatttgtcttcatgtgttctcatcatttacctcccacttataaatgagaacatgcagtatttggtattttgctcctgtgttagtttgcaaaggataatggccttcagctccatccatgttcctgcaaagaacataaccttattctttcttatggctgcatagtattctgtggtgtatatgtaccacattttctttatccagtgtaccaatgatgggcatttaacttgattccatgactttgctattgtgaatagtgctccaatgaacatacatgtgcatgtg

SEQ ID NO: 607842 - DNA, 538 bp, Homo sapiens
atgtgtgttcttgttattatcacacaaagccagaaagtgcagtcgtaacaatagatattcactttatttttaatttttattttaggttcaagggtacatgtgcaggtttgttatatgataaactcgtttcatggagctcattgtacatattatttcatcacccaggtaatgaacatagtatccaataggtacttttcagtcctcttcttcctcccacgctccaccctcagataggccctagtgtctgtwtttcccctatttgtcttcatgtgttctcatcatttacctcccacttataaatgagaacatgcagtatttggtattttgctcctgtgttagtttgcaaaggataatggccttcagctccatccatgttcctgcaaagaacataaccttattctttcttatggctgcatagtattctgtggtgtatatgtaccacattttctttatccagtgtaccaatgatgggcatttaacttgattccatgactttgctattgtgaatagtgctccaatgaacatacatgtgcatgtg

SEQ ID NO: 607843 - DNA, 465 bp, Homo sapiens
tcccattcccttggtggaagatgttcctcttgactatgtctagttggccatcttggagcagctcctggatattctctttaaaataacccagaaatgtagtaatcttgacctgtatttcccttgagtgctggcaagattattgctttgccatcctattttgtttctcaggaaagtaaaaccataactacatatgctgttcaagtgacaaagagcacaaaaagtcccatagccgcacatgtaaatgtggcatgctgcttctggtggtttccagggaataaattttgttcatatgargaaagtaaacatatagaaggtaagaattattcatccatttaaatttcaatgtatgttttcacagacaataataaaaatcttctcagcattcctatgcttagtgttattataattttatagatgaaatccagagagtatacagattcacctaatcttatgggaataagtaac

SEQ ID NO: 607844 - DNA, 577 bp, Homo sapiens
attttctctcttcttgagctgggacatccatcttctcatgcccttagttttggatcttctagttctctgcctttagaccctgggactcacattattagccccctggttctcatgtcttcagactcaaactaaattataccactggctttcttagtcctctagcttgtagaccagattgtcaactgctcagctaccataatcttatgagccatttcccaaaaagtaggaatatatatatatatatatatatatawaaaacctataaataaagaatatacatatgtatattccttatttttgggaaataaggtacatgtattagtctatttcttcagagaaacagaaccaataaggaatttatatatatatcatatatattccttgttttttatttatatacattatatatatatatatatatggaataatattcatgatagttaattttatatgttaacttgactggactaaaggatgcccagatagctggttaaacttattattaaaacatatatgtatcaacaaacatatatattccatatatatggaatatatattataatatatggaatatata

SEQ ID NO: 607845 - DNA, 577 bp, Homo sapiens
attttctctcttcttgagctgggacatccatcttctcatgcccttagttttggatcttctagttctctgcctttagaccctgggactcacattattagccccctggttctcatgtcttcagactcaaactaaattataccactggctttcttagtcctctagcttgtagaccagattgtcaactgctcagctaccataatcttatgagccatttcccaaaaagtaggaatatatatatatatatatatatataaaaaacctataaataaagaatatacatatgtatattccttatttttgggaaataaggtacatgtattagtctatttcttcagagaaacagaaccaataaggaatttatatatatatcatatatattccttgttttttatttatatacattatatatatatatatatatggaataatattcatgatrgttaattttatatgttaacttgactggactaaaggatgcccagatagctggttaaacttattattaaaacatatatgtatcaacaaacatatatattccatatatatggaatatatattataatatatggaatatata

SEQ ID NO: 607846 - DNA, 510 bp, Homo sapiens
tctcacaccacatggataccaaagctcacaattagtaataagactgcagctctgttttattggttttcagaactggagccaggcttagaggtacaactggggatgcttggcattgtgcagctagaggtgaaattcttgyagcccagaagaaccagaagaaaacatttgccaagaatgttttccttaatcaaagaggaaatttcatcagaggtttgatcagatacctatagtgatcagatagctgcattgtagtcccaatcataaccagtgcagactaggccatgtgaccttgttattctcatgactcttagggtggcctccaggaaatcaaaatttttcagttctgatggaagtatgggtgcaaagctgaaacttgaaaaaaactgataaaagagttttccccagaagtggcccctgcagcttactttgactccatacagtgatcctggcccagcccagacacagacagaattgacagttttccttggcccttcttctttttttttttct

SEQ ID NO: 607847 - DNA, 589 bp, Homo sapiens
agtcctctttcctgtggactccaattgctatgtattgactctcttttcaacaccctaaatcagaatacatggtctgcagagaatctgtctcccacttatgggtgtgagcagctatctaggagatgttgtttgaagctgaaaatactggaatttcacacatcaaaagtttttttttttttactttaagtgcgtattatgggccaggcactatgttaaacacatcatatacatgatttcattgaaacctcatgacaatcctcataggtaggtattattatagacrtgcccgaggttatactagtgacaataaattgcagagccagaattcaaactcggctctggatgaatatttaggacacgctcaccactcggccacctagctgctcacagaagtgagaaagggtagggtggcagggtttggattgggtgaggcttccagtgtgtgaagagaagctgggagagatgaggctgggcttgaccacaagcatataggaagtactcagggctggcataagtgggatttaggccctcaaactctgttgctttccttgtcccattttcaagtaaagaatattggcattttctgtaa

SEQ ID NO: 607848 - DNA, 556 bp, Homo sapiens
  misc_feature 427: n = A,T,C or G
caccaagattgccagggaccttcccaatattctaggattatattattatctctgctgttgttctagtttccaagtaacatagaaattatctttggcctcaagaagtgatagagcattgtggtgaagagtttctatctcttgtgctcttagataaataagataacttccttagttagtccgtgattctgctctatgggatgatctctataactcactgttctaggaggcccctagtcttgatctttgggaagttcttcactgttcattttcgtatttgtccatctccaaagtgggtgttagagaggaccctcccaagtacaatggtctatmtcttattatttgtatgatttggggcttctctcagtttcagtgtcctcagtgtaaaatggagattatattatacttgcacctatctcattgggttggnttttggttggttaaatgagctaatatacatggagcacgtagcaaatacttgtatctataaatgctagtgtgttagtctaggtaggctagattctgctggggtaacaaacagacccattcacattccatt

SEQ ID NO: 607849 - DNA, 582 bp, Homo sapiens
ccaacttggttttgatcaattgcactttttatgtattgctgtattgagtttgctaatattccttttagaatatttgcatctatgtttgtaagtaatattggactgtaattttgttggtatcaagttgatggtgtcaaaattatagaactttataaaacaaatwggaaaatttctcctttttccctattctctggaatagtctgtgtaattgtcctatttctcgtatgtttggtaaaatttaccagtgaagcccaacttttctttgtgggaacaaaattgaatataaaatttaaaaaatattcatagagattattcatatactctatttcttcttgtatcaattttagtaagtttttttaagaaatttgtccataacatgtaaaaattcaagtttattggcataaaattgttcatgttatcctcttattaactttgtagcatctgtgtggaaactttgtcgtctgtgatgatatccccctttttatttatttatttatttatttatttatttatttatttatttattgagacagggtctcactctgttgcccaggctggagtgtagtggtgcaaccagagctc

SEQ ID NO: 607850 - DNA, 582 bp, Homo sapiens
ccaacttggttttgatcaattgcactttttatgtattgctgtattgagtttgctaatattccttttagaatatttgcatctatgtttgtaagtaatattggactgtaattttgttggtatcaagttgatggtgtcaaaattatagaactttataaaacaaataggaaaatttctcctttttccctattctctggaatagtctgtgtaattgtcctatttctcgtatgtttggtaaaatttaccagtgaagcccaacttttctttgtgggaacaaaattgaatataaaatttaaaaaatattcatagagattattcatatactctatttcttcttgtatcaattttagtaagtttttttaagaaatttgtccataacatgtaaaaattcaagtttattggcataaaattgttcatgttatcctcttattaactttgtagcatctgtgtggaaactttgtygtctgtgatgatatccccctttttatttatttatttatttatttatttatttatttatttatttattgagacagggtctcactctgttgcccaggctggagtgtagtggtgcaaccagagctc

SEQ ID NO: 607851 - DNA, 578 bp, Homo sapiens
tttaacaacataaattcttctgattcatgaacatgaaatatctttccatttatttgtgacttctatagtttatttcttcaatatcttacagtttttagtatacagattttttacctcttttgttaaatttattcataaacatattattmtttttgatgttattgtaattgggattgatatcttaatttcattttcaactaatttgttcttagtgtacagaaacacactaattttcatatgttgattttgtgtcctgcacctttattgaatgtattagttctaaaagtttatggtggagtctttagggttttctttacataagattatatcatctgtaaacagacaatttaacttctttctttccaatttgaatgccttttatttctttttcttgtctaattgctcaggctaagacttccagtagtatgttaaatagaagtgacaagaacaggcacccttgtcttgtttctgatctaagagggaaagatttcagttgtcaccattgagagtgatgttgactgtggcttcgtcgcatatggcccttattatgtcgaagtatatttcttccatacctaatt

SEQ ID NO: 607852 - DNA, 412 bp, Homo sapiens
aagggaagtacacatttcatgtggaaaactagctatctctaccacaggttgttagaaaaattaaataagcctttatttgtaaagtgccttgtatagtgcctattataacataggcactaaaaaattgctagatatagagaaaaaaagagcttaaaaatttaaaatttatataattataaaaagtatataatgcaagataaaaagtggtatcatcagagagtccatttaaagtgtaataggacattgtattaatttcctacggtgctgtaacaaattaccagaaacctaagggcttaaagcaataaaagtttattattttacagttctggaggacagaagtttgaaatgagtcttacagggctaaaattcagatgycagcaagacagcattcctctggaagttctaggggagc

SEQ ID NO: 607853 - DNA, 535 bp, Homo sapiens
tataggcttaatacctgggtgacaaaataatctgtacaacaagcccccatgacacaagtttacctatgtaacaaacctgtacttgtacccctgaacttaaaacaaaagttaaaacaacaacaacaaaaaaagaaagtgactttattaaccaaaactagtcatgaggaagtggctggattcctattaaaagtaatcacttcaaaccttaggctgggaagaggggcttaaaagggggaactggcaatggaaattatgcgagatgggtgctgagtacaaggtctgtgtgtcttgttccatggctatctggagccacggtctggcatctggagtgagggctggcatcatctcaacaatggccacgttattgactaacttccttgagagaatctctggaatcttgcagctgggtctctatgcgtggtctgtctcaagattrgcccccttagaagttctaaataagcacataattagacacaagcatacaattattaataaatgtgcatggtgtaagggagtgtatggcgagaaagggagg

SEQ ID NO: 607854 - DNA, 588 bp, Homo sapiens
ccgatgcagatgtgtgatagccaacttatttcaaagtgggggtggagtaggggagacacagctggatatattggttggtaggggaagttgaggagggcaaggggtccttgaagtgaagattaatgaggaagcacctaggaaggtcaagggagtgctgggggaagtacaggggatggagaagatgacaagtatttagtacaagtatcatagatctccaaagggacagaaattagttgaataagttgtggtccaggctggggcccttggtagcaagcccagtgttgctggaagtttagctctcgggtgacataccctgttactgttacatagatattgtccatcaggttcaggaaagtagggagtggagatggtgacagcgaagtagtggagagtgaaggatggatagttggatgagggggaatcagagctgatgtggctgtaagagtagggatagtggagatgggaatcctgattcaggttttagatattaaggggagaaataaaatggtaagaccagygggtatagatcagctaatttgcagggtgatagctcataccaggagaaaaccctatgaaaagagaaaagag

SEQ ID NO: 607855 - DNA, 591 bp, Homo sapiens
gagaagcatactcttttgtggttttaagggggagaagaagagctcttgttacatgttggtgggatgtcataggctctaaagcttgaaattgcagattaactaaggcagtgggcaaaagagaggtcaatttgggagaccattatccatttggtaattttaagagaatttccttgagtaagccattatgtctgtctatyaggccacatgcctgtggacaataggacaaatgaaagttccaaatgatgccgtgttgtaagtaaagcccacacctgaaatgaatgagcagcaacatgtgtaccctgttcagagtcagtgatatctgggggcacaaagagagctatctaagttttggtgacacctgtaattgtggtgttggcagtagaatgctggaaaggataagacaagaatatgcatacataaatatcagccatcattgaggaagagtaatttttgccagcagactggggcaacagttcaataaaatcatcttgccaatgagagaaggaatgcccatctcttggtatggatccccattggcaatccccatttcccttggtatgaaaccagtggtgggacagggaatagagataa

SEQ ID NO: 607856 - DNA, 591 bp, Homo sapiens
gagaagcatactcttttgtggttttaagggggagaagaagagctcttgttacatgttggtgggatgtcataggctctaaagcttgaaattgcagattaactaaggcagtgggcaaaagagaggtcaatttgggagaccattatccatttggtaattttaagagaatttccttgagtaagccattatgtctgtctattaggccacatgcctgtggacaataggacaaatgraagttccaaatgatgccgtgttgtaagtaaagcccacacctgaaatgaatgagcagcaacatgtgtaccctgttcagagtcagtgatatctgggggcacaaagagagctatctaagttttggtgacacctgtaattgtggtgttggcagtagaatgctggaaaggataagacaagaatatgcatacataaatatcagccatcattgaggaagagtaatttttgccagcagactggggcaacagttcaataaaatcatcttgccaatgagagaaggaatgcccatctcttggtatggatccccattggcaatccccatttcccttggtatgaaaccagtggtgggacagggaatagagataa

SEQ ID NO: 607857 - DNA, 591 bp, Homo sapiens
gagaagcatactcttttgtggttttaagggggagaagaagagctcttgttacatgttggtgggatgtcataggctctaaagcttgaaattgcagattaactaaggcagtgggcaaaagagaggtcaatttgggagaccattatccatttggtaattttaagagaatttccttgagtaagccattatgtctgtctattaggccacatgcctgtggacaataggacaaatgaaagttccaaatgatgccgtgttgtaagtaaagcccacacctgaaatgaatgagcagcaacatgtgtaccctgttcagagtcagtgatatctgggggcacaaagagagctatctaagttttggtgacacctgtaattgtggtgttggcagtagaatgctggaaaggataagacaagaatatgcatacataaatatcagccatcattgaggaasagtaatttttgccagcagactggggcaacagttcaataaaatcatcttgccaatgagagaaggaatgcccatctcttggtatggatccccattggcaatccccatttcccttggtatgaaaccagtggtgggacagggaatagagataa

SEQ ID NO: 607858 - DNA, 591 bp, Homo sapiens
gagaagcatactcttttgtggttttaagggggagaagaagagctcttgttacatgttggtgggatgtcataggctctaaagcttgaaattgcagattaactaaggcagtgggcaaaagagaggtcaatttgggagaccattatccatttggtaattttaagagaatttccttgagtaagccattatgtctgtctattaggccacatgcctgtggacaataggacaaatgaaagttccaaatgatgccgtgttgtaagtaaagcccacacctgaaatgaatgagcagcaacatgtgtaccctgttcagagtcagtgatatctgggggcacaaagagagctatctaagttttggtgacacctgtaattgtggtgttggcagtagaatgctggaaaggataagacaagaatatgcatacataaatatcagccatcattgaggaagagtaatttttgccagcagactggggcaacagttcaataaaatcatcttgccaatgagagaaggaatgcccatctcttggtatggatccccaytggcaatccccatttcccttggtatgaaaccagtggtgggacagggaatagagataa

SEQ ID NO: 607859 - DNA, 580 bp, Homo sapiens
gcaaatatctattttacatactgagtttattttcatgaatatatagccagaagtgggattgctggttcatatgggagctctgttttcaatttttatcaaaactccatactgttttccacactggctgtaccaatttacattctcaccaatggtgtacaagggttcccttctctccacatccttactaacacttgttatcttccatctttttaataatggccatcctaacagacataaggttatatctccttctgatattaatttgcctttccctagtgatcagtgacactgagcatcttttcrtataccggttgagtagggccctttttcatctttccgctaaatataatccttaaataaatgttgaatttcctagcaggttaaatccctggtctcaagctatattacaacagccgttctttggtaaaagcaaagaaagatgtattactcccaaggtgaggagcagagaaatggttctctgggaaaaggtgcagaacagagtatagcaagtgtatcattttatggagctatagtcccaccagccagagggcagcttattgtcttgaagcttaatagaagc

SEQ ID NO: 607860 - DNA, 580 bp, Homo sapiens
gcaaatatctattttacatactgagtttattttcatgaatatatagccagaagtgggattgctggttcatatgggagctctgttttcaatttttatcaaaactccatactgttttccacactggctgtaccaatttacattctcaccaatggtgtacaagggttcccttctctccacatccttactaacacttgttatcttccatctttttaataatggccatcctaacagacataaggttatatctccttctgatattaatttgcctttccctagtgatcagtgacactgagcatcttttcatataccggttgagtagggccctttttcatctttccgctaaatataatccttaaataaatgttgaatttcctagcaggttaaatccctggtctcaagctawattacaacagccgttctttggtaaaagcaaagaaagatgtattactcccaaggtgaggagcagagaaatggttctctgggaaaaggtgcagaacagagtatagcaagtgtatcattttatggagctatagtcccaccagccagagggcagcttattgtcttgaagcttaatagaagc

SEQ ID NO: 607861 - DNA, 416 bp, Homo sapiens
aaacttgaagataaatcagtagaaattatccaatctcaagagcaaaaaaaaaaaaaaaaagagaaaagaaggaggagaaggaggaggagaaaggatagagcctcagagacatawgaaagtcctcatgcatacaaatatagatagtaaaagtcccaggagagggagaaaatcaatatataaaaatcaattgtaaagatggcataaacacacttttccctgttcctcctctttaaatacaattaactacccttaaaataattcagcaggcaatcatgaaaggtctctgaaaggtgtaaaaaagaaggtagactgggctgggcgctgtggctcatgcctgtaatcccagcactttgggaggcctaggcgggccgatcacgaggtcgagagatggagactatcctggctaacatgtgaaa

SEQ ID NO: 607862 - DNA, 416 bp, Homo sapiens
aaacttgaagataaatcagtagaaattatccaatctcaagagcaaaaaaaaaaaaaaaaagagaaaagaaggaggagaaggaggaggagaaaggatagagcctcagagacataagaaagtcctcatgcatacaaatatagatagtaaaagtcccaggagagggagaaaatcaatatataaaaatcaattgtaaagatggcataaacacacttttccctgttcctcctctttaaatacaattaactacccttaaaataattcagcaggcaatcatgaaaggtctctgaaaggtgtaaaaaagaaggtagactgggctgggcgctgtggctcatgcctgtaatcccagcactttgggaggcctaggcgggccgatcacgaggtcragagatggagactatcctggctaacatgtgaaa

SEQ ID NO: 607863 - DNA, 554 bp, Homo sapiens
tgagttaattaaacctcttttctttataaactacccagtctcargtagttctttattgctatgtgagaatggactaatacaatagtcttttaaataaatggtttgggaacaattaaacatccacaggcaaaaaaaaacttaaaaaaaaaaaactcaaaaaaaaaaactcaacctaaacctcacaccttatataaaattaacttaacatggatcatccacttaaatataaagcataaactataaatcttaacaagaaataggagaaaatcttcaaaatctaagtgaaaagttcttagacttgacaccaaaagcctaatccttaaagaaaaatttgataagttggacttcatcaaatttaaaacttctgtgaaagaccctgttaaagaatgaaaacagaaacagaacctacaaactagaagacatttgaacatcaggtatctgaaaaaggaataaaatatagagtgtttaatgaattctaaaaactcagaaataaaaaacaagcaatccaattagaaaatgggcaaaacccctaaataagcattttattaaagagg

SEQ ID NO: 607864 - DNA, 572 bp, Homo sapiens
gggctatgactacagaccctgcagccattaaaaaacataagaaaatattatgaataatttttcatcataaatatgacaacttagaagaaatggaccaaatcttcaaaatcccaaaarttacaaaacataccaagatagagaggataacctgactagccctatacgactaaagaaatgtatttgtaattaaaaagcttccataaagaaaattttcaggaccatatggttttactggatagttctatcaaacatttaaagagttaatacaattttatacaatttgttacagaaaataaaagaggaggaagcactcccatggtcattttatgagtttggtactaccctgagatgaaatcaggcaaatacggtacaaaaaaaaaaaactatgaaccaataattcttattaacttatatgcaaaaacctcattaaaaatttagcaaatcagggctgggcacagtggctcatgcctgtaatcccaacactttgggaggccgaggcaggcagatcacttgaggtcaggggttcgagaccagcctggccaacatggcgaaaacccgtctttactaaaaat

SEQ ID NO: 607865 - DNA, 572 bp, Homo sapiens
gggctatgactacagaccctgcagccattaaaaaacataagaaaatattatgaataatttttcatcataaatatgacaacttagaagaaatggaccaaatcttcaaaatcccaaaaattacaaaacataccaagatagagaggataacctgactagccctatacractaaagaaatgtatttgtaattaaaaagcttccataaagaaaattttcaggaccatatggttttactggatagttctatcaaacatttaaagagttaatacaattttatacaatttgttacagaaaataaaagaggaggaagcactcccatggtcattttatgagtttggtactaccctgagatgaaatcaggcaaatacggtacaaaaaaaaaaaactatgaaccaataattcttattaacttatatgcaaaaacctcattaaaaatttagcaaatcagggctgggcacagtggctcatgcctgtaatcccaacactttgggaggccgaggcaggcagatcacttgaggtcaggggttcgagaccagcctggccaacatggcgaaaacccgtctttactaaaaat

SEQ ID NO: 607866 - DNA, 589 bp, Homo sapiens
accagtatttagaccagactgattatattagtgggtttttktgtgtgtgtgtgtgttatgatttttaaacttttttcttattacttgactagtctttgtaaagccagctctcccaacaagataatgttagcccagcaagatgattgactagacatagccaggtagaatagcttctaccaagggacagagacagctggtatactcctaacagattttcagagggaaggctgcccctaccacttccctccaaaaatgatgtagggaagacacagaagctgggctgaagtggggagaaacctgggaacactctatggggctaccgtgcacccggactctttccttgaccccagtggctctgagggcatgggtgagttgaacttgcaaggagcaacacattcttgccataggcctctggaaccccaccaggaggagacccctcaaccaccatggacacttgaattggcaggaagggctacttagagaactggtaggggcagcaagccagctgatgtggagcacagagggtttggagcaggaacatctgtagtggagcatggccagggacacccatcccccttggatcaactta

SEQ ID NO: 607867 - DNA, 545 bp, Homo sapiens
gatgaaagaaatcaaagcaagsccttaggcttgcttagaagcctaagagatgcttaaccgtgttcatggactggaaaactgaacaagataaagctgtcaattctctgcaaattgatctatagatttaatgcaatccttataaaaaccccaacatggtgttgtagacacaagcttattttaaaatttacataaaaataaaaaggccctagaacgcccaaaataataataataataaaatagtattattctactattataatatataatatataaaaatatacatacaattatataataataataatatattattattattgagatggagtttcactcttgttccccaggctggagtgcaatggtgcgatctcggctcactgcaacctccacctcccgggttcaggcaattctcctgcctcttccgcccaagtagctgggattacaggcatgcaccaccacgcctggctaattttgtattcttagtagagacggggttttcaccatgttggtcaggctggtcttgaactcctgacctcaggtgatct

SEQ ID NO: 607868 - DNA, 541 bp, Homo sapiens
ggagcaacacattcttgccataggcctctggaaccccaccaggaggagacccctcaaccaccatggacacttgaattggcaggaagggctacttagagaactggtaggggcagcaagccagctgatgtggagcacagagggtttggagcaggaacatctgtagtggagcatggccagggacacccatcccccttggatcaacttacttccataggagactttagccccaggggaactgttagtcctgaactctgtagggcaatcttgcccatcagttggggctggtccaacctgagcaccccttgctctgctggcctcccccaaggccctagcctagccacacctgcttgcagggcaatctcaggcrcgtgggggcccacatcatagtttctgtgctggcggactgtgcctgactggaaagctctagctgggtggccctcacagcccacatactccctccccacattgcagcttccctgagacccacagcaattcccaacattgcttcgctggtgcatatctttgcagacaggttttgctt

SEQ ID NO: 607869 - DNA, 545 bp, Homo sapiens
gatgaaagaaatcaaagcaaggccttaggcttgcttagaagcctaagagatgcttaaccgtgttcatggactggaaaactgaacaagataaagctgtcaattctctgcaaattgatctatagatttaatgcaatccttataaaaaccccaacatggtgttgtagacacaagcttattttaaaatttacataaaaataaaaaggccctagaacgcccaaaataataataataataaaatagtattattctactattataatatataatatataaaaatatacatacaattatataataataatratatattattattattgagatggagtttcactcttgttccccaggctggagtgcaatggtgcgatctcggctcactgcaacctccacctcccgggttcaggcaattctcctgcctcttccgcccaagtagctgggattacaggcatgcaccaccacgcctggctaattttgtattcttagtagagacggggttttcaccatgttggtcaggctggtcttgaactcctgacctcaggtgatct

SEQ ID NO: 607870 - DNA, 545 bp, Homo sapiens
gatgaaagaaatcaaagcaaggccttaggcttgcttagaagcctaagagatgcttaaccgtgttcatggactggaaaactgaacaagataaagctgtcaattctctgcaaattgatctatagatttaatgcaatccttataaaaaccccaacatggtgttgtagacacaagcttattttaaaatttacataaaaataaaaaggccctagaacgcccaaaataataataataataaaatagtattattctactattataatatataatatataaaaatatacatacaattatataataataataatatattattattattgagatggagtttcactcttgttccccaggctggagtgcaatggtgcgatctcggctcactgcaacctccacctcccgggttcaggcaattctcctgcctcttccgcccaagtagctgggattacaggcatgcaccaccacgcctggctaattttgtattyttagtagagacggggttttcaccatgttggtcaggctggtcttgaactcctgacctcaggtgatct

SEQ ID NO: 607871 - DNA, 424 bp, Homo sapiens
tctcttaatatatttattgagatagatagatatatcttactggttctgtttctgtgattgaacactgatttatacactcatcataactcataagatgagattcaaagggtagaggcctttttgaccctggcaaaggtgtttaagcaaaacttctgatgaattattggctggccactgagctatgccaactcagcrgtgaacccatgaaagccagatgtaaaattttttaaacaattttttagagagcagctgagcagccagcagagactatactatgagagaaacagactccagagaattcattcaaaaaatgtctgggcacagtggcttacgcctctaatcccagcactttgggaggctgaggcaggtggatcacctgaggtcaggagttcaagaccagcctggccaacacgatgaaaccccg

SEQ ID NO: 607872 - DNA, 608 bp, Homo sapiens
gctctaaaagaaaatgaagatccatgtcgagaactctagatggagagggacagcttctagcagcttagagtggctaccgtgggacagctactaggaaaattgtgactgcagtcctrcaactgcaagaaaataaattctgccaacagcctgaatgaggttggaagtggacctctggccccagatgagagctatagctctagctgacgctttggtttcaactttgtgagacactgtccagagaacatacccacagcaggcccagtcttctgaactacagaattgtgagctaacaaatgggtgccgttttaagtcaccaagtttgtgatgttttgttatgccatgatagaaaactaatccatcatcacatagacatgccactttctccactttttcatgtcaatgtggactttgttctcacctggactactgcagctctctcttcactagactccttgtcagtgcattgaaaccttctcaaatcatgcaggtttcatacgatagaatgatctctttagaatgtaaatttgcccactgaaccccattgcttaaaagcctgccatagcttcactaagaggtaaattccgcaatgttttaaacacggtttaaac

SEQ ID NO: 607873 - DNA, 608 bp, Homo sapiens
gctctaaaagaaaatgaagatccatgtcgagaactctagatggagagggacagcttctagcagcttagagtggctaccgtgggacagctactaggaaaattgtgactgcagtcctacaactgcaagaaaataaattctgccaacagcctgaatgaggttggaagtggacctctggccccagatgagagctatagctctagctgacgctttggtttcaactttgtgagacactgtccagagaacatacccacagcaggcccagtcttctgaactacagaattgtgagctaacaaatgggtgccgttttaagtcaccaagtttgtgatgttttgttatgccatgatagaaaactaatccatcatcacatagacatgccactttctccactttttcatgtcaatgtggactttgttctcacctggactactgcagctctctcttcactagactcctygtcagtgcattgaaaccttctcaaatcatgcaggtttcatacgatagaatgatctctttagaatgtaaatttgcccactgaaccccattgcttaaaagcctgccatagcttcactaagaggtaaattccgcaatgttttaaacacggtttaaac

SEQ ID NO: 607874 - DNA, 608 bp, Homo sapiens
gctctaaaagaaaatgaagatccatgtcgagaactctagatggagagggacagcttctagcagcttagagtggctaccgtgggacagctactaggaaaattgtgactgcagtcctacaactgcaagaaaataaattctgccaacagcctgaatgaggttggaagtggacctctggccccagatgagagctatagctctagctgacgctttggtttcaactttgtgagacactgtccagagaacatacccacagcaggcccagtcttctgaactacagaattgtgagctaacaaatgggtgccgttttaagtcaccaagtttgtgatgttttgttatgccatgatagaaaactaatccatcatcacatagacatgccactttctccactttttcatgtcaatgtggactttgttctcacctggactactgcagctctctcttcactagactccttgtcagtgcattgaaaccttctcaaatcatgcaggtttcatacgatagaatgatctctttagaatgtaaatttgcycactgaaccccattgcttaaaagcctgccatagcttcactaagaggtaaattccgcaatgttttaaacacggtttaaac

SEQ ID NO: 607875 - DNA, 553 bp, Homo sapiens
aatatttaatattttgaagattatactttttaaaattaataaatttatcacaattctcaataaattacaaaatattttgacaaagtgattctaatattaacatggaagagtaaacagataagagccaaaatactaaaaaggatgattaagcaggtagataaacattttataccccataayttattcaattgaaagtgttattgactataagagaaaccattttttacatactattaaaaatgttaaatgctcacagttaagttgtgatataattcttttttttctattgtaagagacattctgatatcagagatcttaaaatgttttttaaaaccttagaatcaatgaaatgtggtattagaatacattgtaagtctgtaagaatttgaacaatgtggtgctggtgtaagaatatagaggtatgtcattatattgtaagtagatctgtttgagacaaagatatgtgacctcttagagaattcaaagttgctgttttgagggagctcaatgaaagttaggataacacagagaaggaattcagaatcctagcaga

SEQ ID NO: 607876 - DNA, 600 bp, Homo sapiens
tgtctgtcttaattcatcacccttcccagtgctcagcagaactgcctggcactgagtaaacaattaatttgttgaatacgaaaatgtgtttgtctttctcctgcttttccacaacttgctattcccttctcccctgacctcttcagatttccattaatgattgaaataagaggaagttacagaggrgttgagcaatggtatcatagtaaggaaattaaatggaatgcccttagtatgagagttttactctgaaagcacctctgttgaggttcctatcagaaagcagtagcagaagagatgggggtgccatcctgagatgaagagatgggtgccctcctgagttgccttggagacagctgcaccatcactaccgtcctggatgtgaacccaggacctgtgaccagccaggttcagagtgtcactggactctgtcataacccatggacagagtccagtgtatcctagaatgtctgcattattagatgagactagtgaatgttgtaccaggcaaagccacaggtaactacaaaattcactgatgctgttgctttgagagtatagtgtgcgttggtggggggtggggcagcagttgtttttaag

SEQ ID NO: 607877 - DNA, 600 bp, Homo sapiens
tgtctgtcttaattcatcacccttcccagtgctcagcagaactgcctggcactgagtaaacaattaatttgttgaatacgaaaatgtgtttgtctttctcctgcttttccacaacttgctattcccttctcccctgacctcttcagatttccattaatgattgaaataagaggaagttacagaggagttgagcaatggtatcatagtaaggaaattaaatggaatgcccttagtatgagagttttactctgaaagcacctctgttgaggttcctatcagaaagcagtagcagaagagatgggggtgccatcctgagatgaagagatgggtgccctcctgagttgccttggagacagctgcaccatcactaccgtcctggatgtgaacccaggacctgtgaccagccaggttcagagtgtcactggactctgtcataacccrtggacagagtccagtgtatcctagaatgtctgcattattagatgagactagtgaatgttgtaccaggcaaagccacaggtaactacaaaattcactgatgctgttgctttgagagtatagtgtgcgttggtggggggtggggcagcagttgtttttaag

SEQ ID NO: 607878 - DNA, 558 bp, Homo sapiens
tgctgccagttagccaagacattatccaccaaattgctttgtgatttatacagggattaatcaaatctggctactataacatggggcattgtaactttaaagtagtgttttaattacagtgatgtattttagactcacattttgtgattcaaatatgttataaaggcattcttgcaccatggtaaagaatgtgtgtggtaaatctccgtttatatgtagttggaaaaaattcactgaataatgttttaatgatagggtattatgatacaatgtaaaaaacaattggttcttcagcagtacagaaagtaaactatatatgtgctatcaggaaaccccttcatactgtgtataaaattgcaatctagtgaaataaacygtatgcaatggaccattttagtggctacagtgatttgttaatgtaccactccttgtgcctcaaggcaagttacattcattttgtaacctagccaggtcagttgccaaactgaaaatagacctcctttcaatgctacagtcaacttctagggcttcttgaccatctagatcaaatatgcaaac

SEQ ID NO: 607879 - DNA, 551 bp, Homo sapiens
ccttgaggaagaaattttaatttaatttaaattctccctaacaagggaaattaaatactagaggttaaggtttttttggattgggttgcgttttggagagctacaaatcattgtaatctctgtttcttttccttctgtaagaattcattttcactcctttatgggcagtatctcctccgttgagaatgtgtgccctaaataaaggggttctccaaagttttgacttcagccccttttttcagtactatttgttgccttccatctctttttaagctacacatgcttgtcattgctkggggtggtagagcactgagttgaaagcaagaaggcctgaagttgagtatataggaatgaatgaaacaggcatgatccctttccacactgaatgtggagatgtaagtggataacagggttgactccccagtattggactcccaggattgtttatcccacagttccattgacttcagtcatagggtgggatttcttattcctatgacaagaataataaatccatcctacttatttggtcagaaactaagacttactgc

SEQ ID NO: 607880 - DNA, 551 bp, Homo sapiens
ccttgaggaagaaattttaatttaatttaaattctccctaacaagggaaattaaatactagaggttaaggtttttttggattgggttgcgttttggagagctacaaatcattgtaatctctgtttcttttccttctgtaagaattcattttcactcctttatgggcagtatctcctccgttgagaatgtgtgccctaaataaaggggttctccaaagttttgacttcagccccttttttcagtactatttgttgccttccatctctttttaagctacacatgcttgtcattgcttggggtggtagagcactgagttgaaagcaagaaggcctgaagttgagtatataggaatgaatgaaacaggcatgatccctttccacactgaatgtggagatgtaagtggataacagggttgactccccagtattggactcccaggattgtttatcccacagttccattgacttcagtcrtagggtgggatttcttattcctatgacaagaataataaatccatcctacttatttggtcagaaactaagacttactgc

SEQ ID NO: 607881 - DNA, 450 bp, Homo sapiens
gtgcactggcaacctcaccaatgcagagaaccggtaaaataattaataataataataataataataataataataataataataataatacatatgtaatactgtgagtctcttatagatttgttttgagttagggcgtataaagatgattcattctaatgatagaactaactgttcagtgagccagaattcaagctccgtagtgccataaaatgatgcctgtttcaaggtttaaatttaactgctgtaaaagtattaagagtgtatgtgctacatacaaaaaaatgtgagaatgtttcaagcatttactaagtgtctaccatgtgttgagtacgttatgcacattaagtcacttagtgttytaattaaccctgtgataaatatgcaagtgttttttacacacgtatgatgtgttctacagcattatttatatcagtgacagattttaac

SEQ ID NO: 607882 - DNA, 614 bp, Homo sapiens
aatagtgagtgagttctcacaagatctggttgtttgaaagtgtgttgtacagtacctccccctttacttgcttcctcctgctccagccatgtaagttgtacctgcttcccctttgccttccaccatgattgaaagtttcctgaggcctccccagctatgcttcctgtgagccaattaaacctcttttctttataaattacccagtctcaggtatttctttatagcagtgtgggaatggactaatacagtatcaaattatctcattattttcaatagtaaaagttcagaaatgagaaaatcatgaagaattgattaaagaaactattatgcaattgaataccttgcaatcatttaaaattgtttttaaagagtatataattacatgggggaaatgtmcaaaatgtaagttttgaaaggaataaaaaatgtttaaagccagatttaaaaatatatagacagaccaatttgcataggtaaaaaagtaaaatgcaaatggtaacaatggctttttgattgttgtgaatgttacagatatttaaatttttctctatatgtctttgttttccaaacttgtaacaatgattgttattgctttagtaaagaaaaaaaaagtt

SEQ ID NO: 607883 - DNA, 596 bp, Homo sapiens
tgttgtttaggacttttctgccacatttctgctggacctaatctcaacaagtatattatctgtcttctgttacaaaatggatttgaggtttaaaacctcagaagaaaacattagaattgcattgagcttttttttttttttttttgtagtgatcattttaataaaaatctctgtggttccaaataatcagccctccatctcggggtctcattttcattataaccatactaacttagttaataatttagtaaaactttatgttatagttactgtttctgtttactttctaacttccttgttatgagacaagccaaataaaataattttcatgctatgcctctagctctctacttggttgggccatggcattgccaaaatccaagaatgccattcacagtgtagcattctcagggcaccattgcaatgtgaacagtgtcccctggaggtgtgcaatatagtagccctgctgctaggctccatgcatgatggggaaaatttaaaaagcagaagatgggtatgatcctataaatttaaccatgtttagyttttcaactgtatgtcagtatcacattcttgaaaataatcactcagggctc

SEQ ID NO: 607884 - DNA, 643 bp, Homo sapiens
gggagtaacggttagtaaagtacttgagtgggagttgggagacaaaaagcacttagcagattagttccttgtaaatactaactggtacctttagggtttttcctattataagcaatgaaatacatgacattcagtttaattagctgtataaatagcaccaggagaacaagttaagcctcttgttcaccaccaagacgacagtagtattcacttgagaatgcaaaaatgcttataaaattttagaaccctatgaacatatctactctgttgaatgaaaaaccacagctgtccaagcatcattattcttcacactgagaaagtattcccgctcttcttcttctcatcccccttccccacccctgtacacctatactggcatcccacagcctaccagcagctctgcagtgaattgtaacatcagttatgtgagttagttttcttttggagatggaaaaattactgactgaaaaccattgcatcatccatttaaacyctcattctcaactagctccttttttgttagtactaacacatgatcaagtctttcactgtaaaaaaaaaaagaaaaaccaaaccttcctcccactcccatgttccccttgagccccaccttatctctcccttcccatcacagccacactgc

SEQ ID NO: 607885 - DNA, 559 bp, Homo sapiens
ctgctggccaagtatggagtgctgtggcttatttctgttcaaatagaggaggtaaggggtgtgctactccactcgaagccaaatgagagaggcaaaagtgaagactcagagaagcttagggttggtgttttccacaaataaacactggcctcttacttttagttagatgattgctgaaatgcaaaaactccttagcccaccttcaggctcttattagagccaaacataaaattttggagagcctggcatggccttcaaagagtttaggagtcaatgataaagacagaagctggctgaaaaggctctgtcagtggagcgagcaggaagatggggagagacgatgggagcagcctatgttcccagggtttggaattttcccttgaggtcacctggaccatgtggagatatgatagtcatcagagctgtttaaaaatattctaatacttctstctatctgagcctgtggattgtccatcaacatgtgaccagagggtaatctttcaagttagccttgcatatgtgaccagctttggctcatgaaatgtgggcagaaaaagaa

SEQ ID NO: 607886 - DNA, 606 bp, Homo sapiens
cttttgttccaccttgtttgtgtatgtacaattctgcctgaaaacaggagaatacagtggaactgaaactccttcaggcatatgattctccaagatggttattttgaggcagttatagatatgcatatactatgttagaatcaatttagtggaaacctgggtgagctttgtgaatgaacaytttgtaggtaaaatataattgcatcaatgtgcagttgcaccagagataggttctataatcatgggcacctgggaaactttcaactgtatatatggaattagcactaacccagtttactgaggttttctttgttatgccctatcttggaatctttttctgtgttagaaaaaatttcaccagctgaaaagtatattaagaaaaagatctgtactcatgtgaaaactattctggaacagtgcagcttcaaaggttgggtttctcttactgggtgaataaaagcaaaatgctgcccgtaaatggacaattgagtgcaaaagcagaaggagtaatggaatattacaaccaaaaaagaaatggaagagctggcaagagaactgggatacagcaaaatggagaaatataaaattagctgaaaacagaggcaa

SEQ ID NO: 607887 - DNA, 606 bp, Homo sapiens
cttttgttccaccttgtttgtgtatgtacaattctgcctgaaaacaggagaatacagtggaactgaaactccttcaggcatatgattctccaagatggttattttgaggcagttatagatatgcatatactatgttagaatcaatttagtggaaacctgggtgagctttgtgaatgaacactttgtaggtaaaatataattgcatcaatgtgcagttgcaccagagataggttctataatcatgggcacctgggaaactttcaactgtatatatggaattagcactaacccagtttactgaggttttctttgttatgccctatcttggaatctttttctgtgttagaaaaaatttcaccagctgaaaagtatattaagaaaaagatctgtactcatgtgaaaactattctggaacwgtgcagcttcaaaggttgggtttctcttactgggtgaataaaagcaaaatgctgcccgtaaatggacaattgagtgcaaaagcagaaggagtaatggaatattacaaccaaaaaagaaatggaagagctggcaagagaactgggatacagcaaaatggagaaatataaaattagctgaaaacagaggcaa

SEQ ID NO: 607888 - DNA, 567 bp, Homo sapiens
ctcaataattttctttttaaacaaatcaaccatgcgacttcatgtttgatgcaaaagcttattgctctctagtcactcagcagcccacaactgacattttaggttctgtgcctggcccagagtggatgctcaacaaagtaaatttttaaagaggttttcaagaagttacaatgtaatatttcctccttaacatttattaaaagtcaaacattgatacaaagaatgtttttctttaaaacaaatcaagaatattatccattctgtttaatgtcttcacaataagtatcctgatttcttagtaagaaaataagtttctcttttgttagattttaggggtgcaactcattgtgagcccctaaacttgtcttctaggtatttggwgcttaattttatgtttatttactactgttatctttaggtttgtaaacttatttcccacttccctatgttaaggcattttctttgtgtgtttgagacttactgtttaacttttatttccatatgaatgccaaaaatagcattagattcattgaaatttgtttgactctgtatttgtacatgctttca

SEQ ID NO: 607889 - DNA, 532 bp, Homo sapiens
ttcaacaacgttcacagcatcttcaccaggagtggattccatcaaaagaaaccactttctttgctcatccataaaaagcaactcctcttctgtataagtttgatcatgagattatagcaattcaatcagatcttcaggctcaatttctaattctagttctcttgctatttctaccatatctgcaatacttcctccagtgaactcttgaatccctcagagtcatccacgagggttggagccaccttctaaatttctgttaagtttatattttaacatcctctcatgaatcataaacgttcttaatggcatctggaatgatgaatcccttccaggyttccaattttatctgcccaaatccatcagatgaatctctatgtatggcggctatagccttacaaaatgtatttcttaaataataagacttaaaagccagaaatactctgattcatgggctacagaatgaatgtggtgttagcaggcatgaaaacaacagtaatctccttatatatttctgtcagagctcttgggtgat

SEQ ID NO: 607890 - DNA, 630 bp, Homo sapiens
ttaaacatgtgggcacagaataaggactctgtaaatgttagctggtattccagtgacttggaatttgggtaattcttcctataggatcaaaaggaaaactggaaaggaagaataattcagcaagacaactcttcaaagactgatgtggagatccaaggcctcttagcttttaagaacctatctayattttcatatgatatatttcaatatccatcacaatctccagcatcccaccccaaatgtaagaaatatgtctgacaaaagaattactttgatagagtaaatagtagaggtttaaaccctcttatctctagaactataggaattgaacctaaccctgagaatccaaaattctccatgctacctgtcacaccacatcctaaaataaggtcagctagagactaaaggtgactaagcaaaggaaagactcatctggctaatttggcacattgttttaaaattgtccagaaatctaaatagccaacagttaaataatcattaacatgatattgtaaaatggaaaaaatacttatgccattatattacaacaaaagaatagaggatataaaattaaatatatagtagagtatctatgcacattctgagtcatttacacacaacggcaatggt

SEQ ID NO: 607891 - DNA, 630 bp, Homo sapiens
ttaaacatgtgggcacagaataaggactctgtaaatgttagctggtattccagtgacttggaatttgggtaattcttcctataggatcaaaaggaaaactggaaaggaagaataattcagcaagacaactcttcaaagactgatgtggagatccaaggcctcttagcttttaagaacctatctatattttcatatgatatatttcaatatccatcacaatctccagcatcccaccccaaatgtaagaaatatgtctgacaaaagaattactttgatagagtaaatagtagaggtttaaaccctcttatctctagaactataggaattgaacctamccctgagaatccaaaattctccatgctacctgtcacaccacatcctaaaataaggtcagctagagactaaaggtgactaagcaaaggaaagactcatctggctaatttggcacattgttttaaaattgtccagaaatctaaatagccaacagttaaataatcattaacatgatattgtaaaatggaaaaaatacttatgccattatattacaacaaaagaatagaggatataaaattaaatatatagtagagtatctatgcacattctgagtcatttacacacaacggcaatggt

SEQ ID NO: 607892 - DNA, 604 bp, Homo sapiens
tttgtgttgctttggaattgcctctaaatgtctcttgtttggatgtccccccattactctctgagcagtgatagtactcaacttgttaggtgtacaccatagtgaaccacaatgcatataatctaaacattttaactgtcagaacttggtgctataccttaaaattaacactagagcaacagcatccatcagcgrtaggattgaactagaatgatcacatgtgctccagcaggatgccttgcctttagtgcaatcagccagtcaacaaagaactctttgagggccaactttatgtccggtgaagagtgaggttagaaatgaattttgatgcaagaggcttgtgttatgaaaaataaaataaaatccttaagtctccaaggaagctcagaatatgaccattcacatttgttgcataatgcctgaaaagttgaaaaaaaatatggttttttaaatccaaaaacatcctaaagtggctgcagtcccagtcctgacccagaggcaataacagcatcttccaaagaaaccatttgtttctttttaacaaggacgtaatacgagtttcaaaacttatctcacgggatggttctgagaattacaagcaaca

SEQ ID NO: 607893 - DNA, 604 bp, Homo sapiens
tttgtgttgctttggaattgcctctaaatgtctcttgtttggatgtccccccattactctctgagcagtgatagtactcaacttgttaggtgtacaccatagtgaaccacaatgcatataatctaaacattttaactgtcagaacttggtgctataccttaaaattaacactagagcaacagcatccatcagcgataggattgaactagaatgatcacatgtgctccagcaggatgccttgcctttagtgcaatcagccagtcaacaaagaactctttgagggccaactttatgtcyggtgaagagtgaggttagaaatgaattttgatgcaagaggcttgtgttatgaaaaataaaataaaatccttaagtctccaaggaagctcagaatatgaccattcacatttgttgcataatgcctgaaaagttgaaaaaaaatatggttttttaaatccaaaaacatcctaaagtggctgcagtcccagtcctgacccagaggcaataacagcatcttccaaagaaaccatttgtttctttttaacaaggacgtaatacgagtttcaaaacttatctcacgggatggttctgagaattacaagcaaca

SEQ ID NO: 607894 - DNA, 584 bp, Homo sapiens
ctataagacaaggaagagaccccagagcttccactctacgccatgtgaggacagagcaaaccaagaagagggtcctgaataagaactgaatctgccagcaccttgatcttgaacttcccagccttgagaactatgagaaacatatgtttgctgtttaagccacccagtctatactattctagaacagcacctcaaacagactaagacaataagcataccacttacatcttcttccaacacacagactaaaatgtggctctagataatgctcatggagtcaaagtctggggtgtgctactgaagcccctccaagcccttgatgatctgttatctgtascagttgggtagagttcttcaactgagtagaaatctcccacaattctttcatttcagctaccagaaagccataatattgtaatgcattattatttaaagtggtttacaaattgtagatactgaaacattttcagggtgtccagagggatgagctatctccaaatgaagatgaagtatctgagcactggagcaagtggatggtgaaacaccaccagttgcagtctaagtgcagatgaaaagacaaagtc

SEQ ID NO: 607895 - DNA, 584 bp, Homo sapiens
ctataagacaaggaagagaccccagagcttccactctacgccatgtgaggacagagcaaaccaagaagagggtcctgaataagaactgaatctgccagcaccttgatcttgaacttcccagccttgagaactatgagaaacatatgtttgctgtttaagccacccagtctatactattctagaacagcacctcaaacagactaagacaataagcataccacttacatcttcttccaacacacagactaaaatgtggctctagataatgctcatggagtcaaagtctggggtgtgctactgaagcccctccaagcccttgatgatctgttatctgtagcagttgggtagagttcttcaacygagtagaaatctcccacaattctttcatttcagctaccagaaagccataatattgtaatgcattattatttaaagtggtttacaaattgtagatactgaaacattttcagggtgtccagagggatgagctatctccaaatgaagatgaagtatctgagcactggagcaagtggatggtgaaacaccaccagttgcagtctaagtgcagatgaaaagacaaagtc

SEQ ID NO: 607896 - DNA, 584 bp, Homo sapiens
ctataagacaaggaagagaccccagagcttccactctacgccatgtgaggacagagcaaaccaagaagagggtcctgaataagaactgaatctgccagcaccttgatcttgaacttcccagccttgagaactatgagaaacatatgtttgctgtttaagccacccagtctatactattctagaacagcacctcaaacagactaagacaataagcataccacttacatcttcttccaacacacagactaaaatgtggctctagataatgctcatggagtcaaagtctggggtgtgctactgaagcccctccaagcccttgatgatctgttatctgtagcagttgggtagagttcttcaactgagtagaaatctcccacaattctttcatttcagctaccagaaagccataatattgtaatgcattattatttaaagtggtttacaaattgtagatactgaaacattttcagggtgtccagagggatgagctatctccaaatgaagatgaagtatctgagcactggagcaagtggawggtgaaacaccaccagttgcagtctaagtgcagatgaaaagacaaagtc

SEQ ID NO: 607897 - DNA, 561 bp, Homo sapiens
ccggctaattttttttttgtatttttagtagagacggggtttcaccgttttagccgggatggtctcgatctcttgacctcgtgatccgcccgcctcggcctcccaaagtgctgggattacaggcgtgagccaccgcgcccggccttctccgaggttttaagtgaggcatgcctggctggacgctgcactaagttacactttcagtcacacaaatgaacagaccacggcattaacaatcatcagcacagtgtcctcaaagaattaacaaagcctcaggaaggatatagagascttaagccttagtggaatctggattatattatttaaggaattaaatcagaaataattcaaaaagcttcatttgtgaaacttgcatccactccagatgttaagaaatgacaaaaataaaatgctgtatttttcgtgtatgtgtgtgtgtatatatatacagagagagaaagataaattcaaattttatcaactgttccaaatatataagttacttcatgcatatcaggaagctgaatacagaactatgagcctcataaatgccagctgatt

SEQ ID NO: 607898 - DNA, 572 bp, Homo sapiens
tgggcactggaattcccatattgtttatggagttgatgtgagggttcagttaaactattttttaaaaaggtgggacaagtaatcttagggtggcatcttgttggcagcatatggaccccgatgccaccacaggcaggccaagatggtagcagtgcaggtgccaccccactatggccaagcgttattccacaggacagcgtggaggaaactgatttattctcagaggcttatcaagcctcaktctctgccagggttgtcaaaaattctactctaacaaactgcttatgggacagatttctcttttgagccaaaaagattctaaagactcctggggtccatgaggaagcatctttgttctcactgggaacccaacgaataagtctttatgttctttccactttatcatccaattcctctgcagcttttcactgatcctgctatgaagagaacatgccaacactaggggaaatgccacagcagcaaactgaacgcttgacaaaacaacagttgagtacaacagtcagcagaatgactgcagggaaaaaaaggacagagcagaaatgtttcagatg

SEQ ID NO: 607899 - DNA, 455 bp, Homo sapiens
caacatgtaatatcacaattcgccacttggtgtcactagacctccaggaaactcaaatttacacttaccctgacaagagattacgttagatttccacacctttttttctgtaaggccccatttcacacaaagatattacaaaatgacaacggcatgaattatcggaatgatggaactatcttctaaaagggtagtaaactcaggttaactcccaaacagaatacacacctattaccttactagtaagagtaataaccaccaattattgagcaccagccacagtgctaagtgytctacctatattgtcttatctaatcctgaaaacacgatcttcctttaatggtagttgtctttatttttaaaatgagaaacctgagctctgcagaggttaataacttgccaagctgttcccagtacccaatctcacatacagatctctgctaagccatgaggcc

SEQ ID NO: 607900 - DNA, 582 bp, Homo sapiens
ggatttattcctgaaataaacaaaattaaataatcagctgatggcaaattttagctaaagtcattaaagccgatttttagattcagagtagcattttggaactcccaaaattctgaagtgcagcagggagagggaacatttatccatatgtattctttgctctaatgagacactttataaaaatatttatttgaataggtaaatatttatgaaaatagatgaactcccatcttgagaaaattcaatatatgaaaattcagaactacaagatgtttgaataactcattagaaatggagccagtgaagggcttacaaaatgtgtaaaggtgaagtttgccatcttattgctactataattcacaagccagcatgaactttctggtcattgatagatttaygacatttaggctacagactcttaaatatagaagactaagtctcattcattagagaatctcatccattagaatccttatccgcatattacttagggcaagggttataagccaagcaaaagatggtaaatacaaatgaacaactggcacatattccttctttcctaatgaattttataatttagag

SEQ ID NO: 607901 - DNA, 440 bp, Homo sapiens
tatccgcatattacttagggcaagggttataagccaagcaaaagatggtaaatacaaatgaacaactggcacatattccttctttcctaatgaattttataatttagagcatctgaatggatccctaagggaagtattctttcatgactaatactctttctaggattagcatctatttctaattcagaaagtttgaatgcgctagcctttaagaacttggaggagtcttctatttaataagatcaatcttttaattcatggatcattttaattttaatatttactatacatacaaatcattcaaattatccctcaaaaaaawttttttaaaaaagcattttgatagcaccacattaaaaactaaacttccagcaaagatagtgtgctcaaaagtataatctggtaaactctgaatgactagcaaatcatgctgtacatat

SEQ ID NO: 607902 - DNA, 517 bp, Homo sapiens
aaaaaatcccattccaacactaatcaaaagagagccaaagaggtaataataatattagacaaagtasatttcagagaaaagaatattgctaggaacaaagagagccatttcataatgctataaggtttcattaatcaaaagagtgcagcccagttcttaaccaggggttggggacccctgctctaggtatctcatagaagtggaataaaaagtgttttgttttttttttgtgacaggcttatatcgcttagcataatggcctcaaagttcattcattttgtagcatgtgtcagaatttccttgcttttaaaaaatatatactttttttaagggaaattttagtatcataacaaaactgagaggaagggatggagatttcccatagacctcctgtccccacacacagacagcctcccccactatcaacatccagcaccagaggggacatttgctacaactgatgaacctacattgccacatcactaccacccagaatccatggtttaccttagggttc

SEQ ID NO: 607903 - DNA, 483 bp, Homo sapiens
ctgtactttcaaataatagataaaacaacyaggcagaagatcaaaaagaaaatggaagattggaacaacactataaaacaatagaatgaatagaactatatagtacagcccacccaacaaaagcagaatacacattcttctcaacagagacatagaatattctccaggataaaccatgtattaagccataaaatgatagaccatgtattaagccataaaataaactttgataaatataaaagggtggaaatcatacaaagtatgttctctgatcacattggaatgaaattagaaattaataaaggaaatttgagaaatttatgaatatatggaaattaaacaatacactcctaaatagccaatggattaaagaataaaccacaatggaaattacaaaatagttcaagatgaacgaaaatgaaaacacaacacaagctgataagatgcagttaatacttagggacaaaatcatagctgtaaaac

SEQ ID NO: 607904 - DNA, 637 bp, Homo sapiens
tagcagctggcctctggtataaaaagcaaattggtgaataaaattcacactcttcaaaatgtgcgaacatcggtgattttttttcagcaccactttcttctaaagctaaaccagagaggcaaacactgacttttaaaaattccctttttatttaaatttctgtcaattttcttggtaaaatgttttgttgaaagtattgcatagacagggttactgtgcacacatgtacacacacacacacatacaaatacactgcccttctatcttccaaaactaagcgacaaggtaaaaaaaaaaatctttgatccagctaaacaaagacctaatttaatcatgaaattctgaaagtatgactaagagacataaatatgttgctgtatttttatgaatttattagcaaaacacttttgaacgcagtgtctaataaagtatattttccctaaatttaaaatgaagatggccttactaagtagcagatatttatawaatacagacaacttttctttttaaatttaaacttaatttttttttttttttagatacaaggtctggctctgtcacccaggtgggagtgcagtggcatgatcatagctcactgcaacctcaaactcctgagttcaagtgacctccacattaa

SEQ ID NO: 607905 - DNA, 641 bp, Homo sapiens
tcccccatgttggagaggggcctagtgggcggtgtttgggtgataggggcagatccatcatgaatggcttggtgccctccctgcagtaatgagttcacatgcaatatggttgttaaaaggagtctgcaatttccttcccctctcttgctctctgtctctctccatatgacatgmaggctccccttcaccttctgccaagagtggaaacttcttgtggcctcacctgaagcagatgctgctgccatgcctcttgtacagcctgcaaaatcatgagccaaataaacctcttttccatataaactccccagtctctgatattgctttataacaatgcaaaatggactaacacactcatgaaaatggtaaagggaagtccagtttttattttttcttaaaactgtactgtggagatgatgactgtacagaaagcaaagcattcaaccctacctaatgcataggggaatgtaggcttccaaaagaattttctgaaggaagtgtaattggtagatcatctgatacatttaagaatatggaaattaatattgattaatgtttaacatatctcaagaaacagataggtacatagaaaactcagcaaaattttaaaaatgagtcaactaataactccaagcaaaaagagc

SEQ ID NO: 607906 - DNA, 491 bp, Homo sapiens
actataatgagcaatagtatatcaaatacctgarggctgggtgtggtggctcatgcctgtaatcccagcactgtgggaggctgaggcacgaggatcacttgaccccaggagttcttgaggctgcagtgagctaggatcgcaccactgaactccagcgtgggcgacagagtgagaccttgtctctaaaaaaccccaaaccaatatatcgtatacttggaaactgctaggagagtaaactttaagtgttctccccacaaaaatatgatatgggtgtaaagtaatgcatattttaatttgccagatttagtcattccacaatgtatgcatatattaaaacatcatgttgtatatcataagtataatttctgatttgtcaattaaaaattaaaaagtagtctgtgaatgccaagctggagccaactgatatatttagcattggatatatgctaaaactggaaacctttcactagggacaaagcatttctgataaa

SEQ ID NO: 607907 - DNA, 491 bp, Homo sapiens
actataatgagcaatagtatatcaaatacctgagggctgggtgtggtggctcatgcctgtaatcccagcactgtgggaggctgargcacgaggatcacttgaccccaggagttcttgaggctgcagtgagctaggatcgcaccactgaactccagcgtgggcgacagagtgagaccttgtctctaaaaaaccccaaaccaatatatcgtatacttggaaactgctaggagagtaaactttaagtgttctccccacaaaaatatgatatgggtgtaaagtaatgcatattttaatttgccagatttagtcattccacaatgtatgcatatattaaaacatcatgttgtatatcataagtataatttctgatttgtcaattaaaaattaaaaagtagtctgtgaatgccaagctggagccaactgatatatttagcattggatatatgctaaaactggaaacctttcactagggacaaagcatttctgataaa

SEQ ID NO: 607908 - DNA, 491 bp, Homo sapiens
actataatgagcaatagtatatcaaatacctgagggctgggtgtggtggctcatgcctgtaatcccagcactgtgggaggctgaggcacgargatcacttgaccccaggagttcttgaggctgcagtgagctaggatcgcaccactgaactccagcgtgggcgacagagtgagaccttgtctctaaaaaaccccaaaccaatatatcgtatacttggaaactgctaggagagtaaactttaagtgttctccccacaaaaatatgatatgggtgtaaagtaatgcatattttaatttgccagatttagtcattccacaatgtatgcatatattaaaacatcatgttgtatatcataagtataatttctgatttgtcaattaaaaattaaaaagtagtctgtgaatgccaagctggagccaactgatatatttagcattggatatatgctaaaactggaaacctttcactagggacaaagcatttctgataaa

SEQ ID NO: 607909 - DNA, 422 bp, Homo sapiens
gaaaaatcaaagtaaagttgagaatgaacactaaggtactattcagcctcacctttctttggactaaaagtacaatgcccctttttttctcagtagcagctttctgaacttcaatactttccttattatagtgatagccatctagaaagctatgtttaccgattaataaaagaagaacyttagaagggaatgaatctgttcagaaaaaggccctatgctatgtagaagggaaaagatctttaatgaaagttaaattaccttcttagaattaaaggctgccattcacaggaagcctgagccccccaggtgatttggaatacaactccactttcatcactatcactttagagatggcaagtaatagctgctactttattttaaaaatatcccccaccattcaaacctctttttacttgagaaac

SEQ ID NO: 607910 - DNA, 422 bp, Homo sapiens
gaaaaatcaaagtaaagttgagaatgaacactaaggtactattcagcctcacctttctttggactaaaagtacaatgcccctttttttctcagtagcagctttctgaacttcaatactttccttattatagtgatagccatctagaaagctatgtttaccgattaataaaagaagaaccttagaagggaatgaatctgttcagaaaaaggccctatgctatgtagaagggaaaagatctttaatgaaagttaaattaccttcttagaattaaaggctgccattcacaggaagcytgagccccccaggtgatttggaatacaactccactttcatcactatcactttagagatggcaagtaatagctgctactttattttaaaaatatcccccaccattcaaacctctttttacttgagaaac

SEQ ID NO: 607911 - DNA, 667 bp, Homo sapiens
gattgtctgtctttcaaataccaacttcccattctcagtggtacagtggccagaaagcatactttttccaattatatcagcctcatgatcagaacgattaatggagtcttctgtgagtatgcaaatagatgtacagatgtttatcaaacacagacattccgtattatacttgactgataaatacataatcattaattttgatttacatgctgttgtgtgtccyagcgtgtgtgttgactggcagagatttttaaaaatcttgctgcatcatacttcagtatgcactctgcaagtgcatacagcagcaaaataaccaacaaatagttaataatgaattaaatgagttaataaaaaaagatgtctggttaaaaaccagactgcaacaaaactttctctcaaaaaatttagtaacataaactgctaaagataagataccaatcaaagaactgtgcagttgtggccataactcagacaaccaaggatgcagacaggaagacccatagagtatttattctgtgccccaacagcccccagaatgccgtgtctgcaggaatgatccataggctggaagaaaaagtgatcattatgtcagatgtgatgaatgcaacacctggttaggaacaatgtgtgcaaaactgtacacagccatatgaggatggaagcatat

SEQ ID NO: 607912 - DNA, 667 bp, Homo sapiens
gattgtctgtctttcaaataccaacttcccattctcagtggtacagtggccagaaagcatactttttccaattatatcagcctcatgatcagaacgattaatggagtcttctgtgagtatgcaaatagatgtacagatgtttatcaaacacagacattccgtattatacttgactgataaatacataatcattaattttgatttacatgctgttgtgtgtcctagygtgtgtgttgactggcagagatttttaaaaatcttgctgcatcatacttcagtatgcactctgcaagtgcatacagcagcaaaataaccaacaaatagttaataatgaattaaatgagttaataaaaaaagatgtctggttaaaaaccagactgcaacaaaactttctctcaaaaaatttagtaacataaactgctaaagataagataccaatcaaagaactgtgcagttgtggccataactcagacaaccaaggatgcagacaggaagacccatagagtatttattctgtgccccaacagcccccagaatgccgtgtctgcaggaatgatccataggctggaagaaaaagtgatcattatgtcagatgtgatgaatgcaacacctggttaggaacaatgtgtgcaaaactgtacacagccatatgaggatggaagcatat

SEQ ID NO: 607913 - DNA, 608 bp, Homo sapiens
tacatgctgttgtgtgtcctagcgtgtgtgttgactggcagagatttttaaaaatcttgctgcatcatacttcagtatgcactctgcaagtgcatacagcagcaaaataaccaacaaatagttaataatgaattaaatgagttaataaaaaaagatgtctggttaaaaaccagactgcaacaaaactttctctcaaaaaatttagtaacataaactgctaaagataagataccaatcaaagaactgtgcagttgtggccataactcagacaaccaaggatgcagacaggaagacccatagagtatttattctgtgccccaacarcccccagaatgccgtgtctgcaggaatgatccataggctggaagaaaaagtgatcattatgtcagatgtgatgaatgcaacacctggttaggaacaatgtgtgcaaaactgtacacagccatatgaggatggaagcatatggaactgatcagaacacaatcctggtctcaggtaagggggatggggtcacacagatcttttaaaagactcagaggaagcatgtggtgatggcgatgatgggggagttgagggaggagttgtgaaaccatgagcctggatagaat

SEQ ID NO: 607914 - DNA, 608 bp, Homo sapiens
tacatgctgttgtgtgtcctagcgtgtgtgttgactggcagagatttttaaaaatcttgctgcatcatacttcagtatgcactctgcaagtgcatacagcagcaaaataaccaacaaatagttaataatgaattaaatgagttaataaaaaaagatgtctggttaaaaaccagactgcaacaaaactttctctcaaaaaatttagtaacataaactgctaaagataagataccaatcaaagaactgtgcagttgtggccataactcagacaaccaaggatgcagacaggaagacccatagagtatttattctgtgccccaacagcccccagaatgccgtgtctgcaggaatgatccataggctggaagaaaaagtgatcattatgtcagatgtgatgaatgcaacacctggttaggaacaatgtgtgcaaaactgtacacagccatatgaggatggaagcatatggaactgatcagaacacaatcctggtctcaggtaagggggatggggtcacacagatcttttaaaagactcagaggaagcatgtggtgrtggcgatgatgggggagttgagggaggagttgtgaaaccatgagcctggatagaat

SEQ ID NO: 607915 - DNA, 330 bp, Homo sapiens
accaggccctagtcttctctttctccatcaactgatcatagggaagtccctatgaggccttcagtgcaggctcgggaagagaagacacggtggcaggagtggagcctatggacatttgagacattttctcgtgtracttacttgtgtcttcaggacctgctcaagaccaaacacatatataccacttccagttcatgatggaatgtttgtgtgaagaacccactttatggctagatgggtcagaaaacacccagttcaatataggcagttcagtttgcatactgacttgaatacacatagtcaaacattcagtttctaccaaagcccagt

SEQ ID NO: 607916 - DNA, 555 bp, Homo sapiens
gttgtttctcttttccaatggggaagtgatgataattccaggagctgaagcctagtgagcttgaaaaaggttccagaaaaaattattatgaacagatagtttctgagtaagtcaggtctctgcctgcatgggttctgcaacttcagattcaaccagctgcagatcaaaaataattgcaaaaaataaaaataaaaataaaaaataaaggccaggcattgtggctaatgcctgtaatcccagcattttgggaagccaaggcaggcaaattgcttgaagccaggagttcaaaaccaggttgagaaacatggtgaaaccccatatccactgaaaatacaaaaattagctgagtgtggtggtgcacagtggtaattccagctagtcaggaggctgaggttggagaatcacttgaactcaggaggcgcaggttgcagtgagctgagattgcaccactgcactccagggtaggcaacagagcaagacccmgtctcaaaataaataaataaaaaataaatataatttctaatttgattgcactatagtctgagaggctgttat

SEQ ID NO: 607917 - DNA, 594 bp, Homo sapiens
atatggagtttggttttagatagttctccattcaaattgtatctctgctactcacctgtcatgtgatatttaagccaagtgtttcatctctttgagcatcagtttctttatatgtcacataaaaataatgtctcctatatcaccaactcttatggagaattaaataagataaatttacataaactacaaacatagtacctggcatataataagtactcaatcaattttagtaacttctgtcctcacttccacttcatattaattttcccttcatgcaccctaagtctcattaagttttagttcagtgaaagaatagaattccaggaaggtcaagagagttactcaaggacatatagctaataaatagcagaggcaaatcagggccagagactaagtctggctaactgaagttccaatattctttccattatgcttcagaatctttcatagattatgagattgccatgaatctcatccaaaaacagcagagtgctgacaagtgtgggmaagctcattggctggatggcagtctctattctacctgccttcaggaaccctgcaaggcagaaaaacagaagctccagaggggaccta

SEQ ID NO: 607918 - DNA, 567 bp, Homo sapiens
ttaagagctccggctccaaagctacatacactgggtttattaaaactaaactctgccgctagaataaccaacttcttccagggtgtttctagttttagcactgtaagtcccatattcctagaaacccctcagtactaggcaaactgccatggttggtaaccctatctttcatttattatatataaatcatatatatatacatatataaaaatatattatgtgtgtgtgtgtgtgtrtatatatatatatatatatatatatatgcacacataaaaccttgtggcaattgctaaacctctgtgtttttcagttccctcatcagtaaaatgaggattattttactttatttggttgttttacaattaaacacaataatttgtgaacagtgcttagtatagaacatattcaatgttcagttaagtgatgctataaataagtaaatatagctgtaataattcttattccaagaaaaacattgatgagttgtctcctatcaagtaccaaagaaataaagtagacttcaatagttaggtaaaaagaaagagaatgtcttgattgcagagggat

SEQ ID NO: 607919 - DNA, 392 bp, Homo sapiens
ctgtgcccaggccgagcaggtgccaggccactgtgtcacccttgcacatgtccagcctgggcaggttagagaacagaaacccattaatggctggaaaacaaaaacacaagacaaggtggggagatgagaccagactactccagcactggccaggagcatggcatcagctatgtactatggtttcacacaacttgaaactgmtgagtcatcctcaacacctctgccttcctctctatgccactttaactctactcgtgaatatctctgtctttgggatgagtgctcaactgtcctttctggcctcacctacaccatgatccacatgctgacaacattgaactattctgcactaccaaacacacacacacacacacacacacacacacacacac

SEQ ID NO: 607920 - DNA, 550 bp, Homo sapiens
tttatatccactttatttcatctgtgacctcaagtagactagacttttgcttttcaacttcaaattgatggattttccatagaataatagtggtggtatccacaggaaaaaatacaactaaacaaaacaaaaataggtcttgagcatttactttgtatatggaaatagcaacctttattcacagttatcttaataaatgatctaaaacactttctgggacaggtaaactgattgtcttctcatttttataaataaaggggactaatatagagaagaggtaaatgacatgttagttatgcagctactaataaagggctggattttgagactaaatctgtctgatttcatattccatgctttgaattcctaccttatgctgccacttcccagtgtcacttrtttgctttgctggttattatcactgcccacctagaggaacaactggctccttcattttgaaattttgctacttcttattagacagcctattgtagctgtgggctgccatggctgtaattttattgtgccctgtgtagtaaatacagttgtg

SEQ ID NO: 607921 - DNA, 586 bp, Homo sapiens
ttgtggatttcatttctgccttttagtttttacttcctctttctttggaggcagaagttgggcataagacaatatgaggggtggtctcctcccttattcccccactttgagaatctcactcaatagtgggagttctcactttcattctcactacctatgtcttcttgcaagacagatcgatagtgattcatatagtacacttgtgccgaagtattttggtgaactaaggtagcaatgaagctttttatcatttgaagaagtrcaggtagcaaggaagcagtaagcaggtttctattactattataactcctattataagagttttaaatctttttagcactgggaaccactttccaaacatggccccaggatcgaatccatgccacacttgcacgggcacatgtgccagttttgtcatatttctaactatgtcttcaactacttgcctttgatcgtctatgtgtagacagcaattagtaaggttaaattttctacagacccctccttcagttgctagcaagtagtcgagagccaatctattttgatagatagcatttctcatctgagtttcttgccaggcaagaat

SEQ ID NO: 607922 - DNA, 533 bp, Homo sapiens
ataagtacagatagacatgtagaattggtttctttttttttttttgagaagcagtcttgctgtcacccaggctggagtgcaatggcacaatcttggctcactgcaacctccgcctcccaggtccaagcaattctcctgcctcagcctcctgagtagctgggattacaggcacctgccaccacgcccggctaattcttgtatttttagtagagacggggtttcgccatgttggccaggctggtatcaaactcctgacctcaggtgatccgcccgccttggcctcccaaagtgctgggattacaggcgttagccactgygcccagcctggtttcacttttcacaagtgggatctgacttcacgtgcacccaatgttttacagctttttaaacttaatggtagccaggcgtggtggtgcgcgcctatagtcccagtactcaggaggctgaggcaggaggatcacttgaacctaggagttcgaatccagtctgagcaacataatgaaattctgtctcaaaataaaataaaataaaaa

SEQ ID NO: 607923 - DNA, 556 bp, Homo sapiens
tttgtgcagtgagagaggctggactgtgtggctcccagggttccttcagctcagactgtctatgtcaccccatcagatgccatattctcagccatgtctcccaagaggccctgggggtttctctcctgggggtcagctttgggtggcatcattgtgatgcattggacctcaccagccctgcttcccaggaggttttcaactgggtctcttactaagaaagcccaaagaccaggatcctagagagagctgtcaggcagaggccagcatggacttagagagcatggcctaagagaagccaaagagcawgccctctcccaggggaaatgatggcagaaagtcctgggttcaaatcctagcagctctgccacggactcactgtgtgaccttggacaagtcacttccttctctgagactaagtgtcctcatctgaaaaatgaggataaaagagtctttccatcacatggtaaaaagggttgctcagcagaggagctacaaaaggttgcttccttccttctccaatcttccccaggatcctgtgtgcaggggctggtgccct

SEQ ID NO: 607924 - DNA, 594 bp, Homo sapiens
ctgtcatagggcagaacactgacaaaaaaaatcttagagctgaataaaaatcatcaggtgtaacctggaggggaagggaccatccaaagatgagccagggaggctggctctcaaatgtactgctctttccatccccgtccccctggccaagtaccctccccatctatgagagtatagaaagcagaacaggcacaaggaggggggttccagggaggtgactccagacttttaatagggaaccactttctgacaactagagtggtccaagaagrgaaaggtactaagtccccccctccccaccccaaagctaggggtaggcaagaagtcctctggcagggcattaggtgggagtggaatgggatggcgttcagggttcctgccagcctgggaaatggacccagaatgacgatggtccactgggctgtaaaagagctatgtgccatgggcaacttcctcccttctctgggcttccatttcctcattgccctatggttggccttcctccctgaggactgggttcggatcccaccagggtctgcttgcaacagaagtgatcagagcctagaatctcacgtaagcagctggctcctctcc

SEQ ID NO: 607925 - DNA, 594 bp, Homo sapiens
ctgtcatagggcagaacactgacaaaaaaaatcttagagctgaataaaaatcatcaggtgtaacctggaggggaagggaccatccaaagatgagccagggaggctggctctcaaatgtactgctctttccatccccgtccccctggccaagtaccctccccatctatgagagtatagaaagcagaacaggcacaaggaggggggttccagggaggtgactccagacttttaatagggaaccactttctgacaactagagtggtccaagaagggaaaggtactaagtccccccctccccaccccaaagctaggggtaggcaagaagtcctctggcagggcattaggtgggagtggaatgggatggcgttcagggttcctgccagcctgggaaatggacccagaatgacgatggtccactgggctgyaaaagagctatgtgccatgggcaacttcctcccttctctgggcttccatttcctcattgccctatggttggccttcctccctgaggactgggttcggatcccaccagggtctgcttgcaacagaagtgatcagagcctagaatctcacgtaagcagctggctcctctcc

SEQ ID NO: 607926 - DNA, 354 bp, Homo sapiens
ccttttagaacccaggtgcaggcccagagcccagccaggagtaaactgagcctcagcgtggaaaatatggaaccaagatatccgggaagggaggcgggcgggaaggggaataatgcaaaccatgcagctctgcccgggaaagagcaaggaaaggggggccrgggactggtgaacagcaaatgagatatgagcttgcaatgtgatatggtagcccgctgaagtcagcatctctctctcaccctctttctctctctgcctgcatggggccacactgctgtagcacagagtaaaggcagaggaccccctatctgcaggctcagccctgccaggacattacctagaggtgtcctcatc

SEQ ID NO: 607927 - DNA, 612 bp, Homo sapiens
agtgggtaggaggacaccttcccagccagcaaggaaagtccaccaggcctccctggaacaaggccccccaggaagtaggctgtgatgtaagagaaacgggaaggtcacacctaatgatgaactaacttctgtggggcgatctctgccctctaagcaagcaaaggcttgagaaaggtaagttctcatgggcagcccttcttcctccccaacccctccctgcctataccttctcctgtcccgcctccccatggttggaaaaggctggctgtgcagtgttggaatgtggagctattcctagggggagacagggaagtgagggaagctgaattggccatgctgagcaagacgtttcactactcaagcaataatagggctttcatggagatggccaaccttgggttctgaagcgattttccacccacaaccctccttcctcccgccctgagtcgccttgcctgagaatcctyctttgttgggctgagccctggggggagaggggccgggctttgtgaagggggcccccaggccaggctgactgggctcctgttgtctgggtggagcacatctgggcagtggaagggaactagggccaaggccagggccaagacagcc

SEQ ID NO: 607928 - DNA, 529 bp, Homo sapiens
gggttctgaagcgattttccacccacaaccctccttcctcccgccctgagtcgccttgcctgagaatcctcctttgttgggctgagccctgrggggagaggggccgggctttgtgaagggggcccccaggccaggctgactgggctcctgttgtctgggtggagcacatctgggcagtggaagggaactagggccaaggccagggccaagacagccagcccttccttcccagaaagccccggggcacaggccctgcctctgcttctgggtgctgagttgcgttttggggctggcgtttcccacatttctctgtgggagggtccttgagaggacacagggatgaaatggtgactctgtccagcacccttggacagagaagcctatgccggagccacctctcactacaggtagacacaagggcaagggtggggaggatcccaggccctgacttggagggtccgggtctgaggagcaggacctggcaggataggggtgaggctgaggctggggctggggctggggcttggcc

SEQ ID NO: 607929 - DNA, 529 bp, Homo sapiens
gggttctgaagcgattttccacccacaaccctccttcctcccgccctgagtcgccttgcctgagaatcctcctttgttgggctgagccctggggggagaggggccgggctttgtgaagggggcccccaggccaggctgactgggctcctgttgtctgggtggagcacatctgggcagtggaagggaactagggccaaggccagggccaagasagccagcccttccttcccagaaagccccggggcacaggccctgcctctgcttctgggtgctgagttgcgttttggggctggcgtttcccacatttctctgtgggagggtccttgagaggacacagggatgaaatggtgactctgtccagcacccttggacagagaagcctatgccggagccacctctcactacaggtagacacaagggcaagggtggggaggatcccaggccctgacttggagggtccgggtctgaggagcaggacctggcaggataggggtgaggctgaggctggggctggggctggggcttggcc

SEQ ID NO: 607930 - DNA, 515 bp, Homo sapiens
agaagccaaagagcttggtcagttagaaaacaatatcagcttgggcataggctgcagtagctggagagagttcagggagggaggggggaaggccagaagctcaaagagctccctcctgaagccccctgacagacagccagatactcctcatgaaaagaagcatttcagaaatgattcccaatgtcagggtccactgggaggggtcaggtgaggagaagcagtcccggaagtagtgtatgagcttgactgtcccttggttctgtaacatacttccctgcctcrttgggtgccttccctttctctgaggttggttctcccccttccccaacaagactgtgagccatcccaaagctttccagtaaatctatttttggtttaacttagctggactcagattcaaccaaaacccctgctggatatggcccctgatggctaaaagtcacaaaccagtgtgcccatcctagctctagaacagaggcaatgcacggtgaggggaggagccagttcagaatcta

SEQ ID NO: 607931 - DNA, 592 bp, Homo sapiens
ccagaaaggtttcctgtcaggactttcctccctcagggatttctgaggactactgcatgctgggctaggaagaaagcaaagatagagaaacaatctcaggggtcgggggtggtagaacagtccttggcagtgtgctgtggcgcagagggctgtggacatggagtgcccctgggaagaggtgatgggctctcccaaggcctgttcactgtgtgccaaggtttgcctgctgcctcttattccaccctcacacaacccaggggagaggtattcatggctgcattttataaggaaggacactgaggtagagtgattaaagggccttctcagatgtcccatggctcagttttgtctccaaatctcatggtctgtccgatctccatattacactgctgcagtctcaacacagccaagagtactttcaacaggagaggacaggaaggcttcaccgagaaggtgacatttgggatggacattcagaacaggtggwtgggaagaaggagagtattccaagggtgtagaggagtgtggggatgggatggagtatgccaaagacaggagttcaaggcattgaaaggtaccttagaaggacagc

SEQ ID NO: 607932 - DNA, 633 bp, Homo sapiens
gagtgattgcaatatgccccccttgcccctttcccccagggtgaagcaggcagatgggcttgtgactttgaagtgtttttgggtacccttgggaattcccaaggcaggcccaagccctaattgcctcccagaggctatgcaggctctgccagaggaggaagggccaattcttgctttttgtgatcttccaacaggctgcgggcagtgcctccaagagagcaggggagacttgtttgagggctacaggcctaggcagtgggcaggccggaggccccatcagcagccaccactccacagtaatctcaaacttccagtcctcttggtgtgtagcatcttgcagagtcatgcatccaggctcacacctgtggtggggtccggggacacgtgtgaagctttcagggcccatgctcctgtcaggcagcccagcagaagctgtgggagcatgcacagaggccagagcttcagctccttgggatggttctttctttttggcaggagggaacatrgtaggacaggacaatgaaacaaatagctgaaggaggcccagacagttgcattgggaagaacactgagtgtggagtcaggacagggtgtggccccagctgattggctgagcaggcttagctatgtgac

SEQ ID NO: 607933 - DNA, 398 bp, Homo sapiens
atcggagggtaaaggagtgctcgccttggaaggtgaagggggctccccacacactcgggtgtcacatgcatctagcttagaatgtctgccttgtgacttccagactgcatgcctttggttagcaagtcacttccaagccccagtgttytcatttacagaagagggacaataactttacccaatagaatggttatacagaaaaaaaggggagcctagaaattaatggaaacgtgctgtgtaagctgtaatgtggtggactattatgactgcctcttcctgtctccagctcacctggaatccagttccttcccctaagtgatttcagttagtccccacaacgccatgacatgggtgatattatcccatatgtatagaggaggacactgaggctcagcaag

SEQ ID NO: 607934 - DNA, 500 bp, Homo sapiens
ctggcatttaatacggggacctgaggcatattacaaaaacctgagcgggagactcaaagtttgacatacatgttgatggaagctatgagcatagatgagatggctcaaaagagagtgtatagaatgagargggaaggggtttgggataaaacctgaggaatcccaacatctcggggtaggcagaggaagagaaagtagagaggaagccaccatgggtaaagggatcccagggcatcaagccaagacaagagaggattttcaggaggaagaaatgatcagccattaaatgagtcatatcaagaaaggagaagcccaagcaaaggccacaggctgagtgtttagagagcagcgttgttgagtagcgcacatagaaggcaacccattacaggctccagagcaaagacagtgaatgcaagaaagaggaaagcaacacttcttgagcacctactatgtgtcaggttctctgctggggcccttatatgcctcatcctttcattcat

SEQ ID NO: 607935 - DNA, 500 bp, Homo sapiens
ctggcatttaatacggggacctgaggcatattacaaaaacctgagcgggagactcaaagtttgacatacatgttgatggaagctatgagcatagatgagatggctcaaaagagagtgtatagaatgagaagggaaggggtttgggataaaacctgaggaatcccaacatctcggggtaggcagaggaagagaaagtagagaggaagccaccatgggtaaagggatcccagggcatcaagccaagacaagagaggattttcaggaggaagaaatgatcagccattaaatgagtcatatcaagaarggagaagcccaagcaaaggccacaggctgagtgtttagagagcagcgttgttgagtagcgcacatagaaggcaacccattacaggctccagagcaaagacagtgaatgcaagaaagaggaaagcaacacttcttgagcacctactatgtgtcaggttctctgctggggcccttatatgcctcatcctttcattcat

SEQ ID NO: 607936 - DNA, 578 bp, Homo sapiens
tccaagtatagtgaacagtgtatgtgaaggtgccaaagcaagagggagtctgatacatcccagacaaggaaaggaagccaggggaaactggagagggagaggggaggctggaaagatgggcagggcattaatccactcaagcctctaggccgtggtgaggagttcacgttggatcctaggatgaccccaatgcacaccacccccacctcacaatgttactgtgacttccactactgatcagcacattaaaacaactgtcagtgcctgaggcacagccatgctcaaggggcttgactcagagaaggtttagagaagattctggaatttgagagctgagagagctcttggagaacatttaggtccaaattctcactgtgcagatggaaacactgagacccagagaggaaaaaaaagacctgctcagggttgcacagcaagcaggggtatcaggcctgtaactagagctccgtttaatcagccacacagtgccccttgcctctgtggagatstaaaggcaagctttttcttacaggtgcaatttcctctgcctctcaggacaaccaggagagtgtttccag

SEQ ID NO: 607937 - DNA, 556 bp, Homo sapiens
gttcgtattgcattttgtatctttaccagacccctggcacttcctccctcaggtcacgttcatctgccttattcccctactggactctgaaagccttgagtgaagactttgtatcattcattgtgatgctgtatcattcattgtgatgtgtatcattcattgtaatattggaccccctcgtttatccagtagagtgttttgagtatagaaactctttttagtgtttggtgaatggtgaatgaatgaatgagtgggtgaattcatgaataccrttccctgaatatagccactgacttcccagaatgggtactgtcatggcataactgagacaaccacatgtgaatagccctggggttccagggaaattattattgttgcattatcattgcttctgttttataagacttttaaacatttatttgcttaacttcattttctttaaggaaaaaaaaaagatactcacctagctaatcaaaagtcttgcggctgggcgcagtggctcacgcctgtaatcccagcacttcgggaggccaaggtgggtggatcacccaaggtc

SEQ ID NO: 607938 - DNA, 504 bp, Homo sapiens
tataattttataattcaatacaaaaggatttcttaaagattttgaaaaagcgcatttaaaaataatttggaaaaaacagtcaaaatagcaaagaagctgggggtggtggttcatgcgtgtaatcccagcactttgggaggctgargcgggcagattgcttgagcccaggagtttgagaccagactgggcaatatagtgagacctcgtctctacaaaaaatacaaaaattaacccagtttgttggtgtgcacctgtagtcccatatacttgggaggctgaggtgggaggatcgatcacctgaacctgggaggttgaggctgcaatgagccgtgatcatgccactgtagtccagcctgacagagcaagaccctgtctcaaatgacaacaacaacaacaaaacaccacaacaaaaactgataggggtttctaaggcacaaaaacaaatttttaaaatagtgaaggatagtctttaaaaaagcaatgataatagaaatacttaaataa

SEQ ID NO: 607939 - DNA, 504 bp, Homo sapiens
tataattttataattcaatacaaaaggatttcttaaagattttgaaaaagcgcatttaaaaataatttggaaaaaacagtcaaaatagcaaagaagctgggggtggtggttcatgcgtgtaatcccagcactttgggaggctgaggcgggcagattgcttgagcccaggagtttgagaccagactgggcaatatagtgagacctcgtctctacaaaaaatacaaaaattaacccagtttgttggtgtgcacctgtagtcccatatacttgggaggctgargtgggaggatcgatcacctgaacctgggaggttgaggctgcaatgagccgtgatcatgccactgtagtccagcctgacagagcaagaccctgtctcaaatgacaacaacaacaacaaaacaccacaacaaaaactgataggggtttctaaggcacaaaaacaaatttttaaaatagtgaaggatagtctttaaaaaagcaatgataatagaaatacttaaataa

SEQ ID NO: 607940 - DNA, 504 bp, Homo sapiens
tataattttataattcaatacaaaaggatttcttaaagattttgaaaaagcgcatttaaaaataatttggaaaaaacagtcaaaatagcaaagaagctgggggtggtggttcatgcgtgtaatcccagcactttgggaggctgaggcgggcagattgcttgagcccaggagtttgagaccagactgggcaatatagtgagacctcgtctctacaaaaaatacaaaaattaacccagtttgttggtgtgcacctgtagtcccatatacttgggaggctgaggtgggaggatcgatcacctgaacctgggaggttgaggctgcaatgagccgtgatcatgccactgtagtccagcctgacagagcaagaccctgtctcaaatgacaacaacaacaacaaaacaccacaacaaaaactgataggggtttctaargcacaaaaacaaatttttaaaatagtgaaggatagtctttaaaaaagcaatgataatagaaatacttaaataa

SEQ ID NO: 607941 - DNA, 585 bp, Homo sapiens
ctctccaattctcttttggagctgtatttgggaaaccagttgtgtgtctcttcacatcacccatatcccattggtaaaatgaagtcaaggatctgaatgaagtaacagaagggtgtcttacctgggagtatttatatgtaaggatttttgttccctcatgattatccccagctttagaatggtgatatgttatattataaattttcgctgtctcacgtaagttgtatcatactaggattaggtttagaaatcagacatctcaaatcaacaaatactctctcaaacatctgcttttttttctgtggacactgtgacagtgacaaagatcagggaaatccatgtcatcttataagggcttccatccctgggggggtcaccaaagctgacattctttatctcatcatgttagtgccyccacaatgatttgcttgtagaaagttgcctgtccagctactatatgtgattcctccgatcacagtatagtgagtattctaattcaatggctttggaacagaaagaatcagtgtttgaatcttagttccatcctttaaaagctgtgtgaccttgaacaagtcacttgtcctc

SEQ ID NO: 607942 - DNA, 524 bp, Homo sapiens
taacctctgaagttatgatttatcttgagggaatttcacaccaaggaccacatctaccttttcagagttatggtagraaagacatgagatcatttttatctggaaaaaaactaagaaggtaattcttgcccttcttcccaaaacattgaccttctctgagtctatcttctaagtcctgagagggcagagaactttcaccattattttggtggaaagggttactgtaagggcttcttagcctgttctaacaaaaggaaataccaaccaatgggcaaaggctcaagttttacagcagctttgtggagttaaaagcaatgaagttttcccttctaagaacagaagaccttccaggaaccacaatgactcctggggtgcttccatgactccagagaaagaacaggcctccagaaacatgcactcttagcagtgagcataagtgaaaactgagcattgcctgtaaattgtaaaatgctattcacatggcaggcattgttactactcaatgccatctcctcattagaaac

SEQ ID NO: 607943 - DNA, 524 bp, Homo sapiens
taacctctgaagttatgatttatcttgagggaatttcacaccaaggaccacatctaccttttcagagttatggtagaaaagacatgagatcatttttatctggaaaaaaactaagaaggtaattcttgcccttcttcccaaaacattgaccttctctgagtctatcttctaagtcctgagagggcagagaactttcaccattrttttggtggaaagggttactgtaagggcttcttagcctgttctaacaaaaggaaataccaaccaatgggcaaaggctcaagttttacagcagctttgtggagttaaaagcaatgaagttttcccttctaagaacagaagaccttccaggaaccacaatgactcctggggtgcttccatgactccagagaaagaacaggcctccagaaacatgcactcttagcagtgagcataagtgaaaactgagcattgcctgtaaattgtaaaatgctattcacatggcaggcattgttactactcaatgccatctcctcattagaaac

SEQ ID NO: 607944 - DNA, 612 bp, Homo sapiens
ggcctactatttttcatttcacaatgatgcaaaacaaaaatagaccctaattttaacaatagcaatgactatatattatatatgtattatgtaatcasatatgtaaatacatacatgcatatacatatgtacatgtggacacacaccatcaaattcatcagccaagaccatccgatcagccaaaatacactcttaataggcaaagaccctctttgtcagcctccctctgaaagcatgaccagcaagaaaagaaggactttgaaaatggaagtaccacctacaaagcacatagtatcctaaaggcaaagtgaaaatgtgaaacatagccattagggaagtacagaagacaaatatgtttctcttatgcacatacacacacacacactctctctcattccctaccctctctcacaatcaaatggcaagtagacttagaacacaaacttcaggaccctaatcagaagacctgaaacagaaaggaaaaaaataggtcaccccgctgcttccagcattccccaaagaactccaagccttccaacagcaagcctgtctgcttctatttctgactcttcctttaggaggcccctcagggcttggctgcttccttccaag

SEQ ID NO: 607945 - DNA, 612 bp, Homo sapiens
ggcctactatttttcatttcacaatgatgcaaaacaaaaatagaccctaattttaacaatagcaatgactatatattatatatgtattatgtaatcacatatgtaaatacatacatgcatatacatatgtacatgtggacacacaccatcaaattcatcagccaagaccatcmgatcagccaaaatacactcttaataggcaaagaccctctttgtcagcctccctctgaaagcatgaccagcaagaaaagaaggactttgaaaatggaagtaccacctacaaagcacatagtatcctaaaggcaaagtgaaaatgtgaaacatagccattagggaagtacagaagacaaatatgtttctcttatgcacatacacacacacacactctctctcattccctaccctctctcacaatcaaatggcaagtagacttagaacacaaacttcaggaccctaatcagaagacctgaaacagaaaggaaaaaaataggtcaccccgctgcttccagcattccccaaagaactccaagccttccaacagcaagcctgtctgcttctatttctgactcttcctttaggaggcccctcagggcttggctgcttccttccaag

SEQ ID NO: 607946 - DNA, 612 bp, Homo sapiens
ggcctactatttttcatttcacaatgatgcaaaacaaaaatagaccctaattttaacaatagcaatgactatatattatatatgtattatgtaatcacatatgtaaatacatacatgcatatacatatgtacatgtggacacacaccatcaaattcatcagccaagaccatccgatcagccaaaatacactcttaataggcaaagaccctctttgtcagcctccctctgaaagcatgaccagcaagaaaagaaggactttgaaaatggaagtaccacctacaaagcacatagtatcctaaaggcaaagtgaaaatgtgaaacatagccattagggaagtasagaagacaaatatgtttctcttatgcacatacacacacacacactctctctcattccctaccctctctcacaatcaaatggcaagtagacttagaacacaaacttcaggaccctaatcagaagacctgaaacagaaaggaaaaaaataggtcaccccgctgcttccagcattccccaaagaactccaagccttccaacagcaagcctgtctgcttctatttctgactcttcctttaggaggcccctcagggcttggctgcttccttccaag

SEQ ID NO: 607947 - DNA, 618 bp, Homo sapiens
tcagcctaccagctcatgactcctctttcagtccttgaatgccacaagttccttgctgtgttggggcatttgcccagaatatccagctctgtggaaccctccacctctgactcctagaacagcaccttttctttcaagtagccttgaacaggattccttaataactgcattatctaagtactatccatccaagaaccctcaaaattactttcacttttattaacttataaattgatatttattattcactctccactagaatacaaatgctcaagggaaaggcccattactgttttacttttcacacttttttcagaacctagcacactgcttagcacaaaatagaaaattcatttatagaatatgtgtaaaattaataaatgaatgaataatctgaatgagttagtaagtaaatgaatgaaagtttatatcttatctttcctctgcaaatcatgttttgttcctagtttattccttatgattaacacaagctcttttgacagctcatgttagcatatctcwattataagcagacaggcaccaatttatctagttatttttttcattcatttgagagcccttaatatatcaggcactgtgcagattctggtttttttg

SEQ ID NO: 607948 - DNA, 566 bp, Homo sapiens
tgataaataaactctaatatgtagcagccttgcgttcctttcaccttctgttagcacagttcttttctagaaatcagagcagatgtatttgcagcaagctgaccataccaggggcatttctaaacattaacttttgcctgaagcatattgtatttggsagcccgaaacaggggacaagttctctgcctaatgaaaattatgcatatccaaactcatcttcaaagctcaaatcactttcgaaacaaagtatctaaattggcaatgattaacttttctaacatttaatcttctgtccaaagaggacatggttatctgtgattgtatctgggtattggaattgtggaagacagtattttcgtatttttctacattttaatcaaaacaatgcatgcatttttgtgggaagtgttttgttttggatttggggatgaatctttatgtatttttctttttagtgtggctagctctcccaaagctcattgcctctttttgtcttccattctgagagggtctcaggcatcacctgagccagccagattttcagcgcagctggctgtagcacatag

SEQ ID NO: 607949 - DNA, 566 bp, Homo sapiens
tgataaataaactctaatatgtagcagccttgcgttcctttcaccttctgttagcacagttcttttctagaaatcagagcagatgtatttgcagcaagctgaccataccaggggcatttctaaacattaacttttgcctgaagcatattgtatttggcagcccgaaacaggggacaagttctctgcctaatgaaaattatgcatatccaaactcatcttcaaagctcaaatcactttcgaaacaaagtatctaaattggcaatgattaacttttctaacatttaatcttctgtccaaagaggacatggttatctgtgattgtatctgggtattggaattgtgkaagacagtattttcgtatttttctacattttaatcaaaacaatgcatgcatttttgtgggaagtgttttgttttggatttggggatgaatctttatgtatttttctttttagtgtggctagctctcccaaagctcattgcctctttttgtcttccattctgagagggtctcaggcatcacctgagccagccagattttcagcgcagctggctgtagcacatag

SEQ ID NO: 607950 - DNA, 566 bp, Homo sapiens
tgataaataaactctaatatgtagcagccttgcgttcctttcaccttctgttagcacagttcttttctagaaatcagagcagatgtatttgcagcaagctgaccataccaggggcatttctaaacattaacttttgcctgaagcatattgtatttggcagcccgaaacaggggacaagttctctgcctaatgaaaattatgcatatccaaactcatcttcaaagctcaaatcactttcgaaacaaagtatctaaattggcaatgattaacttttctaacatttaatcttctgtccaaagaggacatggttatctgtgattgtatctgggtattggaattgtggaagacagtattttcgtatttttctacattttaatcaaaacaatgcatgcatttttgtgggaagtgttttgttttggatttggggatgaatctttatgtatttttctttttagtrtggctagctctcccaaagctcattgcctctttttgtcttccattctgagagggtctcaggcatcacctgagccagccagattttcagcgcagctggctgtagcacatag

SEQ ID NO: 607951 - DNA, 566 bp, Homo sapiens
tgataaataaactctaatatgtagcagccttgcgttcctttcaccttctgttagcacagttcttttctagaaatcagagcagatgtatttgcagcaagctgaccataccaggggcatttctaaacattaacttttgcctgaagcatattgtatttggcagcccgaaacaggggacaagttctctgcctaatgaaaattatgcatatccaaactcatcttcaaagctcaaatcactttcgaaacaaagtatctaaattggcaatgattaacttttctaacatttaatcttctgtccaaagaggacatggttatctgtgattgtatctgggtattggaattgtggaagacagtattttcgtatttttctacattttaatcaaaacaatgcatgcatttttgtgggaagtgttttgttttggatttggggatgaatctttatgtatttttctttttagtgtggctagctctcccaaagctcattgcctctttttgtcttccattctgagagggtctcaggcatcacmtgagccagccagattttcagcgcagctggctgtagcacatag

SEQ ID NO: 607952 - DNA, 658 bp, Homo sapiens
tcctggaacaaacctgatcaaactagtcacctttcccaagcacttctctgcaatcatggtacccgacttttctcatccttcctttgtgggatagtttcatggcaaccattgaatgtcgcaactgtctccagcctaatttgtggatgtaatttgtgcttacgttctcccaacttttccaaacctgctagcccacaagtactgttcctagaagaactctaatggcttagctctatctaacctggcatcttttttttcccactgttccatcraataaagctctcatctttcccagtaacctgcctcttgaagaaaggactcgggtacacaagactgacctcttactttgtctgggcctttttaccctagagtaggtgattcagagcaaaaagaaaagaaaattatcagaaagcaaatgagaagggaaaaaaaatacagaaatgctgtcaaggtcaccagtatatttttgttgcaggatcaccctaggtgaaattattttaatttaccagtttgcagagataaaaaatatcccactgtgaaaaccacagtattcacagtagtgtgtggcactgatgagctacaccatatgataaagcacattgagatcaggcattttcaagaccacttcatgatggggaaaaatcacataaagagttataat

SEQ ID NO: 607953 - DNA, 658 bp, Homo sapiens
tcctggaacaaacctgatcaaactagtcacctttcccaagcacttctctgcaatcatggtacccgacttttctcatccttcctttgtgggatagtttcatggcaaccattgaatgtcgcaactgtctccagcctaatttgtggatgtaatttgtgcttacgttctcccaacttttccaaacctgctagcccacaagtactgttcctagaagaactctaatggcttagctctatctaacctggcatcttttttttcccactgttccatcaaataaagctctcatctttcccagtaacctgcctcttgaagaaaggactcgggtacacaagactgacctcttactttgtctgggcctttttaccctagagtaggtgattcagagcaaaaagaaaagaaaattatcagaaagcaaatgagaagggaaaaaaaatacagaaatgctgtcaaggtcaccagtatatttttgttgcaggatcaccctaggtgaaattattttaatttaccagtttgcagagataaaaaatatcccactgtgaaaaccacagtattcacagtagtgtgtggcactgatgagctacaccatatgataaagcamattgagatcaggcattttcaagaccacttcatgatggggaaaaatcacataaagagttataat

SEQ ID NO: 607954 - DNA, 653 bp, Homo sapiens
acaacggactttggggactcgaaaaatgctgggagtggggtgagggataaaagcctacaaattagatacagtgtatcctgctcaggtgatgggtgtaccaaaaattcagaaatcaccactaaagaacttattcatgtaaccacacactacctgttccccaaaaaattatggaaataaaaaaaaatcaataaaaagcccctctgcttccaacacacaccatttttcccctatcacactctgggatggaatgtggacttagacctaagaatttccaggtgcctgaggatcaactttctcccaaagaaagacagaaatcacctgctttaaaagatttatctactgttgtctaatgactctaaaaacaactagctctcaatattctgttatycatgtaggacatttctcacaagcaggtttatttaatctgaaagaataaagattgattttcctattactcattctagtgattttacgtatttaaattacgaacttttctaagaggtgattctatataatgaaaggtgagaggcatctatttaaggaccagagtattcaactgttagtggaggtaatgtttaaaaataccgttttttgaggttttttaatttttttataatgttgagggaaattgagtgaaaaagtcagaagtgttt

SEQ ID NO: 607955 - DNA, 597 bp, Homo sapiens
cagctcacgagctgggcattctgtccctcaagcccatctccagaactcccaaactctttaagttcagagccaccttctctgcccagcagctcacacattccagaaaaacagcttgggataccagcaaatcactgcatgtttaggtgacctcctgaagagggatggtgcttgcagtaatggtaagttccagacatccaacttggaagrctttactattcctttaagcacataccctttgaacgaatggtggtatttgtaagaccaaccttcatgcacttttgctattccaattacttgtaaatcaagacacacaagcttttgtttttccactaaaattcctgagattttgccaataaaactggggtgcctgaataaaatgtgcatgtgaaattacagtccccaaagctaatggtcagcaatttgccccagaatcagcacagcacctgagattcaacttgtgtgtcatgtgatggggcactcagtttgggctttttcacttttgtggctttaactatttaaaaaaaaaaaaaaactgtgacagacatagggccaaaattggctattttaaacaatcaaggtaaaaaatgcctactttta

SEQ ID NO: 607956 - DNA, 543 bp, Homo sapiens
agaaagaatttttctcactgatctggttcaacatgaatggttttccccaagaggaatggctagaatggagcagctgttgccttgggctggccagaggttctcactgcatctcatcttctcctttgtactagggaagtctctcagttgaagaactttgccctgtacttggaccttcatgacctggcttaggaaaaaaattatgaactttcttgagtcacacacagtcctaaatcctaggacaaggacactgaaaatccttgatgtggacatttgacctttgagtaggagtccttctgtggaaattggcggttgccttaacaactgcttgaggggtaggaaaaagaggcaggaccaagakggcctgtaacatggaaactgtagccaaagtaatcaaaatgggaggaggaaaaacagaagaaaaatgaacagtggtgttctgatggtgagactaggtttgtacagcacatcttgaccctgtggggggaaaaaagctaaagctagatttgaatagtacctcaaagacagtttcctttgctgtggtat

SEQ ID NO: 607957 - DNA, 575 bp, Homo sapiens
ccatgtcgaaactttctgttacattgtgctagcaaagctctgcctaagatgagaaaagtggagggaaatctctacgaaggaagagatttcccttttgcaatggtgagctgattgtgttaatcaaggttatacacagcagattgtgctgtctctctgaagatgtgatcacaccaccaagcataagtcaaacagtgagcttcttcttaaaagctggtctcctagccatctttcactgattaatgagtaccttggcatcaaaatctaaaagttgagagataatgaaaaagagtagaactcctagaaccagcatcaccatctgtctgaagcctacttttacacttcccctgcattatgtaccaaaatcccaaaattatcatatttcaaactttattcatttaaggaaaagcatagcatgatcatgaatagcagtagtcatgatcaaagagaattctaggaaattaaggtaawgagaggtcagatctaatcaaatttaggtgtcctcagactcaatattacctttggctttagtttgtgtaagttttgaaaagacagaattctaatgttctattttgtgg

SEQ ID NO: 607958 - DNA, 605 bp, Homo sapiens
taaaacatgaacaggcaactcaaggacatcagacatctgagaaaaggccctaagctgaaagatagggatcaaagctaataagcagaaaaaagcaagtttgaggaaccaggatgcatacaagaaaaagaaaacttaaaaawatatatatatatatatataatgctcagagagataagagatgatgcattcatttaagaaaggagaacaagatgccataaaaaaaatttcagagaacaaccaagatcacttggcaattaaaaagaaaagtgaaaattgaaagaaaagagataagaaaattaggatatcaatccagaaagtctgacatccaaataataggagtcccagaaagaagcagagaaaaaggagagagaaaattatcaaatagctcagggaaattgcccagtacagaaggatctgagtttccagactcgaagagcgcagcaagggttcagtaaaacggatgaaaacatgaccatatataaacagttattgaaaaattttaaaacatcaggttcaaagagaaaaccctacaagctcccagaaaggaagacaaaaaatcacacaaagatcagaaatcaaaatagtgtcagtctattccagcggga

SEQ ID NO: 607959 - DNA, 605 bp, Homo sapiens
taaaacatgaacaggcaactcaaggacatcagacatctgagaaaaggccctaagctgaaagatagggatcaaagctaataagcagaaaaaagcaagtttgaggaaccaggatgcatacaagaaaaagaaaacttaaaaatatatatatatatatatataatgctcagagagataagagatgatgcattcatttaagaaargagaacaagatgccataaaaaaaatttcagagaacaaccaagatcacttggcaattaaaaagaaaagtgaaaattgaaagaaaagagataagaaaattaggatatcaatccagaaagtctgacatccaaataataggagtcccagaaagaagcagagaaaaaggagagagaaaattatcaaatagctcagggaaattgcccagtacagaaggatctgagtttccagactcgaagagcgcagcaagggttcagtaaaacggatgaaaacatgaccatatataaacagttattgaaaaattttaaaacatcaggttcaaagagaaaaccctacaagctcccagaaaggaagacaaaaaatcacacaaagatcagaaatcaaaatagtgtcagtctattccagcggga

SEQ ID NO: 607960 - DNA, 629 bp, Homo sapiens
gtttatatttatggatttctgccagatctcccaacttctgagaaattaattttagtaattagagagcaccattgcaaaagatataatatttcactttccatttcaccactccccttctttctaaagggtaaattttcttaattttaatttttataattctgacccagattattaatgtacctttttaaagaaaattattttacattcttatatgtttactaaatgtttaaagacacaagcaactttctggtatttccaagtctattatctttcatgaactacagtggaaaaatccctttktaatgtcaccttttctggctacatattttttctttcatgtttcttctgtggaactataaactcccaaatcaacattttctcctccatagttgacatccatgatcatataccttccaactcagccatattgtaacctatgaatcattgaccccatataaaagcttcaaccccaattatttgcaagaaataaatttcctttgtcaatatttagctttaattcttatatgaaaattgaaaaattgaatctagtaggaattgctgcattttctctttgatgcattttgacgttaactgatttaccttattatgatgagttttgcccagatgtg

SEQ ID NO: 607961 - DNA, 629 bp, Homo sapiens
gtttatatttatggatttctgccagatctcccaacttctgagaaattaattttagtaattagagagcaccattgcaaaagatataatatttcactttccatttcaccactccccttctttctaaagggtaaattttcttaattttaatttttataattctgacccagattattaatgtacctttttaaagaaaattattttacattcttatatgtttactaaatgtttaaagacacaagcaactttctggtatttccaagtctattatctttcatgaactacagtggaaaaatccctttgtaatgtcaccttttctggctacatattttttctttcatgtttcttctgtggaactataaactcccaaatcaacattttctcctccatagttgacatccatgatcatataccttccaactcagccatattgtaacctatgaatyattgaccccatataaaagcttcaaccccaattatttgcaagaaataaatttcctttgtcaatatttagctttaattcttatatgaaaattgaaaaattgaatctagtaggaattgctgcattttctctttgatgcattttgacgttaactgatttaccttattatgatgagttttgcccagatgtg

SEQ ID NO: 607962 - DNA, 556 bp, Homo sapiens
accagaaccccttctttttaaggttcaaattattagaatatgactgatggcccagggtgacccagaccaaagccatctctcaagagaggtcaacagagggccttccagaagacattcctcatgatggagaaggaggagcctcagtttctgcttcttgcctgcgtggaaggccggttctcatgtgtgtccakgtttccatgatgcttctttcagcagagggccctgactgtaactgccagaaactcaggggcctgggcaaagatagaaacaaaaagataaaatggggactttgggtaatctgctcagattttctagttttatggtcccgctggagtaaagaaatacctaaaagttcttgtacttaacaagagaagaatgggcttttcacaaacccgtggatgagattcactgattttcttctttttgttttaaagagactttattttgtactctatgcactctgtgactgaagcaggaacctatgtacatacaacaatggagtattttgcaatcccactttagtccattcacggtgataactggagtcctttatccc

SEQ ID NO: 607963 - DNA, 591 bp, Homo sapiens
ggttcaggctgccaaaatttggtccttttcatggccacagtctaggctgtgggggcttcttctccccttcactctctctcattctcctcagcagtagctgaaaaacaatgagctagaaagtggaaaactaaaatccaagcccgctcttccaatggctggagacyaaggggccagtcatctctactgtcccagtacccagcacagactatggcacatagtaagtgcttaaaaaacgtttgttaaatgaattgataaatacatttaatatcaaggggcctccaattcctcattagtaaataggaaagttacactaggtcccttcaaaaatctccagctctgagactttaaaatgtcagtagcatcacacttttaggctagctttcaggatagtataattatattaattaagataaggcagtgttccccttctgacatgatggagtaaactgatagatcaactctcacacagataacgactacttagaggctctgcagagtgaacaaagcaaatggctgtgtgtttgggtgcaaaatggtacgatcacttaggaaaacactttggcagttacttacgaatgcaaacgtatattt

SEQ ID NO: 607964 - DNA, 550 bp, Homo sapiens
gcctcatctggatatctttagatgagtctgatcccacttggcaggtaaatttgggatatttgctctcaaagaagtaggtatgtaatttacatgattatgcaaatgaaacatcacttccttgaggcagatctgcttgctctaccctgatcgataaccttcttttttcagcacagscacatggatacatatccattcaaataaattaacattccaatcctggaaagctgatttcagaagaatgaattggtaaaatgctaatagcaggtaaagtggagttcaaactcactaatcaaagagacataaatttaaaacaattcagagcaatctcttagccattgaaactgcaaatccttttgtaaaggataacgttgtgtcagcttcaaggtgatgatgtgggaatgcctgcctaagcaacacagctggggcagtgaaggcagagcatctgacttcaaattctgaacactggcagtatcctactctatcccatgagataatgtttaaatagatcatagtatgatctatttaataaatagacaattattaaaattca

SEQ ID NO: 607965 - DNA, 580 bp, Homo sapiens
gatacatatccattcaaataaattaacattccaatcctggaaagctgatttcagaagaatgaattggtaaaatgctaatagcaggtaaagtggagttcaaactcactaatcaaagagacataaatttaaaacaattcagagcaatctcttagccattgaaactgcaaatccttttgtaaaggataacgttgtgtcagcttcaaggtgatgatgtgggaatgcctgcctaagcaacacagctggggcagtgaaggcagagcatctgacttcaaattctgaacactggcagtatcctactctatcccatgagataatgtttaaatasatcatagtatgatctatttaataaatagacaattattaaaattcatgctctgtattagtctgttttcatgctactgataaagacataaccgggacttagtaatttataaagaaaaagaggtttaatgaactcacagttccatgtagctggggaggcgtcaaaatcatggtagaaaacaaaaggcacatcttacatggtgggggtaagagagaattgaggattaagtaaagggggtaaaccccttaaaaagccatc

SEQ ID NO: 607966 - DNA, 580 bp, Homo sapiens
gatacatatccattcaaataaattaacattccaatcctggaaagctgatttcagaagaatgaattggtaaaatgctaatagcaggtaaagtggagttcaaactcactaatcaaagagacataaatttaaaacaattcagagcaatctcttagccattgaaactgcaaatccttttgtaaaggataacgttgtgtcagcttcaaggtgatgatgtgggaatgcctgcctaagcaacacagctggggcagtgaaggcagagcatctgacttcaaattctgaacactggcagtatcctactctatcccatgagataatgtttaaatagatcatagtatgatctatttaataaatagacaattattaaaattcatgctctgtattagtctgttttcatgctactgataaagacataaccgggacttagtaatttataaagaaaaagaggtttaatgaactcacagttccatgtrgctggggaggcgtcaaaatcatggtagaaaacaaaaggcacatcttacatggtgggggtaagagagaattgaggattaagtaaagggggtaaaccccttaaaaagccatc

SEQ ID NO: 607967 - DNA, 580 bp, Homo sapiens
gatacatatccattcaaataaattaacattccaatcctggaaagctgatttcagaagaatgaattggtaaaatgctaatagcaggtaaagtggagttcaaactcactaatcaaagagacataaatttaaaacaattcagagcaatctcttagccattgaaactgcaaatccttttgtaaaggataacgttgtgtcagcttcaaggtgatgatgtgggaatgcctgcctaagcaacacagctggggcagtgaaggcagagcatctgacttcaaattctgaacactggcagtatcctactctatcccatgagataatgtttaaatagatcatagtatgatctatttaataaatagacaattattaaaattcatgctctgtattagtctgttttcatgctactgataaagacataaccgggacttagtaatttataaagaaaaagaggtttaatgaactcacagttccatgtagctggggaggcgtcaaaatcatggtaraaaacaaaaggcacatcttacatggtgggggtaagagagaattgaggattaagtaaagggggtaaaccccttaaaaagccatc

SEQ ID NO: 607968 - DNA, 615 bp, Homo sapiens
ttgaggattaacaatacaagccttgtgcagtgaactatggtggtgtcactgcactgcagcctgggtgatagagcaagaccctgtctcaaaataataaaaataaaaataataataaaagttttcacttattgagcatttattatacgccatgcacattgctacactctttatctactttagcacatttaaacctcacaataacattgagataagtattcccatttaagaaattaggagagaaattagagmgctcacatttaacctgcttttaaattccccaagctataatcaaggctatagcttgccctgggtgctgttactgagagatgctcctgcaaatgtcaataaccagctatggcattacatactggaaaactaataaagtatccctgagccctgtcctatcaacagatgccagatgagtgaaacctgaagtaatgtcgtctatcaagcatcttaggtcctctttttcttatgggctgatggaagctcattcacacttttggttttactttttaactgtcaattatactcgttctgggtgtctaaaaatgacttcattaagggaaggctgttcaaatatttctaaaatcaaatgaaacataagaccaagta

SEQ ID NO: 607969 - DNA, 602 bp, Homo sapiens
aacacagcaagatactaagtagtgaattctttcattttacaaatctattctctaggtaaaaatatttgctacgagagaaagctacacttgtcatttctagtaaattccaccttttggctccttccctctgttgctttttccttttctccctctttatcatcttctaaaaccagaggacctacttgtcccttcacttatttcttaagyctaaaacccttgcactcactctctgtcaatagatacaactctactacacatgccctcagtacagtgactttgacaggtgaggcctagatacaggcctcccattggattacttatctattgctgcacagaaaatcattctgaaactcagtggctgccagcagacaagtctccattcaatgccttgtgtgtgttgtgagcagagacactgacagcttttggcccagactcttttccagaatatttacacagcaaacaatgttggaagatagagatagtgtatccctttgggacagaggccagatttgtttgccatccagtatcataaagttaatgtctcctgccaggacaatgtttgagcagattttcttgaagtacttttatagaagattgggatt

SEQ ID NO: 607970 - DNA, 609 bp, Homo sapiens
ataatatggaaatgtttgcctggaaaaaaaacacagaaatattgtgcatgtgtagcatgttgtgtgtgataagggagggctctggggactttcaaaaataaaatgcaatggtcttcattttagcaatcaaatgtttttgagcatcttccataagccagactctgtgctaattccattcacattgaattttcattcaggacagccttgtgaggcaggcatgatcatcccatttgacaggtgagaaaggaaaatgtggcttagagagaatgtgacttgccctacgtgacagttagtgacagacacaatattcagaagtacatgctcttgtacatctcactagctctttgacaaaacagggatgtctgttacttgaaatggtgaagaagagagatgcccaaatctgaaatctttattgagaccacaagtatttctataactgggagagaatgaaatacacaaaagaagtaacagtgaagataattatacrttttcctaaaagagggccgaatgcacatccgtttacataatctttgtcttcagcaaactgttccatagggtttcctcctctaacagttcagtgcctttgagtccttgaaagagggctggtaa

SEQ ID NO: 607971 - DNA, 625 bp, Homo sapiens
atcacatatggcttctttaaagggggtggaggaatgatgaatgtcaaaaacacgtgtttatacttaaacctgttatgcacaagagctttcaactcttcggtaaaagagcttcaatggggttatgtgtgtatctgctgcctttaagaatgattgtctgtcaagtggttttgcagactccacagaatccctcaaggcagtagggaaaaagcagagggattgtaacctggaaaccagaacaagttgaggattcattctcacctcgtgacatctgcartttgggaaatgggaaggctacagaatgatctcattcacttgaagccagagactcacacctcctcccctgcccctgtgcctatcatctgtctatttttaaaggcaaggaatcttaaatgtgcttcaaaaaactaaaactaaagtgatgctcacaaaagccaaagtccctggttcagtgactggatctccagagaggagggtcagagctttatttttgctttctgtctctttcaaagcatgcaggaaaaatagttaacagccatttgagaattgcaattgagtttatctctgctactttgggtaccttccctcaggttcccaggagcaggtacttttgactagaggcagaggt

SEQ ID NO: 607972 - DNA, 414 bp, Homo sapiens
ataggttcttccctggagtgtgcccagctctggatgttggccaagcacattcatctggatggggcttgctgtcaggaaatacattagaggactccactctgacatctaaacagtcttgtggaactttcgccagcattcttacctctgtgggtataccaagtaattgccaagaaaaatgctagtaatggcaatgaacttcccacaagtgagccttcaatttaatttttacagtcacagtgataaggaagagactctggaacattgatctagacagggatgtaagatgcccggctccatmttttgcaaaccatctgtggccaatgggagtctactactttctctcagtctccccagagtccttcttggatgttcagagaccacttgctttcagaggcacattaaacatggctcaca

SEQ ID NO: 607973 - DNA, 578 bp, Homo sapiens
tgcatttcttactggcaatgtcaaaactgaaggttctcttctcaatgttaaactcctcacttaacaagagggaaaacctgcctcttattttctctgccagataactyttccccaacctgcacttgaattcaactgtctaaagtccaaacagctgaagatgatgcagggctattccaatccacattgttctgcaccacctccggaaggaatcattacccagctactgtagagagagaggtccagcccatcagccatcttctggatgacatatatgtgctctattaatatcacaagatgcttcccctcagcattcacctcttaagagtgcattttaatcccgataaatattcacagctgacaccttccatatgccacgtaggctaaaatggaacgaacgagtgcttcagagatgatgtttgaaaatgatgcactgcgtaggagctcctacaaatttccgctttattgcaggaaccagaggttagcattaagaagactgccatttgcttctccaatttgtaatgctattaattattcttgctttttaatctgctctacacttagtagcatcacaaagctac

SEQ ID NO: 607974 - DNA, 556 bp, Homo sapiens
ttttcattctctttccaacattttttttctttctctctctgttcctcttttgaaacttgacaggattatttggtgcctgataaagatattccacaccaacctcaagtcctcagagaatattttcaacacagccatttctaggtcctggaaattagaatttacaaagaaagtgctgacaaaagccttaagtagggcagccctgttcagccccaacctcatttaatcagctttcctagagccrggcccagaaaacaggataaacttcatcataaagcttttccctcattttttacccacctacttctcatcaacctattcataatgagcaataaatgaatcccggccacaaagccccagacctgggcttagcattttgcttcacaaaagacagagctttccacattaatgccttttgctttctgtcatagacttcttggaaaaggcattcttctctattttgggagaaaaacaagccaaagggcttgagatagcgaagatttagtgagtccttactatgtgcaggcctcagcattttacatgcattatctcatttagt

SEQ ID NO: 607975 - DNA, 556 bp, Homo sapiens
ttttcattctctttccaacattttttttctttctctctctgttcctcttttgaaacttgacaggattatttggtgcctgataaagatattccacaccaacctcaagtcctcagagaatattttcaacacagccatttctaggtcctggaaattagaatttacaaagaaagtgctgacaaaagccttaagtagggcagccctgttcagccccaacctcatttaatcagctttcctagagccaggcccagaaaacaggataaacttcatcataaagcttttccctcattttttacccacctacttctcatcaacctattcataatgagcaataaatgaatcccrgccacaaagccccagacctgggcttagcattttgcttcacaaaagacagagctttccacattaatgccttttgctttctgtcatagacttcttggaaaaggcattcttctctattttgggagaaaaacaagccaaagggcttgagatagcgaagatttagtgagtccttactatgtgcaggcctcagcattttacatgcattatctcatttagt

SEQ ID NO: 607976 - DNA, 629 bp, Homo sapiens
attgcaacatctaatcctgcttgagtaagagcagagcttgatacataaatttggaagttgttaacagatgacatttgaaaccaagtgaatagagacagctgcccaaacacagaggctaacagggcaaggcaaagccttgaggagataatttaggaggaaaaagcaaaattgggactatgtaaagattagtgagcactagcagagaagggaagattttgttaaattatagattagcttcaagatggctgactasagacattgaacactcaccctctccagaaagaaccaaaattgtgaatagataatcacacctcaaatagaacacctaggagtgaacactggagttcaacagagaagtcacaggaaacacctgaggcacagaaggagaaataggtaagcagctagcttggctagcttggtagggacacagagcaactcttattgtggaaaaagtgtaagagagagatgttcagcagtcacattcccactacaatctgctgcaatcctgaccaagagagagctcctctatccacacaaaccctggcactagcacgggcaggtagtctagaggcccaagggccctctagcagacagatgacttgtgctggctggatcactcacaaccccaa

SEQ ID NO: 607977 - DNA, 629 bp, Homo sapiens
attgcaacatctaatcctgcttgagtaagagcagagcttgatacataaatttggaagttgttaacagatgacatttgaaaccaagtgaatagagacagctgcccaaacacagaggctaacagggcaaggcaaagccttgaggagataatttaggaggaaaaagcaaaattgggactatgtaaagattagtgagcactagcagagaagggaagattttgttaaattatagattagcttcaagatggctgactacagacattgaacactcaccctctccagaaagaaccaaaattgtgaatagataatcacacctcaaatagaacacctaggagtgaacactggagttcaacagagaagtcacaggaaacacstgaggcacagaaggagaaataggtaagcagctagcttggctagcttggtagggacacagagcaactcttattgtggaaaaagtgtaagagagagatgttcagcagtcacattcccactacaatctgctgcaatcctgaccaagagagagctcctctatccacacaaaccctggcactagcacgggcaggtagtctagaggcccaagggccctctagcagacagatgacttgtgctggctggatcactcacaaccccaa

SEQ ID NO: 607978 - DNA, 629 bp, Homo sapiens
attgcaacatctaatcctgcttgagtaagagcagagcttgatacataaatttggaagttgttaacagatgacatttgaaaccaagtgaatagagacagctgcccaaacacagaggctaacagggcaaggcaaagccttgaggagataatttaggaggaaaaagcaaaattgggactatgtaaagattagtgagcactagcagagaagggaagattttgttaaattatagattagcttcaagatggctgactacagacattgaacactcaccctctccagaaagaaccaaaattgtgaatagataatcacacctcaaatagaacacctaggagtgaacactggagttcaacagagaagtcacaggaaacacctgaggcacagaaggagaaataggtragcagctagcttggctagcttggtagggacacagagcaactcttattgtggaaaaagtgtaagagagagatgttcagcagtcacattcccactacaatctgctgcaatcctgaccaagagagagctcctctatccacacaaaccctggcactagcacgggcaggtagtctagaggcccaagggccctctagcagacagatgacttgtgctggctggatcactcacaaccccaa

SEQ ID NO: 607979 - DNA, 579 bp, Homo sapiens
attgtgctctgtcaatttgccaccaagttaagctgacagatattatgagaataagctttatgaagaaaaagctttatgtgtaaaaagctttactacacttactatcatgtttttgaggacatagttcattacagtttcttctttataaatactcacaggagaaatttctcacaatttggtcttaataccaaaaacttatgtctatcctgaacaattgctttacattatgtttattttatggacccagaatcacgagcctatatgccttttgttttgcaaactagaaagctcaraataaaatttgtggcctctaggaaatgtacgttacatatattttgcatataaactcctcttattattctttcctcattttccctctaaccagattatctcacctgtctctattttatttcacctttaaagttaaaggcacttttaatgaaatgagaatcccatctagctctttaccaaaaaatttacttctcttttttaaactattgtcttattttgatgactatagagatataaactttattaaggcagcattatattcaaagatgcctatgtaagcacagattt

SEQ ID NO: 607980 - DNA, 579 bp, Homo sapiens
attgtgctctgtcaatttgccaccaagttaagctgacagatattatgagaataagctttatgaagaaaaagctttatgtgtaaaaagctttactacacttactatcatgtttttgaggacatagttcattacagtttcttctttataaatactcacaggagaaatttctcacaatttggtcttaataccaaaaacttatgtctatcctgaacaattgctttacattatgtttattttatggacccagaatcacgagcctatatgccttttgttttgcaaactagaaagctcaaaataaaatttgtggcctctaggaaatgtacgttacatatattttgcatataaactcctcttattattctttcctcattttccctctaaccagattatctcacctgtctctattttatttcacctttaaagttaaaggcacttttaatgaaatgagaatcccatctagctctttaccaaaaaatttacttctcttttttaaactattktcttattttgatgactatagagatataaactttattaaggcagcattatattcaaagatgcctatgtaagcacagattt

SEQ ID NO: 607981 - DNA, 586 bp, Homo sapiens
ggtaagagaaaaaaaatggtggattagggaaagggtaaccaaaaagttcacagatcaaattcagtctactgtctatttttgtaaataaaattttattggaacacagccatgctcactagttacagaccatggctgctttcatgttacaaaagcagggttcagtagttttagcagagatccatatggccagcaaagccaaaaatatttactaccaggctcttcgcagaaaaagttcaccaacccctggtctagactatttgggatcttcatctacaaggataatctgaaaagcaaaatctatcgggtgactcttcctatcagaggtttaaaaagtgatgttatagcatgcaaatgtttagtagtcagtggtgagatgtgtcccacatactttgttacaygcaagtagtatttaaaatatatttaaataattttcttattttctaaattagtataggtttaaagtaactcttataacagtattacaaatagatatttgttgctttcccttatttgttctatagctgtgaagaataatagcaaacatttactgtttgtagttttccagatgctgtgctaaatactttat

SEQ ID NO: 607982 - DNA, 572 bp, Homo sapiens
atgttgcctggaccagcaacctcagctgccctacctggcatagattgtgatatagcagggctctttctgctctaccccccaggcagatttctgggcattcagagcacccactcagcttgatcaacagcctgacatgctccacccatcctgtgccaagatcctggttcagagaagccgtctctgcttcatgcccaggcagatctccaggcatttagagcacccactcatctgattcagcagcccatgccacctcactctttctggacacagatcgtggtgcaatgagaccctctccacagcarcccaggcagatctgcaggcatccagaacatccactcacctggataagcagcccaagctgacccacccttcctgtgctgagatacaggtgcaagagggccctcaccaatacacattcaggcagatctccaggcattcagagtgtttgctttccttggtcagcagcctaagtcaccccacccttcctgtgtacagatcttgttttgggggcacctctccactccatgtgcaggcagatttccaagcttttcctactcacctaaatcagctgc

SEQ ID NO: 607983 - DNA, 572 bp, Homo sapiens
atgttgcctggaccagcaacctcagctgccctacctggcatagattgtgatatagcagggctctttctgctctaccccccaggcagatttctgggcattcagagcacccactcagcttgatcaacagcctgacatgctccacccatcctgtgccaagatcctggttcagagaagccgtctctgcttcatgcccaggcagatctccaggcatttagagcacccactcatctgattcagcagcccatgccacctcactctttctggacacagatcgtggtgcaatgagaccctctccacagcagcccaggcagatctgcaggcatccagaacatccactcacctggataagcagcccaagctgacccacccttcctgtgctgagatacaggtgcaagagggccctcaccaatacacattcaggcagatctccargcattcagagtgtttgctttccttggtcagcagcctaagtcaccccacccttcctgtgtacagatcttgttttgggggcacctctccactccatgtgcaggcagatttccaagcttttcctactcacctaaatcagctgc

SEQ ID NO: 607984 - DNA, 611 bp, Homo sapiens
atgtgcaggcagatttccaagcttttcctactcacctaaatcagctgcctgacccaccccacccttcctgtgcagagatcctggcacagagaggctctctctggtcaacgccaaggcagatcttcaggcattcagagcaccaggtctcctggataaggagcctaagccaccacacccttcctgtgcagagatcctagtgaaagagggccctctatgctacctacataggcagatctgcagggattcaggtcacttgcttgccttgttcagcagcctgarttacccacctcttctgtgcaaagatcttggtataggggatcccctctgctccacacccaggcagatctacagcatctggagcacctactcacctggatgagtttaggctgcccccaatccctgtgcagagaacttgggactgaggggagtttcccagttccatgcctaggcacacctcagggctcttggtggccactcactggattcttcctcagtgctggtgcttgtgcctgccattagcagacctgtaggtgagactttgcagtcttgtcccaccatcttgccccaccgtcttgcccccgacagccccttcacccaacataccagggagc

SEQ ID NO: 607985 - DNA, 594 bp, Homo sapiens
gacttatacatgcctaacacgctatgctccctgggtgtgggaagaggagcatccatttctgtagctccagaccacgcttttcccctgctggagccagagaggctggatagcttaatcccaagagatgtccctcacagcccaacatagcagctgtggcagactgtggccagagagcctctttaggcctgaccttgacccatccttcctcactgggcggggcctccctgcaggaactccaacaactccaaccagaggttcaagaacagaacgctgatctccctggaccygaacccctagggggaggagtgtccacagactctgtgggccagcagacttagcctttcctcctagtagttctgaggaatttgagcagcccagacaagtgggcttctccccagcaaagtacaccccctccaccaaggaatagtcaaagtactttgttaaacagatcctgttccccgtgtcacccaactgggtgaggccctccaacagaagctgtcagacaccctgtacaggagcaatcctactgacatcagcttggtgcccctgaggtcagagatcccaaaagaaggagcaggcacccatccttgctgt

SEQ ID NO: 607986 - DNA, 395 bp, Homo sapiens
gagcattcatcgtgaccaagtaggatttatcctagggatgcagggatggttcaacatatgcaaatcagtcaatgtgatacatcatatcaacagaataaaggacataaaccatatgatcatttcataggattcatatcaaaaagtatttgataaaatttaacatcccttcataaaaaaaaaaaccctcaaaaaactggatacagaaggaacatacctgagcacaataaaagccatatatgaacaacccacagctactrtcatgctgaacagcgaaaaactgaaagcctttgacctaagacctggaacacaacaaggatttccactttcagcactgttattaaacacagtaacggaagtcctagctaaagcaattagacaagagaaagaaataaagg

SEQ ID NO: 607987 - DNA, 395 bp, Homo sapiens
gagcattcatcgtgaccaagtaggatttatcctagggatgcagggatggttcaacatatgcaaatcagtcaatgtgatacatcatatcaacagaataaaggacataaaccatatgatcatttcataggattcatatcaaaaagtatttgataaaatttaacatcccttcataaaaaaaaaaaccctcaaaaaactggatacagaaggaacatacctgagcacaataaaagccatatatgaacaacccacagctactgtcatgctgaacagcraaaaactgaaagcctttgacctaagacctggaacacaacaaggatttccactttcagcactgttattaaacacagtaacggaagtcctagctaaagcaattagacaagagaaagaaataaagg

SEQ ID NO: 607988 - DNA, 395 bp, Homo sapiens
gagcattcatcgtgaccaagtaggatttatcctagggatgcagggatggttcaacatatgcaaatcagtcaatgtgatacatcatatcaacagaataaaggacataaaccatatgatcatttcataggattcatatcaaaaagtatttgataaaatttaacatcccttcataaaaaaaaaaaccctcaaaaaactggatacagaaggaacatacctgagcacaataaaagccatatatgaacaacccacagctactgtcatgctgaacagcgaaaaactgaaagcctttgacctaagacctggaacacaacaaggatttccactttcagcactgttattaaacacagtaacggaagtcctagctaragcaattagacaagagaaagaaataaagg

SEQ ID NO: 607989 - DNA, 373 bp, Homo sapiens
gtaataactgacaggcataacaggcaaccaaagcaaaactgtacaagtgggatcacgtcaagttgaaaagcttttgcacagcaaaggaaacaacaacgtgaatagacaacccatggaataggggaaaatatttgcaaactattcatctgacargggattaataatcaaatacatacggagctcaaacagctgtataggaaaaaaaatctaacaatctgattttaaaatgggcaaaagatttcaatagatatttatcaaaacaagacatacaaatggcaaacaggcatatgaaaaagtgctcaatatgattgatcatcagagaaattcaaattgaaactgcaatgaggtatcatttcaccccagttaaaatagc

SEQ ID NO: 607990 - DNA, 373 bp, Homo sapiens
gtaataactgacaggcataacaggcaaccaaagcaaaactgtacaagtgggatcacgtcaagttgaaaagcttttgcacagcaaaggaaacaacaacgtgaatagacaacccatggaataggggaaaatatttgcaaactattcatctgacaagggattaataatcaaatacatacggagctcaaacagctgtataggaaaaaaaatctaacaatctgattttaaaatgggcaaaagatttcaatagatatttatcaaaacaagacatacaaatggcaaacaggcatatgaaaaagtgytcaatatgattgatcatcagagaaattcaaattgaaactgcaatgaggtatcatttcaccccagttaaaatagc

SEQ ID NO: 607991 - DNA, 627 bp, Homo sapiens
ccaataaagcaacaaagtttgatttgccagttctggaaaatgcccccctcaggaatacttagacctcggttctatccctggatcctaactaactcaaaaccattggattagtaacttaacctstctgagcttcagttgcagaatccagagaaagaggacactgaagtaaaccatctcagaggttcttttgaacttttctggtgcatttttccaagaagcaatttcaatgttggaaggttggtaaatgttgtcaagcccccaaatagcaaccacatcatctccattactagagataggtggtcagaaaataggcctagaggacattttaaatacttttctactacaaagattctttgctgtttaacaaggttgttggcagcccctcagatggcatagtcaagaaaagacctggcaggaaagaagtgccattcagagaaaacaccactgatttttaaaatgtgaattgcaggcttctcctcccctttcctttatcaactgtgattaggctgtactttgctcgagtttacaataatgatacttttatactcagcactgtgcattctgaagagtgggcctaaaagtactttaccatctcatagagaagagttctttcctagcagggtgtat

SEQ ID NO: 607992 - DNA, 627 bp, Homo sapiens
ccaataaagcaacaaagtttgatttgccagttctggaaaatgcccccctcaggaatacttagacctcggttctatccctggatcctaactaactcaaaaccattggattagtaacttaacctctctgagcttcagttgcagaatccagagaaagaggacactgaagtaaaccatctcagaggttcttttgaacttttctggtgcatttttccaagaagcaatttcaatgttggaaggttggtaaatgttgtcaagcccccaaatagcaaccacatcatctccattactagagataggtggtcagaaaataggcctagaggacattttaaatacttttctactacaaagattctttgctgtttaacaaggttgttggcarcccctcagatggcatagtcaagaaaagacctggcaggaaagaagtgccattcagagaaaacaccactgatttttaaaatgtgaattgcaggcttctcctcccctttcctttatcaactgtgattaggctgtactttgctcgagtttacaataatgatacttttatactcagcactgtgcattctgaagagtgggcctaaaagtactttaccatctcatagagaagagttctttcctagcagggtgtat

SEQ ID NO: 607993 - DNA, 580 bp, Homo sapiens
tctaaatcagcaacccataaaatattaatagacaactctcagagggaacacagttgtatacaaaaacttccaacccaataaaattttaagttttaacatacatacgagaaaagtcaaaaaaaatcacaagcatacagctcatggaattttcaccmaaaaaaaatttaaaaacacacaccactgtagccaatgcactgattaagaaacagaacattaagagcacttcagaagcttccctcatacccgtttcatttaccacttacaggaatcaatactaggccaatatataggaaaaatgactatgactaataacctgagatgataaagtttttattgcaaagttatttaatatagtgaaaaattacaaacattataaatgcccagttcttaaggaaaggttaaataaatcatggtatacttatagaccagaataatattcacatttggcctccaattaaaatatagaaagtgaagagtgtagttctcactctaacaagaagaaaccacataagctacaaagtcatagttttttaaaaacctgtcagagatctgaaaatagaaaaaaacttaaatgaaccag

SEQ ID NO: 607994 - DNA, 580 bp, Homo sapiens
tctaaatcagcaacccataaaatattaatagacaactctcagagggaacacagttgtatacaaaaacttccaacccaataaaattttaagttttaacatacatacgagaaaagtcaaaaaaaatcacaagcatacagctcatggaattttcacccaaaaaaaatttaaaaacacacaccactgtagccaatgcactgattaagaaacagaacattaasagcacttcagaagcttccctcatacccgtttcatttaccacttacaggaatcaatactaggccaatatataggaaaaatgactatgactaataacctgagatgataaagtttttattgcaaagttatttaatatagtgaaaaattacaaacattataaatgcccagttcttaaggaaaggttaaataaatcatggtatacttatagaccagaataatattcacatttggcctccaattaaaatatagaaagtgaagagtgtagttctcactctaacaagaagaaaccacataagctacaaagtcatagttttttaaaaacctgtcagagatctgaaaatagaaaaaaacttaaatgaaccag

SEQ ID NO: 607995 - DNA, 580 bp, Homo sapiens
tctaaatcagcaacccataaaatattaatagacaactctcagagggaacacagttgtatacaaaaacttccaacccaataaaattttaagttttaacatacatacgagaaaagtcaaaaaaaatcacaagcatacagctcatggaattttcacccaaaaaaaatttaaaaacacacaccactgtagccaatgcactgattaagaaacagaacattaagagcacttcakaagcttccctcatacccgtttcatttaccacttacaggaatcaatactaggccaatatataggaaaaatgactatgactaataacctgagatgataaagtttttattgcaaagttatttaatatagtgaaaaattacaaacattataaatgcccagttcttaaggaaaggttaaataaatcatggtatacttatagaccagaataatattcacatttggcctccaattaaaatatagaaagtgaagagtgtagttctcactctaacaagaagaaaccacataagctacaaagtcatagttttttaaaaacctgtcagagatctgaaaatagaaaaaaacttaaatgaaccag

SEQ ID NO: 607996 - DNA, 580 bp, Homo sapiens
tctaaatcagcaacccataaaatattaatagacaactctcagagggaacacagttgtatacaaaaacttccaacccaataaaattttaagttttaacatacatacgagaaaagtcaaaaaaaatcacaagcatacagctcatggaattttcacccaaaaaaaatttaaaaacacacaccactgtagccaatgcactgattaagaaacagaacattaagagcacttcagaagcttccctcatacccgtttcatttaccacttacaggaatcaatactaggccaatayataggaaaaatgactatgactaataacctgagatgataaagtttttattgcaaagttatttaatatagtgaaaaattacaaacattataaatgcccagttcttaaggaaaggttaaataaatcatggtatacttatagaccagaataatattcacatttggcctccaattaaaatatagaaagtgaagagtgtagttctcactctaacaagaagaaaccacataagctacaaagtcatagttttttaaaaacctgtcagagatctgaaaatagaaaaaaacttaaatgaaccag

SEQ ID NO: 607997 - DNA, 543 bp, Homo sapiens
agagagaactgacagaagtccttcaagttgctccagtaggcagtccacaccctcacctagcacactgaagctgtcctcctaaagctaggaacaaagcagaaggaaagagagctckctaagttcagaaagccaagaaaacaaattctctgtgacccaaaaatctagaatccaggcaagaatgcagagaaatcaatcacagtttagaaatctggtgactatcttctaaaacagagataaatctcaagaatctcagactctcaaacctcataacctgctaatgggaaagtcctaatcccatcctcaaaacatttgaagtagatggggaacggaatctaacattgcaacaaaacccagagccacttgcacaactactgagtagattcctttactagaatctgatagatcttataccagatcccataccaaagacctgacagaagaaggaatatgtcctttcttttttaagggtaaaaattatttaattcagtctccacttttttgggggaggggcacacaatctcagcatacaattaaaggttagaa

SEQ ID NO: 607998 - DNA, 539 bp, Homo sapiens
aggaacaaagcagaaggaaagagagctctctaagttcagaaagccaagaaaacaaattctctgtgacccaaaaatctagaatccaggcaagaatgcagagaaatcaatcacagtttagaaatctggtgactatcttctaaaacagagataaatctcaagaatctcagactctcaaacctcataacctgctaatgggaaagtcctaatcccatcctcaaaacatttgaagtagatggggaacggaatctaacattgcaacaaaacccagagccacttgcacaactactgagtagattcctttactagaatctgatagatcttataccagatcccataccaaagacctgacagaagaaggaatatgtcctttcttttttaagggtaaaaattatttaattcrgtctccacttttttgggggaggggcacacaatctcagcatacaattaaaggttagaagatatgtaaaggtgatccaagcttaagagaagaaatattcaataaaggcaagtccccagataattcaaacttggaagtaaaa

SEQ ID NO: 607999 - DNA, 361 bp, Homo sapiens
aaaagaaagtagaaaaaaatagaccaagcatctgagaactgtcagagaatatcaaaccatctaactaatgtaaggataactgataaatatgtagaagatgacagaggatttacaaagaatatagaacaaaaactcatttcatgattctgaaactcctgatcacatctaggacatataaaagggttgtgaatggaggactgaaacagaggaagaaggacaaaagagttatttgggatattgtttttttsagagagggcaatactgtgtggcccacattgtctcccagtctgtgagaggtggatacaagagagtgttgcatcccaactctaagcctcgtggaaaaggcttcaccaaaaccaca

SEQ ID NO: 608000 - DNA, 608 bp, Homo sapiens
aacaatggaggggctgagctgctttgctggaggtgaagaggctggctgggcttcctgtacttccagggtgaataacagtggggtgctcctggaagagaggcaaagagagtttttcatcataattgctatagcaacattaaatagttgttattagctcagaatattccataaagagttgccttattttaaagcaggtgaactctgtgcctgtccaatttggagtgtgggtgtatatcatttagcagaattggctgtcatttctagcggcctccttaggttgtgtcagacaaactgagctgtctgtaagtggctcttaggaaagccaccagacaaaatcagcttaggcatcaaaggagagtaataatcatcttttagattcattttttcagcaaatatatattggggccctgctatctctgatgcaaaatgctractattttggaggcacaggggcatgcatattgttctcaatgagcaaaataatatatgatcaaatgtgattagtatcacaaagtaaatgtcatgttctccagatacttagaaaaataagagactattcagagactattttagaagagtggtagttggttgagggatgggatggagaa

SEQ ID NO: 608001 - DNA, 455 bp, Homo sapiens
acattaaatagttgttattagctcagaatattccataaagagttgccttattttaaagcaggtgaactctgtgcctgtccaatttggagtgtgggtgtatatcatttagcagaattggctgtcatttctagcggcctccttaggttgtgtcagacaaactgagctgtctgtaagtggctcttaggaaagccaccagacaaaatcagcttaggcatcaaaggagagtaataatcatcttttagattcattttttcagcaaatatatattggggccctgctatctctgatgcaaaatgctaactattttggaggcacaggggcatgcatattgttctcaatgagcaaaataatatatgatcaaatgtgattagtatcacmaagtaaatgtcatgttctccagatacttagaaaaataagagactattcagagactattttagaagagtggtagttgg

SEQ ID NO: 608002 - DNA, 613 bp, Homo sapiens
tgctggtaccatgttaggatgatagagtgggaaaatggaaaaagggttgattcctaatgactacaccactgaaccaaccagccccgaaacccctacttctccacttcatgcatgtgagaaaataaatgtcctcactactttaaccagctgtttcaggtttctgttacttgtgctgagggaatcctaactgacaccaggagataccatatcttcgttccgctctggctgggaaacagacacacacatggatcctaggagatggttcattgccattgagtagtgcatgaagaaaaatgtagtaaagcttcctataaaactcctcactgaagctcagatttgattctgattagaggcccctccactcatctctgtgggctccccagcgtggcttgcctattgagccagggacctgtcaggctctcacattagattcagctggccctgagattagacaaaaaggagccactatatgggataattttgagaaaaagagaggggaatatgaccagagttattacacaagctratcaacaagactgtagtacctgcaccagcaatgccttctccctgtatgtggcatctaaagaccaggaatatcttacacttctccggc

SEQ ID NO: 608003 - DNA, 643 bp, Homo sapiens
catgtgaagttaatatgtgccaagcactgttttcagtcatttgccaatatggcctcttaactctcacatcaactcttattattaaatattatccccaaataagaaattcaagtcgcaggcaaattaatgtctttccaaaggtcaccctttcataaggtcagctaaggtagagttacgatttgatcccagggtatttggcttcaaggtgcatgatcttagctgccttgccacacccctatgccaccatgccttttaaggagcaggtgacatagagatgacagcagcagcagcagacatttctcatctgtcttctagctccctctcgatccctttcatccagagcctagctcccaagatcctcccagcttgaactccttaatcaaccttatgcttctgctctcagaaagcaaaatttgaagaaatatttataggcttattagtctattgtagataaatgatctataacactctatctgccaactctgtctctgaaatcataattacygctaatagagattcttttactgacaatgaaagagcatgttccttcctcctctttggacaccagctggcataggtttcatttcccactcccaccaagccagggactgccacagtctctcagcatctcagaaaagcaagg

SEQ ID NO: 608004 - DNA, 582 bp, Homo sapiens
gtcatccttcctggctgacatcctgaaaatccaacatctgctcattgatctgctgaccatgcaaaagtcagtgaaaatgtaaatgttttccaggactctcaatatcaaatacttttccatatccacaaatgaggggtgcaagggggagaatctacaaagcttatatccaaatttgggcttacttttcataaatggatattatgaacatgccgyttttcctaatttttgataatcaggagaagaatcatcccaggctcctggagcttcaggaagataatgcctctatttccccattgctcgttttctggacttccacccacgacagcctcctccactgccccttgcagtcctcctcctattcctgatgttctttccttccttctctctctcccagactggaggcgtccagagctgactgcatcctccttagttgctctcccttgccttaatggatacaatgtcacttcaggtgcatttgcatagacactcagtctatgttatttactttgttaaataagaaatagactctcctggattgggggtaaaaatatgcttttgaagaaggagtcagtggaggcccat

SEQ ID NO: 608005 - DNA, 531 bp, Homo sapiens
catatttacaggacatttattgctgccattttatggggaaaattagtcttttatgctttcagtaatgattccctaggccctcttttcacaccagcatgctcataaattccttgtttttacagcagggcaaaaatttctaaagcgttctcttcctcacttaccaggatcaactggcagagggtggagaggcatcccaggaagaggatagcgtgctggccagggccacgatgccarcaggcctctgggtcctctctggacactatttccagaggtgaagggaatgttgtgtaactgaggaagcccttctggagagcccacattggctagaaacacagctggctctttaaacaagagaaagcccaggcattgagcaggaaacgcctgcacgagctctcttggggctttgctggagttgaatgatgctagccagacacatgctgtggaaaatgttctcctcattcagggcatccggactcagcacatcccatctcaaagtgagccagaaataactgctttgaaacctggacaagg

SEQ ID NO: 608006 - DNA, 502 bp, Homo sapiens
cttccctaaggtagagtatgcaggtttttgccttgattgaagatttaaatagatggtttaaaaagctcctaaaacccaacagggctgatatttatacaatgagtctggcctctccactgactgttcttacctcaacatccttttttagtttttccaggaagaccttcttgttgttgtcatcaatataaatcttttggccctcattaatgaaatcattatctttcagagttggcagttctttggcctaaaacaaatgagaaaaacaatgacaaaggcgcttgaagaaaacctaaaaaaaccacatacaccttccaaccctggacactgaagtttgcccctttcaccgcccccaccccgttcaccaccacaggggtcttacccaaacaataaaataggagaaggcttgaataccaccggggggcgccagtgagccccaatctctggaagcattcgcaagagcagtggggtgrgggtcagacagactccatatcataaggctttt

SEQ ID NO: 608007 - DNA, 434 bp, Homo sapiens
gatgcagcactgtttgcttcccagaactgataaaaaggagctaaaaagcaacacctaaaaaattcctgcttaatattatttagtacttttatgcttaaaaattccaaatgactaagaacttttgcagaatctctaaaaccaaaaccaaaacaatgtgtttaccaaaagagttaaatgctttgtttgtttgaagtgggaattaactcacgtgtatgtgtacatatgtgcttatttcatgaggttctgtaatttgatgcataactgctgtcattcatatggagttgagcaatattggatattstaaggtttagtaaagccagaagttatatgaacattttattttagtgagattttaaaaaactatctttcagatgacacaaaatttttaaaaatcacaaatttcaaactatagtttgaaacattaaacagaattc

SEQ ID NO: 608008 - DNA, 467 bp, Homo sapiens
gtgaattcttcaaaacactttatrttattattttcgtggcaagatgtatggcaatatgacccacaaatttgcctctgtgaaaaaatacttttctacaactctccaacaactgcttttaattaataaaaatttggaaaggttgagttgacctccttaacagcatttatttcaattgaaagtgttctgcatattacagaaacttccagggaaagtacttaagattgctgggccacaccctggtagttagtttgcaatgtgacattttacttaaactgagcatttactgacacattctactgttagaacttggtcaggatttttgaaatgtatcctaacagtgacaagttaaataccataataagaaaacacacaatccaataaaaataggcaaaagatctgaacaaacatttcatgaaaaagatacacagatggcaaataaatacatgaaaagaagcccaacatcatta

SEQ ID NO: 608009 - DNA, 619 bp, Homo sapiens
tggctctaacaataaaactaaaaagtttactacaaccagcattctgatcaatgccctgtaataatctaggtaacttactaccctctttatgaagcctacccttaccactctagaactctttatttcttttcttttcttttcttttttgagatggagtcttgctctgtcacccaggctagagkgcaatggcacaatttcagctcactgcaacctccgcctcccaggttcaagtgattctcctgcctcagcctcctgagtagctgggattacaggcacctgctaccacgcccggctaatttttgtatttttagtacagacagggtttcaccatgttggtcaggctggtctcgaactcctgacctcaggtgatccagcctcctcagtccccaaagtgttgggattacaggcttgagctaccatgcccggccaggactctatttcacaggcatttattcacaaatatcagttgagcatctactatatagtgctatatagcattacatcaagaattgtaaagaactcgaaaaagcacaagttgtgctctcatacatctcaataaactcaagatataatatccacgtacactaactttgtgtgtgtgagagtgtgatgcttaaag

SEQ ID NO: 608010 - DNA, 566 bp, Homo sapiens
tgtctacaaacaaatttcaagtgctaactttaaaaagaaaattttaaagtcactatagataaaaactcatacatagaagaattaaacacactttaacaggtggactgacacaccaaaagtcattacagtggcagaataatttcctctgctactctttccccagataaccaaattaagaggtaccagcttcggttatttcaacagaagtaatcctaggccaagcaatatgctgttctactccaggaatgttttacataaaatgtgaaagcaaatgccaagtgttttctctgggagcttaacaagggctttttaaagtttcaaaatcaccaacattttctccagaaaggaaccacattttattcctgtaactcccatgtccttggacagagctggagaaaggtggaatgaggaatttgaactcagcaaagttcagggaaacaataattaatttttcttccccactgagaacagtatggcttcaggaccaaccattacaccctgttccactggttaggcacacttttctgatgttggatmttttttctttaaaaataagattaaagaaa

SEQ ID NO: 608011 - DNA, 575 bp, Homo sapiens
tgcagatgtgacataggcataaggataatgtgacttttccaatatcttggaactagtgacttgtcttttaatcttggtcagtgctgctcagtcttcaatgtccagacaaaccacttcaggatcagcaggttcagtaggcctggggtgggctcaagagtcttcatttctaacaagctcccagctcatacaataagaaatcagaatgcagaatgcattacttttaaattggttatttgttcttattctgaaataaagccttcattcacaaaaagcataaaattgcacagatgcttaaaaatattattatagtccatataccrtatgacctactacctgggtaagaatttgaacatgacctgaaggcttctccctcatggcacctcacccccattagccctctctctcctcccaggagaaaacactgtcttggcttttgtaataattattttctagcttttctctaggaaatggatgttttgaagagtttttttgttgtcgtttccctggtccctgatactttgaaatcaccagtatttcacacatgataaaggtacacaggccaaagaagtagatct

SEQ ID NO: 608012 - DNA, 432 bp, Homo sapiens
caatcaattgaatttgggtttcatatgaagaaatattattcagaagacattattggtttgccagaggatctttctttatctgttcaacaaatattagccccacagagaggccaggggtcagaaggcatttcagcagagagaaccgcatctgtgagtggaggaaccgcaagggccttccaggatggtgtgaatgcagtggcccacagcaggtgtgtgaaggggcaggcatggtggcagtgctggatacacctcattaagaaacaaagactaggccgggtgcggtgacttatacctataatgccagcactttgggaggtcaagttaggcagacagcttgagctcaggaattcgagaccagcctgggcaatatggcatgaacccatctgtacaaaaaactacacaaamtttgccaggtgtggtggcgcatgcctg

SEQ ID NO: 608013 - DNA, 552 bp, Homo sapiens
gagggtgatatctatgcttgcatttccggggtgcacctccattcgctcgtttttaaaactccatctttaatacctggtattttcaatgctgacgctgcctggcagtcccagctctatggtattttcaatgctgacgctgcccggcagtcccagctctacyttctaaaatgaataactggagttggaggaaaaagcagttttctgaaactcagggctgcagccaacctttgtccatccaagaatgtccccgaatcactggggcacaccttgcagccacctcgacatcagacaggccctcctgcctcgggggcacggggacacggccatcgtctggagcacgtgtacccagcttctcaacacaccgccacccgcctggcccagcccctaccctctcgcctcctgcacccctgcagcagccagaggctggtttccctgcaaaatgcgcgaccccatcatgtccctgctcacatgctcccgcagggcctgccgccctccccagcagggcccgccaccctccccagcagggcccgtcaccctccctagcagggccca

SEQ ID NO: 608014 - DNA, 437 bp, Homo sapiens
tccccaccacactccagatattgggcaggtccccrccacactccagatattgggcaggtccccaccacactccagatattgggcaggtccccgccacactccagatattgggcaggtccccgccacactccagatattgggcaggtccccgccacactccagatattgggcaggtccccgccacactccagatattgggcaggtccccgccacactccagatattgggcaggtccccgccacactccagatattgggcaggtccccgccacactccagatattgggcaggtccccgccacactccagatattgggcaggtccccgccacactccagatattgggcaggtccccgccacactccagatattgggcaggtccccgccacactccagatattgggcaggtccccgccacactccagatattgggcaggtc

SEQ ID NO: 608015 - DNA, 437 bp, Homo sapiens
tccccaccacactccagatattgggcaggtccccaccacactccagatattgggcaggtccccrccacactccagatattgggcaggtccccgccacactccagatattgggcaggtccccgccacactccagatattgggcaggtccccgccacactccagatattgggcaggtccccgccacactccagatattgggcaggtccccgccacactccagatattgggcaggtccccgccacactccagatattgggcaggtccccgccacactccagatattgggcaggtccccgccacactccagatattgggcaggtccccgccacactccagatattgggcaggtccccgccacactccagatattgggcaggtccccgccacactccagatattgggcaggtccccgccacactccagatattgggcaggtc

SEQ ID NO: 608016 - DNA, 549 bp, Homo sapiens
aggttagtaaacaaaataaattcctaagcccccaccaactgactaaatggattccctcttggccaaggggaccccagagaaatctgaaaaactgaattaatgacattaaaggaggttggacacacctaattataccccctcctttggaggtagacacaactgaccaacattcaataaattttaaaataaattaatttaataaaataaaagtaataacttttattaataaaaataataaaattaaagtacttaaaataaatttaaataaaattaaaatagagatcacaagactgaaaaaacagactctttgtggcaataagctaccaaattccaacctgactctggtgtaggattgcgtgacacatagcagacccagagagaaatcaaaatattttaacccaaaatatatttatttgacatattatgaaattgccccacaaagctgtctttgtgggggaaatttgyatctgtagagaatctccattaatgcagacaggccttccctttgcaggcctttcctggatctaggagagattaaccaagcatctg

SEQ ID NO: 608017 - DNA, 484 bp, Homo sapiens
gtgtgggtttctgcaggcgtttgagccctttctcagcataccctatatgatatccctgggagagaattatttcattagccaaaataatgaaatatttatggaacttaattatcttgaaagaaaaacaacaaamcaaagatccctggaagtattagaacacatggatgaaaatatttaaataaatttattatatagattaaaagacataatggacaaaacatggacatactggacaatatttggaatcccatttcaacttaagatttggagaggacaaatatctaaactacatcagaggggaaagagaaattttcaatatgaaacagaaacacaaaaacaaaggaacctagtacaaatattaggtatgaaaaattagataattaaaataagaaacatagaagatggtataaatagtagaatggatacaggtgaagacccaactgatgagctagaacagatggaaaaaccatcccaagaagaaaat

SEQ ID NO: 608018 - DNA, 547 bp, Homo sapiens
gagctctgcccacctcagcctcccaaagtgctagggttacaggcgtgaaccagcgtactcagcctttataccgtttcaatggacctctgtttaactctgacttctttgatcataaccaaagggtcttagcaaggattctttkgccaaaaacaattcaggaggaaacatatatcccataagaatattagtgccatgaaatttgttcattatgttgaccattgtatttctgctgcttagagcaatatctattccacagcagatgctccatagaaagctattaaatcaataaaatgaaatctacatgattgacatgcacatgcattgcagaatctgggatacctcacagatgttgaaatgaagacatagaagtaggttgtgtggaagaataatatgaatatgaggaaacttatttcatttgccctttctttctttgttatcctggtgtgaggttgcctttgctttgttttgactttcatttctttatagatttcaagttaagaaactgagccttggctgccaaatgccactcttcactattcttaacaga

SEQ ID NO: 608019 - DNA, 591 bp, Homo sapiens
tcatttgatttaatcattccacaatgaatgcatgtatcacaacatcgactgcataccatacacatacacaattattatttgtcaatttacaatagaattttaaaaatrttaaaacaaaaaaaatgttgctcaagttttcgagaccctcatcttctccactgacaaatgaaagcactcaaccccagtgcctctaagctccctggaactttgaacctacaggttttgtttttttatttttgagattaaaggtaaggaagaggcatcaccacatgatacaaagttatctgaacactgatatgatctccactgacaccttacaaaatgtaaagtcgcatttggtaaaagagaaagacaagccctgtgaattctgcagttctgcgcgtctttgggagacaggctggtgtggccggcgaggctctgcctgcaggaggcacctgccaaggtccaagcctctctgcagcatgaaggttctggaggaggtcccgccagccttgcttttgttcttgaacaaaaagggcgggtggatggatgcagtgcgtgggctccagagggagatcatcccccaaagctgcctatttggaaagccatgtg

SEQ ID NO: 608020 - DNA, 572 bp, Homo sapiens
tcttctgggatattaggacatgtgtaggaaacaagtccaacagagcggcagagcctagcagcagagcggcctcgccccaggccctgcggaagggggacaaatgctaagcccaccttcctccaggtctctctgtggctctggctgtcctactgccttgggacatttgaggttaggggaggaggaccccaggtttctgagttgctaatttataacaagttcaataagagcccacygtcagccctgttggctacaggtggggcaaaggtaggtccctgaagctaccgcagagcgaggaaagataccctgtcgggttaccgtttccgaaaggatcacagcctcagactgctgcagggaaatgtcggtgggtttaaattctttctcaaatatctcttgatgtttgctgttccttttttccttcttcttgtccttcttctccttctccaggtcatccttgtccagcttgtcctgggacctggagtgcattttctttggcaggagaggctccagggcaaacctaaaggaaaggtcaatgacgtcttaataggagagcaattgctttccagcccacagac

SEQ ID NO: 608021 - DNA, 488 bp, Homo sapiens
agaataaaaggtgatgatgatgattactgttatttagagacagggtctgactttttcaccctggctggagtgcagtgacatgawaatacctcaccataacttcgaaatcctgccctcaagtgatcttcccactctggctttccaaagtgttgggattacaggcatgagccactgtgcttggccaaacatgttattattgaagcaacaaattgcccagaaattatccctaacattatgttaaaaccttaactggaagaaccacttttaaactatgaagaattatttaataaatggtgctgtaataactagttgcaatttaaaaaatcaacttacatgcatttaatacaaagcattaaattctagacaaacaaaaagtttaatataaaataataaaacctaaaatggtctatcaaatttatagagggagggtgctattacagagaaatcattaaaaaagatggaaagatataaattaaatatttgtatgt

SEQ ID NO: 608022 - DNA, 538 bp, Homo sapiens
tttgcacacttactgtgtgccaggccctgagaatagagctgtgcataaaacagatccacacgaagctcactgcagactcagggtcacacccttcgcagcacccaggacaaaatgtcccacaaggtcaaacactgtaagtggagctaacagggctgtctacagcagcaaccccagttcttggggtccaggaaggccacagctgacctggtggcttggtcctgctgggtggcagtgaatacagccctcccagctactcacacgcccatgcctcctgcctagcccctgcacctgcccaggcctgacctacacytgaaggcaacaaacttctttgtgcaagggtgggtaatcatctcctcgcagccttctctcaggcagtatcctttttgtctcagtttttgctctgtctagatcaggggtcaacaagctttttttgtgaaaggccagatggtaaacattttaggtgttgtggaccatacaggtctctatcacaactactcaatgctgccactactcaactcgccagttacagtatcaggaa

SEQ ID NO: 608023 - DNA, 615 bp, Homo sapiens
cctcccaacttcaagcttctcaaccttcagccgyggcctttgtcattccactgcatttaggaaaggcaggaggacgttatttctcaaatgatggcacatccccaaagcagccggggatactcaggcctcagccttgtttcttaaacaaaagtgattctaagtccggcacaaaacatcacacttcgagcttctactgtgtgcccccttcctcctgcactggccacctggtgggattccccacatcgcagtcacgggggtcaggagcccattctctcaggctgcttctcctgcagggttctgcctacctaagccccctctttaacggaagaaggaaactccacgacagagaaacgaggattgaggcccaacaagttttatgagatgttattctcacatctctagttgtggggaagccgagttatttgggagactagtgtggacgtcgtctttctcagaatacatgcatacttaggggatttctagatgaacttttgttaatctagattggatggtgcccttgattgttagactcacctgtctaacaagctgtgtggtgcacgtgggtgccgctcacactcacctgcccctaagtgcacttctccaccccttgaagtc

SEQ ID NO: 608024 - DNA, 615 bp, Homo sapiens
cctcccaacttcaagcttctcaaccttcagccgtggcctttgtcattccactgcatttaggaaaggcaggaggacgttatttctcaaatgatggcacatccccaaagcagccggggatactcaggcctcagccttgtttcttaaacaaaagtgattctaagtccggcacaaaacatcacacttcgagcttctactgtgtgcccccttcctcctgcactggccacctggtgggattccccacatcgcagtcacgggggtcaggagcccattctctcaggctgcttctcctgcagggttctgcctacctaagccccctctttaacggaagaaggaaactccacgacagagaaacgaggattgaggcccaasaagttttatgagatgttattctcacatctctagttgtggggaagccgagttatttgggagactagtgtggacgtcgtctttctcagaatacatgcatacttaggggatttctagatgaacttttgttaatctagattggatggtgcccttgattgttagactcacctgtctaacaagctgtgtggtgcacgtgggtgccgctcacactcacctgcccctaagtgcacttctccaccccttgaagtc

SEQ ID NO: 608025 - DNA, 615 bp, Homo sapiens
cctcccaacttcaagcttctcaaccttcagccgtggcctttgtcattccactgcatttaggaaaggcaggaggacgttatttctcaaatgatggcacatccccaaagcagccggggatactcaggcctcagccttgtttcttaaacaaaagtgattctaagtccggcacaaaacatcacacttcgagcttctactgtgtgcccccttcctcctgcactggccacctggtgggattccccacatcgcagtcacgggggtcaggagcccattctctcaggctgcttctcctgcagggttctgcctacctaagccccctctttaacggaagaaggaaactccacgacagagaaacgaggattgaggcccaacaagttttatgagatgytattctcacatctctagttgtggggaagccgagttatttgggagactagtgtggacgtcgtctttctcagaatacatgcatacttaggggatttctagatgaacttttgttaatctagattggatggtgcccttgattgttagactcacctgtctaacaagctgtgtggtgcacgtgggtgccgctcacactcacctgcccctaagtgcacttctccaccccttgaagtc

SEQ ID NO: 608026 - DNA, 598 bp, Homo sapiens
ctgctgtgtgccacaaaccaggtcaaagaggaggcggaagatgcctgacycccaggatggtgcgattctacattagagaataatgacacagaacaacactgcgtgagctaggaccaggctactgcactctagcctggacaacagagcaagacccttctacaggaagaagaagaaaaaaaaacagaacaagaaaaagaacactgtgaaaaagactccatgggcacctacgggcaggaggcatgtgctcccactgggcagcctggaggctcacgggaggacacggtgagcatgggcttgcttattgctggccctaggagagggagcttgaccctgttttcagccaggccagggagggtgctgcaaaggcactaagtgggaagctggggtccgggcaacggggcaaggctccgtcagctgcttactgtcttagcaaaggtcccgccccactttcctgaaaccacgggctggggagcacctcccgctggacatcagggctcccaggcacagggcacgggccctgtatggctctgcctttccagaaaggtcaggcaagagtgagaagcctttaagcggtctgcaagatttttcaccttaaaat

SEQ ID NO: 608027 - DNA, 598 bp, Homo sapiens
ctgctgtgtgccacaaaccaggtcaaagaggaggcggaagatgcctgactcccaggatggtgcgattctacattagagaataatgacacagaacaacactgcgtgagctaggaccrggctactgcactctagcctggacaacagagcaagacccttctacaggaagaagaagaaaaaaaaacagaacaagaaaaagaacactgtgaaaaagactccatgggcacctacgggcaggaggcatgtgctcccactgggcagcctggaggctcacgggaggacacggtgagcatgggcttgcttattgctggccctaggagagggagcttgaccctgttttcagccaggccagggagggtgctgcaaaggcactaagtgggaagctggggtccgggcaacggggcaaggctccgtcagctgcttactgtcttagcaaaggtcccgccccactttcctgaaaccacgggctggggagcacctcccgctggacatcagggctcccaggcacagggcacgggccctgtatggctctgcctttccagaaaggtcaggcaagagtgagaagcctttaagcggtctgcaagatttttcaccttaaaat

SEQ ID NO: 608028 - DNA, 598 bp, Homo sapiens
ctgctgtgtgccacaaaccaggtcaaagaggaggcggaagatgcctgactcccaggatggtgcgattctacattagagaataatgacacagaacaacactgcgtgagctaggaccaggctactgcactctagcctggacaacagagcaagacccttctacaggaagaagaagaaaaaaaaacagaacaagaaaaagaacactgtgaaaaagactccatgggcacctacgggcaggaggcatgtgctcccactgggcagcctggaggctcacgggaggacacggtgagcatgggcttgcttattgctggccctaggagagggagcttgaccctgttttcagccaggccagggagggtgctgcaaaggcactaagtgggaagctggggtccgggcaacggggcaaggctcygtcagctgcttactgtcttagcaaaggtcccgccccactttcctgaaaccacgggctggggagcacctcccgctggacatcagggctcccaggcacagggcacgggccctgtatggctctgcctttccagaaaggtcaggcaagagtgagaagcctttaagcggtctgcaagatttttcaccttaaaat

SEQ ID NO: 608029 - DNA, 598 bp, Homo sapiens
ctgctgtgtgccacaaaccaggtcaaagaggaggcggaagatgcctgactcccaggatggtgcgattctacattagagaataatgacacagaacaacactgcgtgagctaggaccaggctactgcactctagcctggacaacagagcaagacccttctacaggaagaagaagaaaaaaaaacagaacaagaaaaagaacactgtgaaaaagactccatgggcacctacgggcaggaggcatgtgctcccactgggcagcctggaggctcacgggaggacacggtgagcatgggcttgcttattgctggccctaggagagggagcttgaccctgttttcagccaggccagggagggtgctgcaaaggcactaagtgggaagctggggtccgggcaacggggcaaggctccgtcagctgcttactgtcttagcaaaggtcccgccccactttcctgaaaccacgggctggggagcacctcycgctggacatcagggctcccaggcacagggcacgggccctgtatggctctgcctttccagaaaggtcaggcaagagtgagaagcctttaagcggtctgcaagatttttcaccttaaaat

SEQ ID NO: 608030 - DNA, 433 bp, Homo sapiens
tgtcctcttgggggaaataggcaattccctgtctatactttagagttgaaatggaacaacacagaagaaaatggactcactcttttaggaggggccagggtaaaagatggcctcagagagagcctgtgtccagagaagaggtctggggtctgccctgagagcccaactgtggcaggtggagctcatatcacctccttcatgaacgytggtgcctataaaagtcctggactcactgagttccaacagagaacagcccccctccatgccattgctgtgaaagccctcccccgtctcctgcctctctctctctctcatgggaccacactgggtccctgcctggtgtggggcctgccgtctggcctaacagagcaaatgacagatgcatctgtcagagcaggattttaacaaagaacacagagagatcaattggaat

SEQ ID NO: 608031 - DNA, 442 bp, Homo sapiens
agattctgaatccacgccactacgtgggaagcaaacgttttctttagtagccaaggcccttcgaggttaatgtttttttttcttttcgttttggtttttgagacagacggtctcactctgtcagccaggctggagcrcagtcgtgtgatcatggctcactgcagccccgaccccctgggctcaagaaatcctcccacttcagcctcctgagtagctggcaccacaggtgcgcgccaccacacctggctaatttttgtattttttgtggagaaaggggtgttgttgtgttgtccaggctggtctcaaactcctggactcaagtgatcctcccatcttggccttccaaagtgctgggattacaggtatgagccaccgcaccgctgttagtgcatgtcttgatgttgccttaggctcttaacgctcacaccaacagaaggaaggg

SEQ ID NO: 608032 - DNA, 442 bp, Homo sapiens
agattctgaatccacgccactacgtgggaagcaaacgttttctttagtagccaaggcccttcgaggttaatgtttttttttcttttcgttttggtttttgagacagacggtctcactctgtcagccaggctggagcgcagtcgtgtgatcatggctcactgcagccccgaccccctgggctcaagaaatcctcccacttcagcctcctgagtagctggcaccacaggtgcgcgccaccacacctggctaatttttgtattttttgtggagaarggggtgttgttgtgttgtccaggctggtctcaaactcctggactcaagtgatcctcccatcttggccttccaaagtgctgggattacaggtatgagccaccgcaccgctgttagtgcatgtcttgatgttgccttaggctcttaacgctcacaccaacagaaggaaggg

SEQ ID NO: 608033 - DNA, 559 bp, Homo sapiens
cccacgggaagtgtgccagcagatctgcgggtttgagcatgggtacaggcagcaacagctgtatcaacaaagagctgtttctctgagcccgggtcctggacgaggtgactgcaaacgcagatgcctctagaacctggtcttcgatgtctacaagccgagcacagcacatgcaatctggctgtcagtccacagagaggtgggcgctggctgagcctctgtactctggtgtcctacctccctgccctcatgggcatctgtactgcagatcagccccctcctgctgggcagcagctgcgggtgagtgtgtcacctgctcaggctggcagagaaaaacagctaggaggtctcttccttcccagtgcaaaatccacaagactggctcaaagaaatcaagtctcataggggaagggaactcccaaccaaccaaactacccagagggcacatgccaaaatcctccacgagagagagcgagagagagagcgagagagagagagcgagagagagagcgagagagagagagcgagagagmgagagagagagagagcgagagagagagag

SEQ ID NO: 608034 - DNA, 543 bp, Homo sapiens
tacagtaagcaagtcagtatgcgactggcataaggatagacatagatcaataaaacagaacatccagaaataaactctcacatttagggtcaattcattttgacaacagtgccaggacaattcagtggagaggtaatagacttttcaataaatggtgctaagacaactggatatccacatgcaaaataatgaagctagacccctgcctcacatcatatacaagaattaactcaagaattaactcaaaatggatcaytgacctaactgtaaaactcttagaagaaaacataggaataaatctttgtgaccttgagttaggcagtggttttctagatatgacaccaaaagcatacgcaaaaaaagaaaaaatatataaaaactggacttcatcaaaataaaaaacctttgtgcttcaaaggatgccatcaagaaagtgaaaagacagcccagaggatgggagaaaatatttgcaaaccacatatctgataagggacttgtaaccagaatatataaagaactcttacaaatcaacaataaaaagac

SEQ ID NO: 608035 - DNA, 543 bp, Homo sapiens
tacagtaagcaagtcagtatgcgactggcataaggatagacatagatcaataaaacagaacatccagaaataaactctcacatttagggtcaattcattttgacaacagtgccaggacaattcagtggagaggtaatagacttttcaataaatggtgctaagacaactggatatccacatgcaaaataatgaagctagacccctgcctcacatcatatacaagaattaactcaagaattaactcaaaatggatcactgacctaactgtaaaactcttagaagaaaacataggaataaatctttgtgaccttgagttaggcagtggttttctagatatgacaccaaaagcatamgcaaaaaaagaaaaaatatataaaaactggacttcatcaaaataaaaaacctttgtgcttcaaaggatgccatcaagaaagtgaaaagacagcccagaggatgggagaaaatatttgcaaaccacatatctgataagggacttgtaaccagaatatataaagaactcttacaaatcaacaataaaaagac

SEQ ID NO: 608036 - DNA, 498 bp, Homo sapiens
tcagataaatttggaaagtgatacagaycagatcccttctgaaatattcatagtctctagtccagtaggaaaatcagcttaaattctttaatatggtgttttgcaatatgtatgtccatagggttctgcatttccaaattccttcctttcttttctttttctttttaagctgagctcctgctaaattagtattctgactcatcagatactttgggaaatgctgacttacaagatgaggcttaactcccgagcatggcattcaaaaccgtcgtggtttcttccagtgtctccagactagtctcaaacatgcccgatgttttccccatcccacacagttcctatttgttcatggttctttcagcggccccctgcaactcccacatccccatctccaaaactccttcctggcccagatggagtgcccctttcccaaccctgcctgcgggtactgtctacacccctcggtgtgcttttcccatccccctgctgggtcccagt

SEQ ID NO: 608037 - DNA, 520 bp, Homo sapiens
tgatttttgtataaggtgagagatgaggattcagtttcattcttctatgtgtggctagccaattatcccagcaccatttgttgaaaagggtgtcttttcctcactttatgtttgctttgtcaaagatcagttggctgtaagtayttgggtttatttctgggttctctattctgttccattggtctatgtgtctatttttataccaataccatgcagttttggtgactatgacctaatagcatagtttgaaatcaggtaatgtgctgcctccagatttgttcttttttcttagtcttgctttggctatgcaggctttgttttggttccatatgaattttaaaattgtttttattctaattctgtgaaggatgatggtggtattttgatgggaattgcattgaatttgtatagtgcttttggcaatatggtcattttcacaatactgattctacccattcatgaacatgagatgtgtttccctttgtttgtgtcatctgtgatttctttcagcagtgttttg

SEQ ID NO: 608038 - DNA, 546 bp, Homo sapiens
cccaggaagtcgaggctgtggtaagctgtgatcacaccactgcacttcagcctgggtgacagagtgagaccctgtctagaaagaaagaaaaaggaaagaaaagaaggaaagaaagagaaagaaagaaagaaagaaagaaagaaggaaagaaagagaaagaaagagggaggraggaaggaaggaagggagggaaagaaagaaagcgagcctttaaagggacgtcacagaaatgagatgggtaaaggaaggcaggcaagtcttagacctggatggtagctgacaactttggggaagaagaaaacttttttccctgactctcctggtctctgaagtgggagtgattgctgttggatgcaatcaccttctctggctgactgccattaaagtgaagcatagaagatacttgccagggctttccctctgcagcagatattgtttataaatcggaatatgaaactatctcatttatttgtccaatattctactgggaaggaagtaaatggttgatttcagtggagatacactagcactttcataatattataa

SEQ ID NO: 608039 - DNA, 649 bp, Homo sapiens
cattatttcattaagttgatcttcaatctctgatatcctttcttccacttgatcaattsggctattgatagttgtgtatgcttcacaaagttctcgtgctgtgtttttcagctccatcaggtaacttatgttcttctctgaacttgtgactctagttagcaattcttttaaccttttttcaagcttcttagcttccttgcgttgggttagaacatgctgctttagctcagaggagttttttattacccaccttctgaagcctatttctgtcaatttgttaaactcattctcaatacaattttgttcccttgctggcaaggagttgtgataccttggaggagaagaggagttttggtttttggcattttaagcctttttgcactggtttttcctcatcttcgtggatttatctacctttggtctttgatgttggtgactttggatggggtttctgtgtggatgtcctttttgttcatgttgatgctattcctttctgttagttgtccttctaatagtcaggcccttctgctgcacgtttgctccagtttgctggaggttcactccagaccctgtttgcttgggtatcaccagcagaggctgcagatcagcaatgattgctgcctgttccttcttctggaagcttcattcc

SEQ ID NO: 608040 - DNA, 721 bp, Homo sapiens
aatttattttgcatgagaatctccaactatctgcccctctgggagccagactgcaaggggtggggaaaggagctgtggggttttatgagccctgtcacttaatacacacgatgacgggggctggaatgtcacctctgggggctgccatgtcacctctgggggctgccagggatgcttggcccactctacctttgtcagcgtttagtttaatgccacgaggaggttgttatagcccaagtctatacataaaggatttacaattaaggttattagcatcaggtggaacctaaacttggcaaccttgcatttcatgcacagaaataatcgtgtagtgcattttgttctgattcaaacaacaacagcaaaaagaccggagctcacccactgtgggcttcccttgctaaaacattttcacacctgtggcagcgccccaggttcctgtggggtagaagcctctttgaaaggtgcctgtgggtctcaaagtacagggactggctgaggtatcacctcctggggtcataggttgtgtcccagggtggtggccacagagaggtgacaatactaggtggctgtctattaaacctgccaggtgaggttcaggaggtgtggtcttcagccaagtctcctgtgtttgcawcagtgacatattccaaggtcttctccagcttgcaagtggccactcgtctccagtcctgcacccaagaaagtgctgaggtttccc

SEQ ID NO: 608041 - DNA, 550 bp, Homo sapiens
aaagtccttatgagcagaaatctccctgataaacacttaaatctgggggtaggaattttcattccgcacctggccagggcctatggagactccagggtggatccttctttgcctggaagaaggcaaagtgtgtagggtgtttcttccagccctgggatgctaacaggctttgccagtccaggaatgagaggccaggcatcaagagtcctgacaacccgactcaggctctgcctggctgtgccaggagatgtggggccctgccatgcccaagccgggtagatgccagctggtggtcaaggcaaatcacttctggggatggaacatggggccccaaagacaaatgatcttagatcgggctctgatgtcacaaggaattcatcgcctcctctccctacgctcacccacatcccaaacttgatcctcctcacaaagcccccagaacacagctgcgggaatcaaatgaactctaatcatgatcgttgaagatcaaggcatgacaaagcccagtgggaaaacytgctaaataatggtttgtagtttaccccccgaa

SEQ ID NO: 608042 - DNA, 580 bp, Homo sapiens
tgattgccataaagtgcacatattttaaattaatttgtttaccttatttatttgccttttagatgaatctagattttctacctgtatactttgattcaattaatgtatgattattttttagaaacttctacttgtcatgtttcaaagctgcacattaactgaaattctatatcttkttgcttccagtctctagtagccagtgaagcagttcgtgctattgagaaaattagtaaaaataccaggtatacacatggccatggctcagaaaccttatgtaagtatttcttcttatgatcttagagaactttgagctactaaagaaatctgtgtgatctgtttttctttgtgtatttaatttttctgaattaaatagggtcacatgtaatacaactgaattgtaataattaggaacagaagcataatagctatgacaatgctgaacaaagctatattaataaatgagttactaaaaagaagccaaaatcctatttaagaaatcatatttatcacaatcaagtaggaattacagaattggcatcatactagttgagtgaagcagaaaagttcataaaacttttgc

SEQ ID NO: 608043 - DNA, 580 bp, Homo sapiens
tgattgccataaagtgcacatattttaaattaatttgtttaccttatttatttgccttttagatgaatctagattttctacctgtatactttgattcaattaatgtatgattattttttagaaacttctacttgtcatgtttcaaagctgcacattaactgaaattctatatcttgttgcttccagtctctagtagccagtgaagcagttcgtgctattgagaaaaytagtaaaaataccaggtatacacatggccatggctcagaaaccttatgtaagtatttcttcttatgatcttagagaactttgagctactaaagaaatctgtgtgatctgtttttctttgtgtatttaatttttctgaattaaatagggtcacatgtaatacaactgaattgtaataattaggaacagaagcataatagctatgacaatgctgaacaaagctatattaataaatgagttactaaaaagaagccaaaatcctatttaagaaatcatatttatcacaatcaagtaggaattacagaattggcatcatactagttgagtgaagcagaaaagttcataaaacttttgc

SEQ ID NO: 608044 - DNA, 601 bp, Homo sapiens
tctggctaatattttgtatttttaatagagacagggttaactcaggtgatccacccgccttggcctcccaaactgctgggattataggcgtaagccacagcacctggcgtattctttattggaatataaaatctatgaaggcaatgaatttgattttattctcctagccctagaagtgtctctggcatgtaagtttttgagaacattgattgtttcttcatctgaaaaccaaacacaaagtaaatgacaacatgtgcaaaatttacaaacattaaataaatgcttttatagtttccaataaaactacaaatagaattctataatagtatgttaaagtataaagttgtataagaccatcacatcaattattataactaaatatattcactgcttacctggatagaaagcacccaggcatatttttwaagaacaaatgaatagattggtagaaaaatgcatgcacgtacagggaggtttagctcactactcttcctctgttgctttccacaaatacttactgagaactaatctaaatatatatagaaaggaataagctgcagttcttgtggacaatatactcaatttttagagggtatattag

SEQ ID NO: 608045 - DNA, 656 bp, Homo sapiens
tagcattttaagttctaccaaaaacctattaggattcttattggattacattgaatctatttgggagatctgatatctttaaaacattgaaactagccaacttacatagataggagatatctgtccatttaattaagccatttttaatggtgatcaatgaagctttatgatttctttcattaaaaaattatcctaacaaattttaatacttttgttggatttattcctacattatataggaatatatartagtatatgagatagacttgtgatattacagtaaatggtgtctgttttttaaaaaatcagtaatatttattaaaattttataaatattttaataaaattcaatacttaatttctagccttaattttaaacaataaatgcctaccataatgctgtcattgggtcttgaaagtgcaatcacatcaaatgcaaaaccatggtactatgaggtttaccaaatgactgagggagttgatggagccagcagctctacaggtcaaagccagatgcatatgatgctatatacaggcttgcattagcactggggctcattgtatgatcaaaatactgcatatgtttttgcagaccaaataaatgggcaccagtttgtagttaacacaaacaaaataagctggtaattttgaattct

SEQ ID NO: 608046 - DNA, 580 bp, Homo sapiens
cttcctgagaccatctgtatttgcatttgtacctctattataacacttaacgtattctgtggtgtattatagtgaattataaacagaatctatcggcctgacgagacgccaagctccgtaaaggttttcatttttgcataccctgagttatcttgcgtagaaactgatatattgcacaatattggctgaactgaaatggggaaaaataaattgaggttgtttcagtaagattcactgccatatgataatgaattggcatcagtcttctttatgaaaagttatccattggcatctgcacactcagttccaagtaagttaccaagtgtcagatcagatacgagagagggacaaacaacaacaacaacaaaactcatgtaattgtttgcctttgggaagataatacattagtccattgwgtgtgtgtgtgtgtgtgtgtgtgtgtgtgtgtctatacctcacctggatagggatcaatgtttctgccttttggtaactgctcttctcagcttgtgactccttactttccccatttcatactctgccttctacctttattttccatcgcttaacttttccaaat

SEQ ID NO: 608047 - DNA, 616 bp, Homo sapiens
aagatacatacatcactttcattttgtcttaaggcaggatgaaaagggccacacagagaggattaagattcaggataaaaaaaaaaatccttcaacatcttggttgctccttctctcaccagttagatccatttctctttaaacatttggaagaggatagaagttgtcatcactcatctgtttttgggaagtagcctcatattaacatccaggtgggttgggttggagaaaacaaagaaatcttccttcagaaatgaacctagaatatttatcttgcctgggtctatgcagacctcttaaagctacatttgcaaaacgaacactttactggaccagaaattttgacatcctgtacacttcacaataccgcattcagcatctggttctcagctgaccacacygtaaatcagacagaagatgcagcccacttaagaatccagtgaagaaggttttctgttttttatttgtttgtttgtttgcttttgttttaatgggcaaaggagaatgccaaagagaaattcccatatcctaccatgatgcttagtgggtcaaaattccaaattggatattttctcttgccttgcttaaagcaactaaataaataagcatgttccag

SEQ ID NO: 608048 - DNA, 616 bp, Homo sapiens
aagatacatacatcactttcattttgtcttaaggcaggatgaaaagggccacacagagaggattaagattcaggataaaaaaaaaaatccttcaacatcttggttgctccttctctcaccagttagatccatttctctttaaacatttggaagaggatagaagttgtcatcactcatctgtttttgggaagtagcctcatattaacatccaggtgggttgggttggagaaaacaaagaaatcttccttcagaaatgaacctagaatatttatcttgcctgggtctatgcagacctcttaaagctacatttgcaaaacgaacactttactggaccagaaattttgacatcctgtacacttcacaataccgcattcagcatctggttctcagctgaccacactgtaaatcagacagaagatgcagcccacttaagaawccagtgaagaaggttttctgttttttatttgtttgtttgtttgcttttgttttaatgggcaaaggagaatgccaaagagaaattcccatatcctaccatgatgcttagtgggtcaaaattccaaattggatattttctcttgccttgcttaaagcaactaaataaataagcatgttccag

SEQ ID NO: 608049 - DNA, 572 bp, Homo sapiens
ctagcatattggctgcaagaaaaagcattgagcttcaaaaaatgtacttagtgaggactcaggaaacccagatttgcccacaaatagaagaacgttatcatcttgtatcctttctaccaccaaagttaatctttcagattctggaagtctctgttaaagcatttattctacctgagactggcctatgaagagtttcccatttgtattcgctgaacctttattaaacacacttttggctctggcctcagtttcctttcatggctctgragctaaaggtagtgagattgagagggtggagcagggattgctgcagtgaccttggcctgagcctgtctctcagtggattctagtgctggtgttggagaggctgtgtatgcacaagatgagcacctcaaccctaccttctcctttttggtcttaaaactgacatgaagtcagttagaaagtgtcttctttgtttgtctcaggtgaagggtctctattgttattaaagggaattatttattaaatgacacaaattgtattgggaattattaaacgatgcaaatgtcaaagtgattgttacctgattt

SEQ ID NO: 608050 - DNA, 484 bp, Homo sapiens
tcactctgtcacccagactggagtgcagtagtgtgatcacagctcactgcagccttgacctcctgggctcaagagatcctccagcaacctcagcctcctgagtagctgggactacaggcacacactacgatgtccggctaattaaaaaaaattttttttgtgtagagatggggstctcactatgttgccccaactggcaagtaaaaactttctaacataaaagtgcctaagataaatgacatttgtgtctgtgtaacttgtcgctatcttgtcctagcccaaggtgttcaatacagccctacccttcgcgagttcaattcccattcttgtgcctggtttttgtttgctaataaatcaggtgttcttaagggcgcattaactcatctagatcaacctaaaaggctagtttccaactagctcctgaaggctaactggaaattaacctttcaggtaaatttttaaaaaaagaaagaaaagaaaaaag

SEQ ID NO: 608051 - DNA, 503 bp, Homo sapiens
cagaagctgaagcagcacattaacagacgggccagtggggccacctgcagaggccattgacaaaccccaaaggacaggaagaatggatgtggaatctttgggttcctaaaggcttttcctgctactttcctttcaaaggctcgaaggctgaatggtgatttctccacccactacaaaaaccagtggcatctcccccagagctcaaagaaaggggcagcgtgaggattctccaccaccagacacatggccatttccacagatcccagctaggggacgaggagatgcagctrgatctccagggcagaggactgtgacacgtgaagatcccagtggcatgtgctacctgcctcacattgactgccagccagagttcaaatttgtaatccttcacctcctccagtgaggaacaggtaatactgcaaactgcacactgaaaatgttctactgcctagtgaaattattaggatgcacacacacacacacacacacacacacaatcccct

SEQ ID NO: 608052 - DNA, 383 bp, Homo sapiens
ataaaataaattctttcctttttatcataactcagtacatgaaccagacaacacccacatgttaggacagcttttgtggagtctgtcagtcgttttcctgacattttcactgctccagagaaaacagaaagttaggttatttcacttaaagattaaataggataaaacatttagaaaacctggagacaaaaatctcacaggttcaatatgactaaaaggtaaatttctagaaactacacttgctaggagcttcagtagattctaagcttccccatggccactcctctttcagtcattctctactctgctgagaaagcaactgtgtttttagctgaatyccaactgccctaaatgttagcttggaatccaactggaaagacgaa

SEQ ID NO: 608053 - DNA, 528 bp, Homo sapiens
agtctcagctactcaggagactgaggtgggaggatctcttgtgcccaggaattcaagcttggacagcatagtaagatcttgtctcaaaaaaaaaaaaaaaaaaaaaaaaaaaaaagaaggcttcagtggaaagcatgttcacacatacatatgcaatgaaaatttacgaatgaaaaagttctcctggattccaacaatttctaaacaatttcttatttttatattctttcacattcatccaaagtaaggcagacattttttaagagtgagttaattatcaaggataattctatgtgtcctactctgaaaacttcaratttccttttccccacttttgccaaaaagtctagtatttattatcctgtttctcatgttctctaattacttgactttccttttaatgagaagtatccttcccaccaactgtctaataaaatccttggttgtattgtttaattttaaagcaccctcttcatgaacaatttatctattttccctcctattccaaatgacagacattaaattaca

SEQ ID NO: 608054 - DNA, 592 bp, Homo sapiens
tgagtgaaaaaatgtagattataaaacagtatagtgtgcacattgtatgcaaagaaacatttttaaaggatatctgaacagattttaacagtgtttgtttcccttagatcaaggcattgcttttactttttttgcatttccaattttctataatatatgtgttgttttttaaatgtaaaaatgttcttgcattttaaaacatttgaatatcttagaattaatttaaataatatataagaggataaagtaaaaactctctctcccccacttcctctcactcttagttcaatacgctatagataacaatttcttggctggtctgtcctaaaaggtcagagaatatataagcattataaaaatatgcataccagtatgtatatgtgtgtatgtgttttccggtataaaaatgggatacaaaacataataytgataactttgattttatttttgcacttaacaatctatatttgacaatttacaatattggcctatttaggttggcctaattcttattaatgacagcatagtattccattaaatggatatatagtaatttacttagccagatctctactgatagtttttacttttt

SEQ ID NO: 608055 - DNA, 638 bp, Homo sapiens
cctcctgttaaacacctctggatctttacctgttcacttgtatatttcagcataaggtaaatagccttggatgattctggaaaacttttcttggctgcaagcataaatggaaagcccttggtatcccagaggaagaaagaggcatcgctgaaatataccaaaagatgggctctgctctccacatgacagcacacaaacacaaatcgatttgttttcagcagtgttttttacactttggcaccttgctttcagatagtcagtggtgcctggacacataggcggagccctgtagtaattgttcaatgaacggtgaatgaagaaatgagacaaaaccaaagacatctaccctatctgagtagtttcctttaaggttctgaastactgggttcggggcaaggagtccagcagaggtgaaggggcaagcagctttcccagaaagatttgaaatattcctgctgttggctcacaacaccattctaagtttattcattaacttatccccttggcaaatattttttgaacatccactgtgtgacatacaaaaaagaataaaacgccgtttctatccttaaagaagaaaggcaagccatattaacaactttgacaaagtcatcaatagctaccatttattgagcact

SEQ ID NO: 608056 - DNA, 638 bp, Homo sapiens
cctcctgttaaacacctctggatctttacctgttcacttgtatatttcagcataaggtaaatagccttggatgattctggaaaacttttcttggctgcaagcataaatggaaagcccttggtatcccagaggaagaaagaggcatcgctgaaatataccaaaagatgggctctgctctccacatgacagcacacaaacacaaatcgatttgttttcagcagtgttttttacactttggcaccttgctttcagatagtcagtggtgcctggacacataggcggagccctgtagtaattgttcaatgaacggtgaatgaagaaatgagacaaaaccaaagacatctaccctatctgagtagtttcctttaaggttctgaagtactgggttcggggcaaggagtccagcagaggtgaaggggcaagcagctttcccagaaagatttgaaatattcctgctgttggctcacaacaccattctaagtttattcattaacttatccccttggcaaatattttttgaacatccactgtgtgacatacaaaaaagaataaaacsccgtttctatccttaaagaagaaaggcaagccatattaacaactttgacaaagtcatcaatagctaccatttattgagcact

SEQ ID NO: 608057 - DNA, 558 bp, Homo sapiens
agatgctcctcttgggaagaatttaaattagttccacgccaacttgtgccctcaaatccatcagaacactcatgcaacctttacctccaacaacaggccatccagtacagccaagcctccttcagttttctgccagaggctctcgggtgaaagtcaaacacataaataccagtctgttatttgcctctgtccacagaggacactgatcaagcacttacratcttccagtgaaacccctattgaggtgaaggggagcatcgcccctcttttggaatgatggaattcacagcaaggctctctcttaaagaatccttctcatagatctgctttctgtctagtaacttaagccttttatgtcctcaaagtgagtaagaagactaaggtctagaactgtttatatctgctttgacatttctggaataggatctgtctcacaattcactttggtatctgatacacatctccttggagtctgggtgaaatgttcattttcaatcctattgcatttgcaactggcttctatgcctaacatatgtagtagttccactaagcaaggat

SEQ ID NO: 608058 - DNA, 558 bp, Homo sapiens
aatatgtgccaaggcactatgctaagacctggagattctatagtgagcmaaacacagtctctgccttgaaggatcctgcagccttttcatcatgaactctagtaagtggtggcacatacttatgaccctggttattgtgattctaacagtatttagtacaagagaaccatgtgtccagcctcagtcatagatggctccagcagagaatagagaccttggttaaaataagctccaatataaactatgtcataataacagatgatttgaaggcagcaagaaagacttaaaatttaaggaagatctttctgcctggaaggctgcctggaattttagaatggccaaatgagtaactgtggaacagcctgagtttatttatgggccatgcagaagcccaagcttgccatccaagacccttggctttgggtctaaatgatgggttaagaggaaaaaaaaattaaaaagaagatgttcacattgaattttttttctggtcatctagattaacttgctttttgacatgttcctagagccgtggttggaatagattttattagaaac

SEQ ID NO: 608059 - DNA, 558 bp, Homo sapiens
aatatgtgccaaggcactatgctaagacctggagattctatagtgagcaaaacacagtctctgccttgaaggatcctgcagccttttcatcatgaactctagtaagtggtggcacatacttatgaccctggttattgtgattctaacagtatttagtacaagagaaccatgtgtccagsctcagtcatagatggctccagcagagaatagagaccttggttaaaataagctccaatataaactatgtcataataacagatgatttgaaggcagcaagaaagacttaaaatttaaggaagatctttctgcctggaaggctgcctggaattttagaatggccaaatgagtaactgtggaacagcctgagtttatttatgggccatgcagaagcccaagcttgccatccaagacccttggctttgggtctaaatgatgggttaagaggaaaaaaaaattaaaaagaagatgttcacattgaattttttttctggtcatctagattaacttgctttttgacatgttcctagagccgtggttggaatagattttattagaaac

SEQ ID NO: 608060 - DNA, 599 bp, Homo sapiens
ttttttttttaatttagagacaaatctctgagggtcagatgacacaaagcaaattaattttagagcagatgtggaaatgaatgagaccttggagcagtacttccaacaatagtgtttaatgagtagacattggttggtttatttctgacatcttatgaattctaagatcactgcctgtgactagaagatttagccttcatttttcatttatctcattttctttctttttctsttctctttatttctttttctccaggatgatggcctcccagaaaatgaacatcagctgtcagtagctggaaagataaagaagcatttcaacacaggccccaagccgaatagcacagcagctggagtttctgtcatagcagtaagcatctgaaatatccacctataactttttttaaagcaacccacctaagagacaggcattactcaggagattctccagtcagagacagcagaatgggtcatttctttagacagctcagccacttaatgcactagaggaggtatgggacttatatatattatgtgtttctgcagatcatttccctgggcatcacatcattatccaacacctccagggtgtcttgcag

SEQ ID NO: 608061 - DNA, 616 bp, Homo sapiens
tgttccctaagattcattcatgtttttaaacttaattactctctattcctagccaagttcatctactttaatggctttagcaatgatggttctggtagacagtgatggtgacaaatggcaacyagatggtatgcaataagcaaagcctttgaaggatgtataattttcccaaatttacaattaaggaaattaaggcttggagatgataaataatttgttcaaggccacacagatagtattaaaggcagaggtcaaatccaagtttgtctttgtttgacaatatatccttaatctttaaatgtaccccctttgaggtatacatctctaaccctgactcctctcaggagctccagaaccacatttccaactttctcttatgaacttccctatgactattccacagccacctgaaattcaacacatcccacaactgaactcatcgtctacctggtcagcttcatttcttgttctgtgtttcctggatgagctcatggcatcagcattctcaacaccaaggttgcaaaacatggagtcgtcttttactcacccctcacttttactccccatagcccatctgtccccctcctttccaatgctactgccattatcttaggtc

SEQ ID NO: 608062 - DNA, 375 bp, Homo sapiens
cttccatggactggactctctcaccacattgaagacagagtgggatcataaaaccagccctgattttaaagggcttagattccaactcttatggtctttgttcgatcattcaactgttcaacaaacatttgttgagcaactactgggtgcgaggtactgaagacagagcagtgaacccccargaaattgcctagccttcctaagcccattattggcaaagaaaaatgggcactaatcatgactggccgtatctacctcacagatagttgcacagctcaaataaagggatttatgaaagcatcctgaaaatggggaatgtctataacaacacaagtgctcctatttaattaattgtcttataatttgttaaaggcc

SEQ ID NO: 608063 - DNA, 465 bp, Homo sapiens
attttaagcatcttatataccttaactgtgttgtgtttgtacttattgtgttcttcccaacaacattgtaactttgtaatctagtttctatggtaatccccactgacagatggggaagctccatcactaagtctaatagttcctactgccagaatagaagacagatataggcttgaatatatatatggacgtggtcatagaggtggasaatcataaaattgtcagctcattgatataaattttaccagcctccctactgcactgaatcatctggctgtacattgaaggccacaaaatgttccatttctctgaattgccaccttggtgagtagtcgagtgatttgttttgttttgttttccaaaacaacaaaagcttgaggtcaaggcatgattgaaagcacagtcaatgtgtcaggtgactacatatggggggacaagaacttgggatctcattcatgttgtgcc

SEQ ID NO: 608064 - DNA, 611 bp, Homo sapiens
tcaccccaggtgttttaaagtcccatgcatcacattacatctaccccaccctttgttacacatgaaaacatggtaatgttgtaaacaggcaggtacaatatggacattgtcatcactgtaatgattgctaatacaagtcagcaacctttccaaactcacttacccaggtcatggtacctttttcttagctgtgcggggaggaagaggcacaagccagctgcaggctctctgggtggcagtggttggttctgactgatccacatgttaatgctgtatgacaaaatgctctgattcctagtgccaaaggttcaattcagtgtatataactgaacacactcatccatttgtgctacttttttttaatgatgcttaaagagctcatcctttgcaagtcatccttgttgttatttaggcattttatctttgctcaaattgttgwagaatggtggcttttttcatggtttttgtatttgtgtctaatgcatgttttaacatgatagacgtaatgcgttgtgtagctagttttctggaaaagttgatcttttaggaattgtttttcagatcttcaataaattttttctttaaatttcaaagaaaaaaaataaaagctt

SEQ ID NO: 608065 - DNA, 288 bp, Homo sapiens
accaggatgtcctgccactactggtggtctaaccaccrttgtgccactatttaattcatcagtgccctgagataacttatctccatatataccgtttgggttttttttcctcatactgcaaaaccctgatgtgaacatccctctggatagctacatatccagtttcttcctcttaggttacatttctagaagtagaaatacttggtcacaaggcacacatgttattgaagtttttgttatatattaccaaattgcctctctgacaggttccaccaagtgactctccca

SEQ ID NO: 608066 - DNA, 650 bp, Homo sapiens
agtagttgtccataagattgacagtgcagggaagttaaaattattggaatttatttttgttctggaccatctgaccccaccagttttaaagtaactgttccactgctttctttgtatttttggcagtttagtcaaatacatactaatcttttatggacccaactgtattaagtaatgcattttacaaagacataactaaaacagacaccagcataggcaacctcacagatgtttactgtttcagctaaaataaagcagccttttgatctcagcaggagtctctggtcatttctattggaaacagttttaaaacctgaagtctggaacaggtattattatgaactgttctttcaagatggaatgkttcagtttgcagctcttgaataacctgccagagaagtgtctttctctccaacagacagcataatgaggcactaattattatagggctaagttttcaaatgctgttagattgcctggacgttttttcttcttcctcttcttttggttggaatattttattcacttgtaaagtgagatggtaacatacgtaactataaaccagatggtaaaatttgctagttgaacaatttatcagggagataaatcaataacatttaaaacagcgtgtgacaactgaatttctctcc

SEQ ID NO: 608067 - DNA, 456 bp, Homo sapiens
ttacatccctaagctggaggtctcctcaataaataagcaaggagaggagctcccatttgcagcgggaattcccaatcactcttaatgtcaacaactaagcataaacgacaccaataaatctttaatctgagtttaattagctcaaagaataaagacagatttctatgctaggtgtactctccaaagcatacactctaagagacagaatgttctcagaaagagggcccttcctgctctgtatccaatggcggtccctatagattgamgcctcactgggtgatgttcacaagaaaagaatgaccgaccagctcttccttcactcaaggacaggcctttaggagagtaaataaatttggccaattcttggagttgttcacaaatgattccaacaccttaaaattccaaattagactgtggccaagaagaaaccatagtgaaaacactcaaatggaggta

SEQ ID NO: 608068 - DNA, 545 bp, Homo sapiens
tccaagctcagccaaattctccataaatgcaagtagtgatgaaaaggtgctcaatgtgggtttcatccacaaaagcacgtgtcataggttcccatcccctacctcatggaccctctgctgctctggggccccatccataccataagcaattttccaccagggccctcccctccattcacagcacttcttctttcccttaatggtgatatctaatcaaactcatcacaactaagaaggcttacaaactagtgctaataaagcctgtgcattcagaacagaaagaggagagtatgtaaaagtgaagtagcaaaggtgcattcttctcagagttaagatttggacaaggttacagagaagctaaaagccctgagttctagctaaaccaaagcaataagcaacccctcattggtcacctcctgttctagcttagatatcgcctagagacgagcagcacgatttgctggcacctgtacctgtctgcaccaaggytgagacaggtctgaaacaagcagcttgcttatttccttaccctctgcttccgcagg

SEQ ID NO: 608069 - DNA, 528 bp, Homo sapiens
tctgacgtccacctgtccatacaattattaagtaccaggcatgacaaccagtaaagcaacaagaaccatgtaaaatcatgggcatgatcaatttggggggaaaaactttagttaaatacaacaataaatttataaggggtattttttattgggtcartgcccagttttcacctaaaatgtggctgaaaacatccctgtaagtcaaatcatattttctcatcaaaatactttaacccaaccaaacactagagttaaataaatcattcatacaatcaatatagatccttaagaccaggctacatttttatgctgttctataagaattaaaaataaaaaacgctaaaagttctacatacacaattatactgtgtacaatgaaatctatagctgaattagatatgtattaaaaatactttgctagttataacaaatattaatctaacacttagctaacaaaaatcttgttgtcagtcttacaatttagaagggttttataagccttttaataacgtagtaaaacaaagtatg

SEQ ID NO: 608070 - DNA, 612 bp, Homo sapiens
tgtctccaattcagtctgtcccatgccttctttttcacttttgtgttttatatattttttaatttttggcccggtgtggtggccatgcctataatcccagcactttgggaggccaaggtgggcagatcacctaaggtcaggagttcgagcccagcctggccaacatggtgaaaccccatctctactaataatacaaaaatcagctgggcatggcagtgtgtgcctgtaatcccagwggctcaggaggctgaggcaggagaatcacctgaacctgggaggcagaggttgcagtgagccaagattgtgccactgtactctggcctgggcgacagaacaagactatctcaaaaaaaaaaaatgtaatttttatggttacatagtaagtgtatgtatttatggagtacatgagatattttgatacaggcatataatgcataataatcacatcagggtaaatggggtatccatcacctcaaacatttattccaattatactcttttagttatttttaagtatacaattaaattattcttcattgtagtcaccctgttgtgctatcaaatactagatcttattcattttttctaattattttttgtacccattaacca

SEQ ID NO: 608071 - DNA, 612 bp, Homo sapiens
tgtctccaattcagtctgtcccatgccttctttttcacttttgtgttttatatattttttaatttttggcccggtgtggtggccatgcctataatcccagcactttgggaggccaaggtgggcagatcacctaaggtcaggagttcgagcccagcctggccaacatggtgaaaccccatctctactaataatacaaaaatcagctgggcatggcagtgtgtgcctgtaatcccagtggctcaggaggctgaggcaggagaatcacctgaacctgggaggcagaggttgcagtgagccaagattgtgccactgtactctggcctgggcgacagaacaagactatctcaaaaaaaaaaaatgtaatttttatggttacatagtaagtgtatgtatttatggagtacatgagatattttgatacaggcatataatgcataataatcacatcagggtaaatggggtatccatcacctcaaacatttattccaattatactctwttagttatttttaagtatacaattaaattattcttcattgtagtcaccctgttgtgctatcaaatactagatcttattcattttttctaattattttttgtacccattaacca

SEQ ID NO: 608072 - DNA, 581 bp, Homo sapiens
ggctttgttcagctcaaccaggcagacaagctggagactgaggatggagactgagattcaaaaccatgaggcaggaggtggtgaatctcccaggcactgggggtgctcagaaggaagctggaccaccacttagttggaatggagacaggaggagagaatattcctgagttaaggagagagttgactcattaaccattgacagccttgatattctaggagggcgcctcccaaggggagggaagtgaacatgtaggggcaacttactggagaattggagaatcagaattgcaagttctttttgtcattgactttgtgccatttttataaaatgcctctggaactgaatgtgcttcctcactctcttttgcatatagcaacagagaggaatattattccwtttacaggctttgtacctttgccaaattaagaggaagcttgcctttgtaatcagagtatggtagaaagcacaaagcatctactgcttatgatggtttcttctagatgaacttgtccatttcctgaacaattcagaaaactgaatttagagttgagatatattaagaggcctctgcctaagagtg

SEQ ID NO: 608073 - DNA, 574 bp, Homo sapiens
ttctttcattctgtggctttggtgagggcttaggaactatagctrtaaactaacctaagatagcttccgcagaaattcctgcccaacagaaagggcctatcagcatttaacaagtaatgtttgtaggggctaagaaacttgccctgagacagctggtatcacagttgtaatctcaatttaggtctgtctgagacaaaatactgctcttttttcccctatgtaatttccactgaggttaaatcttggtttcctgtgatgagtcctttccatcattatatgctatttatgttttccatgctttgtgtgaatgccattacaacttcaaaaatgaaaccaacagatgtttctgaataactgtacactaaggaaaggtactatttttaaaaaataaaaccctaaatgcatagtgcccttatcagactctgaagacgcataaaataaaaacattcacacagtgtgagcacattttctcaataatgatcagtctcctcacttgaaaaataagagaaagatggagaattggaccaaatattaaccgctttagctctacttgactaatgaactgaataataca

SEQ ID NO: 608074 - DNA, 574 bp, Homo sapiens
ttctttcattctgtggctttggtgagggcttaggaactatagctataaactaacctaagatagcttccgcagaaattcctgcccaacagaaagggcctatcagcatttaacaagtaatgtttgtaggggctaagaaacttgccctgagacagctggtatcacagttgtaatctcaatttaggtctgtctgagacaaaatactgctcttttttcccctatgtaatttccactgaggttaaatcttggtttcctgtgatgagtcctttccatcattatatgctatttatgttttccatgctttgtrtgaatgccattacaacttcaaaaatgaaaccaacagatgtttctgaataactgtacactaaggaaaggtactatttttaaaaaataaaaccctaaatgcatagtgcccttatcagactctgaagacgcataaaataaaaacattcacacagtgtgagcacattttctcaataatgatcagtctcctcacttgaaaaataagagaaagatggagaattggaccaaatattaaccgctttagctctacttgactaatgaactgaataataca

SEQ ID NO: 608075 - DNA, 513 bp, Homo sapiens
gaattctttggttatttacattcaaggttaatattgatatgtgaagttttattcttgtcatagcattagctagtttctttgtagtctctattgcatagttgccttatgcactttttgggctaygtgcttgtgcgtgcttttgtagtagcaagtattgttctttcatttccacatttagaactcccttaagtatctgttgtaggtctggtctggtggtgacaaattcctataacaattgtctatttgggaaagaccgtttctcttttgttcatgaagcttaaattggcaggatatgaaattctttgctggcatatcttttctttaagaacgctaaaaatgggccctcgatctttggcttttgaggtttctgctgagaagtatattgttggtctgatggggttccttttgtaagtgacctgatccttttctctagctgcctttaaggctttttcttttgcattgacctgggatcatctgatgactatgttccttgggattgtcatcttgtatagt

SEQ ID NO: 608076 - DNA, 592 bp, Homo sapiens
gtccatcttaaccatgtacaatgaactaaattactatttataatttcctatgtacaacagagccacagcacaagagggtgggcataagmagttgccacccagaagagctttcactcatgaaagaaagccctacaaataggcccaggagaagcaacgttcaccaacaattatggacgttctcattttttctgttccttggaattttctcttacctgttgctttcatttctaaaacaactatgaaaagcaaagatttttttctctcttccctcaagccagttgctggcagttacgctaaattaagagggagatggggttcaaattttctaaactttaaaattctgataatctatatcagagactgggttgtgtccgatgcatatatttttatctacctcagagatactatatacatttacataaacccattcttttaacagaaaggctaatatcatcataaaataagagaaatgaacaaagagaaaaggaaaacatgttttgaagctcatgaatcagactttctcaagagaatgagattcaaaattgggtgctttttgaagatattaaacaggacccctgatttccccagtact

SEQ ID NO: 608077 - DNA, 592 bp, Homo sapiens
gtccatcttaaccatgtacaatgaactaaattactatttataatttcctatgtacaacagagccacagcacaagagggtgggcataagaagttgccasccagaagagctttcactcatgaaagaaagccctacaaataggcccaggagaagcaacgttcaccaacaattatggacgttctcattttttctgttccttggaattttctcttacctgttgctttcatttctaaaacaactatgaaaagcaaagatttttttctctcttccctcaagccagttgctggcagttacgctaaattaagagggagatggggttcaaattttctaaactttaaaattctgataatctatatcagagactgggttgtgtccgatgcatatatttttatctacctcagagatactatatacatttacataaacccattcttttaacagaaaggctaatatcatcataaaataagagaaatgaacaaagagaaaaggaaaacatgttttgaagctcatgaatcagactttctcaagagaatgagattcaaaattgggtgctttttgaagatattaaacaggacccctgatttccccagtact

SEQ ID NO: 608078 - DNA, 592 bp, Homo sapiens
gtccatcttaaccatgtacaatgaactaaattactatttataatttcctatgtacaacagagccacagcacaagagggtgggcataagaagttgccacccagaagagctttcactcatgaaagaaagccctacaaataggcccaggagaagcaacgttcaccaacaattatggacgttctcattttttctgttccttggaattttctcttacctgttgctttcatttctaaaacaactatgaaaagcaaagayttttttctctcttccctcaagccagttgctggcagttacgctaaattaagagggagatggggttcaaattttctaaactttaaaattctgataatctatatcagagactgggttgtgtccgatgcatatatttttatctacctcagagatactatatacatttacataaacccattcttttaacagaaaggctaatatcatcataaaataagagaaatgaacaaagagaaaaggaaaacatgttttgaagctcatgaatcagactttctcaagagaatgagattcaaaattgggtgctttttgaagatattaaacaggacccctgatttccccagtact

SEQ ID NO: 608079 - DNA, 592 bp, Homo sapiens
gtccatcttaaccatgtacaatgaactaaattactatttataatttcctatgtacaacagagccacagcacaagagggtgggcataagaagttgccacccagaagagctttcactcatgaaagaaagccctacaaataggcccaggagaagcaacgttcaccaacaattatggacgttctcattttttctgttccttggaattttctcttacctgttgctttcatttctaaaacaactatgaaaagcaaagatttttttctctcttccctcaagccagttgctggcagttacgctaaattaagagggagatggggttcaaattttctaaactttaaaattctgataatctatatcagagactggrttgtgtccgatgcatatatttttatctacctcagagatactatatacatttacataaacccattcttttaacagaaaggctaatatcatcataaaataagagaaatgaacaaagagaaaaggaaaacatgttttgaagctcatgaatcagactttctcaagagaatgagattcaaaattgggtgctttttgaagatattaaacaggacccctgatttccccagtact

SEQ ID NO: 608080 - DNA, 585 bp, Homo sapiens
atgttagcacatggcttgactccttcatctggatcacctagacccacactgaaagaccatcaaaagtcctgctacttgaaaaacaaatgacgaatgtaggaagagcccgtgtgtgaagcctgggctctgagtggcagccttgtggttgyggctgtgttggggtgatggtgatggtattcagcatgaggaagctgctgtggggggggatgcctccagggcctgaagaaggatgctcaaagggactttgattttgttggcaaggtgtatattcttaagccaaatggtgggtttaaggtattcaatgcattatttttacacctttttgaatgttcactttcaaaataatgccttaagtattttttaagaaaagaaaagagagaaagcaaatggtaaaagggaacatacagtagataatgtgttgtaaacttcatgcaactactgagcacaaatcatccttctggagttgaaatgtaaatctgcctgtttggaaacctcttaggattatggaattttgtattcataggactagcgtagataataagatcatcatccagctctatttactaattcttcactaaagacctg

SEQ ID NO: 608081 - DNA, 589 bp, Homo sapiens
ggaaataaaagaagccaaactatctctcttccctgatgatatgattctatactgagaaaatgccaaagcctccaccaaagcctctaagaattgataaacaatttcagtgaagtttcattatacaaaatctgtgtacaaaaattagtagcatttctatacaycaataatgttcaagctaagagccaaatcaagaacacaatcctatttacaatagcctcaaaaagaatacaatacctaggaatgcatctaaccaaggaggtgagagaccactagaagaacaacaagtgcactgaaataaatcagtaatgacacaaacaaatggaaaaacattccatactcgaggatgggaagaatcaacatcattaaaatggccatattgcccaaagcaatgtatagattcaacaccattcctattagagcaccaagatcatttttcacagaattggaaaaaactattctaaaattcatatggaaccaaaaaacagcctgaatagccaacacaatcctaagcaaaaagtacaaagtgggggggcatcacattacctgacttcaaacaatattataaggctacaataaccaaaacagcacg

SEQ ID NO: 608082 - DNA, 492 bp, Homo sapiens
attaaaagaaaactataagaaatgaaataataaatgatcactttgatttttagataattcataaaaatgataaattataaaatacattaaaaattgaaatccatgaaaatttggcataaaatattggaattttattattaaaaatattaaaaaattaatattaaaatamattttaaaactaatgatataaaaatcaaaatgcttaataatatagttatctcaaatgtgttctgaatttgttgctgctcaagagtacacaaaaaagcaaaatatactataacttacatgtgaaaaaaatgatgtcttccaatatttgataccaacaataattctgtatatttgcaatatttcactaatacaaactgtaaatttgaaagatagttatataaaacatcctaaataacaataaattttgatataccatgctagaataaacttaaaattttctctttagtgtctttaatgatacagtatagttcccatgtaaagtgc

SEQ ID NO: 608083 - DNA, 492 bp, Homo sapiens
attaaaagaaaactataagaaatgaaataataaatgatcactttgatttttagataattcataaaaatgataaattataaaatacattaaaaattgaaatccatgaaaatttggcataaaatattggaattttattattaaaaatattaaaaaattaatattaaaataaattttaaaactaatgatataaaaatcaaaatgcttaataatatagttatctcaaatgtgttctgaatttgttgctgctcaagagtacacaaaaaagcaaaatatactataacttacatgtgaaaaaaatgatgtcttccaatatttgataccaacaataattctgtatatttgcaatatttcactaatacaaactgtaaatttgaaagatagttatataaaacatcctaaataacamtaaattttgatataccatgctagaataaacttaaaattttctctttagtgtctttaatgatacagtatagttcccatgtaaagtgc

SEQ ID NO: 608084 - DNA, 485 bp, Homo sapiens
tagtattagaagtcctagcaagagcaattaggcaagaaaaagaagtagaagacacccaggttggaaaacaagaagttaaatttttcctgtttgcagacagcaatatcatatttataaaaaactctaaagatacccctgaaaatttacgcacctaataaacaaattcagtacagttgtaagacacaaaatcaacttacaaaaatcagtagtgtttctatacactaagagcagactatctaaaatgtaaattaacaaaataattttatttacattattaacaaaaattgaaatacttagaaataaatttaactaaggaagttaaatatctctacaataaaaattataaaatattttttaaaaattaaagacagaaataaatggaaagatatcctgtgtttatgagttgaagtaattaacattattaaaatrtttatactactcagaatgatctacagatgcaatgtaatcgctaccaagttaccaac

SEQ ID NO: 608085 - DNA, 505 bp, Homo sapiens
tttctgatttattgaatatggtaagaatttcatgtgtcatggaagggtacaacataggctagagcagaaggtcagagttgactttgtgcatggtattgaaattcattcaggggttcacaaagaatgagggatttctttctttaaaatcagcaataaaagaatcctcttcttagaaagtgtagatgctagccacttcgtagtctattgcttctcacactcattattattacaaataaacaacttaaggttagggagcacatactactaattttgataataataacaataaaagctgacatttgttctttatttactgtgagaaaagctctattgtcagmattttaaatgaatattttcattcacttcttacaacaatcttattatcaccatccgcattctccaaatgaagggttatgtgacttgcacgaggtcacactaaggtttgaagtcagaattggaattcaggctccatttcttctgaagccacatggaaagtccaccaaac

SEQ ID NO: 608086 - DNA, 505 bp, Homo sapiens
tttctgatttattgaatatggtaagaatttcatgtgtcatggaagggtacaacataggctagagcagaaggtcagagttgactttgtgcatggtattgaaattcattcaggggttcacaaagaatgagggatttctttctttaaaatcagcaataaaagaatcctcttcttagaaagtgtagatgctagccacttcgtagtctattgcttctcacactcattattattacaaataaacaacttaaggttagggagcacatactactaattttgataataataacaataaaagctgacatttgttctttatttactgtgagaaaagctctattgtcagcattttaaatgaatattttcattcacttctyacaacaatcttattatcaccatccgcattctccaaatgaagggttatgtgacttgcacgaggtcacactaaggtttgaagtcagaattggaattcaggctccatttcttctgaagccacatggaaagtccaccaaac

SEQ ID NO: 608087 - DNA, 532 bp, Homo sapiens
aaactctcagcaaaattggcatacaagggatacaccttaatgtaataaaagccatctatgacaaacccacagccaacataatactgaatgaggaaaagttgaaagcattccctctgagaactggaaccaaacaagratgcccattctcatcactcctcttcaacatactactggaagtcctagccagagcaatcagagaagggagagaaataaagggcatccaaattggcaaagagaaagtcaaactgtcagtatttgctgatgatatgattgtttaccttgaaaaccctaaggactcctcctgaagaaagctcctagaactgataaaaaatttagcagttttcggatagaagattaatatacacaaatcagtagctcttctatacaccaacagcaactaagcagagaatcaaatgaagaactcagctcattttacaatagctgcaaaaattaaaataaaatacttaggaatattattcctatataaccaaggaggtgaaagacctctgcaaggaaaagtacaaaacactgc

SEQ ID NO: 608088 - DNA, 532 bp, Homo sapiens
aaactctcagcaaaattggcatacaagggatacaccttaatgtaataaaagccatctatgacaaacccacagccaacataatactgaatgaggaaaagttgaaagcattccctctgagaactggaaccaaacaaggatgcccattctcatcactcctcttcaacatactactggaagtcctagccagagcaatcagagaagggagagaaataaagggcatccaaattggcaaagagaaagtcaaactgtcagtatttgctgatgatatgattgtttaccttgaaaaccctaaggactcctcctgmagaaagctcctagaactgataaaaaatttagcagttttcggatagaagattaatatacacaaatcagtagctcttctatacaccaacagcaactaagcagagaatcaaatgaagaactcagctcattttacaatagctgcaaaaattaaaataaaatacttaggaatattattcctatataaccaaggaggtgaaagacctctgcaaggaaaagtacaaaacactgc

SEQ ID NO: 608089 - DNA, 532 bp, Homo sapiens
aaactctcagcaaaattggcatacaagggatacaccttaatgtaataaaagccatctatgacaaacccacagccaacataatactgaatgaggaaaagttgaaagcattccctctgagaactggaaccaaacaaggatgcccattctcatcactcctcttcaacatactactggaagtcctagccagagcaatcagagaagggagagaaataaagggcatccaaattggcaaagagaaagtcaaactgtcagtatttgctgatgatatgattgtttaccttgaaaaccctaaggactcctcctgaagaaagctcctagaactgataaaaaattyagcagttttcggatagaagattaatatacacaaatcagtagctcttctatacaccaacagcaactaagcagagaatcaaatgaagaactcagctcattttacaatagctgcaaaaattaaaataaaatacttaggaatattattcctatataaccaaggaggtgaaagacctctgcaaggaaaagtacaaaacactgc

SEQ ID NO: 608090 - DNA, 532 bp, Homo sapiens
aaactctcagcaaaattggcatacaagggatacaccttaatgtaataaaagccatctatgacaaacccacagccaacataatactgaatgaggaaaagttgaaagcattccctctgagaactggaaccaaacaaggatgcccattctcatcactcctcttcaacatactactggaagtcctagccagagcaatcagagaagggagagaaataaagggcatccaaattggcaaagagaaagtcaaactgtcagtatttgctgatgatatgattgtttaccttgaaaaccctaaggactcctcctgaagaaagctcctagaactgataaaaaatttagcagttttcggatagaagattaatatacacaaatcagtagctcttctatacaccaacagcaactaagcagagaatcaaatgaagaactcagctcattttacaatagctgcaaaaawtaaaataaaatacttaggaatattattcctatataaccaaggaggtgaaagacctctgcaaggaaaagtacaaaacactgc

SEQ ID NO: 608091 - DNA, 497 bp, Homo sapiens
aaaaaagttacagtaagttaagtgtatgattgaataaaaacaatttttataataaacacggtatagcctgtatgtacagtgttcataaagccgacagtcatgtcccaggccatcacaaccactcaccactcactcactgactcactgagagcaacttcagtccaattaacttcatacatgctaagttcctagacaggtctaccattttttaatcttttatgccatgtttttactgtaccttttctatgtttaaatatgtttaagcacatgaatgctcaccactgtgttacaattgcctccagtattcagtccaataacatgctgtacacgtttgtagcctaggagcagtaggcygtataccacatagcctaggtgctaggctatcccatctaggtttatgtaagtacactctttgatgttagcacaaggacaaaaatcacctaaggacacatttatcagaacacgtctctgtcactaattgcatgtctgcacaaggc

SEQ ID NO: 608092 - DNA, 428 bp, Homo sapiens
agatgccagagggagatggatgtacaaagtactttcaaaaacagcttgactctgctcttgtaaatacgagtctagccatgtgcttggtcaatatatgctagatagaactcagtataactccttataattttaaaagatctttctcttatcctaagaatttctaacatagtatttcaccataccattcttacccaacttatcaccagattacattccaaatatatacactttttgktcgttttgttatattttccttcaatttccagaatttaaagtgcttataaaatttatttctgaatttctattataaatctcatctatattatatctacacacatgagcaaacacaattttgcaccaactcacccaattcaaaactaatgagaattaaacactgtatttttcctcttctcttcttttgaatctca

SEQ ID NO: 608093 - DNA, 369 bp, Homo sapiens
atatatacaccatggaataatgtttaatgtttcaycataaagcagaatgaaatcatgtcttttgaagcaacatgaatgaaactggaggccattatcttaagtgaaataacttaaacagaaagccaagtaccatatgttctcatttataagtgagagctaaataatatgtacacacacacatagagagtagaataatagacattggagtctaggaagtgcaggaagggggttagggatgagaaattacttaatgggtacaagtacactgttcaggtgatgtctctaacaaaagcccagacttcaccaataagcaatatatccatgtaacaaaactgcacttatatcccctaaatctatttttttaaagaa

SEQ ID NO: 608094 - DNA, 534 bp, Homo sapiens
ttcctgtctgggtgacagagtgagactacgtctcaaaaaaaaaaaaaaaaaaaaaaaagagagagagagaaagatgtggtatatatacaccatggaataatgtttaatgtttcatcataaagcagaatgaaatcatgtcttttgaagcaacatgaatgaaactggaggccattatcttaagtgaaataacttaaacagaaagccaagtaccatatgttctcatttataagtgagagctaaataatatgtacacacacacatagagagtagaataatagacattggagtctaggaagtgcaggaagggggttagggatgagaaattacttaatgggtacaagtacactgttcaggtgatgtctctaacaaaagcccagacttcaccaataagcaatatatccatgtaacaaaactgcacttatatcccctaaatctatttttttaaagaawtcataaaataatttctgaaaaaatacaaaaaggagaattaccttgtatttaagctatttatgtctgtacctgtccctgccacac

SEQ ID NO: 608095 - DNA, 575 bp, Homo sapiens
ataaagcaaaaaatccggcctacaacaaagcagtaatcacgttctaggccagaactttgtaatattgacattacttctctgagtaactaagttattatctttaaaatgattggttactttcttttaggcatgaatcctcactatttaaaaactcaaagcaaaagaatcgctaagtaactcagaccctaatggctttctcaaagatcacattctcatttcatattgtaatttttttgatgagacagtgtttttatatttatactactgaaccaattttattttaaaaataactaatttgaaattatagcatcatgaaatagaaattgagcacataaacacatctacccagcgtcttccttattctaagtgataatttctttgtggccccaatttctagtataacatgcagaatttaggagttttataacaaccaaaattatttacagtggtgatccccaagtccctgaatgtccaccttgaagtgcaatgttatatcctttttctagcctcaatggttccagccactgctcaccaccttgrgtcagtccgccatcatctctcctcaatagtgcagt

SEQ ID NO: 608096 - DNA, 565 bp, Homo sapiens
gagcagaaacttgagaaggccctgagcagtgagctctgaggtccctctcttgaaatcattctgcactctgggcctgtaatgggagtggcagcctagaacaactccaaaatgcctctggagtcattcttccattgtcttaatgactagcacctgacttccacctatttatactaatcttcttttcaagtgtagctttgtcacacccttggtattctctcccaaactcastttgtcattctttatatggccaggctaagaatttttcaactctttaaattctgcttctcttttgactataacttctgtctttcattattttctctcttttcaaatttcactataagcagctgagaaaagccatgtggcaccctgaacactttgcttagagatttcttctgccaaatatcctagtttattgctcttaagttctgccttctacagagcattaggacatggacataatgcagccaaattctttgccacttcataacaaggatggcctttcttccagttttcaataagatattcctcatttccatctaaaatctcattagaatgatcttta

SEQ ID NO: 608097 - DNA, 358 bp, Homo sapiens
gtgattttattttaattacttcatgtctcatttctataatttctattttgttatttcccaaatctgccatttttcaaaatatcttgtctttgtcttacatttctattcattttttccctcatttctattcatttttttcctcatttgagcattttatttatacttgttctaaaaatctctttgctttgctctatgacataacagttccaggagattatttgtagcagctgctaattctaattcttctccatggtagttcaattccttttttttgagatggagtcttgctctgtcgyccaggctggagtgcagtggcgtggtctcggctcactgcaagctctgcctcctgggttcatgc

SEQ ID NO: 608098 - DNA, 616 bp, Homo sapiens
taaatggaagtgatgtgtatcagaataaaaacttcagaagtgattgtgccttttccacttatttccctgcactgcagaattactgcatgaagaaatgcacccatcatccagaagcagtagagtagattgttgtatggacaatatataagctattttttgtgtaagcatttaaaagtaaataaaagagatgttcagtgaggtatatttcaactcccaaaataattctattcattcatttatctgcttggcatttgttgcaacaataattgctatatatacataactgaatctgaaatagtttgtaaaagatgtgtgggatagatkgagattgaaaaaaattaagcacctgaaaatctgtcacatgaaaaagttattccacctacagaattaaaaagcttactaggcacaaaatataagctcttagtttgaattctactaatttgtgacttacgggagataacttgatctctttgagttttactacctctcaataacaaataaaaacagtaaacactaggtagtgtagataaaaatgtatctacaatatgcccatttgcttttcaatttacttacttttatgtagttttccttttgtaggagaagagggacctgggtg

SEQ ID NO: 608099 - DNA, 616 bp, Homo sapiens
taaatggaagtgatgtgtatcagaataaaaacttcagaagtgattgtgccttttccacttatttccctgcactgcagaattactgcatgaagaaatgcacccatcatccagaagcagtagagtagattgttgtatggacaatatataagctattttttgtgtaagcatttaaaagtaaataaaagagatgttcagtgaggtatatttcaactcccaaaataattctattcattcatttatctgcttggcatttgttgcaacaataattgctatatatacataactgaatctgaaatagtttgtaaaagatgtgtgggatagatggagattgaaaaaaattaagcacctgaaaatctgtcacatgaaaaagttattccacctacagaattaaaaagcttactaggcacaaaatataagctcttagtttgaattctactaatttgtgacttacgggagataacttgatctctttgagttttactacctctcaataacaaataaaaacagtaaacactaggtagtgtagataaaartgtatctacaatatgcccatttgcttttcaatttacttacttttatgtagttttccttttgtaggagaagagggacctgggtg

SEQ ID NO: 608100 - DNA, 574 bp, Homo sapiens
ttgcttatctttctcctcacttcctctctcttgcctcctccaacatccacatggaagtgtttcaattaataatataaatcccctacttcttagtctctttcttggaattcatcctaacagattgagctctgacttgtatacaaattacactcaagtccttatctgtagcccttgtttttctctgtagttcacctctaagcagcaactggaagtgagatgaactctaccactttctgtcttaaaataaaactgctcatctccactattcgtgtgtcattacagtttatcttcccagctccctcattacaggggccatkagtctctcctacccactaccaccatattattttcttaaaatcagtactttcaccgtgtcatttttcagccttactgctctctgtgattctttactgtcaaaaccactggttcccaacatgacatgtgtctagaggagagttatcaatccaaaaagatgggtcacagaaagagtgataaaatgtggaaaaatgtttgagaaatgcataccatggccgcttcttaatttcctagaactaaaccctcatgagaaattttg

SEQ ID NO: 608101 - DNA, 594 bp, Homo sapiens
agtctttgatattgcagacagtgtctccagtataaattttgcttgagatgagaatctttctaagaacattttttcgtcacatacagtatgtcacatgttggaacattcccacttaaagttaacatgtactaatataaaggcctcagcagaatgtgttaagtggattctttttggcattgggtaaaggaatctttcaagcattctgtggatatacaaataagaaaaaaatttcaaaasaggcatatgcacaaaatttttataacctatgagaatcatgatctggactaaacgcaaataagtgaaccaaagtacaatacaatacaaagcaaaaataaaaaataaacaggaaatttaatcctatatgatgcagaaactatgtgccaatactcagtgtgaacatacactattaggaggaagttgctgctgcaccagcagatggcagagtttaagcaaagctgaagaagtcaggtagcgatgtgcgaaggaatcactttgatttttggcttagttcctaccctcctattattctggttaccatacattagtgaggtgtctccaatgagtttcgagggttacaaataccttcctgcatat

SEQ ID NO: 608102 - DNA, 571 bp, Homo sapiens
gaatctttcaagcattctgtggatatacaaataagaaaaaaatttcaaaacaggcatatgcacaaaatttttataacctatgagaatcatgatctggactaaacgcaaataagtgaaccaaagtacaatacaatacaaagcaaaaataaaaaataaacaggaaatttaatcctatatgatgcagaaactatgtgccaatactcagtgtgaacatacactattaggaggaagttgctgctgcaccagcagatggcagagtttaagcaaagctgaagaagtcaggtagcgatgtgcgaaggaatcactttgatttttggcttarttcctaccctcctattattctggttaccatacattagtgaggtgtctccaatgagtttcgagggttacaaataccttcctgcatattagcctaccttccttagaacttcttaagatgggtcattgtctcacgatactcaataattcaggaaaatcaagaactgggattaaaataaaccaatgaattacatacttctttatcacagtgtgacataaacatacacttttagacaagttttcattactggcc

SEQ ID NO: 608103 - DNA, 601 bp, Homo sapiens
taattcctggggaggaactgatgtgtctttaatgttttgcagtcattgtcttagaatttaaacacaagtagcctcaagtytgtggtttgcttctattgcctacggatagctgcaaagaacaggctaaacatgatggatttcctaaaggttttcagaatatgctgaataattaagtagggttggtgacaacttaggctgtattaaggtaatgatatctctttctgttttctttaataatttctattctcaattgtaattcctttttcaaaattgacaacagcaatttgacaagcattgtatgtaattacacttcacctttttattcgatataaaggtgaatgacttccgttcattcacaataaaactacatagacctactatcctggatagctatttcatagccgtattagcaagttattttgatatatgtcttctgttttctgtgtcattatcaagtaagaaagaactctgagaattctatatcttgttttgctgttgatgagagccctaattaacttatgcttaaagagattttagaagaataccaacatacgtttctctgagattcctcttagattatcaagaggcaaaaaggtgaaat

SEQ ID NO: 608104 - DNA, 487 bp, Homo sapiens
atcgacctcacccactctaattatcttaaatctgtatcgagacttttttcctgagttccagtcttaacttttctgatgatgttgcctttattaattgtcgtgttcaaagctgaatataaccaccctcatcttcttcccaaaccaaaacttcctctgtgattctccattgatgtgccatcactcccctggtcttccaggacagaaaccttgaagtcactttgatttttggtgcaattttgtaaagtattgatggctttacctcttctgaataatctacaggacatatcaactgtstgcgtgtcattcagagccctctaaatagatgcctaaaatatgtcgatgatcaatatacattgaatgatgtattcattgataggctggacatctcttcatttagaagttcataggtaaatcattaggaccaagctttctctcccctatgtaccccattcccaaaagtgtaggctgaggtcaaagaacaaatttc

SEQ ID NO: 608105 - DNA, 487 bp, Homo sapiens
atcgacctcacccactctaattatcttaaatctgtatcgagacttttttcctgagttccagtcttaacttttctgatgatgttgcctttattaattgtcgtgttcaaagctgaatataaccaccctcatcttcttcccaaaccaaaacttcctctgtgattctccattgatgtgccatcactcccctggtcttccaggacagaaaccttgaagtcactttgatttttggtgcaattttgtaaagtattgatggctttacctcttctgaataatctacaggacatatcaactgtctgcgtgtcattcagagccctctaaatagatgcctaaaatatgtcgatgatcaatatacattgaatgatgtattcattgataggctggacatctcttcatttagaagttcrtaggtaaatcattaggaccaagctttctctcccctatgtaccccattcccaaaagtgtaggctgaggtcaaagaacaaatttc

SEQ ID NO: 608106 - DNA, 579 bp, Homo sapiens
tattcctattttcctgctactccattatacagattctgccattttcattaaccatctagagtgttccattattttttctgggagcatccttcccctggagaagcacctcatatctgtcactccatgtggtcctgaaagttagtagaaacattgtccaagtcaactgcccacgggactggaaatctgaactgggctgagcccaccataatggctctgacactgacaatcaatgactgattccagtgtaggacctggccctagtgggacaattcaggatctttcctttaagtttgataaatggacactggaattttttttattatactttaagttttagggkacatgtgcacaacgtgcaggttagttacatacgtatccatgcgccatattggtgtgctgcacccattaactcatcatttaacattaggtatagctcctaatgctatccctcccccctccccccatcccacaacaggccctggtgtgtgatgttccccttcctgggacactggaatatttttttaatgccctctctgttgtttaaatatcagcccatgaggatatcatggctgtcaatgt

SEQ ID NO: 608107 - DNA, 599 bp, Homo sapiens
aaacagaaaaatgcctgtcccattccaaatgcctcaatcatctctgttgagaaacatgatgaatatgatctaatagggaccttgccgttccttgaatacagtggttcattttctgcctattgtgagcagtgcaatgtcagagataacaagaggcccaggtttgtgtcttcccacaatgtcaggcttttaytgacgttacttcaatcacgggctgcatggaattcccagggagacaattctcggtggtgcttcccattcacttgtagtcagagccgcgggcacacaggctcaagccactccacacatcaatcaagattgcaaaccatatatactagtatatgtaatcaatagataaatgctatagattaaatattccacaacaaacaaagtgacatttaacatcaaggggaaagaaaaagggttaaggaaccagtccagggagagagatgtagacaaaaagaatatcctggtctggcctgggcagaccatgagtcgtgcatggaagggtcagtgatgtgggcagagccttcggtggtagattctgggtgcttatcacaagggacagtaagatagtgtctgttaagaggccgtttcgagct

SEQ ID NO: 608108 - DNA, 571 bp, Homo sapiens
ttccttgatttttcatgaaacagaaatgtcctcagcacttttgaaactgactgaggtatttggtattcatcagtataacctagctggttcacacaaaatgggattttaagaaatgtttcaggtaaaaactgaaagtgagtaaattaaaataaaatgctcttcatgcgaggrcatcaaatactgttgattttgcctttgtggggcagttctctcctgtgaaggcctaactctgacagatagattgctcctgcagcttccgtggtcttgagcagcctgggaaggagtaggctttggcagttttgtcaaatcctgaagcctctggcaaacgttgcgattggaattgataatgtcctaagggccagcatttatctctcttccttaatgtgtcacacggcgcatatctttctacatgagcttctctggggacaacagttatgaatgcttaatggggcatatgtctgagggttaaaagaaaaatgtgcttattaatgaagtacaaaaagaagggtagtgattgaactaggaacctgggaaataactgggtaaattgtcaacttctgagcatgtgact

SEQ ID NO: 608109 - DNA, 459 bp, Homo sapiens
ttcctttttctccccaacctcactagcacctgatattttttgactttttaataatagccatactgagtggtgtgagatggcatctcattgttgactgccagtttttaattattttcagtttatagmcaaaagtgggatttcttattcatatgtaattgcatgtttaatgtttttaataactactaaactgttttctacagtggcgaaaccattttacattctctcctgcaatataagaaggttccaatttcttcacatcctcaccaacacttaatgttcctttaaaaaatttatttattataatcatcccatttcccaagcatctttcatgtcttgttggtcgtttttatctcttctttagagaaaagtattttgtctatttttgtttgactttttgttctgcagttctaagagttcttggtatacacattttatatactagacctctatcaaatatat

SEQ ID NO: 608110 - DNA, 597 bp, Homo sapiens
ataagttttgaaatcatgacaagtaagtccttaactctgtttgtctttttcaagattgttttggttattcagcttcccttgcaatctcatatgaattttagggtcagctttttaatttctgcaaaaaaaaaaagttttggggatttcgatagggtggatcatggcttttttcatggtaagcaaaatatattagttattgtaggtcaatttaccaaaaaatgatattacttagtaagcagttacttactaaaatgttagtactcattattttaacagtaatatagcaaaaaattttatattcacttggtataaataaaacacatcaaaaattcaccaaaaatgtgtaactatgatttaccagaaagtgaayatcatataaccaccactgaggaaacaaagtagaacactgccaggatccttggaatgaaaggttgatttaacagttgaaaactaatgtgattttctatgttaaccacataaaggaggaacaaccatatgcaactgatgcagaacttctaaaaatcagaagagaaaccactgctaaaatgtatcacaaaatatttaactgcatgttaaagacacagagtggttttttca

SEQ ID NO: 608111 - DNA, 470 bp, Homo sapiens
gtaagctattatggcacttaggtcaccttccatgtccagcaccgataattaagtaactagtctctgtgtcccaattccaaatttccagctggagaatccatcacgcccaactggggtcagatgtccaggtccactcagtggtattcagagaataaagatgctagatatgcagkaggacccctttctgaacagctaaaggaggtaatgttcagaaaaggagtgtggacagatatgtacagtggttattagagaataaatgagataaataaaacttgagatgtgatttccgttcccaatttgaaatgtatcctttgatatttcacatggtgattgtatcttattcctgagggtttgggaaatcttgtgatcctgtggatttttctcaaatctcacatcagacaaacacacaaaggctatatgagcactaagactccctgattaattaaaacctgacaagataaggatgtcat

SEQ ID NO: 608112 - DNA, 470 bp, Homo sapiens
gtaagctattatggcacttaggtcaccttccatgtccagcaccgataattaagtaactagtctctgtgtcccaattccaaatttccagctggagaatccatcacgcccaactggggtcagatgtccaggtccactcagtggtattcagagaataaagatgctagatatgcaggaggacccctttctgaacagctaaaggaggtaatgttcagaaaaggagtgtggacagatatgtacagtggttattagagaataaatgagataaataaaacttgagatgtgatttccgttcccaatttgaaatgtatcctttgatatttcacatggtgattgtatcttatycctgagggtttgggaaatcttgtgatcctgtggatttttctcaaatctcacatcagacaaacacacaaaggctatatgagcactaagactccctgattaattaaaacctgacaagataaggatgtcat

SEQ ID NO: 608113 - DNA, 486 bp, Homo sapiens
tacacatatatatagttattacatatatgcatatgtataccatatatactatatacacacatgtatatatagttattacatatatacacatatatgtatttatgtatatatagttattacgtatgtatatatagccattacaaataacattttactcacattttaataacttccacagatattggcatggggttctttatttttgtttttattatctcaagatacaaacaaaattccagattagtagttatgtcagttmtttttgtttatttgtaaaagtgagtcattttttgaaactgtttatttctaaaatttggcataaaaaagagcattttaaacttacataacataaattgtcagagcattatatagagagaaaataagaagggaagcatgtatttatattgcatgcatcctggatttactacttctacatcaagagctaaggaaatatgccatcaagtttatgatgttataatactgtca

SEQ ID NO: 608114 - DNA, 486 bp, Homo sapiens
tacacatatatatagttattacatatatgcatatgtataccatatatactatatacacacatgtatatatagttattacatatatacacatatatgtatttatgtatatatagttattacgtatgtatatatagccattacaaataacattttactcacattttaataacttccacagatattggcatggggttctttatttttgtttttattatctcaagatacaaacaaaattccagattagtagttatgtcagttctttttgtttayttgtaaaagtgagtcattttttgaaactgtttatttctaaaatttggcataaaaaagagcattttaaacttacataacataaattgtcagagcattatatagagagaaaataagaagggaagcatgtatttatattgcatgcatcctggatttactacttctacatcaagagctaaggaaatatgccatcaagtttatgatgttataatactgtca

SEQ ID NO: 608115 - DNA, 486 bp, Homo sapiens
tacacatatatatagttattacatatatgcatatgtataccatatatactatatacacacatgtatatatagttattacatatatacacatatatgtatttatgtatatatagttattacgtatgtatatatagccattacaaataacattttactcacattttaataacttccacagatattggcatggggttctttatttttgtttttattatctcaagatacaaacaaaattccagattagtagttatgtcagttctttttgtttatttgtaaaagtgagtcattttttgaaactgtttatttctaaaatttggcataaaaaagagcattttaaacttacataacataaattgtcagarcattatatagagagaaaataagaagggaagcatgtatttatattgcatgcatcctggatttactacttctacatcaagagctaaggaaatatgccatcaagtttatgatgttataatactgtca

SEQ ID NO: 608116 - DNA, 486 bp, Homo sapiens
tacacatatatatagttattacatatatgcatatgtataccatatatactatatacacacatgtatatatagttattacatatatacacatatatgtatttatgtatatatagttattacgtatgtatatatagccattacaaataacattttactcacattttaataacttccacagatattggcatggggttctttatttttgtttttattatctcaagatacaaacaaaattccagattagtagttatgtcagttctttttgtttatttgtaaaagtgagtcattttttgaaactgtttatttctaaaatttggcataaaaaagagcattttaaacttacataacataaattgtcagagcattatatagagagaaaataagaagggaagcatgtatttatattgcatgcatcctggatttactacktctacatcaagagctaaggaaatatgccatcaagtttatgatgttataatactgtca

SEQ ID NO: 608117 - DNA, 525 bp, Homo sapiens
ttgtccttcataaagcactgagaacactggcactatcaactttttcaggactttggagattaatcaaaggcttccaacaatctaagaagcatttataggctgggcatggtggttcatgcctataatcccagcactttgggaggctgaggtgggtggatcacttgaggccaggagtttgagaccagcctggccaacagggtgaaaccctttctctactaaaaatacaaaaattagccgggtgtggtggcagactcctgtaatcccagctactcagaggctgaggcaggagaatctcttgaacctgggaggcagaggttgcagtgagctgagattgagccattgcactgcagcttgggcaacaacagygaaactctgtctcaaaaaaaaaaaaaaaaaagaagaagaagaagaagaagaaggatttattcaggaacaaatggttgaacttcggcaagagcagtgttttgtggtcctttgacgattgtagccacatcctctcttccccggctctataatagccctaaa

SEQ ID NO: 608118 - DNA, 605 bp, Homo sapiens
ttcaagccatttaaggaaatatgtttactcattgactactacgataaatgagcagagatttcagtggctacacatgatacrtaatatagacattgcagatttagttacgaaaaataatgaaacaaacaaccaaacaacaattacaagcagaaacagcaatctacccaggagcggagagggaatcggattttcaaagtctccacattttattattcatcatgtttagtgctatgtttggaatgtttgtcacccccctgcaaactcatgttaaaatttaattgccattgtaatagtaataagaggtgattaggccatgaggactctgccctcatgagtggtttaatgctgttatcactggagtaggtttgttatcgtgggagtggcccccttttaaaaggataagtttggtcccttttgccctccccttcttcctaccttacaccattggatgacccagcaagaaagttctcacaatatgctggccccttgattttggacttctcaggatatagaacagttagaaaataaactaccatttttaaaaataaattaaccagtctgtgcattctgttatagcagcacaaaccaaactaaaaaacatagtt

SEQ ID NO: 608119 - DNA, 474 bp, Homo sapiens
tggtttaatgctgttatcactggagtaggtttgttatcgtgggagtggcccccttttaaaaggataagtttggtcccttttgccctccccttcttcctaccttacaccattggatgacccagcaagaaagttctcacaatatgctggccccttgattttggacttctcaggatatagaacagttagaaaataaactaccatttttaaaaataaattaaccagtctgtgcattctgytatagcagcacaaaccaaactaaaaaacatagttgtcaacaaaaaattatgagatattcaaataaacaagaaagtgtgttccacagagagagaaaaaagtagtcaacagaatctgtgtctgagagagcccagatattagatttactagagagggattttgaataaacgatcataaaaatgttcaaataactaaagaaaattatgtctaaatcgctaaaggaaagtatgaaagtggtat

SEQ ID NO: 608120 - DNA, 664 bp, Homo sapiens
caggtataatacacataacaaacaaaagcaaaatggtaggcataaatcctactttatcagtaattgcattaatataaatggatttaatactcaaaaggcagagattagcagaatgattaaaaagtcatccagctatattttgcctgtaagagacatctattggattcaaagacacaaattkgttgaaagtcaaacgtgggaaatcatataccattcaaaaagtaacccaaaaagagctagaatacatatgtaaatatcaggtaactcaactttaatgtaaaaattgttattaaagaaaaaataaggacattatatagtgataaaggaattattccatcatgaagtcatacaaattgtaaatatatatgtgcctaacaacagggttccaaaatacatgaagcaaaactgagagaattaaaaggaaaaatagagcattcatagatatttgaatatttcagtacctttcacagcaatggatggagctagacaaaagttcaacaggaaaaagaagacttgaacaaccatatacagcagaaatttatcaaacatactcttccacaacagcagaacactccttcttctgaagggtgcatgaaacattctccaggacagaccacatgcaaagccataaaacaagtgccaataaattttaaaagaattaaaa

SEQ ID NO: 608121 - DNA, 664 bp, Homo sapiens
caggtataatacacataacaaacaaaagcaaaatggtaggcataaatcctactttatcagtaattgcattaatataaatggatttaatactcaaaaggcagagattagcagaatgattaaaaagtcatccagctatattttgcctgtaagagacatctattggattcaaagacacaaatttgttgaaagtcaaacgtgggaaatcatataccattcaaaaagtaacccaaaaagagctagaatacatatgtaaatatcaggtaactcaactttaatgtaaaaattgttattaaagaaaaaataaggacattatatagtgataaaggaattattccatcatgaagtcatacaaattgtaaatatatatgtgcctaacaacagggttccaaaatacatgaagcaaaactgagagaattaaaaggaaaaatagagcattcatagatatttgaatatttcagtacctttcacagcaatggatggagctagacaaaagttcaacaggaaaaagaagacttgaacaaccatatacagcagaaatttatcaaacatactcttccacaayagcagaacactccttcttctgaagggtgcatgaaacattctccaggacagaccacatgcaaagccataaaacaagtgccaataaattttaaaagaattaaaa

SEQ ID NO: 608122 - DNA, 664 bp, Homo sapiens
caggtataatacacataacaaacaaaagcaaaatggtaggcataaatcctactttatcagtaattgcattaatataaatggatttaatactcaaaaggcagagattagcagaatgattaaaaagtcatccagctatattttgcctgtaagagacatctattggattcaaagacacaaatttgttgaaagtcaaacgtgggaaatcatataccattcaaaaagtaacccaaaaagagctagaatacatatgtaaatatcaggtaactcaactttaatgtaaaaattgttattaaagaaaaaataaggacattatatagtgataaaggaattattccatcatgaagtcatacaaattgtaaatatatatgtgcctaacaacagggttccaaaatacatgaagcaaaactgagagaattaaaaggaaaaatagagcattcatagatatttgaatatttcagtacctttcacagcaatggatggagctagacaaaagttcaacaggaaaaagaagacttgaacaaccatatacagcagaaatttatcaaacatactcttccacaacagcagaacactccttcttctgaagggtgcatgaaacattctccaggacagaccacrtgcaaagccataaaacaagtgccaataaattttaaaagaattaaaa

SEQ ID NO: 608123 - DNA, 373 bp, Homo sapiens
gtgtctgtaatcccagctattcaggaggctgaggcaggagaatcacttgaaccccggcggcagaggttgcagtgagctgagatcataccactgcactccagcctgggcagcagagtgagactccgtctcaaaaaaaaaaaagaaaagaaaaaaaaaagtaaaggmcatataatctttcaaaacaaaaaggaaatctccagtctcataaaagtttaatggcataagctttcttaatgtcaatgagcagtgggttaatgaaatgtctcttaggatttctgccagtgacgaatgactataacatttgcacttacagagttatcccgggaattttaatagtcctgtctttatagctgcttcatgaaattaagtataa

SEQ ID NO: 608124 - DNA, 493 bp, Homo sapiens
catttttttcataaaacacccttcactagttcagcacagaatgcagtataatttctgaactccttaacacatcgcaccatttctccagtaaagttagcatttcataatattcatgcttcctttccattttatagactgtcacactcaaagcttagaaagcagtcagatctttagtaagtagttgctaattactttcagaaatgcatcaggaatgtttaaattcattaattttagatttcatctcttatactagcatgctaaaagaaatatctcacaggctccaattgacatcaccaattttctgaaatgtctacarttttccgaaattctacaatcaaataattcaactaaaacagaacaaaaggcaggaaagggcagactcatattgtgtttggtgaccaactgctccctgaatctctcacgtccatgtcactgtccctttgtgcttccacccatgctccatggctgccctccaccaggtgtgttcaatgtg

SEQ ID NO: 608125 - DNA, 493 bp, Homo sapiens
catttttttcataaaacacccttcactagttcagcacagaatgcagtataatttctgaactccttaacacatcgcaccatttctccagtaaagttagcatttcataatattcatgcttcctttccattttatagactgtcacactcaaagcttagaaagcagtcagatctttagtaagtagttgctaattactttcagaaatgcatcaggaatgtttaaattcattaattttagatttcatctcttatactagcatgctaaaagaaatatctcacaggctccaattgacatcaccaattttctgaaatgtctacaattttccgaaattctacaatcaaataattcaactaaaacagaacaaaaggcaggaaagggcagactcatattgtgtttggtgaccaactgctccctgaatctctcacgtccatgtcactgtccctttgtgcttccrcccatgctccatggctgccctccaccaggtgtgttcaatgtg

SEQ ID NO: 608126 - DNA, 493 bp, Homo sapiens
catttttttcataaaacacccttcactagttcagcacagaatgcagtataatttctgaactccttaacacatcgcaccatttctccagtaaagttagcatttcataatattcatgcttcctttccattttatagactgtcacactcaaagcttagaaagcagtcagatctttagtaagtagttgctaattactttcagaaatgcatcaggaatgtttaaattcattaattttagatttcatctcttatactagcatgctaaaagaaatatctcacaggctccaattgacatcaccaattttctgaaatgtctacaattttccgaaattctacaatcaaataattcaactaaaacagaacaaaaggcaggaaagggcagactcatattgtgtttggtgaccaactgctccctgaatctctcacgtccatgtcactgtccctttgtgcttccacccrtgctccatggctgccctccaccaggtgtgttcaatgtg

SEQ ID NO: 608127 - DNA, 561 bp, Homo sapiens
tgaactattgttctttccaaatacgaatgcataatatttcaaactcatttttgaataatcaagaaacccctttttctcttttatacaccatacagctgctcattattcacactatttctgatatgaacacatgattttttttctcttaaatgttagcattattatacaccagattttttcaaataaggctaaattatttcccagccaaaaacaaaaaaagaaactgcaatgattctaatgagagataagcattcaaaagttagaaattgcttagtaaatatcttttaaaatgggatacatgagacacagctccaaaaaggccccaggtgagatactacttaatgttttcatttaaaaccyatttggacaatgtaaaacatgtagtttcataatgccagtctgctgacagataattcctaatctaatagtgcctgcattgacatgctttattaaatgaagaaattaaaactaaagtttgcaaacatcaccaatttgggaaaggtacgtattaacagtaggtcatgacaaaaattctaaatgaagatataaatcacacacaac

SEQ ID NO: 608128 - DNA, 503 bp, Homo sapiens
cttttcccattgatatacatggattttttaaacaaaatatgcctctttagttgaatcatgctcttatttacaatttaatcacactaagttacctattcaaattccatgcattcttcaaatttacttcaagcccatttaatctacaaactgttcttgatttttttattgcttaaattattcctgaccttctctaaagcttatattcatttttttcrtgtaccagtcaatccagcatttataatgcaatgctttgcatttttcttaactagttatcatagggaaggctcttcctaggtaggtaactcgttatttgagtctcagaccttctacttttcctatttcctatgaagtccaaaacattagtgaacattcagagatcaacaaagggagagccagagaattagaattgctctaaagcattttctggtgcatgacatataatgtcttgaggaatattttattaaaggcaggattattgaacacttaagtaaacataacttacc

SEQ ID NO: 608129 - DNA, 589 bp, Homo sapiens
ttatattcagtgattttcatgtcttggaccaacctgatactcctgggataagtccaacttggtcatagtgaataaatctttctatatgtttctgcatagggtttgctagcattttgttgaatactttgctttttatattcataagggacttttgtctggagtttctatggaatgtctttggtttggggataagggcattctggctgcatagagtgattgggaagtgttccttcttcatctattatgacactaagttttgaaggtggcttcttacacataaaaggataacttccatgaacataaccaggagggcatgttacctaactagatatcaagaaataaaaagaggagacaaktaaagataaattttagaatgtcttcagcatatccagaattgaggacacatttagacacaatcagtcatttacatatttccaatgtttttacaggcagacagaatgtcaaatccagaaagattatgtagatttcccagacacacaaatgagccctaccatattcagaaaatgctgaaatcaattcttttttatattttaatcaaatttaattaaactttagccctcttaagaca

SEQ ID NO: 608130 - DNA, 581 bp, Homo sapiens
gacagtttttttgagagggctgtttgcatgatcaagatggaaccatattagaaccacagactcgatattaactggcttgcccatcattaccatgagtaaggactcaagaataagacaaagtcgactactggccaaatagagaaataggttattcttcgcatataaagatagtagtgtgaactaaattctatggctctgctaagggttaaaaactggaattgtaagagacctaaatgtgaagatacaatgaagaaaatatcatttgtgtaataattagtttataataattttgagaagaaaattatgaaacgaatacatgttgaacatctttggtataaccctgtactgagtaccttacgtgtaagaattactttaattccctccacacctctataatasagacactataatcgtcactctttcttttactaataaggaagctgaggctctgttacattacgtggttccctgaagctgtaggtacatgatggagctagaactcaagtgtagcaacaggactccagtgattgtgcccttaaccccaaacggcatcagagagtaaaacttcaaaatcacagcca

SEQ ID NO: 608131 - DNA, 445 bp, Homo sapiens
gtatcttatctcattaacatgtcaatcaagaagagaagcaagaagcaggaatatagaaattatgttatcaacaccacagaaatgtctatttgcacagcaatgctgctgaaatacagatttcctttcctaagtagagctcaaactttaggatgtataagaataacttgaggattttattaagatgaatgttgctagttccgggcttctcaatctgttttttattatcaccccctcaccctctgtgaaattgtaataatacacacaggctgggatatctgattacggaatgtgaccggatggagggtcacamaaccattgctttagctgagtttttgtcctccaaaatcccatttttgcacctttgggagctatttctgcccccattagaatcaggccctagtcccatctcttcaatcctttgatttaggagctttgttgtgggatc

SEQ ID NO: 608132 - DNA, 467 bp, Homo sapiens
aatacacacaggctgggatatctgattacggaatgtgaccggatggagggtcacaaaaccattgytttagctgagtttttgtcctccaaaatcccatttttgcacctttgggagctatttctgcccccattagaatcaggccctagtcccatctcttcaatcctttgatttaggagctttgttgtgggatctaaaattgtgtgtttaaaaaaacacatgcacacacactgcaggagattctggtgcagatggtccctttaagacattctgagaaaaactgctaagattttacaatctcaggaaattacctctgaacgcctcatttggaagagacagaattagtaagtggcaaagacttgatagaagatcctttcccattaatttgccattgagactttggcccctagtaccacatgtcccacaggatccctcaggacacacagtattctcaatacatgcatattaag

SEQ ID NO: 608133 - DNA, 632 bp, Homo sapiens
acacacaggctgggatatctgattacggaatgtgaccggatggagggtcacaaaaccattgctttagctgagtttttgtcctccaaaatcccatttttgcacctttgggagctatttctgcccccattagaatcaggccctagtcccatctyttcaatcctttgatttaggagctttgttgtgggatctaaaattgtgtgtttaaaaaaacacatgcacacacactgcaggagattctggtgcagatggtccctttaagacattctgagaaaaactgctaagattttacaatctcaggaaattacctctgaacgcctcatttggaagagacagaattagtaagtggcaaagacttgatagaagatcctttcccattaatttgccattgagactttggcccctagtaccacatgtcccacaggatccctcaggacacacagtattctcaatacatgcatattaagctagacctcccttacatggatccggaataatcagggtgagctcacaggaggtgctcatgctgcagtggatggggaggcctgcaatcaaagactgagtctgggcaatgaccctcgaccctcactatgcttaagatccttacccaaacttcgtaaagatacaaattgttc

SEQ ID NO: 608134 - DNA, 400 bp, Homo sapiens
acaattacatattagaaggatttgcagtgcttcttgaatcactggctaaatatcttgaatttgttctgaaaaccgaattaccatttttcccttcaaatgttacttgtaacccatttcattccttctcctcctcaaggatcacactgagatatatgttcagcattatcatcatgttccttatatctcttaggcmtttctttgctttctctcaatatattaccctggatattttctactgccctgccacaatatgaaatccttttcagccacgtacaatcaactgttcagcccatcaattcaattttaatttgtcacattattttttagtcctacactttccatttgatactttcatatagattttaattacctggtagaaggttttatcattatttcttgt

SEQ ID NO: 608135 - DNA, 400 bp, Homo sapiens
acaattacatattagaaggatttgcagtgcttcttgaatcactggctaaatatcttgaatttgttctgaaaaccgaattaccatttttcccttcaaatgttacttgtaacccatttcattccttctcctcctcaaggatcacactgagatatatgttcagcattatcatcatgttccttatatctcttaggcctttctttgctttctctcaatatattaccytggatattttctactgccctgccacaatatgaaatccttttcagccacgtacaatcaactgttcagcccatcaattcaattttaatttgtcacattattttttagtcctacactttccatttgatactttcatatagattttaattacctggtagaaggttttatcattatttcttgt

SEQ ID NO: 608136 - DNA, 400 bp, Homo sapiens
acaattacatattagaaggatttgcagtgcttcttgaatcactggctaaatatcttgaatttgttctgaaaaccgaattaccatttttcccttcaaatgttacttgtaacccatttcattccttctcctcctcaaggatcacactgagatatatgttcagcattatcatcatgttccttatatctcttaggcctttctttgctttctctcaatatattaccctggatattttctactgccctgccacaatatgaaayccttttcagccacgtacaatcaactgttcagcccatcaattcaattttaatttgtcacattattttttagtcctacactttccatttgatactttcatatagattttaattacctggtagaaggttttatcattatttcttgt

SEQ ID NO: 608137 - DNA, 400 bp, Homo sapiens
acaattacatattagaaggatttgcagtgcttcttgaatcactggctaaatatcttgaatttgttctgaaaaccgaattaccatttttcccttcaaatgttacttgtaacccatttcattccttctcctcctcaaggatcacactgagatatatgttcagcattatcatcatgttccttatatctcttaggcctttctttgctttctctcaatatattaccctggatattttctactgccctgccacaatatgaaatccttttcagccacrtacaatcaactgttcagcccatcaattcaattttaatttgtcacattattttttagtcctacactttccatttgatactttcatatagattttaattacctggtagaaggttttatcattatttcttgt

SEQ ID NO: 608138 - DNA, 534 bp, Homo sapiens
atcaattcaattttaatttgtcacattattttttagtcctacactttccatttgatactttcatatagattttaattacctggtagaaggttttatcattatttcttgtacatgttggttggagttattaygaaatcaaatctgataactatatcatgtgcatcagctatgagtcagtttcaatttactatggtttctcttgatcttatatttcagtatgcctgtagttactgatattattattatttgattggtcatatagagtgtgttaggctgtattccttcctgttcatatttttaaaagcatttatgaaaactagtattaattcttctttaagcatttggaagaaatcctccatgaagccatgtgtgcctgggttttcctttgtggaaagattttattaattaaatctattcgatataagcctatcatgatttgtgtctttctaggaattttttcgtttcatgtggtttatctaactttttggcatataattttactagtattaccttttaacccattttaagtttgat

SEQ ID NO: 608139 - DNA, 534 bp, Homo sapiens
atcaattcaattttaatttgtcacattattttttagtcctacactttccatttgatactttcatatagattttaattacctggtagaaggttttatcattatttcttgtacatgttggttggagttattacgaaatcaaatctgataactatatcatgtgcatcagctatgagtcagtttcaatttwctatggtttctcttgatcttatatttcagtatgcctgtagttactgatattattattatttgattggtcatatagagtgtgttaggctgtattccttcctgttcatatttttaaaagcatttatgaaaactagtattaattcttctttaagcatttggaagaaatcctccatgaagccatgtgtgcctgggttttcctttgtggaaagattttattaattaaatctattcgatataagcctatcatgatttgtgtctttctaggaattttttcgtttcatgtggtttatctaactttttggcatataattttactagtattaccttttaacccattttaagtttgat

SEQ ID NO: 608140 - DNA, 534 bp, Homo sapiens
atcaattcaattttaatttgtcacattattttttagtcctacactttccatttgatactttcatatagattttaattacctggtagaaggttttatcattatttcttgtacatgttggttggagttattacgaaatcaaatctgataactatatcatgtgcatcagctatgagtcagtttcaatttactatggtttctcttgatcttakatttcagtatgcctgtagttactgatattattattatttgattggtcatatagagtgtgttaggctgtattccttcctgttcatatttttaaaagcatttatgaaaactagtattaattcttctttaagcatttggaagaaatcctccatgaagccatgtgtgcctgggttttcctttgtggaaagattttattaattaaatctattcgatataagcctatcatgatttgtgtctttctaggaattttttcgtttcatgtggtttatctaactttttggcatataattttactagtattaccttttaacccattttaagtttgat

SEQ ID NO: 608141 - DNA, 534 bp, Homo sapiens
atcaattcaattttaatttgtcacattattttttagtcctacactttccatttgatactttcatatagattttaattacctggtagaaggttttatcattatttcttgtacatgttggttggagttattacgaaatcaaatctgataactatatcatgtgcatcagctatgagtcagtttcaatttactatggtttctcttgatcttatatttcagtatgcctgtagttactgatattattattatttgattggtcatatagagtgtgttaggctgtaytccttcctgttcatatttttaaaagcatttatgaaaactagtattaattcttctttaagcatttggaagaaatcctccatgaagccatgtgtgcctgggttttcctttgtggaaagattttattaattaaatctattcgatataagcctatcatgatttgtgtctttctaggaattttttcgtttcatgtggtttatctaactttttggcatataattttactagtattaccttttaacccattttaagtttgat

SEQ ID NO: 608142 - DNA, 439 bp, Homo sapiens
gctatgattttcctatacacacacacttataaaatttaattcataaattaggcacagcaaaagattaatgacaataatacaatagaacaattataacaatatactgtaataaaagttatatgaatgtggtctccttctctcttcaaaatatcttactgtattttgctcactcttattcttcttgtgatgatgagagataataaaatgcctgtgtgacaagatgacatagacaccgcgatgttgcattaggctacaactgaccttctgatgataggtcagaaaagsctcctgtgttccaggtgatcccggatcactgagccatgatgatgtcaatggttagataacaagagcagacgatgttgatgattaacatgtaggtagtgtacacagtgtatatgctggacaaagagttgattcatgtcccagatggaatggagtg

SEQ ID NO: 608143 - DNA, 439 bp, Homo sapiens
gctatgattttcctatacacacacacttataaaatttaattcataaattaggcacagcaaaagattaatgacaataatacaatagaacaattataacaatatactgtaataaaagttatatgaatgtggtctccttctctcttcaaaatatcttactgtattttgctcactcttattcttcttgtgatgatgagagataataaaatgcctgtgtgacaagatgacatagacaccgcgatgttgcattaggctacaactgaccttctgatgataggtcagaaaaggctcctgtgttccaggtgatcccggatcactgagccatgatgatgtcaatggttagatracaagagcagacgatgttgatgattaacatgtaggtagtgtacacagtgtatatgctggacaaagagttgattcatgtcccagatggaatggagtg

SEQ ID NO: 608144 - DNA, 564 bp, Homo sapiens
tttgcctattaaatacctttctggcaggaacagtgagctgagtctcttccaaccggaattgaagatgttgatyaaagatgaaatatgtagatatggattcagagcagaaagatcgttcaacatttgagggttcaaaaatgtatatttagggtagagcatctaaatttattttactgagtataaaaccaaagagaacttctcttttgggatatagcctgtttgggccaggaatccaagcttgtctgagactgtcttaattccaaagcatcatcctctcttggaagaaatagagcaacaatttgagctcttacatcttgaagacgctcagtagtggaggcatggtgtttagaatggcaggggcatttaggaaaagacaggttctggtgtgcagcatatgacgcttcatctgaaggcatctggaaacagccataggaggcagttctgatcttaaagggccagattttttagagaaattgtcatctgataagtcagtagctacgatgggatgtgccagacccttggctgatgcttcacatgcattttatcattggatcatccctgtga

SEQ ID NO: 608145 - DNA, 564 bp, Homo sapiens
tttgcctattaaatacctttctggcaggaacagtgagctgagtctcttccaaccggaattgaagatgttgatcaaagatgaaatatgtagatatggattcagagcagaaagatcgttcaacatttgagggttcaaaaatgtatatttagggtagagcatctaaatttattttactgagtataaaaccaaagagaacttctcttttgggatatagcctgtttgggccaggaatccaagcttgtctgagactgtcttaattccaaagcatcatcctctcttggaagaaatagagcaacaatttgagctcttacatcttgaagacgctcagtagtggaggcatggtgtttagaatggcaggggcatttaggaaaagacaggttctggtgtgcagcatatgacgcttcatctgaaggcatctggaaacagccayaggaggcagttctgatcttaaagggccagattttttagagaaattgtcatctgataagtcagtagctacgatgggatgtgccagacccttggctgatgcttcacatgcattttatcattggatcatccctgtga

SEQ ID NO: 608146 - DNA, 519 bp, Homo sapiens
gtggtaagaacacataacataaaatgtaccattgcaaccatttttaagtgtacagttcaggaatgttaagtatattctcattgttatgaaacagatttcctgaacatttcattttgtcattctgaagctctgtacccattcaacgtcaactctcatcttgcctcagtccctggcaaccatcattctactttctgcttctgagtttgacctctttagaagcctcatataagtggaatcctacagtatttatcttttagtgatcagtttatttcacttaaaaagtgtcttcaatatccatccatgttgtggcatgtacaagaacctcttccactgtaggctgaataatmttccattatacatgtataccatgttttgtttatccattcatctatggacatctgcttccacttcttggcaattttgaatagagcttttgtaaacgtgggtatacaaatatctctccaacaccctgctttcaattattttgatgtatacccagaagtagcattgtcagatcat

SEQ ID NO: 608147 - DNA, 559 bp, Homo sapiens
ctctgccttaaagacaggttaaatcatttgggtcattttgtttgtttgtttttatttctggtctatagatttttaaaaactgatttaatttatacaatgattgcataaattggttcattttcyacttcttcttgagtcactttttgtaagttatattgttctagaaattgtcaatttctcacgtctttcttcacctttcctcttttcttgtttcatgtctattaattaatagcatcattttattttcttccttcttttttttgtttcaactttgtgtgtgtgtgtgtgtgtgtgtgtgtgtgtgttttctaaattcatgtgccagatacttcgcttattgactttaaaactatattcttttctaaaatgtatttaaagttaataatttatttctatgaattgctttagttttatccacaaaattgtgatggatctcctttcatcaatggttaattctaaaaatgtattatttctgtgatgttttcttctctgaaccatgctttatgtagaattggctttgtaagtttctgaacatatggggaggtatggtttcatttct

SEQ ID NO: 608148 - DNA, 449 bp, Homo sapiens
tggtttcatttctttagttgatattccattttcaattatgttaagaaaacgcctgtgtaattttggttcctcagaatttattgagatttgctttgctttatggcctaagagacagttaatatcataaatcatctatgaattcttggaaaagaatgtttcctgcaaattgtctgcaagtttctataaatgtacttagatcaaattttctgtgctcttagtaatgttttgcctctttagcaatcacagagagatttgcttaaaaatcttgaacactgagagtaccatggccacaggaagatttttattctagatgacatggggcatttccggtagttgtacagcagaataaatttacrtattctttttttttttagttcattttcctcttcactttactctttatatttctagttagttataacataatgtctcgacatcatgacacagtg

SEQ ID NO: 608149 - DNA, 591 bp, Homo sapiens
acacggtgtcatcttgcatttctgtaagagcaggactaagcatttatctgccacatgttaagtgctggattaggtcctaataaagagtgtgatatttcttccatcaacrtaattgtccgttctgcaatttcattcaacaacaacagcaaaactattgactacctcctgttccagaggctgaaagtaagcaggggaagaaacagcccaagttcctgcctttatggggcttactaaagcaataagaaaatatatagaattgtattttaggaaatcgattagtatagatattagtataatgtacggttgaaggatagtaattgatattgtaggagagccgtgtgtggtggtaaatgcctgcagtcccagctacttgggaggctgaagtgggagaatcacttgaggccaggagtttgaagctgcagtgagctatgattatgccactgcactctagcctgggcaacagagcaagaccccatctctaaaataaataaataattagataggtagctattgtagaagtataagagtgataaatactaaggagaaaaataaagcaagcaataggaattgaagtgtttttcaggggacatt

SEQ ID NO: 608150 - DNA, 530 bp, Homo sapiens
ctactctaaaatcatttcaaattgcatgcataggtgctgatggaagcgtgcgatgtcgaagttatacaagcattttaagttcagccacattcacgctgccatttatagtaaatcctccttcttatatttgctttattcttggctgcagtattgctggatctggcagagactctgataagcaaatggccaagagctatcttgacaaggaagaggtgaccttgaggcagaagagaggaggagagctgagagaaacaagtagatagaattgcagaatggttgaaaagaaaaaaaaggagcttttgcctttactttcagcttgtctgtgttagtgctctttttcctctggatagataagtctaccggaagttcatttccagatgcttcagtaaaaaattaagttgactcatagtaataaaagagatgacaggaaagtcttcagtgggtgcaaaagccatcatgwtttgaatgatgaattcttatatgaactttaaaaattaaagatatccattaggtatcacatatatcatttt

SEQ ID NO: 608151 - DNA, 603 bp, Homo sapiens
ggaactgggggaaagccggcagtcacgggccaggcaaacctaagggctgatctcactcccaccgtgccccacaaaccaacagccctgagtctgttcccaggtggagggcaagatgggtttgaaaacttgcccgaggctatccaacttccagctgcaagagaaaagggctttagttctttccctgcctgtgaagtctgcatgcctgattcacaccctcccccgagttctggccaggatgcttctcatcctgttaaaaaatgttacaaagttcagctagagaattccttctccctctggccaccctcccaatgaatccctgtggtgccaggcaggaatgggctgcttggggacacagtgagctcccatgacctttctgctgcttcctctacccatgtattttgctcagcyctctaacttgactcagccccaggtaaagttggaaacttctcccacagacagaccttcaccttctccagtgggggtgtgtgtctgggaaaggagggtctctctttccctcttctgcagttggggcactcatagtatttgaggtttctcccaggtcctgcaggagcagtcctcttctttcagaggatctgtgggtcc

SEQ ID NO: 608152 - DNA, 634 bp, Homo sapiens
aatcatgatctgtcactgtggattttttaaaagttaattgaaaatttcaccaagagacgcttcttaagagttacaaactagaggactgctatgtttattcaattatcctcagccatcaactgctggctaatcaacacatggcactctgtgatgttatttgttttaattctttaggcttttttttgtggccctgttgatcccctgggcacctaatgacaagccagaaaagtcacagaagtcaaagtgtcacaagtatcaaagtcaatcaatcaagccctgtgcagttttctacacagatgtgaaagcagaagacagttatggttctttattaatgagctttctcatacaatctgtttctggcagtgatcatagcttttatcaaataagtgtactccagagcaatttgtcatcgtttcagaaccactgttgtctatttgcgtttaggttactggacagggaatattttatgtatagttagttgatatttctcacatcacttttatgaatacttatgaagagtcttatgaaaacatatgatactaaaaygtatagcttctgtcaaatgcaaataaatgaacacaaaatcccccaacatggcttctttttcttcctacatcctatgtaaaagtactta

SEQ ID NO: 608153 - DNA, 635 bp, Homo sapiens
ctctggatgtaattgttgtaattgtacaaggcttcaaagaaacagatataaatcaatttaccttgactggctctcaaatcagtatttggatgaatctaaaatgagcatcttcacaattcattactcacaatttggaatccaaaaagctccgaagccgttattttgatagctcatttagtggcaaaactttcactgacctacttatggtttataacctgttcagtttggaaaaataataaattcaataacatatgtgctttgaaggctttcaaatggggattgtggatctatagctaagaaaacctatagcacattatatacaataatagttatacatggtaagaagactcaagtcatttttttcatggttttgtatgggctttttctagttaaactgtaatattctgagaatttctgttttkttttttttttttttttgtcttaaactgcaatgacagtaacagtgaatctttgagctggaaagtacctaaaaacatttggtgtgatccacttactttacccatgaaggaactgaaattcagccattgtatcatattttctggaaagctgtctggagcactctgatctttcattttattattctcttctcacctatggctgttcattgaatggcc

SEQ ID NO: 608154 - DNA, 570 bp, Homo sapiens
atcacgaatttaatagtgacaaacagcgtaagtattaccttacagttctgtaggtcwgaggtgaggtatgggcttcggtgagatgaaaacaaggtgtcatcagcactggttcaacaattccagcttccggaggccacctgccttccttggatcagagccccctcctccgtctccaacatcaacagtgatggatacggggcagggacagtgctccttctcacgcttcagtttgcctgtttctttgtccatccttgtatctgactgaatcttctgcctccctcttgcacctttaggggcctatgtgatgacactgggctctcctgggctatgcaggttcatctcctgttccagaggcagctcactagtaaccatgcatccctttctccagatcatcttgcatagccgcagatgtaactccagagggtgaaatcgggacagccaaaatgctccctactacagggagtgagaattccaggataacatcaagcttttggggccttgacaactagaagaatgaaatgccattagccacagtaggagtgcctctaggagttgtgaatgagatggggt

SEQ ID NO: 608155 - DNA, 570 bp, Homo sapiens
atcacgaatttaatagtgacaaacagcgtaagtattaccttacagttctgtaggtctgaggtgaggtatgggcttcggtgagatgaaaacaaggtgtcatcagcactggttcaacaattccagcttccrgaggccacctgccttccttggatcagagccccctcctccgtctccaacatcaacagtgatggatacggggcagggacagtgctccttctcacgcttcagtttgcctgtttctttgtccatccttgtatctgactgaatcttctgcctccctcttgcacctttaggggcctatgtgatgacactgggctctcctgggctatgcaggttcatctcctgttccagaggcagctcactagtaaccatgcatccctttctccagatcatcttgcatagccgcagatgtaactccagagggtgaaatcgggacagccaaaatgctccctactacagggagtgagaattccaggataacatcaagcttttggggccttgacaactagaagaatgaaatgccattagccacagtaggagtgcctctaggagttgtgaatgagatggggt

SEQ ID NO: 608156 - DNA, 613 bp, Homo sapiens
tatatattattttttaagatgggaacatttgaaatgcactctgatagtaattttgaaatacaatatacattattatttactacatttaccatgctttgcaatataactcaaaagagataaaaarcattcctcctgtctaattggggctttgcaccctctgtcatctctccaatttccccaactacacgatctctgataaccaccattctactctctccttctttgagttccattgttttagattccacaaagaagcaagaatacgcagtatttgtctttctgtgcctgtcttaattcacttagcataatattcttcaattttgttcatgttttcacggattaaaaagtttcttttataaggtagaatagtattacattgtgtttatatgcatccttttctttatccatccatatgctgatggaagttgattctaaaagttggctattgtcaatagtgctacaacaaacttgagagggcagacatctcctccatagactggttttaattttgaggggtaaatattcagaagtagaattgctggaacataagccatttaattttttagtgtttggaggaaaattcatacaattttttataattgctgtactaagt

SEQ ID NO: 608157 - DNA, 613 bp, Homo sapiens
tatatattattttttaagatgggaacatttgaaatgcactctgatagtaattttgaaatacaatatacattattatttactacatttaccatgctttgcaatataactcaaaagagataaaaagcattcctcctgtctaattggggctttgcaccctctgtcatctctccaatttccccaactacacgatctctgataaccaccattctactctctccttctttgagttccattgttttagattccacaaagaagcaagaatacgcagtatttgtctttctgtgcctgtcttaattcacttagcataatmttcttcaattttgttcatgttttcacggattaaaaagtttcttttataaggtagaatagtattacattgtgtttatatgcatccttttctttatccatccatatgctgatggaagttgattctaaaagttggctattgtcaatagtgctacaacaaacttgagagggcagacatctcctccatagactggttttaattttgaggggtaaatattcagaagtagaattgctggaacataagccatttaattttttagtgtttggaggaaaattcatacaattttttataattgctgtactaagt

SEQ ID NO: 608158 - DNA, 613 bp, Homo sapiens
tatatattattttttaagatgggaacatttgaaatgcactctgatagtaattttgaaatacaatatacattattatttactacatttaccatgctttgcaatataactcaaaagagataaaaagcattcctcctgtctaattggggctttgcaccctctgtcatctctccaatttccccaactacacgatctctgataaccaccattctactctctccttctttgagttccattgttttagattccacaaagaagcaagaatacgcagtatttgtctttctgtgcctgtcttaattcacttagcataatattcttcaattttgttcatgttttcacrgattaaaaagtttcttttataaggtagaatagtattacattgtgtttatatgcatccttttctttatccatccatatgctgatggaagttgattctaaaagttggctattgtcaatagtgctacaacaaacttgagagggcagacatctcctccatagactggttttaattttgaggggtaaatattcagaagtagaattgctggaacataagccatttaattttttagtgtttggaggaaaattcatacaattttttataattgctgtactaagt

SEQ ID NO: 608159 - DNA, 514 bp, Homo sapiens
tcatgaaacttattcactatcatgagaacagaagaggaaagaccaaccccatgatttgattgcctcccacgaggtccctcccacaacacaaggcagctacaattcgagatttgggtggggacagagacaaaccatatcattccctccctggctcctcccaaatcccatgtcatcagatttcaaaaccaatcatgccttcaaacagtcccccaaagtcttaactcatttcagcattaactcaacatccacagtccaaagtccaaagtctcatctgagacaaggcaagtcccttctgcctataagccttgtattagtctgttttcatactgctgataaagacatacctgagactggcaagacatacctgagacatacctgagactggacgaaagaaagaggtttattgggcttacatttccacatggctagggaggcctcactatcatggtgaaagtygaggaggagcaagttacatgttacatggatggcagcaggcaaagagagagcttgtgca

SEQ ID NO: 608160 - DNA, 565 bp, Homo sapiens
ttaaattcgctaagatattttattttatgtaatattatacgtttactgtattcaaaattgacaggtatacatagaaatactagttgacttttgctttatttcattttcacattaaaattaaaaagatgtatrtgtaaaactagagagaaaataattctgtttaggacattttcaatttaatttatcacaaattatattttgatacttatgcaatatttaggtaaaagataacgtaaactttccatttaacttatgtgatttaagctgatacttaagatcggtaaggaggaaaattagaatttttttctcataaaatctgaatggatttttttcccaacttttaaaaactcaacattttggaggacaataacttgattatttgaataattaggatacaaatctatagcaactttctggcatgtaaattattcatacaattgtagaaatttttctatctctatttagaaaatataaaatctcatacaactttgttcatgcaactaattctgtttctctattagcagagttgctcttgttgacagatcaaatagaaaataaaaaataa

SEQ ID NO: 608161 - DNA, 622 bp, Homo sapiens
aagtccttctaaaaatattaaaagaagatttttcatttgcagttttaaaagtacaatattaaaacagtctttattgagttgactgtttgggtcaataacaagttaacagcattgatatctaaaacaacaaggaacatatttgttaaagcatgagaacaatgtctcatataagaggagacattgatgaaagggatgggctcagacagctattcatgggcaaagcttttatatgtttaaaaaaacatttaaatcaaataacaaacaaatgtttattgaacaagctttgagtkggggacatttttaagtcagtttcctgttctaacagattgtaaaaatgaaaatactttgaatcctacaacacatcaactttttaaatttgtttttgtaactccttttttcctttcacataggggataaatatattgtagtcatttaaacattaacaccataatttcttcctcacagatgtagacatttaagtgtaaggagattgaatgttttccaagaaaaaggcagtgagctgaaagacaaacctaaacatgcccattcacttatatatacattgtcagtcataacagcatattatcagaattctataatgcagtaggtactagggttataa

SEQ ID NO: 608162 - DNA, 467 bp, Homo sapiens
tgagttgtctttcctagcccctccctgcttcctgcattataagaatggccatgccctcctgtggcagagactatagggttgtaaaccaaccatttctcttgttttcctaagttcacagttagactacagtttccacctcctttgcaggttgatgaagccatgtgactgagttgtagccaataaaatgtgggaaaaattaaagtatgacatctctaggcctgktccataaattctgtatgccttttccctccccttttctctcagttagatgtagagcagtggttctcaaagtatggtcctatcccatcaggatgcaaagcaagcattagttctgctagcaagctattctctctcctcactggctccaccactctccctggggaaacaacctctctcttttacactccagtgacaccctgtacatacatctatcagagtactgagacacattattcaaattatataca

SEQ ID NO: 608163 - DNA, 543 bp, Homo sapiens
ggcacataaaaggcattcaattatcagctattgttttcatatgcccaacatgtagcttggagtacttgctctatacctgtcacttcgctattgtgtgaaccaaagagacacagttcttggcctcatgaaatctaaaattttgtggaggaaataagacattaatacacaattgcaaaacttcataagcacaaactctgcaaattggtaagaagaaaaatacataatactatgagagtaacagtgagggatcaagggtgagacctaaagagtgagcagcagttaactaggtgtagagttgctccagagaaaggaggcaggacagatgaaaagtcagaagygggaaagagctccatacatccaaaagactgaaaagcgagaaatgcaaatcaaaatcacaatgagataccatctcacaccagtcagaatggctattattaaaaagtcaaaaaataatagatgctgacgaggctgtgaagaaaaaggaatgcttatacactgttggtgggaatccaaattagttcagccactgtggaaaaaagtttg

SEQ ID NO: 608164 - DNA, 543 bp, Homo sapiens
ggcacataaaaggcattcaattatcagctattgttttcatatgcccaacatgtagcttggagtacttgctctatacctgtcacttcgctattgtgtgaaccaaagagacacagttcttggcctcatgaaatctaaaattttgtggaggaaataagacattaatacacaattgcaaaacttcataagcacaaactctgcaaattggtaagaagaaaaatacataatactatgagagtaacagtgagggatcaagggtgagacctaaagagtgagcagcagttaactaggtgtagagttgctccagagaaaggaggcaggacagatgaaaagtcagaagcgggaaagagctccatacatccaaaagactgaaaagcragaaatgcaaatcaaaatcacaatgagataccatctcacaccagtcagaatggctattattaaaaagtcaaaaaataatagatgctgacgaggctgtgaagaaaaaggaatgcttatacactgttggtgggaatccaaattagttcagccactgtggaaaaaagtttg

SEQ ID NO: 608165 - DNA, 524 bp, Homo sapiens
tattgccactttgctggtccataatcactggagacaacttcctgaaatatggatttatgggaaggcaaacaaagaattataaacacaaagaaaatcagaaaactatgaaagagatatactgaataatcaataatcaattcaatatcccaagaactaatactcaaagatacaaaataaagcaaatggaaaatttagcttaagcatattcccaaacacactttaraaacacagaatattttagaagcatacaaaaatagtttcttgtatttccttttgattcctttatatttaatataagactctagttcgtctggcatggcatgacttgggaacacaacagaattttttttagcatgtgggtagacaactattccaacataatttactgaaacgtagtattttcccactgttttgaaatgccatcttaattactaagtacattcttttatatccatgggtctgtttctggactctattttgtctcattcactttcctctcctgcctcttcctatgacaatatcat

SEQ ID NO: 608166 - DNA, 524 bp, Homo sapiens
tattgccactttgctggtccataatcactggagacaacttcctgaaatatggatttatgggaaggcaaacaaagaattataaacacaaagaaaatcagaaaactatgaaagagatatactgaataatcaataatcaattcaatatcccaagaactaatactcaaagatacaaaataaagcaaatggaaaatttagcttaagcatattcccaaacacactttaaaaacacagaatattttagaagcatacaaaaatagtttcttgtatttccttttgattcctttatatttaatataagactctagttcgtctggcatggcatgacttgggaacacaacagaattttttttagcatgtgggtagacaactattccaacataatwtactgaaacgtagtattttcccactgttttgaaatgccatcttaattactaagtacattcttttatatccatgggtctgtttctggactctattttgtctcattcactttcctctcctgcctcttcctatgacaatatcat

SEQ ID NO: 608167 - DNA, 524 bp, Homo sapiens
tattgccactttgctggtccataatcactggagacaacttcctgaaatatggatttatgggaaggcaaacaaagaattataaacacaaagaaaatcagaaaactatgaaagagatatactgaataatcaataatcaattcaatatcccaagaactaatactcaaagatacaaaataaagcaaatggaaaatttagcttaagcatattcccaaacacactttaaaaacacagaatattttagaagcatacaaaaatagtttcttgtatttccttttgattcctttatatttaatataagactctagttcgtctggcatggcatgacttgggaacacaacagaattttttttagcatgtgggtagacaactattccaacataatttactgaaacgtagtattttcccactgttttgaaatgccatcttaattactaagtacattctyttatatccatgggtctgtttctggactctattttgtctcattcactttcctctcctgcctcttcctatgacaatatcat

SEQ ID NO: 608168 - DNA, 451 bp, Homo sapiens
tttcttcactcagataccagagcaaatacctttctacacttgttggggaggtggtagaaataagagaagcttagaaagtccctggttctgaggcagtttctaaggcttttcaatttattttaattcaaaagtgctcagtatgccaaagcatcataccatactttggggtaccattctatgtacccaaactctctctctgtctttctctctttctggaattacatctggaaagcccagacctggtgatttaagatgtttyctttcgcctttctccttttgagagagatggagaaagaggaaagaaaatatcttaaatcactcttggtaacccacacataactagtccaaaataacatttcaccatcaatttttattttaatcttgttttcacttcctgttttggagttagttgtgttatcacactttgaaattttcaataattcattttccc

SEQ ID NO: 608169 - DNA, 540 bp, Homo sapiens
catgtgggaagccctcaggcatgcttcagcagatgagtaaataaagcggctttctctttataaagaccattctatggcaatgaaaaaatggaccaaatggaagtgacagttgcatgtggcacrcatagtaattgtctagatgaatactagggagcatatgagaggccagagctaagggaagtctctcagactagatgacaattgatctgattagagaatcaatcaagaggaaagaatagagaatggctctgaggcttctagtcttgagtactgggtagctggtaagactattaaccaagagatgaaccatatgcagtaaagtcgaccgggaatcagaataaggaggaggcaagtgaaaagcttaacttagtatatgttaagttgatctggggaaaaaagggatttaagcaaaatcttgaagaatgcaaataatgagtatattctgcattgggctcattctcagacattgaaaaactttttaaaaggttgcattctggactcttttcaatagtgagaaatccagagtaacaattatccaaa

SEQ ID NO: 608170 - DNA, 484 bp, Homo sapiens
tgacaatgttgtcttcctattcatgaacgtgggatatctttartatagtcctttttcatattttgcagttttccttatatatacctttatatattttgctagatttatgcctaaatatttatttcatttttaggagtactaatgtaaatttttttgtgttttttaaatgtcaagttccacctgtttattgttggtatatagaaaagttattttcttttgtatattcaccttgtatcctaaaactggtataattgctcgttagttccatttttttaaatatactttcagattttccacacagatgattattttatctgtgaacaaagacagcttatttatttcttcccaatctgtagcccttctattttatgttcttgtcctactgcattagctaagatttcgagtacagtgatcaaaagcagtaataataagagacattctttccttttacctgattttagtgggaaaggttttcatttttcac

SEQ ID NO: 608171 - DNA, 484 bp, Homo sapiens
tgacaatgttgtcttcctattcatgaacgtgggatatctttagtatagtcctttttcatattttgcagttttccttatatatacctttatatattttgctagatttatgcctaaatatttatttcatttttaggagtactaatgtaaatttttttgtgttttttaaatgtcaagttccacctgtttattgttggtatayagaaaagttattttcttttgtatattcaccttgtatcctaaaactggtataattgctcgttagttccatttttttaaatatactttcagattttccacacagatgattattttatctgtgaacaaagacagcttatttatttcttcccaatctgtagcccttctattttatgttcttgtcctactgcattagctaagatttcgagtacagtgatcaaaagcagtaataataagagacattctttccttttacctgattttagtgggaaaggttttcatttttcac

SEQ ID NO: 608172 - DNA, 570 bp, Homo sapiens
agggcatgggggctgcaagaggtgaggggccttggagagggggtggggtggaagaagagctgagatctgcctaggagtggtccacccttcttactcttccctgcccctatcctgcctgttctccttgccaccccgtttccctccccaactctttctcttcctatctttccttagttgagaagaatctggctggaaatacctagtgaaaggaccrtttctgcattctagggatcttcagagagaggaatgtagatgtttctagttagtagtaggctagtgggaggaagagtttgagtaggcagtcacatattttgaacaagatggattcagtctacaatccttgcctagttaccctctgagctgccgagctggaatacctcttcctgtcttagaattctcatctgtgactcactgacaatctttttccgttttttgtttttttttgagacagagtcttgttctgtcacccaggctggagtgcagtggtgtgatctcggctcactgcaactccacctcctgagttcaagtgattctactgcctcagcctcccaagtagctgggattgcaggt

SEQ ID NO: 608173 - DNA, 570 bp, Homo sapiens
agggcatgggggctgcaagaggtgaggggccttggagagggggtggggtggaagaagagctgagatctgcctaggagtggtccacccttcttactcttccctgcccctatcctgcctgttctccttgccaccccgtttccctccccaactctttctcttcctatctttccttagttgagaagaatctggctggaaatacctagtgaaaggaccatttctgcattctagggatctycagagagaggaatgtagatgtttctagttagtagtaggctagtgggaggaagagtttgagtaggcagtcacatattttgaacaagatggattcagtctacaatccttgcctagttaccctctgagctgccgagctggaatacctcttcctgtcttagaattctcatctgtgactcactgacaatctttttccgttttttgtttttttttgagacagagtcttgttctgtcacccaggctggagtgcagtggtgtgatctcggctcactgcaactccacctcctgagttcaagtgattctactgcctcagcctcccaagtagctgggattgcaggt

SEQ ID NO: 608174 - DNA, 599 bp, Homo sapiens
ggcgcagtggctcacgcctgtaatcccagcactttgggaggccgaggcaggcacatcacctaaagtcaggagtttgagaccagactggccaacatagtgaaaccccatctctcctaaaaatacaaaaattagctggataccgtggtgtgcacctgtaatcccagctactcaggaggctgaggcaggagaatcatttgaacccatgaggcagaggttgcagtgagctgagattgcaccactgcactccaacctgggtggcggagtgagactctgtctcaaaaaaacaaaaataaaaaaatagtggtattaattttaatggtaaaaactgaaattatttttgcaccaacctgtacaaaatatgggttaattgaccatttrtgttatcagcaagccttctggtcaacaagtaggctagtagtaaaattttggggggagtcgaaagttatactcagattttcaattgcatggggtgtcggtgcccctatcccccacattattcaagggtcaactgtatatgtaatcaaaacaaattttcagtcaccaacctccaagttttcatttgagtagatttcctctcaccatataggtaaaccatcttc

SEQ ID NO: 608175 - DNA, 419 bp, Homo sapiens
ataggattatttcatatagtagcaattactgtgaagaaagtaaaacagttgtgcrttaaatagttacttgcttagggctgggaagtgaaggctaactcctctggggttcagggcacacctgaaaggtgtgtctgtgctgagactcggatgaaaggggactgactaccctcagaatatctgggatggggcacttaggtggagaggccatcccctctttaccttttacttttgtctctcaatcttattcctctttccttagctggaaggcatggttggaaactcagcatgaaattttgagagttacagtgaggatagagaggaaggaataaatggcattttaaaggggaaaaaaaagagtatgatcttgtaacttatggtcagaggacactaaaatatcaaatggtacatcaaggttgtaa

SEQ ID NO: 608176 - DNA, 419 bp, Homo sapiens
ataggattatttcatatagtagcaattactgtgaagaaagtaaaacagttgtgcgttaaatagttacttgcttagggctgggaagtgaaggctaactcctctggggttcagggcayacctgaaaggtgtgtctgtgctgagactcggatgaaaggggactgactaccctcagaatatctgggatggggcacttaggtggagaggccatcccctctttaccttttacttttgtctctcaatcttattcctctttccttagctggaaggcatggttggaaactcagcatgaaattttgagagttacagtgaggatagagaggaaggaataaatggcattttaaaggggaaaaaaaagagtatgatcttgtaacttatggtcagaggacactaaaatatcaaatggtacatcaaggttgtaa

SEQ ID NO: 608177 - DNA, 419 bp, Homo sapiens
ataggattatttcatatagtagcaattactgtgaagaaagtaaaacagttgtgcgttaaatagttacttgcttagggctgggaagtgaaggctaactcctctggggttcagggcacrcctgaaaggtgtgtctgtgctgagactcggatgaaaggggactgactaccctcagaatatctgggatggggcacttaggtggagaggccatcccctctttaccttttacttttgtctctcaatcttattcctctttccttagctggaaggcatggttggaaactcagcatgaaattttgagagttacagtgaggatagagaggaaggaataaatggcattttaaaggggaaaaaaaagagtatgatcttgtaacttatggtcagaggacactaaaatatcaaatggtacatcaaggttgtaa

SEQ ID NO: 608178 - DNA, 580 bp, Homo sapiens
agttatttccggcaatcattagtctcaataagaaaatgattctcttttctaagatagtctaagaagtgggaggcttccaaactaagtgtcaggacttaccaggtggtaggtgggccatgatattatcaatcccctcagcccctctgcacatagactgaggcatccggagtccctggatgagtcttgcccatgctgccttgtaatatattccaaatattatcatttttaaaatcatttttccaaagacaggggtctctcaaggttacccaggcaggcattgaactcctgggctcaaatgattcttttacctcagcctcctgagtagctgggattgaaggtgcccatcaccacgcctggccacttttgtgtcttcacatgaaagctattggaaattaytgactaaggaacctcatatgatgaaattctacgttgaaaagttgaggtagaaagtgggcagataaattttcctacttaagaattataaatctatagagataaaagtttattatgaatgcttaggtgtctggatttcttttgctgtattattcatcttctagtttcctgtcttaatagtcacctt

SEQ ID NO: 608179 - DNA, 654 bp, Homo sapiens
ttccaagaaaaggaacacagtatgagtattcaccttgatgtggtgacattggttctctatccattgggaggaagaggtcccacctgccctcactgaactcacaaggcagcatgagggcctctgtgtgtgacagccctggacaaatgggctattgtgcctgctgtaaggagaagggkgattttaaactctagtattcagttttcccagcaccatgtgattccaaaaacagcaggttaaagtgaatatgaaggagaaagaagtgtctcaatagcattttgcagcctgaatgcagtaagtgggaaacctggttgttattttaggaccatttgacttgcacttgatgggaaaaaaaggttgaacttgatggggaaaagaaactagcagcatccagaatagtgtcaggcacacatgtgcaatacaatgtttttaactgaattaacagtctggtattatgtagatggttagtggacacactactcactagctgatgcaggagtcactgttcaaccacaaaaattctgggaatgtttcaacctttggataacctgtggatcagcacctcacgactcagaatctatgcctccctgggactggggctctgttctgctggaaatcagtttgggacactggggaaaaatgcactttggagttcag

SEQ ID NO: 608180 - DNA, 567 bp, Homo sapiens
tacagcatatacatgttgtccatgatggaccacatatgtgacagtggttccataatattataatggagctgcccaatataggtgtaccctattttggtcttttataccatattgttactgtaacttttctatgtttagatatatttaaatacacaaatactattgtgtttcaattgtctatagtattcagcacactaacatgctgtactggtttgtagcctgggagcaataggctatatacaccatgtagcctaggtgtgtactaggttatactgtcaggtttgtgtaagtacgctctatgattgcacaataacaaaatcacataaagatgcatttctcagaatgtatttctgtcattaaatgatgcatggctgtatatatcatataaaatatatctggaaagatcaacaaaaatgcatctataacttaratgtttatgcagaaggacactgtaagcaaatgtcaggaataagatgaaaattctttactgaataccttttcatacattttaaattctgcaccatttgcacgtgtattattattattattattttgagatggagtttc

SEQ ID NO: 608181 - DNA, 674 bp, Homo sapiens
aagaatgttcacagaagcactatttacaatagtcaaaaagtagatttcttggaacccaaatgtttatcaagagataaatgaataaacaaattgcatatacttatgcacaccatggaatattcatcaccataaaaaaggaatgaagtatttatatacgtacaatgtagatgaaccttgaaaatgttatgctaaatgaaagaagccagacacaaacagtcacatattttgtgattccatttatatgcaatatacagaatatgccaatccatagtgaaagaaagaacattggcggctgccagagctgggggaggagagaatatggactgacttcttaataagtatggggtactctttgggggtgataaaaatgttttggaacttgatataggtagtggttgcacagtaccatgaatgtactaaaagccactgaattttacggtctaaaatggctaattttatgttatatgaattttacttcaataaaaagcatagcagcaaaagaaacagaatgggtgtgrgaactgactgggaggttgttggattagttcaggcaagagaggagagtgtttttgactagggtggagatggagataaaaagaagtaaaccatctatgacaagctgggcttgatgtcagaggaagaggggaggagaagggcagacactaacagacagg

SEQ ID NO: 608182 - DNA, 401 bp, Homo sapiens
tggaaatggaaaagcccatagcaggatcatgaaagagttcttaggggcagaaggactgtctttatactccccagactcattgccaaagctgcctgctctcttgatctgaaaatggactttgctttaatccaagttaggccamcaggtgactggagtcaggtcagacgggggattagggtatgcagtattgtagagaactggggagtttggaaataggaactcatattttttggtaatgaagaagcgtttatgtgaagtgtaacatttcccttagtttcatttcagtttcctttttgtgggtactatgtaaaatttaattcaactccttttattaaaagtacataatgtaagatttttttttcataaaattattttgtctttctaccctccttccatttatc

SEQ ID NO: 608183 - DNA, 591 bp, Homo sapiens
cctgactgggacagggctaaagagaaggattggggtcggcctccactgcctaattctttggtctctaaagcctttcaagtagcatttcctccttgcttaatttgggcaggctgcccatgttgacatagaagttaaaggcacactttggtctctctcaaaataaagtgctccagagaaactaaatatgcaatggccatttgcccagctgctctcctctttagaaggggtgctttgtttcttcaaacctgcagcttgcattgaggacccatacacacagagactgtcccagcaggctaaaggaagatgtgggcagaaatacaaacctttgcatagaacattagagccagaggacctgttggaaaggcatcaygtccaacccattcacttctcaaaggagaaacatcgtactacctctaactccattaactttgaactctttaagcttgcttaacctgctgcctggaagctatcagccctgctgaactcagaaggcgagagctgtaagggatcctagaataacctagtctgttgtacagatgaggaccagaagcccagagggaggaaggattagcctgagagcccacaggtagt

SEQ ID NO: 608184 - DNA, 591 bp, Homo sapiens
cctgactgggacagggctaaagagaaggattggggtcggcctccactgcctaattctttggtctctaaagcctttcaagtagcatttcctccttgcttaatttgggcaggctgcccatgttgacatagaagttaaaggcacactttggtctctctcaaaataaagtgctccagagaaactaaatatgcaatggccatttgcccagctgctctcctctttagaaggggtgctttgtttcttcaaacctgcagcttgcattgaggacccatacacacagagactgtcccagcaggctaaaggaagatgtgggcagaaatacaaacctttgcatagaacattagagccagaggacctgttggaaaggcatcacgtccaacccattcacttctcaaaggagaaacatcgtactacctctaactccattaactttgaactctttaagcttgcttaacctgctgcctggaagctatcagccctgctgaactcagaaggcgagagctgyaagggatcctagaataacctagtctgttgtacagatgaggaccagaagcccagagggaggaaggattagcctgagagcccacaggtagt

SEQ ID NO: 608185 - DNA, 412 bp, Homo sapiens
acatattatatcatttacttacttactgtttgtctcccctgctagaatatgccagatcaytgaaggcagatatctttgctttgttcgctaacaaaatcctgacagagtccatcgtcagtgcccaacacatagtagttgatcaatacattgtggtagtggttgttattgttgttgatgattgtactggcaatttgggaatctgatcctacacttcccaacccacgctgaaatctgctcaggcaaaaagtagcaacgagtgagggcagaggcgggtgttgtatgtgctcagtccctgtgtccttgggcgattcagtataacacagtgccttaatatccctgaatttcacttgttttccattagtgaaatctcattggcataaatgagacatacagtgtgtgtctcactataatg

SEQ ID NO: 608186 - DNA, 396 bp, Homo sapiens
acatattatatcatttacttacttactgtttgtctcccctgctagaatatgccagatcattgaaggcagatatctttgctttgttcgctaacaaaatcctgacagagtccatcgtcagtgcccaacacatagtagttgatcaatacattgtggtagtggttgttattgttgttgatgattgtactggcaatttgggaatctgatcctacacttcccaacccacgctgaaatctgctcaggcaaaaagtagcaacgagygagggcagaggcgggtgttgtatgtgctcagtccctgtgtccttgggcgattcagtataacacagtgccttaatatccctgaatttcacttgttttccattagtgaaatctcattggcataaatgagacatacagtgt

SEQ ID NO: 608187 - DNA, 433 bp, Homo sapiens
actttgtaaacccccagtataaactgtctgaaaggcaatggagcacctgatggtttaatcaggggaggaytgtggtcaggttttgtgttttatttatttatttatatttatttttttgagaccgtgtcgcccaggttggagtgcaatgacgtgatctcagcttcaagcaattctcctgactcagcctcctgagtagctgggattacaggcacgtgccaccacatctggttcatttttgtatttttggtagagacagggtttcatcatgttgcccaagctggtttcgagctcccaacctcaagtgacccgcccacctgggcctcccaaagtgctgggattacaagtgtgagccgcagcccccagccaggttttgtgttgtagaaacatcactctgagacttctcctttccatgatcttttcttaaactttctgc

SEQ ID NO: 608188 - DNA, 305 bp, Homo sapiens
tcccctcctgcagaatgaaactgggttcamcacaaattctcaagttaatgggctgtaaatatctggcagctagggcagttgcacagggctgagagccacaagtcagccctggcaccccaggaaatgagttcaccatcttcagctcctccaaatctgcatttgctggaggcacaggctgggagcaaacacctggaggtggaagagggggccagctagacggctccccctagtgggagactggatcaatgccccagaaccacacctcttaaatgggatatcgactgcatcttgaagaagggtcccca

SEQ ID NO: 608189 - DNA, 529 bp, Homo sapiens
aaactactaacatatgcagagtcagtgaatttatttttaaaatagggcttggaactatttggatggatggattctcccagcaataagatttcttttgaattgaaaaagaagggggacaccagtgtttttcagaaggggagaggcctgggtggagctgtcttctgagaaggccattctagcagtagtgtgagccgtggactgagcartgcttctcagccttgcaggctcattggaatcccatggatcatactggtacctctgtctgtggccacacattctgatgtaattggtctgtggtgggcgtggggacatcaaatctccctaaatgattttaatgtccagcaaagttagagaaccactggtgtaaggtgtcattatgctcatcaagaagctgagtgggaccacatgagaagtgctgaggccccagtctcactaggcaagaggcaatgaaagggatagaaatggagagaaggggacagtggaggctctgcagaaatgaaatcagtagtacctagaaaatgattgcatt

SEQ ID NO: 608190 - DNA, 589 bp, Homo sapiens
ctgggtggggccagacattggccagttgagctgagtagcatttatcaggagatctcatgttaagtcaaataccaagagcctcttaagtcagtccattaagatagcataggatagttgagtcacccacaggatgtgaccccagaagtgacaaatcccacaggagctcaggtcgatagagtcaaccttgatccaccactgggcttcaagtgagtcayagtccaaatcccgaccccgggacaacttgtgtcagtaacacccccaaagggcatcccaggcctgctgctgaccaagtatattatgacagaactggggtaagaagaagcagtgtcagaagtccactggatctgataagggggtctgtaaaaagataggccggacaaagtgctaggaccctgtcacctgtgccagggtgaggcaagaggttgggaaagcagacttcttgccttagttttctgcagaatcagcccttgcactgcctgtcccaaccagtggtcaagggtcaacagtttcaaagtgcaggcaacaagctttcttgtcaacggtgtcattgccaggggcaaactttcaaggtcgtgcccttccaggtacc

SEQ ID NO: 608191 - DNA, 435 bp, Homo sapiens
tcaaagactcattcctttaggacaaaggtatgagaaagtctgtttcagccacacaggataaatagcagatgactgaagcacagaggagacaggcagggcttccaggagggaggaattttcttctcttggcacaaacgttttcagaaacaagaccagagcgttcttgtcagtcagccaaggccacacctcatcctcagctttgtaggagtcgtgggtgcctgtgtgcatcattactgacaggatttgcatcctggggattttgttttgttgcagccctaagagccaygatcttccagtttgatcttaactctgctttcctctggctcctcaaacttttgcttagtagaagctgcatcttcagaaccggcaccatagctgtttgtaagagctgagaacacaaggggaagtttgcagttcacaccctgataggtcaca

SEQ ID NO: 608192 - DNA, 587 bp, Homo sapiens
gaaaggggagtgcgggcagacttgagagagagtcacgcaatggaatttggggcttctaccttcatgagtttctttaaccaaggggtagaacattcatgaggattcctggaaaaaggtggagatttctgggaactgtgatgttacccatttttacattaaatatggctgttcctgggactgttgtggcactggtgggtgtgtgacctagtatgttaatgagcttataataaggtcccaggtgaaacttgggtcaaatccagcaccatgttggatccaattggtcttagctggcttggcccacaccctgttcttttcagggtcttrtcagccctgaaaataatggcttatgcagctatttcagttcctttttgctagtcatgtgtaactgcctggaattttctgttctcctgcagccactcctgttattcctgtctcagagctgccaaaagtgcataaaatctggcatgtaaataataaatcctttcatagctctatttgctctctgataatatacataaaaatcatacatttccatcaagatagaaaataaagacatgcatgccatctcttggagaggaatgcacacc

SEQ ID NO: 608193 - DNA, 488 bp, Homo sapiens
tggtggggtcgggggaggggggagggatagcattgggagatatacctaatgctagatgacacattagtgggtgcagcgcaccagcatggcacatgtatacatatgtaactaacctgcacaatgtgcacatgtaccctaaaacttagagtataataaaaaaaaaaagaaagaaaatggtttggattttgtgtgttgttattttttggggatagttgtctgtaagtttccttaagtgcttttatttccctatcctgtcttgkcttttcttttttttttttttttttaagtaagttgcaggctttggctaggaaaaacccagggagttgggggcaaaaacctgaggctgctgtccctttatctgccttaacggtagtgtccccttccctcaatttctccctgaccacataggttgggcctcaggccttccagctaactgcttcccataaggctctgctatgatgtcaacctataaccaaaggagctgggtg

SEQ ID NO: 608194 - DNA, 618 bp, Homo sapiens
aattgtattttaaatatatgttttaaacttgtcaaaaaagaacctgcaaaaaatgaacaaacaaaccctaccagagttaataaacaagttcagcaaagttccagggtgcaagatcagcacacagaaatcagctgtgtttccatagatgaacaataaacaatccaaaaaggaaatattaaaaattccacttgcaatagcatctgaagaacaaaataccctctaagaataaagttaataaagggactaaaagacttgtacactgaaaactacaaaatattgctgaaagaaattaaaggagaccaaactaaatraatgaaaatgtatcccatactcatgaattggaaaacttaatattcttaagttgtctattcattttttgatgatgtcttttgatgcacaaaagttttaaatttttatgaagttcaatttagtttgtcttctgttgtttataattttgatgtcatatctaagaattcattggcaaacataaggtcatgaagaggtggagtaatcattcaattgaatattattcacccataaaaaatgaaacactgatatgtcctactgcatcctcaaaaacattatgctatgtgaaagaagccacgtacaaagatcaaa

SEQ ID NO: 608195 - DNA, 489 bp, Homo sapiens
atttttacaaaagttattaatgacagaatactttgtcartatttgtatttaaacatttgatgaacattttaacagtgttattgagcttgaattcacataccatacaattcactcacttaaagtattacattcaatatattttaatatgctcacagttttgcagtcatcatcacaatctatattaaaagtgtttctcacctatcccaaataacccatattagcagttacttgccaattgcttcccatgtccctccttcctaagatttaggcaaccatgaatctactttctgttttataaattatctattttggccattttgtataaattgaattatacaacatgtggtttttctagcttttttcacctaacatttcaaagtctatccatattgtttcagtacttatttttttattgccaaataatagtccaccaaatgggtaaatcatatttattcaattcatcagttggtagacatttgggctttttct

SEQ ID NO: 608196 - DNA, 553 bp, Homo sapiens
catgtttacctgcaatctaggcatctcttagcccgatcaggttgacacaaaattaaccatcgctggcaagaatggcattggaagttgggccagtatacagtgaaaatataagggctaagggcaggtagtcagtgcaccatcggtgtcttctcagaccacttatgtgtcaactttccagaacagatctagaccaaaaagttagctaaaaatggtatcctcaagcactcaaagctccatttcttgtggagaatgccatgaactctcacttaaatgtatttgctgactcttaggaaaggcttcaaaccttcacacaatttgaatcgcatgggacagctggttgcctaattcactatagctttcctattrgaagcagcagatacctcctattggtagacacatgcccgacactaataaataatgatagagtggtaacagatgacagtaaaggagactgaaaaatataaaaacaaaacagacacaagaaagctgaggaaacagagttttaaaataagtaacaaatagctttctttatattaagtttcagtataataaa

SEQ ID NO: 608197 - DNA, 619 bp, Homo sapiens
acagcataaatccaatttctgcctccatcttcatggggctgtcttccctctgtgtatttttatctctgtgtcttttctcttcttttaggggcrccagtcacattagattagggctcacgctaatgatcttaaattgattaaatctgcaaagactgttgtttccaaataaggtcctgttcccaggtactggtagttaggacttcagcctattgtgtccctccttggtgggagggacacaattccacctataacattgagtaaagaccacgtaggctctctctgtattgtttttcacaaactgtacatgaacctaccattacctcagtaaaaaattcaattcaaaataaaaagcaagaagggcacagcaagggcaaccaaagtggttggtatgcagcacaggggccactttaagaatcaggtttaataatctgggatgtgtgtgtgcagtactgtgcaaagcaaggtctagctgtatgtatgaggccaggacccagagcaaattataataacctggtccagtcaattaccctgtgggacccagaaaaaataatcactatgacccttgccccacctccctaggactgatgtaccctatattgctgattcagggcatagtgga

SEQ ID NO: 608198 - DNA, 669 bp, Homo sapiens
ggggatggtgctaaaccattcgtgaaaactccacccccatgattcaatctcttcccaccaggccccacttccagcattgggcattacgtttcaacrtaagatttgtgtggggacacagatccaaaccatatcattgtcccttgaacctgttctgggacatagatgggaagatatgttaacagattttcagtggagacaaaaagtgtgtactgcattacctggacccttgcctagcttttctcttcctgaaacctcttggatgatgtataactactaatgcacccgaaaaaatattaaattaacaaattaataaattaatgtggcaaaaagttatgaatgattggccaaactacattctaatcagcttttaaaactggcatagtttagtaatagacaagagattgaagcactgggtttgaacctttcccacctcttgggtttgaaccactacccacctccctctcttcatcctggaagtagtaatttataaatgtatctctttacccatgaagcctggggaagccattaataatgactgtctttcgctgttctaatcttcaaaggccagagttgacattttaatacagcacctgggcactccagtcatttcttgttatgttatttcactggaatagcattcctgcaagaatggggcatgtgttagtaaag

SEQ ID NO: 608199 - DNA, 376 bp, Homo sapiens
ggtgtggaacctgctgatccaggcacaggagagaatctctttgtctgccagttgctaagaccatggggaaagcacagtatttggttgggagtgtactgtttttccaggtacagtctgtcatggcttcccttggctagcaaagggaaattcccccgaccccttgcactacccaggtgaggcaatgccccrttctgcttcggctcaccctccatgggctgcacccactgtccaaccagtcacaatgagacgaaccaggtatctcagttggaaatgtagaaatcacccgtcttctacatcaatcacactgggagctgcagaccagacctgttcctgtttggccattttggaatcaaactcagtacagattttcttatat

SEQ ID NO: 608200 - DNA, 609 bp, Homo sapiens
gttagtgttactcagcagagcggagttcttgagctgaggattgtattgaagatctataaatagaaattacactttaaataaagatgtgaataaacaagtaaaaaattaaaggtgcttgtttctgggtgctgaatttggggaagagcagatgttggtgcaagacatggtaaacaatctgttttcttaaataaattggtacaatatctttttactatgataytcagtacacacatgatacactattacgaaatttgtaaaaaagagtctcacaagcagtgaaacatagataaggaacatagtcaaaaggaagatataaagtatctattcctgcctttctgagacaagcttggagagtgacttagaaatggtgtattgtgacctatcatgagtgaagccccagcacatgctggctacactgagattcaccaccagggaaggtttagtgtttggcacaaagtagatacgcaatacgtgactgctgaactgatcctaacaaaatgtaagcaccaggctaactccctcagccaccaagcatctttttatgtcccacttaccccatttgaataaaatggggtgctctcagtgttagaaattgtttcatattagagg

SEQ ID NO: 608201 - DNA, 583 bp, Homo sapiens
cagtgagtctaagtgcaattattctctgggggtagggacaatggatcttcctctgactgagcatctgatgaagtagttggtgcatctatagggccatgttgtgtgagaaagtcttgtgcttcatatgctgaaaagacccctaagccactcacaagatcccactgtgagaattgctgagagctgagactgaggaagcaaatggcagtcaggtctcctgtgtcctgttcttccggggagcacacacatggcacagaatgggaggaggcagtgatactcactggttggctagtcagagcattctctttctctttctctctgtctctgtctccccacccccatctttgtctctctctctctctctctytcacacacacacacacacactcacacacacacacatactctctgtctctctctctctcacacacacacaattttcttccctccttaagtagatgcagttgcaaattcctataagatataaagcaactactgtatgcaaagtggtgaagcctcttgctgcctgcatttgaattcaggctccagggcttagttttcaccttaggcatgcaatttcagcttc

SEQ ID NO: 608202 - DNA, 583 bp, Homo sapiens
cagtgagtctaagtgcaattattctctgggggtagggacaatggatcttcctctgactgagcatctgatgaagtagttggtgcatctatagggccatgttgtgtgagaaagtcttgtgcttcatatgctgaaaagacccctaagccactcacaagatcccactgtgagaattgctgagagctgagactgaggaagcaaatggcagtcaggtctcctgtgtcctgttcttccggggagcacacacatggcacagaatgggaggaggcagtgatactcactggttggctagtcagagcattctctttctctttctctctgtctctgtctccccacccccatctttgtctctctctctctctctcttwcacacacacacacacacactcacacacacacacatactctctgtctctctctctctcacacacacacaattttcttccctccttaagtagatgcagttgcaaattcctataagatataaagcaactactgtatgcaaagtggtgaagcctcttgctgcctgcatttgaattcaggctccagggcttagttttcaccttaggcatgcaatttcagcttc

SEQ ID NO: 608203 - DNA, 586 bp, Homo sapiens
aagcttaagcaaaccgagttctctacaattggtactccatctgtctgcttccagaaagcagtgtttaggcaccagaacctaatcaagaaaaagaggaacagggcttctagatggggaagtgggactgtgcctcacaacgggcctgccacaggataggcttcagtaaatggaccttcctctcttgcttatacagggcactccatgcttcagactgagggttttttccttaccatgtgggaaggaagaatattaactctatccaaaggataggtggacctgaagttkctcagggtctgttggaggctggttttccagaagcaaataagacacagtttgacatgctggatatctattaaaaaccaacgcctgtgggagagtgttggaggagaggcagaaatctaaccatgagacaggtttacaaggtcttggccaactccactggaagtttgagagcacatatggcctatctgagttgtcccacattgggccaaaagggctgggcttttatagccctgctttaattggtcactgaatatgggccaccccaggaaggcatgaatacctttggggaatgtaggtctctgtg

SEQ ID NO: 608204 - DNA, 577 bp, Homo sapiens
tcacactggccctttgccctcgctggtagagggcagccaccccacatgatgaggcaaaaggcccactgagctgataacayactgctgtctgtggatggtggagctaagagagcattgtaacacaccctctggggccttggggtggcaggcacccccacctggatgctgccacggggcctcacagagttgtgctggtgctgaagcagtcagctggtttttgcactcctatgctctcacactccctcctgcaaggggtggagactggaggacctgagtgaacagaggttgctcctgctggaccactggccagttcctgtggtcactcactctggctccctcactcgttagcttgtacattccctcctgcaaggggttgagcagggagggctgagtaaacaaggcacccctgtcatgagtccattggaggggtcaagaaaatatcctgcattagtacttacacaaacctagatggtatagcctactacacaccttggctatgtggtaaagcctattgctcctaggctaaaaacctgtacagcactttactgtagtaaatacagtagtaggcaactgtaac

SEQ ID NO: 608205 - DNA, 580 bp, Homo sapiens
caactctttacacaaattatctgcaataggacagactgaagaattctttccaagcaccttcccaccacagtctgttcttattctccaagtttcactgaataattcatgagcaaaaggatatgagcatggaaagagcagcagccttctaggagcaccattccagaggccatcccaacatcaagcatacttactaatggtgtttgtggggaatgaaaaagatgctgagtcttctcatggccatgtggcccagggaagaacaccakcagatgaatggccttattcttcttgctctgcaattgcagatgccattacaaagctaggttaaagcaaaagactctacagcagcttaaatatctgttgtcagccactctgcctatacacatcctcagaccattaggggagtcacttgggttccagccctggtctgctaagataccttctcattgtcaattggcatctgccttgagaggcagcttctctccctgttttgcatccagtctatagtggaatgtgttgaccacacattgtccccagtgagattttctacctctaaaaccactattcccataagcctgaaaga

SEQ ID NO: 608206 - DNA, 517 bp, Homo sapiens
acacctctttttctttataaattactcagtcttgggtatayctttattagcagcatgagaatggactaatgcacctggccttgtggatatatgctgcagcatatggagagtgaccatatactttatcatagaaacctaggcatggttaagagtacagagagtatattaattccataagcaatggatgcaaactaggactagccagagacagtttatctggctagtggatgcagggtatgaaattaaggtttcatgcggcagaaattcatttaaaaaataagtatgaaatccttctttgttattctccctttgaaactatttgtagtaggctgaataatggctcccaaaaatatcaggtcctaatccttggaacatgtaaatattaccttacatgacaaaggtgattttgtagatatgattaaattaaggattttgagatggatggattattctggattatttaggtgggtcctaaattcaataacatgtatccttatacaagtgaaacttgactaca

SEQ ID NO: 608207 - DNA, 517 bp, Homo sapiens
acacctctttttctttataaattactcagtcttgggtatatctttattagcagcatgagaatggactaatgcacctggccttgtggatatatgctgcagcatatggagagtgaccatatactttatcatagaaacctaggcatggttaagagtacagagastatattaattccataagcaatggatgcaaactaggactagccagagacagtttatctggctagtggatgcagggtatgaaattaaggtttcatgcggcagaaattcatttaaaaaataagtatgaaatccttctttgttattctccctttgaaactatttgtagtaggctgaataatggctcccaaaaatatcaggtcctaatccttggaacatgtaaatattaccttacatgacaaaggtgattttgtagatatgattaaattaaggattttgagatggatggattattctggattatttaggtgggtcctaaattcaataacatgtatccttatacaagtgaaacttgactaca

SEQ ID NO: 608208 - DNA, 517 bp, Homo sapiens
acacctctttttctttataaattactcagtcttgggtatatctttattagcagcatgagaatggactaatgcacctggccttgtggatatatgctgcagcatatggagagtgaccatatactttatcatagaaacctaggcatggttaagagtacagagagtatattaattccataagcaatggatgcaaactaggactagccagagacagtttatctggctagtggatgcagggtatgaaattaaggtttcatgcggcagaaattcatttaaaaaataagtatgaaatccttctttgttattctccctttgaaactatttgtagtaggctgaataatggctcccaaaaatatcaggtcctaatccttggaacatgtaaatattaccttacatgacaaaggtgattttgtakatatgattaaattaaggattttgagatggatggattattctggattatttaggtgggtcctaaattcaataacatgtatccttatacaagtgaaacttgactaca

SEQ ID NO: 608209 - DNA, 571 bp, Homo sapiens
tgaggctctgttccttcttttaaaaaattatattttcattgttaaagttgggtattttctattgttctattatccagttcacagattctttcctctatttgctccattctsctattgatcccaaccattgagcttttaatttcagttattgtatttttttagttctaaggtttttgtttggttctcctttatatattctggttatttgctgagactttgtttctccttttttttttcccccccagctttaatgaggtataattaacaaataaaaattatatatttttatataatgtgatgttttgatgtatgtatacattgtgaaatgattatcaccatcagagacttgctagttttttacttgcttcaaacagatttgtagtttcttgcttatgcatttttatcatggctactttaacaaattttaaacataattctaatatctctgtcatcttggtgttggcatcttttgactctttttttttttttttgatagggtcttgctctgtcacccaggctggagtgcaatggtgcaatcatggctcactgcagcctcgacctcctgggctta

SEQ ID NO: 608210 - DNA, 571 bp, Homo sapiens
tgaggctctgttccttcttttaaaaaattatattttcattgttaaagttgggtattttctattgttctattatccagttcacagattctttcctctatttgctccattctcctattgatcccaaccattgagcttttaatttcagttattgtatttttttagttctaaggtttttgtttggytctcctttatatattctggttatttgctgagactttgtttctccttttttttttcccccccagctttaatgaggtataattaacaaataaaaattatatatttttatataatgtgatgttttgatgtatgtatacattgtgaaatgattatcaccatcagagacttgctagttttttacttgcttcaaacagatttgtagtttcttgcttatgcatttttatcatggctactttaacaaattttaaacataattctaatatctctgtcatcttggtgttggcatcttttgactctttttttttttttttgatagggtcttgctctgtcacccaggctggagtgcaatggtgcaatcatggctcactgcagcctcgacctcctgggctta

SEQ ID NO: 608211 - DNA, 571 bp, Homo sapiens
tgaggctctgttccttcttttaaaaaattatattttcattgttaaagttgggtattttctattgttctattatccagttcacagattctttcctctatttgctccattctcctattgatcccaaccattgagcttttaatttcagttattgtatttttttagttctaaggtttttgtttggttctcctttatatattctggttatttgctgagactttgtttctccttttttttttcccccccagctttamtgaggtataattaacaaataaaaattatatatttttatataatgtgatgttttgatgtatgtatacattgtgaaatgattatcaccatcagagacttgctagttttttacttgcttcaaacagatttgtagtttcttgcttatgcatttttatcatggctactttaacaaattttaaacataattctaatatctctgtcatcttggtgttggcatcttttgactctttttttttttttttgatagggtcttgctctgtcacccaggctggagtgcaatggtgcaatcatggctcactgcagcctcgacctcctgggctta

SEQ ID NO: 608212 - DNA, 571 bp, Homo sapiens
tgaggctctgttccttcttttaaaaaattatattttcattgttaaagttgggtattttctattgttctattatccagttcacagattctttcctctatttgctccattctcctattgatcccaaccattgagcttttaatttcagttattgtatttttttagttctaaggtttttgtttggttctcctttatatattctggttatttgctgagactttgtttctccttttttttttcccccccagctttaatgaggtataattaacaaataaaaattatatatttttatataatgtgatgttttgatgtatgtatacattgtgaaatgattatcaccatcagagacttgctagttttttacttgcttcaaacagatttgtagtttcttgcttatgcatttttatcatggctactttaacaaattttaaacataattctaatatctctgtcatcttggtgttggcatcttttgactctttttttttttttttgatagggtcttgctctgtcacccrggctggagtgcaatggtgcaatcatggctcactgcagcctcgacctcctgggctta

SEQ ID NO: 608213 - DNA, 416 bp, Homo sapiens
tgaagagcaaacaggtgaggaaatttgtgaggtaagatgaagcattgtttatgatttagttcatgttggagtaaaaagcctattgaaagagaaagcataaaaagaaaaatatgaagctatcattctctaggaaaaaaaaattcaaacttttccagtacccagaacttccagaactttcttataacaaaaaggaaaaataaaatttttagtgctagaagaggatcctcattctcagcaccttcattttatcattttatagtttaaaaagctgagagcctgtgaaatgcactcatttyctcacactcacaaatctaactggtagagatgtaggtctggaaaccatgtttctgtcattctagcttctctgcattttcacacttgttggggctaaactacattctagagtttgtgtttga

SEQ ID NO: 608214 - DNA, 594 bp, Homo sapiens
tttgtgaggctataaaattgctaaaagtgtttcaatggacagcttgtacatgcagtttatgcatataagtcaatatttttctgttgcgtagatctctaaagtttacattgttagatcaaaatctataaacattttaaaatttctatctgttgtgccaataatgtatgagagggcctattttcccatgtcctcacccaaactgagtatcatttatatttttgaatttttgctagtctggggctgggcacgatggcttatgccagtaatcccagcagtctgggaggccaaggtgggtggatcacttgaggtcaggagtttaagaccagcctggccaacatggagaaacctcatctctactaaaaataggaagattagccgggcatggtggtgcatgcctgtagtcccagctactggggaggctgaggcaagagaatcgcttgaaccggggaggtggagattgtagtgagccargatcacgccattgtactccagagcaagactctgtctcgaaaaaaaaaaaaaaaaattgctagtctgatgaatcaaaaactgttgttttaatattttacttttgattttttagaccactagtga

SEQ ID NO: 608215 - DNA, 541 bp, Homo sapiens
ggctgggcacgatggcttatgccagtaatcccagcagtctgggaggccaaggtgggtggatcacttgaggtcaggagtttaagaccagcctggccaacatggagaaacctcatctctactaaaaataggaagattagccgggcatggtggtgcatgcctgtagtcccagctactggggaggctgaggcaagagaatcgcttgaaccggggaggtggagattgtagtgagccaagatcacgccattgtactccagagcaagactctgtctcgaaaaaaaaaaaraaaaattgctagtctgatgaatcaaaaactgttgttttaatattttacttttgattttttagaccactagtgacattgagcatcttttctgtgtttattatgaattgaaatatttcctgtgaatcatctgttttcatcctttgcccattttttcattaaagtgtttgtcatttgggtccacctctggaagccatctgttttatggttatccactgttatttttttaaaaattagttatgggagacgttgcatttaagc

SEQ ID NO: 608216 - DNA, 556 bp, Homo sapiens
tatacatccctttgggaaaaaatcttatttatttagtagtttgcarcctatcataaaaggagcattctccatgttttactggaaaagagaaagcaatcgtatttagatttgactagttaattgttcttcttcattggaatgcattagggcatgcagtttaattattatgttcatacttgcacacttcacttttttatcgtcaaaaattatttaatatcagaaaaatgataatacttttctacatcatatttcatcttgctatcattttaaaaataaagaggaaaggaaaaggctactgcatttgttgttcattgattaaccagtaatgttatgtataaataatgtatctgacagtatggcagcccacttgggacattatgccatttactacaaaataggatgcaacatacaactgagcagtgagaacaaattaaacatctttccttggtaactttagcatttttattaggtgataaacatcacagtgagagcaaagcagatgtagttatttcagtaatattaaccttaatcgaaagctaacttgacatacagcata

SEQ ID NO: 608217 - DNA, 598 bp, Homo sapiens
gttctcatgcttctaataaggacatactcaagactgggtaatatattttaaaaagaggtttagttgacttacaattccacatggctggggaggcctcacaatcatggcagaaggcgaatgagaagcaaaaycacgtcttacatggcagcaggcaagagagcttgtgtaggggaactcccctttataaaaccctcagatctcgtgagttttattcactatcaccagaacagcaagggaaagacccgcccccatgattcagttacctcccaccaggtacctcccatgacatgtgggaattatggaagctacaatgattttggtgaggacacagccaaactatatcagcctcagactaaaggccatttgccaataaataagtagcaggaatctgaacttctagaaggaattcttccttgaagatatcttaaatattaaacttttaaaagacgttgatcagatataacattgtttattagagaagacaattcaccattatgaccaaaacagaaaatatattacatcaaatgaaaaagggaaaaaaaggccaagagaacacatttagagcgttctccaggagatgaaagctgagcagttgaat

SEQ ID NO: 608218 - DNA, 577 bp, Homo sapiens
cacagcaatctagggtatgaacattgatgacataatcctcacaaacaggttgacaggaaacagttcagtcaatttgattcaggaagccattttccccattggtaataactgtcccccttcctctcttccttacactcagctaggattttttttttcataattaattcccaaatactgagcattctcatgtgtgtaatgctctataggttgtaaattgtgttcacatccattatctcatttcttcctcaccacagcatagcaggcaacagtttgtccagacccctacagttagggtgtttggataagagaagggaccacagctgtcatgttcgtcaatgcactgccagcatgcagcctgatgcagaatggaagttcatctaatattgagtagggctgtaggaatcagacaagcatcattcccatttcacagataaaactgaagctccaaattacagttagatgtcarctcatagaggcagagagtagaatcgtggttacaagggtgtggggcatggggagctgttggtgaaagggtaccaaatttcagttatgcgagatgaataagttctgcagatct

SEQ ID NO: 608219 - DNA, 577 bp, Homo sapiens
gttgttttttaattgagcacattgtttatataggacatcaaatgtaaaaatccaagtttaaaaagtttcttggtaaagtcctgtctttagaattttttaagacacatactcactgatgagttctcatccttaacgctttatctacttatttgtactctgtgggtaatatcttatgtagatgagcctaatgtatgtatattcttgcctatattttaaaggactatcatatactatttttctgaaactgaaaaaggcttgcattacatttatttaaattttgttctagtattctctctgataagtaacmattttgttttcaagataatattctgcacaagaataaatgaacttcaggttctgtaatccacaatttatcacagagcccttttttatgcagcacagaaagactgagcacctaatatgtgtcagaggcactgtatgctgtaagtgcacacagtggtagcatacagtggtaataacatggagagtttttgtagccttggctgtagagatctgggatgacctaggaatgtttgcagcttttatggacctttccttagtctttaagtcactgaac

SEQ ID NO: 608220 - DNA, 555 bp, Homo sapiens
gttcctctttctccctgtgaggaagccctctatgaattgggaaaggtgtggtgctttgttggtactcagacaaaaataaagagaaaagtgaataatgactattaataaaacttaatcccaggaaatgccacttgcctgctgtaagtgtrtattgctcctcggtatcattgaaagataaacacgtggccctcacaggaagctatttggtttgggtagcaatgatttttgacactcaggaaacttgcagtgcatagagaaacgtaaagagcatctcactgtacttcttggtggtgataaaatgctccataaataaacatttcactttgtttccttcttagtgaaattatctttgctgctttgatagatttttcttgtatttagggtaacctgtcctaacctctgttggaacgaaatgagaaatactgcctatatacaagataagacaaatctaatagttgtgtttgaaaacatcaaataacagtgggctcaagatgtgtgatataaagctatcaattaattttgttgtaactgtatgcacctgtgaacaactgctta

SEQ ID NO: 608221 - DNA, 560 bp, Homo sapiens
cagtacatctgttcctctttctccctgtgaggaagccctctatgaattgggaaaggtgtggtgctttgttggtactcagacaaaaataaagagaaaagtgaataatgactattaataaaacttaatcccaggaaatgccacttgcctgctgtaagtgtgtattgctcctcggtatcattgaaagataaacacgtggccctcacaggaagctatttggtttgggtagcaatgatttttgacactcaggaaacttgcagtgcatagagaaacgtaaagagcatctcactgtacttcttggtggtgataaaatgctccataaataaacatttcactttgtttccttcttagtgaaattatctttgctgctttgatagatttttcttgtatttagggtaacctgtcctaacctctgttggaacgaaatgagaaatactgcctatatacaagataagacaaatctaatagttgtgtttgaaaacatcaaatarcagtgggctcaagatgtgtgatataaagctatcaattaattttgttgtaactgtatgcacctgtgaacaact

SEQ ID NO: 608222 - DNA, 299 bp, Homo sapiens
cacaactggggcaggtgcctcatagattgatatggcttcctcaagctctagcactgcctttcctcattgcctccagacctttaaccagagtcagatctcagcatagcccaaatggagaaatattgtccctgttccgggaggaaatagaatatacatccacatactacaagcacataccagcaggagtttcaaaaacacatggttgagtggaacttgakggtggtggattggatggatattgtaatgggagtatttttcccatgactcaggttttgaagtcctggcaagagatcttcatg

SEQ ID NO: 608223 - DNA, 575 bp, Homo sapiens
cttagccttgctagacaaatagcattcagaatttaagtgtattattttttccctgatttgatcacagacctaatttggtaaagaggtcagtacttggcacatttgagcaaatatcaaaatggtattggatatttatagaactaaattagatgttaaacaaatggaaattataatttagagaaagaaaaagacargatatttatagctcgttgagtacaataagagtcttttactttttactggaaagcgatttttaaaaactgtcatttgaaaaataaaccacttaaaatatctaataaattatttttacctgaattatggagattttaagttaactttgtgaatattactgaaatactattctgagttttcttcaccatagggaaaatttgatcggaatgtcattgaagtgatgttgagtcagtgaacactgaggttgaattgctcgggtcaacttctgagcctagagcttaatttaaccttccaaagaaagttcttagatttgccatagtttccattgtgtcttgctgtagtctacaaaggaatctaaacctctaagcaggagtacccaccac

SEQ ID NO: 608224 - DNA, 602 bp, Homo sapiens
cataaaacttttccttttcttagtctccaattgctttttatctgaataaatagcatggtagactgtttacacaattgcttaaggcaggacagaactgggagtcattgttagcacctccctcttcctgaagrtaccccccatgctgcatctatcactaattcctgctggttttccaccaaaatctctctcacattatccattctttccatctgcattactcactcctgatcatctctctcacagacgaaggtatcagctgaccaaattgtcctcacacttttatttgtgtgtgaggacaaagaatacttaacatcacattcaaaattatctgcatttggtttactccactgtcctctgaattcttgagagcgatgagtaaaagtggttcaatggcctttctggtgttgtacaaagaaattgtgttcccaggtgacttgcaggctcctcaagccagatctatatgaatagaatcccttggctaaaagagaataataattaggccgagtgcagtggctcacacctgtaatcccagcactttgggaggtcaagatgggagcctcacttgcgctcaggcattcaagatcaacctgggcaacatagta

SEQ ID NO: 608225 - DNA, 633 bp, Homo sapiens
aatagagttttgcattgccatttacttttttttatgtttctgaaaggaaataactttttagaaaatgagcaaacattactgaggaactagtaattttatttaatgccatttctagaaatactagaaataaattatgcttacaaaacatattttagccctctagtcatctggttattaaattaagaaaaggatatattttataaataattttattactatgtattttatctttaaaaaaatctatatatattaaaatggagcccagaatctgggcttagaggaaacaaattaattaagagctcagactttattatcagataaatrtggtttgcattctcactgaactattttatagctgtgttaccttggacaaattacctaaccactctgtgcttcactgatctcatttaaaagacagagagagaaagaaatgctttcttatgcttaatggggctgttttatagatgaaatgccaaaaatgtatagaatgtgcttggtagagcagcacttactaagtgaacaatattatctaattactactattttcatcacccacaatacttaaatgatataaaaaacacagctttttaagtatgcaaaagagttaattaacaattatattttaataagtgt

SEQ ID NO: 608226 - DNA, 593 bp, Homo sapiens
cactgcaacctccaccttccaggttcaagtgattctcctgcctcagcctacagagtagctgagattacaggtgcacrctactatgcccggctaatttttgtattttaatagagacgggttttctctgttttggccagggtggtcacgaactcctggcctcaagaaatctacttgcctcggcctcccaaagtgctgtgattataagcatgagcaccatgcccaggctggccttaattttttaaataagaggttgtatacatattttacctactagatttaaatagaaattttctgtatatgattaagactagttatatattaagatagaattaaccatgtaagccttctgatattgtagcaacaaacacagatgaaatgaaaggacgcaatgtatacattctcatgaaatggtcacttgagttccattgaaatctgtgttcatagcctaaatgtagtaaattgagataatatggataatctcagtcaaaactcatttatctcatcattatttaactatatcaggtccaagttatgccatgtgactcagctcttcattttctaaaactttaaagttttaaatccgtaggaagttt

SEQ ID NO: 608227 - DNA, 593 bp, Homo sapiens
cactgcaacctccaccttccaggttcaagtgattctcctgcctcagcctacagagtagctgagattacaggtgcacactactatgcccggctaatttttgtattttaatagagacgggttttctctgttttggccagggtggtcacgaactcctggcctcaagaaatctacttgcctcggcctcccaaagtgctgtgattataagcatgagcaccatgcccaggctggccttaattttttaaataagaggttgtatacatattttacctactagatttaaatagaaattttstgtatatgattaagactagttatatattaagatagaattaaccatgtaagccttctgatattgtagcaacaaacacagatgaaatgaaaggacgcaatgtatacattctcatgaaatggtcacttgagttccattgaaatctgtgttcatagcctaaatgtagtaaattgagataatatggataatctcagtcaaaactcatttatctcatcattatttaactatatcaggtccaagttatgccatgtgactcagctcttcattttctaaaactttaaagttttaaatccgtaggaagttt

SEQ ID NO: 608228 - DNA, 593 bp, Homo sapiens
cactgcaacctccaccttccaggttcaagtgattctcctgcctcagcctacagagtagctgagattacaggtgcacactactatgcccggctaatttttgtattttaatagagacgggttttctctgttttggccagggtggtcacgaactcctggcctcaagaaatctacttgcctcggcctcccaaagtgctgtgattataagcatgagcaccatgcccaggctggccttaattttttaaataagaggttgtatacatattttacctactagatttaaatagaaattttctgtrtatgattaagactagttatatattaagatagaattaaccatgtaagccttctgatattgtagcaacaaacacagatgaaatgaaaggacgcaatgtatacattctcatgaaatggtcacttgagttccattgaaatctgtgttcatagcctaaatgtagtaaattgagataatatggataatctcagtcaaaactcatttatctcatcattatttaactatatcaggtccaagttatgccatgtgactcagctcttcattttctaaaactttaaagttttaaatccgtaggaagttt

SEQ ID NO: 608229 - DNA, 551 bp, Homo sapiens
caaattttaaatgatagcaatctgaatttgatattgtagaaaccaaactataaatttaaaaatcacaatttctaggctgtccgtgaggactgtgattctgaaggtaaatcttattcccttttattaacaaaacagctattctttgattgacaacatcccgccaagagctgttgtacatatttacctggaactaatagctatttcagaaaagaaagaatgttcgygtaattggaacttatcaaatcctataggaattagaagtcctgcaaacatatccatcagttctaatgcagaaaacagtgtggaaatagactttgccgtgggcagtataattttgagaaaaagcggcttctcctgatcaatcagtctgctttctttgttagtttccttttgctttggaagtgactttaatgattacatagagtaattatcttagcctagattttcaaacatgtttcttccttcattgcttaactgttatgttttgatccttattctaaggattctgcttttttttttttttattgtatactacttcaattttgtttggg

SEQ ID NO: 608230 - DNA, 646 bp, Homo sapiens
ctggttgcaaagataggcccttttactgtaaatcaatgtgttgctgtcttgtttgctctgctgcaagaaagatggacacagcacagaactaatggtactgcttcctcaactcatttatcttgtagatcggttcatagtgcagcccagacttaaccatttcacctcccctttcctgctgttgttactggggctcagaatgccactgttgattgaatgaaattactggggctgttgattgaatgaaattactggggctctgaatgccactgttgattgaatgaaattatctttattttgcttatttttctggacattaagtaccaaaagtgggatcagttatagttctgactttatggcactctactttatttgtccatgccatgttcctctcttgttattgcagtcatgcattgcttaatgactaaaatacattcagaaacatatatcgttaggcrattttgttgtgtgaccatcatagagtggatttacacaaacctagatgggatagccaactacacacctaggctatgtgctacagcctattgctcttaggctacaaacttgtacagcatattattgtgctgaataccaggcaactgtgacatatttgtgatatttgtgcatccaaacacagaaaaggtacagt

SEQ ID NO: 608231 - DNA, 595 bp, Homo sapiens
taatataaatatagaattaatgtcaggcacagtagctcatgcctgtaatcccagagctttgggaggccaaggcaggaggatgacttgaagccagaagttcgagactagcctgggccacatagtgggacaccctcacatctctacaaaaaacgtttctgaagaaaagaactaaccagtcacagcagcatgtgcctacagtctctgctacattggaggctgagataggaggataacttgagcccaagtgtccaaggctgcagttagctatgactgggcaaagacactccagcctgggcaacagaatgagaccctgtcacaaaaattaaaaaaaaaaaaaaaaaaaaaaawatatatatatatatatatatatatatatatagatgtaggttttctattaaaaatgattacttcattatatatttataggttttctattcaaaagtattacttcattttatatataatatataatagaagatattatatagtatatatctaaaataaatgtaaataaaatatatataatgtaatagttaatagttatgactataatataaatataatataaacatatttatttatatttatttaatat

SEQ ID NO: 608232 - DNA, 579 bp, Homo sapiens
ttggcggtgtgagccccacttgaaatctttttataattctatcttgaaagtattattccattatatccatctttagataattaattgaagtaaatcactaagtccggtccacttcaagaagaaagggattaagagagaatttgggggctatctttgaagccatcacaggctatctcttagaggtaaaggagtgtttaaggaagaaaagacaacataaatggagaggcccaagagytggttctcgggatcattagataatggcagccacagagagaggcagtggcaataataatgaacaatccagcataagccctgtcctctcttcctggaggacagagagaggtgttggcagtggtcttaggttttaagtgtgaaaataagtaattcaaaatctaagctgttggaattataaattattttgagccttaaaggaatgtgattacaaggcctgagttacatggcaggcagctgcaacctaagcaactgtaatctgtgttcctctgattatagattagccttcttccttacctacactgttttgtaaaatgctgtaaatgactaaagggcaccagggaagcc

SEQ ID NO: 608233 - DNA, 547 bp, Homo sapiens
actttataaaaagggcagccrggtgcagtggcttatgcctataatcctggtgctttgggaggccaaggataaggatcacttgagaccaggagtttgagacctgcctaggtaacctagtaagaccttgtctctacaaaaattaaaaacttttaaaaattaggctcctgtgtgcctgtagtcccagctacttaggaggcaggggcgggaggaacaattctccttgtcaaaaataagcagtcctcttcccaaccacaccctaccttcatctggaggttttcaaggcctctagtattaaaagctatgtaatgcagccctacctggcattctctgcagaaaatttaagagaagcagaaagatgcaggctgtgatgaatcacctcaccctaactttcagctcagcgaaaccaggtttctcttgccccaggcaagatggtctcccttcatcagtacacttcagactgaggaactactgagaatacggggaggtgcattgaataacagcaggaaaatactgaatgcgtaattatggaaaggttaagtgaacctcc

SEQ ID NO: 608234 - DNA, 545 bp, Homo sapiens
tgaaaacttatatttcagaacacatttcttttggtaaagatcttcttggctgggcacagtgggtggctcacacctgtaatcccagcactttgggaggctgaggcgggcagatcacctgaggtcaggagttcgagaccagcctggccaacatggtgaaactccgtctctactaaatatacaaaaattagctgggtgtggtgttaggygcctgcagtcacagctacttgggaggctgaggcagggataattgcttgaacccaggaggcggaagttgcagtgagctgagatcatgccactgtactccagcctgggcaacagagtgagacaccatgtccaaaaccaaaccaaaccaaaacaaaacaaaaagaccttcttgtttttcatcaccaaaaactgtttagcattttgtttctttgcatttagtatgttatttcattgtttgtgaactaaatgtggtaggcaggattttggcttccatattctttatcctctgctgttatttctgtgtatgatacattacatggcaaagggattttaagaaatta

SEQ ID NO: 608235 - DNA, 567 bp, Homo sapiens
tgattcaattacttacacttggtctctccctaaacaagtagggattacaattcaagatgaggtttgggtggggacaaaaatcctaaccatatcaatggatgtcagaaagatgtaatggaagaaatagcagcagggtctcaaagaataagagagactcaatctkccattgctggctttgaagataaaggaaggagcttgggacaggaatgcagatgacctctagaagtggagaatggcccccaggtgacagccagcaagaaaacggtgaccgcagtcctacaatcacaaggagcttccttctgccaacaatctgaatgaacaagaaagaaatcctcccctaggttctccagagaggaacacagccctgccgacactgagttcagccttgcgacactctaggcagagcacctagcagaggcctctgtacttctgacccaccaaatctatgagatgatcatgtgttttaagaggctaaatttttggtaatttgttacagcagcagtagaatactgttacagtggctttcaatttttttaagaccctagattgcaaacttttagcaaaaag

SEQ ID NO: 608236 - DNA, 567 bp, Homo sapiens
tgattcaattacttacacttggtctctccctaaacaagtagggattacaattcaagatgaggtttgggtggggacaaaaatcctaaccatatcaatggatgtcagaaagatgtaatggaagaaatagcagcagggtctcaaagaataagagagactcaatcttccattgctggctttgaagataaaggaaggagcttgggacaggaatgcagatgacctctagaagtggagaatggcccccaggtgacagccagcaagaaaacggtgaccgcagtcctacaatcacaaggagcttccttctgccaacaatctgaatgaacaagaaagaaatcctcccctaggttctccagagaggaacacagccctgccgacactgagttcagccttgcgacactctaggcaragcacctagcagaggcctctgtacttctgacccaccaaatctatgagatgatcatgtgttttaagaggctaaatttttggtaatttgttacagcagcagtagaatactgttacagtggctttcaatttttttaagaccctagattgcaaacttttagcaaaaag

SEQ ID NO: 608237 - DNA, 626 bp, Homo sapiens
tatgatatcagtgacactcccctcaattaaatagaattattttgagtcaaactactgcttgttgtgacgtttgaaaattataatatagatcagatawtttatttttcattcgttggattccacttccctttactgaaaatatttgaggtgggagtaaatccactaaatgccacatgccaaatatgtgaccacaaccttgaccttgatatatttctgtcctatttttctgtagagtatctttttttgtgttgaggccaattgtattgggagacagagaaactaaaaagcagaaacattgtttgagtactgtgggctcaagtaattactctcaggctgaaagatcacttcagtcattgttaagaaaagctatctgaactgggtgaactccatgaacattttcagttactatttttgtgcctgtattatgttatagaacaaggaaataactccattattacaacatgttgtctgctccttgttttaaagtttgtagataatatctgatataaattatatcactttgggattatttggaagcagaatatttacactgtttatttcacaatgtaagtagtaaatagtaattggttttaaatctagggcagctgtttaagtatatatattat

SEQ ID NO: 608238 - DNA, 572 bp, Homo sapiens
attattacaacatgttgtctgctccttgttttaaagtttgtagataatatctgatataaattatatcactttgggattatttggaagcagaatatttacactgtttatttcacaatgtaagtagtaaatagtaattggttttaaatctagggcagctgtttaagtatatatattattttgttcccatttccaaagctaatagattacatgtgagtaattccttaatatagctttctccaggcttcacaaagcacaggtgtcaacacaattggctaggtcaacacatgaatacctagaacacattctagttttattatgttaaagcacatataaaactagtgtgaaagaatgatttaaggaaaaaatagaaaaatggrtagtatatttgttatgctaatgtgcactgcttttactattctgttgcagatttctatgtgatcgataccagtatttctccataaactatagattcatgttctctctgtagaaatgctagccattgtccactgaaccaactgaagccagtaaatcctaccaacagctactctcttatctttgccatcctgcaatga

SEQ ID NO: 608239 - DNA, 562 bp, Homo sapiens
gtcataataattgtatgtgaatatacgcatatattcacatgtatatgtatgcatagaaaatttatcttggaaattaggtataaaatagtttacttcttgtatcctgaatatgagctgtaaattttatttctaagaatttggaggttgaatctcttccatgtagaagtttattctctcatatattctctctctttctctttaccatatctttttctctttctaatgacttattctcaggcatatttccttaaagtttgaaaatatagccacmagatggccactagagctctaggcttaaatcattgtcatgtgaagggatccaactcaaagaaaatgccactttcctgctagtcctgctagtcctgtcagtcccagagactgccctgcccttaacaaatgacagttatcagggtattcttgataataaatgtgaaattaaggggtagggattaagaaccaactaaactattaagaatgacatgagacgattgtattacacaaaggagtccactccagaatccatgggtgttcatcatttcatcatgaaaaggagggttggaat

SEQ ID NO: 608240 - DNA, 558 bp, Homo sapiens
agaaatatgccataggaatttaatttgcctatggcaagatcggtttccttatacattgttttgcttaaactcccagtttccaagaacctattgacaatgttaagtgaggattgtctatacatttacagtatattatccttgatgtacttgtaaagtaccaccttaataaataatttaagatgatcatacttaggggtaatatatttatccctattaaacaccttctgttgagctatctcggggaaacgttggtttagtagaaaaaacactggactctgtcaaagactggcttcaattcccagttttggaatgccaagaccccaggaaagacattcagtataggcctcagtttcyttctgtaaattaggaataagaatgtaaaccatttcccagttgctgtgaatgattatttattaaccgaatatttgttcaaggtcttaatttgtattgcaatttaaaaattaataaaattttattgtatgaatacaaggaatattatgcactcactttgtgcaaggcattctgctggatacagagttcaattatcttgcttttgtc

SEQ ID NO: 608241 - DNA, 640 bp, Homo sapiens
atttattaaccgaatatttgttcaaggtcttaatttgtattgcaatttaaaaattaataaaattttattgtatgaatacaaggaatattatgcactcactttgtgcaaggcattctgctggatacagagttcaattatcttgcttttgtccaattttgtttgtgaaaataagctttggatcattgggcagatggtcctaagattttcttccttcagttgtctttcaacaactttttattgagcatttctgtgcttggcactgtttctagtttctggtgacacagacgtcaacatgactaacaatgtccatgctctcagcaacacatttatcttcaactgcttgaawttaacagtaaaacaatcagaaaacatgagtaaaaatcaaaaggcaaaaaataaggtaactaaaaaaggaggataaagggggaaagattagctattctgaaaacattttctgtttaacttcctttctagtaatttcttacaattgaaatcactcacatttcaaatataaagcaattatagaacattatgaatattggacaagttcataatgcagttaaatgaataaacttctatttggaaaactcatatgtaatacaatactgctaactaatttgtttttgacaaacaaaataat

SEQ ID NO: 608242 - DNA, 640 bp, Homo sapiens
atttattaaccgaatatttgttcaaggtcttaatttgtattgcaatttaaaaattaataaaattttattgtatgaatacaaggaatattatgcactcactttgtgcaaggcattctgctggatacagagttcaattatcttgcttttgtccaattttgtttgtgaaaataagctttggatcattgggcagatggtcctaagattttcttccttcagttgtctttcaacaactttttattgagcatttctgtgcttggcactgtttctagtttctggtgacacagacgtcaacatgactaacaatgtccatgctctcagcaacacatttatcttcaactgcttgaatttaacagtaaaacaatcagaaaacatgagtaaaaatcaaaaggcaaaaaataaggtaactaaaaaaggaggataaagggggaaagattagctattctgaaaacattttctgtttaacttcctttctagtaatttcttacaattgaaatcactcacatttcaaatataaagcaattatagaacattatgaatattggacaagttmataatgcagttaaatgaataaacttctatttggaaaactcatatgtaatacaatactgctaactaatttgtttttgacaaacaaaataat

SEQ ID NO: 608243 - DNA, 609 bp, Homo sapiens
ttatctcacagttatatttttagtctaatagtgccaaagaacttgtggttccttgaatgttttacatctttgtgcttataactttttgagtatcatatgctttcagaaactgtaatcactcagaaaattatatttttacccttcaaaacacaatggataaggcaccttaatttcaggacttaaaaaaaaaatcgcaaatgattcttactatttatgtgctatcacgtaaactgttctaatattgtatatagctcactgtattttaattactcgatttcactcaactttttgaaatttcaaaaaaaggtaaaaaggaaattaaaaattctcccaaatattactattttcattttgacatatataaagtacaaattattcttcccatttcagccctttgatttggtatatatctctttctatactttttttttctcatggaaaaatgatataggcacagatayataacaaaataggatagtatcatacagtttttaaatcagatttaaaaatacatactcttaattcacttctgtggtacctacatatctttattttgtaaaatagtgacactgtatttcctggtggagatgtttataataaattatttaa

SEQ ID NO: 608244 - DNA, 609 bp, Homo sapiens
ttatctcacagttatatttttagtctaatagtgccaaagaacttgtggttccttgaatgttttacatctttgtgcttataactttttgagtatcatatgctttcagaaactgtaatcactcagaaaattatatttttacccttcaaaacacaatggataaggcaccttaatttcaggacttaaaaaaaaaatcgcaaatgattcttactatttatgtgctatcacgtaaactgttctaatattgtatatagctcactgtattttaattactcgatttcactcaactttttgaaatttcaaaaaaaggtaaaaaggaaattaaaaattctcccaaatattactattttcattttgacatatataaagtacaaattattcttcccatttcagccctttgatttggtatatatctctttctatactttttttttctcatggaaaaatgatataggcacagatatataacaaaataggatagtatcatacagtttttaaatcagatttaaaaatacatactcttaattcacttctgtggtacctacatatctttattttgtaaaatagtgamactgtatttcctggtggagatgtttataataaattatttaa

SEQ ID NO: 608245 - DNA, 584 bp, Homo sapiens
ttcttaaatgtatggactgaaaaactgagtaagatgaataatattttacatttctgtaaaaatgtaggattatcataatgactaatatcagtgtgttcatacattgatggcctcactgactgtcctgcttgtctttatatttagtggttccaaactgatttgctctttgaagttaagtgtctattaattgggcttttctgttccatagtctccctactagtagttagcagtgtggaactctgaatgtgtagaaacaccccctcaccaagctttcattttgtttttggtacacattttctgtgagctaggactactggtagtaagtttatcagatcaatatctaaaaaagaataaatagattccaaagagagctagaatgtttctaaatatgagcccttgattccatgatacatgatgcatttttgaagagaattgcccgggttgctttgtgtgaaaggtgtgtgcctccccagtctctccagcatgctaactgaaactcataaaggaagtatgtcctagtagaaacaggacacatcttggaggaagaytgttttgagaactcattgttccaaagggtgtgatct

SEQ ID NO: 608246 - DNA, 358 bp, Homo sapiens
tgtcactatcaatgcaggaaatcaagcacctgagaacaaatgtagtttgcaaaactagaggcagttagtatatggcagaccctagacctcctgtaacattctgtgaaactttgttatgagtagagaaaaacaaagtttaaggtacaatgctcagaccaggaagaaactgatattttgaatgtttccttactagccctacaktgatttactctagtaaccctgtgttcacattaaaatatttaattatttctgcaagaatggacttacacagcttactatttaaacaagggtgccatattctgtaacagaatgtcaaaaggaggttttcatgtggtcatggaaaggggataaagtctca

SEQ ID NO: 608247 - DNA, 358 bp, Homo sapiens
tgtcactatcaatgcaggaaatcaagcacctgagaacaaatgtagtttgcaaaactagaggcagttagtatatggcagaccctagacctcctgtaacattctgtgaaactttgttatgagtagagaaaaacaaagtttaaggtacaatgctcagaccaggaagaaactgatattttgaatgtttccttactagccctacagtgatttactctagtaaccctgtgttcacattaaaatatttaattatttctgcaagaatggacttacacagcttactrtttaaacaagggtgccatattctgtaacagaatgtcaaaaggaggttttcatgtggtcatggaaaggggataaagtctca

SEQ ID NO: 608248 - DNA, 589 bp, Homo sapiens
cactgcaaaactcagcctaacatgttaacggtgccatcatccccaataatttcatgaactctaacagttctgtcttaaatatccactcttttgatacaccacataccatacgtccagcctgttgacttcagtattctcaattcatcaatcatcaatcccacccttaactgcttccccagcttcacttccctatatatcaaggttttctggagctttatgtgggattgtaatttaattgatactttgtrgcagctgtatttaagcatggagtacatgaataacaaagaaaataagggatcagggactatgtagaatccttaacataggttttaaactttgaaggcattcatgtattttctggatttaaattattttaacttggatttctgatcctatgcccattttttccgaacagatttctttcattttcatacatgcggtataaacatccttttttttcaatcaataaaaatgacctgccatatgccatcataaagcttctcaggctttatttttattagtttacattacatccttacttagtgggatctggaaaaccctgaaaatccaattatatcagttagccaaa

SEQ ID NO: 608249 - DNA, 589 bp, Homo sapiens
cactgcaaaactcagcctaacatgttaacggtgccatcatccccaataatttcatgaactctaacagttctgtcttaaatatccactcttttgatacaccacataccatacgtccagcctgttgacttcagtattctcaattcatcaatcatcaatcccacccttaactgcttccccagcttcacttccctatatatcaaggttttctggagctttatgtgggattgtaatttaattgatactttgtagcagctgtatttaagcatggagtacatgaataacaaagaaaataagggatcagggactatgtagaatccttaacataggttttaaactttgaaggcattcatgtattttctggatttaaattattttaacttggatttctgatcctatgcccawtttttccgaacagatttctttcattttcatacatgcggtataaacatccttttttttcaatcaataaaaatgacctgccatatgccatcataaagcttctcaggctttatttttattagtttacattacatccttacttagtgggatctggaaaaccctgaaaatccaattatatcagttagccaaa

SEQ ID NO: 608250 - DNA, 558 bp, Homo sapiens
gccatctgaccatcccctcaatgctaatccataagaaaagaaaagtgacagtaggaaaacatcaggataaacacacataaataaattctyagccagttctgacttctgcttatctggaccaagcagggtattacataagaggagccacacagaagaaatgtaagggacaactctttgaattgtagttggagagatactgatcacaggtaccactctgttactcacactccttttattggcctccgtagcatctgttcaaagaaagtatcatatttaccaaaatttagtgatctcatgaaacttgaagactttaggaattctgccatagaactccaatgactaggaggccatatcaggcagccttctattgtttgcagtggcaaaactatagtcaacaatttattgtacattttaaaataactaaaatacttagactgtttgtaatacaaaaaaggttaaatgcttgaagtgatgcttgcccaatttaccccgaagtgattattacatatcatatgcctgtatcaaaatatctcatgtaccccataaatatgtgcacct

SEQ ID NO: 608251 - DNA, 381 bp, Homo sapiens
gaatataatagtgaataaaacagattaattttttacttttcgaacttattcttagaaaagtatgtggatggagagacaagtaaaaattycaagtggggataaatggtagaaacaaaaataaatcatgatatggagctagaaagtaaggggataggatgcggaagctacttcagatagggtagtcatggacagccctttgaaatggtgatattttaacagggactgcaataaaatgagagtgaaacatgcatgcattggaagacattatattccataaagagaggacagtaagctcaaagaccttaaggtggaagtagctcaaagattttgaaggacaactgtgttttgcaagagacaagtgtcccagcagcctgggagagt

SEQ ID NO: 608252 - DNA, 481 bp, Homo sapiens
ttctattaatgctaatgtggaaaatttaaaaacacaagactgtcagggtgtggtggctcacacctgtaatcccagcattttgggaggctaaggcaggcagatcatgaggtcaagggatcaagaccatcctggccaacatggtgaaaccccatccttactaaaaatacaaaaattaactatgcttggtggtgcgtgcctgtagtcccagctactcaggaggttgaggcaagaggatcacttgaacttgggaggcggaggttgcagtgagctgagattacgccacygcactccagcctggcaacagagtgagactccatctcaaaaaacaataatcataataataaaacacaagaccttttatttttgtacaattgttattattagcaaaagacaataaagcaaaagctaaagtgatttgcaatgacatctgagctcatgcaaaagctcaagagagttttcagaacatgatgtcagttcccta

SEQ ID NO: 608253 - DNA, 481 bp, Homo sapiens
ttctattaatgctaatgtggaaaatttaaaaacacaagactgtcagggtgtggtggctcacacctgtaatcccagcattttgggaggctaaggcaggcagatcatgaggtcaagggatcaagaccatcctggccaacatggtgaaaccccatccttactaaaaatacaaaaattaactatgcttggtggtgcgtgcctgtagtcccagctactcaggaggttgaggcaagaggatcacttgaacttgggaggcggaggttgcagtgagctgagattacgccactgcactccagcctggyaacagagtgagactccatctcaaaaaacaataatcataataataaaacacaagaccttttatttttgtacaattgttattattagcaaaagacaataaagcaaaagctaaagtgatttgcaatgacatctgagctcatgcaaaagctcaagagagttttcagaacatgatgtcagttcccta

SEQ ID NO: 608254 - DNA, 594 bp, Homo sapiens
acttgaaaataaatttacttgaaaataaacagkactttttcttgttgttttgatttcttcttagtcacaatgtttcctttatttttaaatttaaaataacattaaaatatctctggaccacagacttatcttgtttaatacagtattcccaattcccagcaccatgactagatactgtaagtatcctgcaactatctattgaattaatcaatggatgatgatttttacactatcaaaataggcctgaagcaataactccacagctggtcagtctgagtccatctctaatctccatactcattagctatggccagtgacctcttatgcatcagttttcacatttgtaaacagggataataataatatcttttaagtatgttatgagatttacagggataaggtgtgtaaagtgtttgttctaataataagtgcagaataaatgttagcaattgtcattatattaaaacagcaaaaaaaaactaggtataaaaatgaaggtgatgtgatactcttaccaaaacaaaggaaattcccctccctgaacaggctttggtgagatatttatatatatttagaaaattaaaacaattaaaa

SEQ ID NO: 608255 - DNA, 594 bp, Homo sapiens
acttgaaaataaatttacttgaaaataaacaggactttttcttgttgttttgatttcttcttagtcacaatgtttcctttatttttaaatttaaaataacattaaaatatctctggaccacagacttatcttgtttaatacagtattcccaatycccagcaccatgactagatactgtaagtatcctgcaactatctattgaattaatcaatggatgatgatttttacactatcaaaataggcctgaagcaataactccacagctggtcagtctgagtccatctctaatctccatactcattagctatggccagtgacctcttatgcatcagttttcacatttgtaaacagggataataataatatcttttaagtatgttatgagatttacagggataaggtgtgtaaagtgtttgttctaataataagtgcagaataaatgttagcaattgtcattatattaaaacagcaaaaaaaaactaggtataaaaatgaaggtgatgtgatactcttaccaaaacaaaggaaattcccctccctgaacaggctttggtgagatatttatatatatttagaaaattaaaacaattaaaa

SEQ ID NO: 608256 - DNA, 610 bp, Homo sapiens
aatggtaattggtaaagcctcaaacagtcttcatcctaaatacacatacacacagacacacacactaacataaatcaattttgtgacttcctggcaaataaaactgagtttctattttttatccattaaattgatgaaacagccaggcatggaaatgcacctgtagtcccaactacatgggaggcttaggcaggaggactgctgaaagccaggggttgaaggctgcagtgtactatgatcatgcctgtaaagagagttactgcactccagtctgggagacccttgtctctaaaacaaaatgtaaaattcaaaaaatttaaaatttacgtcttgtgagatagaatgaattttgcatcttcatataccattcaagggagtataaaattacaatgctgcttgattattttgacaatatgtctccagcaatgatgagtttacagaaccttggatagatagaacatatgacattactatcttaagctgaatttaatttgtttccatgctcccttttctgctgttggtaggaaccatttacacttgtcacttcaagttcccacatttacttctggtttttaagttgttttckatgaactaaatatttaattatatt

SEQ ID NO: 608257 - DNA, 477 bp, Homo sapiens
  misc_feature 360: n = A,T,C or G
tacctatcttaagcaatattgtgtaagcttttcttctatctctagtttgaatttatattgagttagtctaacagccaacaacttatcttccttaggaagtgatgtagggatgcaaaatgtgagtawctttactttcgctactgtcagataagattagctaattgaggcatcagcaaatgtaatgtggtcccaatatagatcctgttccttttcattgaaaactggtaaaaactggatttctggataatagaattgtcaatgaaatttcaacagcagtagtgacagaaagtttgctgttctcctattgaagtaacagagtagcctagtagcacatagtatgtaaaaaaggagaaagtacantaaagaacataacatcaatgaaataaaattatctgcaaatgaaacctctgttttgtctagaagaaatcttgagactaaaaatataggttcttttatagatatcaagttgggtattta

SEQ ID NO: 608258 - DNA, 634 bp, Homo sapiens
gtgcataaactaggagggtaagcacataaataaataacttcacagcagtaggaaaaatgctattagaagactcaacatgctaaggtagcatctataactgatgtctgtctacgagcttctacatagattccattctattgtttactgttgaggtatagtggatacacatcaattaattaaatgtaacttctctggcctcattatggttggctgtatatggtgaactccatgtcttgtaggttttactcctgttctcaggtaatgggctctcaaaaaatgtaatgcaaggctttgatatgaccatttactttctttttttttttttcttttttagacagagtctctctctgtcccccaggctggagtgcagtggcaggatcttggctcactgcaagctccacctcctgggttcacatcattctcctgcctcagcctcccaagtagctgggactataggcgcctgccaccacgcccggctaattttttgtatttttagtagagatggggtttcatcatgttggcctggatggtctcgatctcctgaccttgtgatccgcctgcctcggyatcccaaagtgctgggattacaggtgtgagccactgcactccaccctcatttactttcaacttttat

SEQ ID NO: 608259 - DNA, 634 bp, Homo sapiens
gtgcataaactaggagggtaagcacataaataaataacttcacagcagtaggaaaaatgctattagaagactcaacatgctaaggtagcatctataactgatgtctgtctacgagcttctacatagattccattctattgtttactgttgaggtatagtggatacacatcaattaattaaatgtaacttctctggcctcattatggttggctgtatatggtgaactccatgtcttgtaggttttactcctgttctcaggtaatgggctctcaaaaaatgtaatgcaaggctttgatatgaccatttactttctttttttttttttcttttttagacagagtctctctctgtcccccaggctggagtgcagtggcaggatcttggctcactgcaagctccacctcctgggttcacatcattctcctgcctcagcctcccaagtagctgggactataggcgcctgccaccacgcccggctaattttttgtatttttagtagagatggggtttcatcatgttggcctggatggtctcgatctcctgaccttgtgatccgcctgcctcggcmtcccaaagtgctgggattacaggtgtgagccactgcactccaccctcatttactttcaacttttat

SEQ ID NO: 608260 - DNA, 618 bp, Homo sapiens
gattgtttcaattgagtagtgagattgggaagtagattgtaagatgctatagagtaaatgaacagtaagaaattaaatgaagggtgaatagaccaatgtttttgtgtgtgcaaaagtggaagtccattttttttaaaatgaaatcttgtgtgaattcctgaaacagataagaagttagatttttaatccctcctttccttacttgggtatcctggagatctcagactcaatgcctctgcaatataatttgcaaattaaaggtggaccttcttttgagatgtttaacaggctaagaaaggaaagaaatagtaaaaagaggagcactggggatgcacagtaactgctcaactggaaaagtaaggagagcttgagggatcttttgtgacacggaattgtctcaagagaaggcttcccattggaggcascttaatgtagactcttaccctagccagatgtgtcctttttactgctcttaaagctaatcccacccagactctattctcaattcttgatctaagcttgaaagcatgcagtgaatggtggccccagagggccttacctaacttactctcaaaactttctgtccctgtcactacccccaccttcaacctatgtcat

SEQ ID NO: 608261 - DNA, 577 bp, Homo sapiens
  misc_feature 329, 330, 331, 332, 333, 334, 335, 336, 337, 338, 339, 340,341, 342, 343, 344, 345, 346, 347, 348, 349, 350, 351, 352,353, 354, 355, 356, 357, 358, 359, 360, 361, 362, 363, 364,365, 366, 367, 368, 369, 370, 371, 372, 373, 374, 375: n = A,T,C or G
  misc_feature 376, 377, 378, 379, 380, 381, 382, 383, 384, 385, 386, 387,388, 389, 390, 391, 392, 393, 394, 395, 396, 397, 398, 399,400, 401, 402, 403, 404, 405, 406, 407, 408, 409, 410, 411,412, 413, 414, 415, 416, 417, 418, 419, 420, 421, 422: n = A,T,C or G
  misc_feature 423, 424, 425, 426, 427, 428: n = A,T,C or G
gcactggggatgcacagtaactgctcaactggaaaagtaaggagagcttgagggatcttttgtgacacggaattgtctcaagagaaggcttcccattggaggcagcttaatgtagactcttaccctagccagatgtgtcctttttactgctcttaaagctaatcccacccagactctattctcaattcttgatctaagcttgaaagcatgcagtgaatggtggccccagagggccttacctaacttactctcaaaactttctgtccctgtcactacccccaccttcaacctatgtcatagttaccttggagcttgattgttcagagttnnnnnnnnnnnnnnnnnnnnnnnnnnnnnnnnnnnnnnnnnnnnnnnnnnnnnnnnnnnnnnnnnnnnnnnnnnnnnnnnnnnnnnnnnnnnnnnnnnnnaaacatctcaaaagaagggtccacctttagttggcaaattaygttgcataggcactgagtctaagacctccaggctacccaggtgaggaaaggagggattaaaaatcccacttcttgtctgtttcaggattttacataagatttcatta

SEQ ID NO: 608262 - DNA, 577 bp, Homo sapiens
  misc_feature 329, 330, 331, 332, 333, 334, 335, 336, 337, 338, 339, 340,341, 342, 343, 344, 345, 346, 347, 348, 349, 350, 351, 352,353, 354, 355, 356, 357, 358, 359, 360, 361, 362, 363, 364,365, 366, 367, 368, 369, 370, 371, 372, 373, 374, 375: n = A,T,C or G
  misc_feature 376, 377, 378, 379, 380, 381, 382, 383, 384, 385, 386, 387,388, 389, 390, 391, 392, 393, 394, 395, 396, 397, 398, 399,400, 401, 402, 403, 404, 405, 406, 407, 408, 409, 410, 411,412, 413, 414, 415, 416, 417, 418, 419, 420, 421, 422: n = A,T,C or G
  misc_feature 423, 424, 425, 426, 427, 428: n = A,T,C or G
gcactggggatgcacagtaactgctcaactggaaaagtaaggagagcttgagggatcttttgtgacacggaattgtctcaagagaaggcttcccattggaggcagcttaatgtagactcttaccctagccagatgtgtcctttttactgctcttaaagctaatcccacccagactctattctcaattcttgatctaagcttgaaagcatgcagtgaatggtggccccagagggccttacctaacttactctcaaaactttctgtccctgtcactacccccaccttcaacctatgtcatagttaccttggagcttgattgttcagagttnnnnnnnnnnnnnnnnnnnnnnnnnnnnnnnnnnnnnnnnnnnnnnnnnnnnnnnnnnnnnnnnnnnnnnnnnnnnnnnnnnnnnnnnnnnnnnnnnnnnaaacatctcaaaagaagggtccacctttagttggcaaattacgttgcataggcactgagtctaagacctccaggctacccaggtgaggaraggagggattaaaaatcccacttcttgtctgtttcaggattttacataagatttcatta

SEQ ID NO: 608263 - DNA, 574 bp, Homo sapiens
gatacattcaagcatggccatgtgtgatccatctttaaaggtacagtcattatgcagggaggttgcaatttatttattcctcattcattctctcatcttttgagaggagtcattatgtaaatattgagcacattcataaaatgaaaaacaaaaacaacactagcacttttttaaaaaataaaagctgttgaaaataagatagcatctgcagcagaatgaagtgaatatagaccctattgtgcacattgtgttagtatattttctttagacaataggaaatggtaattgaaggtaaaatgtgcaatttctgattgtaagagctgtggtatacygcaatgattgaggaagcaaaatacacatagttccttcactagggatctggcacaggattaataactcagtcctgaaatatgtataattatatgatttctcaaggcttgtttcacacatctgactagaggtagacatgactacatatatagatgtaattaaacatattaaacatatggattattgtgttattataagactagcgaaatttgaatgtgtttactcatacacaaaattattgaac

SEQ ID NO: 608264 - DNA, 586 bp, Homo sapiens
tatcacatcttcatcttttatctatgtatttttaattttcacacatatgtttgaggctaattttctcctgttatattctaatagaaaatattcttgaaagcaaaattgctgaatgcttttgtattgactctttcatcatattactcaattctctgtttatttctttatatccaccaatactgcaacatagacatctacttttgccaaaagttaagtctacagtaacagctstacctttctggaaaacagaaatgtggtttaattgttgcattgcatttcatttcatgctggctgaatttgatggcctccataaaactatttgtacacactcccgtgaaagtagaccagaaggaaactcaaacctatactttatctgcagactagccatatcatagaaagggataggccttcccaattgtttaataaagtttttattttctctcattttctattttaaaacttttaagatcctattttcagtcctccctactgcctttttctaggcatctaaataggtatacaaagcattgtaaaaactgtttaacttacactcggtaaacaaatagtaaccagattatagggtaaa

SEQ ID NO: 608265 - DNA, 588 bp, Homo sapiens
gttctgggtcaaattttgatgttgagctttatttcttttatgttttttgttgcaagttacttctaattacccaaaatttttagacaaggtgtttttctcttaatcactcataaattgttcatacttctgaatgtgaaatacaatatattgtrttctccataacgtgctaatgaactgttatcttttctctgcatagaatctttcttgtttattctatcttaaaataaactacagaaaattctatttcaagtcatactacaagcaattatattcataaattctcatatttctaaatgttagatatgtccaaatttacattgttattttgaccaaaaattattaatgtgcctttgtccagagccttctccaacccccagtaatgtatgtgggaagtcgcccaaaggccaggattcttgagataaaagtcatcatcatgatagatagtgtgcctttgacatcagaccctagtgtccaggggccattggcagcaaggggagggtgtttgtcatcagtctggaatgctttgcggggaagggtgggaaaagggtccaagataatgggtgaaaagagagttattcaaagttattc

SEQ ID NO: 608266 - DNA, 560 bp, Homo sapiens
caggtgtaattctacttgccggtaagtatatcctrcaactatgataaaaatttcagacttgtacaataaaagaaagtatgggtttttatatttccttctcctctcccactaaaacttttaatatagaacctacatgtatatagcctgggaattttaaaaatttattgaaatttttctcaatttactaatatttttatagaaacttcagccagtgtgtatatgtatatgtatttgtttgctgttggtagtttattgattgttttaaaaactcataaatctattagtctttgtattatgtttacaatagagatagaacatttatacttctatgaaaaactgcaacatcaatggtttggaaaatactgttttctgcaagttggcaaactataggcacttcaataggataacatttccttttccacttgcttctactataataactggtctagttcttcaaagaacaaatgaacagggatcataacgtaagagcccagtttaatacttggttaagtcaagtaaaggaaacatatttgtctaaagtaatttgggtaattctttaa

SEQ ID NO: 608267 - DNA, 560 bp, Homo sapiens
caggtgtaattctacttgccggtaagtatatcctgcaactatgataaaaatttcagacttgtacaataaaagaaagtatgggtttttatatttccttctcctctcccactaaaacttttaatatagaacctacatgtatatagcctgggaattttaaaaatttattgaaatttttctcaatttactaatatttttatagaaacttcagccagtgtgtatatgtatatgtatttgtttgctgttggtagtttattgattgttttaaaaactcataaatctattagtctttgtattatgtttacaatagagatagaacatttatacttctatgaaaaaytgcaacatcaatggtttggaaaatactgttttctgcaagttggcaaactataggcacttcaataggataacatttccttttccacttgcttctactataataactggtctagttcttcaaagaacaaatgaacagggatcataacgtaagagcccagtttaatacttggttaagtcaagtaaaggaaacatatttgtctaaagtaatttgggtaattctttaa

SEQ ID NO: 608268 - DNA, 444 bp, Homo sapiens
atttttctcttgctcagctgatgaccttggctgcagtgaccagtgtagtctcaccttgaatactgccttcacgttttcatcctgtctccctatctgcctgagctaatctgtttcagggttctctttgttcactacatcctgagaattaatgtttatcctagtttggtgatttctagcagggaaaaatggtctctttacaaaatcttgttaatgatatttcacttcagggaccaagacctgttttactgcagtttttgcctttgccttcttcaaatcattatcttttgctcccaactgatagcaaagagccaaacgcccaggtttaatttgcaatgtccttgcttaattcaaacttgccgctatactctcagagyagcccaatttatcttttgaaaacactttccactgtaaaatactttcaactcttttctgttctcttgctgt

SEQ ID NO: 608269 - DNA, 414 bp, Homo sapiens
catttcaacatgagatttggaggggacaaacatccaaactatgtcccctccaaacacatatcaaggactactttggttatctcagtatcatcttattagtttctgctgccaccataagacaaaattcaaatagtataaaagttagaggggaattgccattcttccctctgtgtttattcattcactttaatttgaggagtttatttaaataaaaacatggagtttttcaatggcaagaaaaccatggtgataggattctattaacactggccaagaaaacatcacaggacagccacggttttctggcttaccaggctgtaatcaaatgaagatgtgaagagtgaagatctccsaaggagggtgctttacttcaactagaaaagcaaattgtgctctccataattgtttttgagt

SEQ ID NO: 608270 - DNA, 567 bp, Homo sapiens
aactagaaaagcaaattgtgctctccataattgtttttgagttagaagaggctttgatgtttttcacttttccttctatgaaagaaaacacattatgacttttaagttatacaaacaaaactttttttttaaatgcatattcatgccccaagccaacttttcctaattagtcagatggagaactaatggagttgttggaaagctgattgaatacttaagagcmcaggaataacatcaatcaccatttggagaaaagagaatgtgtttagcgataggttggtaaactgagaaggctcaagttgtagcctggagggaaattgtaggactgctccaactctaatccccaaattccctctcttcattggttaaaggaggctgccagtggtcgagttctgttattacctctgtttagttgtcctccaaagtcccctaacctcagttattctgaagtagtaataataacatctctggtcatatcttagaggtgaaacaatttcttgcagcaggttgggccttcatttactatttctttaattcatccatctaacaagcaatttccatgtatat

SEQ ID NO: 608271 - DNA, 462 bp, Homo sapiens
tgttaattataaagcaaaatagcagcgactgagatatttagttcaaatataagcacaatatgaacactggcagtgttaayaactggtaagatttcaaaatccctcctagttgtgcttcattactccaggtataaatatttactcaacttgagataaaatttttctcacaaatgattaataatatacatagggtttttttttttgtctgaatgcagagctgaatatcggttttacttcatttcatgttttatatcagcacagccaaactttttctcaacaaaaaagcagcctgatttaagccacggttgcagatctttgccagactgccacaacttttattagagatgagtattttacatgcttaccatgatgcactcagttgggggctctttattgttatcatttcaattcaataacaaaaaaaataagaaaaaatggagccctggataaaatttcaattac

SEQ ID NO: 608272 - DNA, 462 bp, Homo sapiens
tgttaattataaagcaaaatagcagcgactgagatatttagttcaaatataagcacaatatgaacactggcagtgttaataactggtaagatttcaaaatccctcctagttgtgcttcattactccaggtataaatatttactcaacttgagataaaatttttctcamaaatgattaataatatacatagggtttttttttttgtctgaatgcagagctgaatatcggttttacttcatttcatgttttatatcagcacagccaaactttttctcaacaaaaaagcagcctgatttaagccacggttgcagatctttgccagactgccacaacttttattagagatgagtattttacatgcttaccatgatgcactcagttgggggctctttattgttatcatttcaattcaataacaaaaaaaataagaaaaaatggagccctggataaaatttcaattac

SEQ ID NO: 608273 - DNA, 462 bp, Homo sapiens
tgttaattataaagcaaaatagcagcgactgagatatttagttcaaatataagcacaatatgaacactggcagtgttaataactggtaagatttcaaaatccctcctagttgtgcttcattactccaggtataaatatttactcaacttgagataaaatttttctcacaaatgattaataatatacatagggtttttttttttgtctgaatgcagagctgaatatcggttttacttcatttcatgttttatatcagcacagccaaactttttctcaacaaaaaagcagyctgatttaagccacggttgcagatctttgccagactgccacaacttttattagagatgagtattttacatgcttaccatgatgcactcagttgggggctctttattgttatcatttcaattcaataacaaaaaaaataagaaaaaatggagccctggataaaatttcaattac

SEQ ID NO: 608274 - DNA, 583 bp, Homo sapiens
tagatactttcttttcctagaacattcattaaattaaaactgctgagacttctggtttccagttcyacttataagtcatcactctgttctaacaacagcaaaaagtgaaatgactgataagtcaacttttattagatcaataaaagaggtgatggaaaacagttgtcttcactgttttggagattggagagacagacaagtgaatatattgggtcacagatttccagagcagagtctcaccagtgaaaaccttggcaggaatgagtactggggttgtaaacctgaaatatagttgataaattggtgggggcacaaagtggacaagtctcagaattaaaaactccaggggaacccacaaaatggagctcacacttttgtgagatttacctccaggaactctacccacttctcttagtaaatatcagagaaaagtctcctcatcgttctggtgtggggataggaaaagaaaccacttcagaatatgccagagcattctgttagaaaggtttgcactcagaagaaactctttaaccagagcttatcctcttgggttttatcagaacctaggggaagggaaatgccc

SEQ ID NO: 608275 - DNA, 563 bp, Homo sapiens
tatcagaacctaggggaagggaaatgcccaatttcagccacttgtatcctcttacatggaggaagggaaatacagaatctcagcccactctaaccatccacaaaggagaaggaaaataccaatctttggcctactctagtcttccttttctatttatggggtggtggtgctgagaagcacttctgaagttcacttctgatgtctggaggcataggcttaaaaaaagactgagactgaatcacaggactgtagaatgcttcctgttcctgacaccttactactgcattattgaagacccgtttacagcagtccttttactacaacatgctactagctacatcatgtccagttatcaagaaagaattgcaaggcataccaaaaggcaaaaaagagaaacaaacccacaatttgaagaggcagagcaagcagacatgacagggatattggaattttcagactgggaattttaacaaayatgattaataggctaagggctcttaatggatacataaagtagacaacatgaaagaacagatgggcaatttaaacagagatagaaatcc

SEQ ID NO: 608276 - DNA, 562 bp, Homo sapiens
tttgtttactaattaaggtcacaatcaggaaatagttacatattacacatttccatagtaaagttatatgaaaatgataattatgtagtttgttttcamggaaaccataatggtatatagtgatgaaaacaggtgaaattgtggaaagtaacccttcattcaaagactgtgttcataatataagccaaaaatgaacattaagtaagtgaatgcaatcaaaacctagagtatctattcctggttcctgaaatctgactgaatctaatttttaaaaaagagatgggaatctctctatgtcacccagactggtcttgagctcctggcctcaagtgatcttccagcatgtacaagaaagcatgtatagcggaattgccttttataaaaccaacggatctcatgagacttattcactatcatgagaacagcatgggaaaaacctaccctcatgattcagttatctcccactgggtccttcccatgacacatgggtatttttggagctccaattcaagatgagatttgggtggagacacagtcagacgataccaccttcctgtatagc

SEQ ID NO: 608277 - DNA, 562 bp, Homo sapiens
tttgtttactaattaaggtcacaatcaggaaatagttacatattacacatttccatagtaaagttatatgaaaatgataattatgtagtttgttttcaaggaaaccataatggtatatartgatgaaaacaggtgaaattgtggaaagtaacccttcattcaaagactgtgttcataatataagccaaaaatgaacattaagtaagtgaatgcaatcaaaacctagagtatctattcctggttcctgaaatctgactgaatctaatttttaaaaaagagatgggaatctctctatgtcacccagactggtcttgagctcctggcctcaagtgatcttccagcatgtacaagaaagcatgtatagcggaattgccttttataaaaccaacggatctcatgagacttattcactatcatgagaacagcatgggaaaaacctaccctcatgattcagttatctcccactgggtccttcccatgacacatgggtatttttggagctccaattcaagatgagatttgggtggagacacagtcagacgataccaccttcctgtatagc

SEQ ID NO: 608278 - DNA, 562 bp, Homo sapiens
tttgtttactaattaaggtcacaatcaggaaatagttacatattacacatttccatagtaaagttatatgaaaatgataattatgtagtttgttttcaaggaaaccataatggtatatagtgatgaaaacaggtgaaattgtggaaagtaacccttcattcaaagactrtgttcataatataagccaaaaatgaacattaagtaagtgaatgcaatcaaaacctagagtatctattcctggttcctgaaatctgactgaatctaatttttaaaaaagagatgggaatctctctatgtcacccagactggtcttgagctcctggcctcaagtgatcttccagcatgtacaagaaagcatgtatagcggaattgccttttataaaaccaacggatctcatgagacttattcactatcatgagaacagcatgggaaaaacctaccctcatgattcagttatctcccactgggtccttcccatgacacatgggtatttttggagctccaattcaagatgagatttgggtggagacacagtcagacgataccaccttcctgtatagc

SEQ ID NO: 608279 - DNA, 562 bp, Homo sapiens
tttgtttactaattaaggtcacaatcaggaaatagttacatattacacatttccatagtaaagttatatgaaaatgataattatgtagtttgttttcaaggaaaccataatggtatatagtgatgaaaacaggtgaaattgtggaaagtaacccttcattcaaagactgtgttcataatataagccaaaaatgaacattaagtaagtgaatgcaatcaaaacctagagtatctattcctggttcctgaaatctgactgaatctaatttttaaaaaagagatgggaatctctctatgtcacccagactggtcttgagctcctggcctcaagtgatcttccagcatgtacaagaaagcatgtatagcggaattgccttttataaaaccaacggatctcatgagacttattcactatcatgagaacagcatgggaaaaacctaccctcatgattcagttatctcccactgggtccttcccatgacacatgggtatttttggagctccaattcaagatgagatttgggtggagacacagtcaracgataccaccttcctgtatagc

SEQ ID NO: 608280 - DNA, 426 bp, Homo sapiens
aggagagaatattgaaagagaacaaagttggagactgacaataccagatttcaagacatattatcaagcacagtaatcaagacagtgtggtactgacgaaagaatgatagacaaatggattagtsgaacagaatacagagcctagaaattgacccacatgaatatagtcaactgattttgacaaaggagcaaaggaaatgcgatggtgcaaaatagtcttttcaagaaatgatgctggaacgactggatttacatgcaaaattttacaaagaaaatctagacacagactttacacccttcacaaaaatttgctcaaaatagaccatagacctaaatgtaaaacgcaaaattataaactcttagaagatagcttaggtaaaattctagctgaacttggttatggaaaaggctttttagatataccac

SEQ ID NO: 608281 - DNA, 426 bp, Homo sapiens
aggagagaatattgaaagagaacaaagttggagactgacaataccagatttcaagacatattatcaagcacagtaatcaagacagtgtggtactgacgaaagaatgatagacaaatggattagtggaacagaatacagagcctagaaattgacccacatgaatatagtcaactgattttgacaaaggagcaaaggaaatgcgatggtgcaaaatagtcttttcaagaaatgatgctggaacractggatttacatgcaaaattttacaaagaaaatctagacacagactttacacccttcacaaaaatttgctcaaaatagaccatagacctaaatgtaaaacgcaaaattataaactcttagaagatagcttaggtaaaattctagctgaacttggttatggaaaaggctttttagatataccac

SEQ ID NO: 608282 - DNA, 426 bp, Homo sapiens
aggagagaatattgaaagagaacaaagttggagactgacaataccagatttcaagacatattatcaagcacagtaatcaagacagtgtggtactgacgaaagaatgatagacaaatggattagtggaacagaatacagagcctagaaattgacccacatgaatatagtcaactgattttgacaaaggagcaaaggaaatgcgatggtgcaaaatagtcttttcaagaaatgatgctggaacgactggatttacatgcaaaattttacaaagaaaatctagacacagactttacacccttcacaaaartttgctcaaaatagaccatagacctaaatgtaaaacgcaaaattataaactcttagaagatagcttaggtaaaattctagctgaacttggttatggaaaaggctttttagatataccac

SEQ ID NO: 608283 - DNA, 537 bp, Homo sapiens
tgaaagataaacatataaaatatgctgcacattttagatcatcaggcaaatgcaaattaaaacaaccataaaataccaatatatacgtattagaatggtcgaaattcaaaacaccaaatgctggcaaggatgtggagcaacaggaactatcaataattgttgctgggaatgcaaaatggtactctggaagacagtttcttacagtttcttacaaagttaaatatactcttatatgttccagcaatcacagtacccaaatgaattcacatgaaaactggcacatggatatttacagcagctttatttgtaattgacaaaatctggaagcaaccaggttgctcttcagtaggtaaacacataaatgyggtacatcctacaatggaatattattcagcactgaagagaaatgagctgtcaagccatggaaagaacattacaggcatattattaaaagaaagaagccagtcttaaaaggttatataccatgtgattcccacaatatgagattctgtgaagggcagaattgtggtgacagta

SEQ ID NO: 608284 - DNA, 606 bp, Homo sapiens
gccctaattgtggatacatgttattatacatttgtgcagacctaaagaatgtacaatatcaacagtaaatcctaacgtaaactctggattttgcatgattatgatatgtcaatatagattcatcaattaaaagtagcacttagtgtgtgatgttgataatgggggagactatgcatgtgtgaaggcaggaggtatgtgggaaatctctgtatcttcctctccatttttgctgtaacctaaaactattcttaaaaaaataagtattaagtgatggcttgacataagctagatcatctcaaaatatttctagtcaaagaacaggtcatagaggtgaatccagaatatacatatatcatacrtatgtatcatatgtatttatattatatattatatacaatatatacattatgctatttgattacagcattctctttttccaatgtttctttatgcttgtcttgctggtaataaagacagtcctcagggcaaaatgttttattatgtcgtgatgtgttaattttggggaattgttttccagttatgaatatttactttgataaggtttccaataagaatgccttgtgtatttgagtaatcaaggatata

SEQ ID NO: 608285 - DNA, 530 bp, Homo sapiens
agtagtaatgagacaaaaacccattttgcacaattttagactaacattcgtaatttattccttaattcatcaagtattacagagaatttactatgtagctagaagtattctagtcattgatgctggcgattctttctaatggctagagcaagaactaaataagtaaacaaacatataaaactagatactggtaagattcaaaagagtgcataayactgaatgaattgggaagctactgtattctgggaggtcagagaatcataaccgatgagatgggatttaagctgagatctgactcacaaaagccagccatgcaaaaaatgggggaagagcattccaggcataagtaatactcatgcagaggtcctagcctgaaaatagtcttagagtgccagtgaacattttctgtaaaagagggggtggtattcaactggagaggagtagagtaagagaagtgactgatgatgaagggagatggaattgagttacctccttgaggagcaattaatagattgaagtaggatttatgc

SEQ ID NO: 608286 - DNA, 530 bp, Homo sapiens
agtagtaatgagacaaaaacccattttgcacaattttagactaacattcgtaatttattccttaattcatcaagtattacagagaatttactatgtagctagaagtattctagtcattgatgctggcgattctttctaatggctagagcaagaactaaataagtaaacaaacatataaaactagatactggtaagattcaaaagagtgcataacactgaatgaattgggaagctactgtattctgggaggtcagagaatcmtaaccgatgagatgggatttaagctgagatctgactcacaaaagccagccatgcaaaaaatgggggaagagcattccaggcataagtaatactcatgcagaggtcctagcctgaaaatagtcttagagtgccagtgaacattttctgtaaaagagggggtggtattcaactggagaggagtagagtaagagaagtgactgatgatgaagggagatggaattgagttacctccttgaggagcaattaatagattgaagtaggatttatgc

SEQ ID NO: 608287 - DNA, 511 bp, Homo sapiens
agggacataatgccaccagtctctttgctaaagcatagcargaatgacctttactccatttcccaataagttcctcacctccgtctgagactacctcaccctggactttattgtccatatcactatcagcattttggtcacaacaatttaacaaatgctaggaatttccaaactttccttgatcttcctctcttcctctgagtcctccaaactgttcctacctctgcccattacccagtcccaaacgtgcatccacattttcagatgtctttatagaaataccccactcccagtaccaatgttctgtattacttcattatcgcattactataaagaactacatgagactgggtaatttataaagaaaaaagctttatttggctcatggttctgtaggctgtacaggaaacatggctggggaggcactgggaaacttacaatcatggcagaaagcaaagaggaaggaggcacatcttacatggctgaagcaggaagagagggcagaggtgcc

SEQ ID NO: 608288 - DNA, 511 bp, Homo sapiens
agggacataatgccaccagtctctttgctaaagcatagcaggaatgacctttactccatttcccaataagttcctcacctccgtctgagactacctcaccctggactttattgtccatatcactatcagcattttggtcacaacaatttaacaaatgctaggaatttccaaactttccttgatcttcctctcttcctctgagtcctccaaactgttcctacctctgcccattacccagtcccaaacgtgcatccacattttcagrtgtctttatagaaataccccactcccagtaccaatgttctgtattacttcattatcgcattactataaagaactacatgagactgggtaatttataaagaaaaaagctttatttggctcatggttctgtaggctgtacaggaaacatggctggggaggcactgggaaacttacaatcatggcagaaagcaaagaggaaggaggcacatcttacatggctgaagcaggaagagagggcagaggtgcc

SEQ ID NO: 608289 - DNA, 511 bp, Homo sapiens
agggacataatgccaccagtctctttgctaaagcatagcaggaatgacctttactccatttcccaataagttcctcacctccgtctgagactacctcaccctggactttattgtccatatcactatcagcattttggtcacaacaatttaacaaatgctaggaatttccaaactttccttgatcttcctctcttcctctgagtcctccaaactgttcctacctctgcccattacccagtcccaaacgtgcatccacattttcagatgtctttatagaaataccccactcccagtaccaatgttctgtattacttcattatcgcattactataaagaactacrtgagactgggtaatttataaagaaaaaagctttatttggctcatggttctgtaggctgtacaggaaacatggctggggaggcactgggaaacttacaatcatggcagaaagcaaagaggaaggaggcacatcttacatggctgaagcaggaagagagggcagaggtgcc

SEQ ID NO: 608290 - DNA, 557 bp, Homo sapiens
ttttaaacaatcagatattgtgagaactcattcactatcacgagaacagcaaggaagaaatctgccaccatgattcaatcacctcccaccaggaccctcctccaaaacttgggattaaaatttgrcatgagattggggtagggacacaaattcaaaccatatcactcagtttttaataaggttgtttgttttttttcttgtaaatttgtgtcttataggtgctggatattagacctttgtcacatattttgcaaatattttctcccattctatatgttgtctgtttactctgttgatatttccttttgctgtgcagaagctcttaagtttaattagatcgcattttgtcaatttctgcttttgttgaaatttcttttggcatctttgccaaagaatttgtcatgaattattttccagttcctatgtccagaatggtattgcctagggtgccttctagcattttaaaatccttaacaaaatacttgaaaacccaaactgaatctagccgcacatcaaaaaatcgaatccatcataatcaagtaggctttatttctggg

SEQ ID NO: 608291 - DNA, 532 bp, Homo sapiens
tatccctttttcgttgttgtgtggagaccagctgggtcggggagaccctaacccagcggcactagaggaattaaagaccagcctgacttgctgattttttctacattaaatatagaggtgcaaagtgggaaatcaggggtctcacagccttcagagctgagagacccaaacagagatttacccacatatttattaacagcaagccagtcattagcattgtttctatagatattaaattaactaaaagtacccttacgggaaacaaagggatgggccgaattaaaggaatatgttgggctagttaactgcagcaggagcatgtccttaaggcacagatcgctcatgctattatttgtggcttaagaatgcctttaagcggttttccaccctgggcgggccaggtgttccttgccctcattccggtaaacccacaaccttccagcktgggctttatggccatcatgaacatgtcacagtgctgcagagattttgtttatggccagtttttggccagatattggggggctttttc

SEQ ID NO: 608292 - DNA, 430 bp, Homo sapiens
tggtagaacttattaaactatacttgactcccttttcattttcatgctaagtaatagggagtatatagagaagatttatattcgcatgggataattgtaagatgtcactaccattttattctccaaaaagagaagaagaatamatttatagttcccccaaaggaaataaattttatgcgcccaggccattctgacaccaacaggaggaaaaaaaaattaaaaataatgactacttttaaaaaagcaaccatttccttccttctctacttttaaatatgtaaaggtaatgaaaaaaaataatccatgattgtaactatgcctcaaagcactgctgctgatcaaggcgtgtggaattgtatgtggagaaaatatatttaagggtaaatctgcttcaactatattccctgttccaatatcattgtgcggaaca

SEQ ID NO: 608293 - DNA, 582 bp, Homo sapiens
caaactgacagattagtatgtaaagagcaacaaagccttcccaagaaagccctatgttggtcccaaggacgtcacttctaacctgtcatagagaaatgatggaggaaaagagctgaaagacaaggcycaggttgccaagtgccacccttccattgaaaaatggagtaccatctttcctatctccggggcctggtccatcagcagtttcttggttatcaactgtaattactagtaggggaaaacttgcaaaatttgccatctgtttctcaactccctaaaacatgatacactccactcactgcaacacactgaaatcactttgtgtattttcctaccttgaccttgtatttctgcaaaatttctctaaaatggatcttcagggaagcaggggacagtgtggggaggggagcggacaccagagtaggatgagctgaaagccataaaggctttcctgagccaactcgaaatggctctggaaaagcagaaatgacttaagacacaaacacactcacagttcgaacaagtgtctgctaacttccgcatctactgcactgagaggatcgtccaggagatagatgtcag

SEQ ID NO: 608294 - DNA, 420 bp, Homo sapiens
atgctcagttttcatcaactatccaccagktttatgaaaacctcagtgtacaatcaaacacttcatcttttctgaaaacaatcactctcttggtgaaatgatacacaatgaaaaataaattttaaaacagtttcctttaaataataaattgcactgtaaatttatccatgtaaccaaaaaccacccgtaccccaaaatctactgaaacaaattttcttttttaaagggagtggagaaggaaacctgtggtttgagagggacccaagcaggaaacatcagccaagtgcacggtgcagacatcttccggagtctgacgcaaaccaatgggtaatgagatactaaagcactgtaatctctgcctagccggttgatgatagcaagaaattctggtgattttttttcttgagtgagatgtaattt

SEQ ID NO: 608295 - DNA, 432 bp, Homo sapiens
tatgctcagttttcatcaactatccaccaggtttatgaaaacctcagtgtacaatcaaacacttcatcttttctgaaaacaatcactctcttggtgaaatgatacacaatgaaaaataaattttaaaacagtttcctttaaataataaattgcactgtaaatttatccatgtaaccaaaaaccacccgtaccccaaaatctactgaaacaaattttcttttttaargggagtggagaaggaaacctgtggtttgagagggacccaagcaggaaacatcagccaagtgcacggtgcagacatcttccggagtctgacgcaaaccaatgggtaatgagatactaaagcactgtaatctctgcctagccggttgatgatagcaagaaattctggtgattttttttcttgagtgagatgtaattttttttcaaaag

SEQ ID NO: 608296 - DNA, 622 bp, Homo sapiens
tagtacaatctaattagtcaattctaccaatacccatggaaagaacatgtaacacagtttgagagtaatctgttcaaaggggggccacatccccccaccatggctgaaagacccctcagccccagaccctgctatcaccagtttctttgcctgaaaaacaagccccaactgaactggtttatcgactgagaggggaacagagatgagcaagacatactggcagggcaacaggaagaaaaaggaaaatatggagagggtgacaagccagggagtgggtaaagaagggayagtgaggacatacatggggacaaatacatggtctagggttaggtcagagaagatcatcttaaggagaatataaatgcagtatacccccattgaagaggaagaaaaaaaccaaacttctgtcatctttttgttgtgtgtgtgtgacagggtcttgctctttttgctggagttaagtggcatgatcgcagctcactgcagcttccacctctggggtccaagcaatcctcctgtctcagcctcccaagtaagagactataggcatgtgccaccacacttggcttttttggagggtagaacagggagggccgaggcagagacagaatctccctatgtt

SEQ ID NO: 608297 - DNA, 601 bp, Homo sapiens
ggctgatgcgcgggcacaggtcaaggccgcccaagccttaacagagagctggtgctgaggaggagtgagctgaatagagatactgaaggtcaagctgaggtgaggtactgaaattctcaccagaccagagtgcrgaaacctcattcatatatcattaacacacctggcatacggttgaaacaccagagagatcatgtcttagaattcaagagcactatccagagaaataattctcaaacagggcaattttgcctcccaggagagatgtggcaacgactggaggcactactggttgttacaactagagggacgctttcggtatctagtgggcagaggccacagatgctgttcaacatcttacaatgcacggagcagcctctccatccccaaaaagaaattatttagccctaaatgtcaagtgctacccaggttgagcactaaaaaagagttaactctaaacttgcccaagaaaaaacaagcactacctaacagggcctgcaaatgacacatgttttgaatcttgagtcccatcaagttagagaagcttggaaaacacctgaaaatttccaaagttctgccctaacaaagcataaaaaacagg

SEQ ID NO: 608298 - DNA, 601 bp, Homo sapiens
ggctgatgcgcgggcacaggtcaaggccgcccaagccttaacagagagctggtgctgaggaggagtgagctgaatagagatactgaaggtcaagctgaggtgaggtactgaaattctcaccagaccagagtgcggaaacctcattcayatatcattaacacacctggcatacggttgaaacaccagagagatcatgtcttagaattcaagagcactatccagagaaataattctcaaacagggcaattttgcctcccaggagagatgtggcaacgactggaggcactactggttgttacaactagagggacgctttcggtatctagtgggcagaggccacagatgctgttcaacatcttacaatgcacggagcagcctctccatccccaaaaagaaattatttagccctaaatgtcaagtgctacccaggttgagcactaaaaaagagttaactctaaacttgcccaagaaaaaacaagcactacctaacagggcctgcaaatgacacatgttttgaatcttgagtcccatcaagttagagaagcttggaaaacacctgaaaatttccaaagttctgccctaacaaagcataaaaaacagg

SEQ ID NO: 608299 - DNA, 455 bp, Homo sapiens
gaattcgaaaaataaataaatgctggccacaaccccagcaatctgacagaatccttgtcacatgttaataccttttctttctgaacttgagtgtgagttatctgtgttcctaaagatataatctcatatatttaggcaaaatgagaatatgcacagaatattataatctattatttaataaaagtatttacttcagtagctacataatattacagtatatatgattatttattcaacaaatcccctatttgtggatgtttaggctccaatattttgctattgtaaataataccatgttaaatatccttgaagctacatctttgcaagcaaycttaattggtttcttaaaataaattcttagatgtggaattgctgaggaacaggtatgaacattttcaaaggaggctgttaagtgatgccaaactaccctccagaaatatgataccaatttctac

SEQ ID NO: 608300 - DNA, 491 bp, Homo sapiens
ctccctggggaaggactggtgtgggggccgcctggggagagtggagctccctctgctgtgactgttctctcctcttccctcaggctctccagcaccaagagggccgtgaaggcggccttggcagatgaytttgacacacccagggtggttgatgccatcctgggccttgcacaccacgggaatggacagctcagggcgtccctgaaggtagctcaacgaacaggtggccttgcggtcctgctgccaggggcatgggtcgggtcctctggtgggtttttctcatgtcggctgggtggcatctctgctgatttcgcctcccgcagcttctgtggaggaactcatggagcccgagtctgccgctgacacacgggatggcacccagcctggggcttgaccctcccgggcctcagggccacctggggaacaagctctcaggagcccctgaggctgagaaattctgtgtgcttgatcctcaggggacacatctcatg

SEQ ID NO: 608301 - DNA, 528 bp, Homo sapiens
cccccagcaagaacacaatcttacgttttytctctggttacaaaagtaacgtattcagcataggaaaaatgcagctgagaacccgtctgcagtcccgctgcagttaacatcctggcagctgcaggccatcttggtggtcatggtctgtgcagagcagtgatggggtcgagctgggcctgggaaaggttggttccggaggagtcagggcagccaggctgaaagccagctggcgagctgtgacagacaggattcctgagcgggaggtggcggccagcacacggcaggctgcctgggctacaggaccggtggcctcctgaagcacccaccttgctcctgatctcacccttctgtggtaagcccagcgccacagctgtcagtgactcagcagggtgacccctctccactcttcctgctcgcagaccctgggccaggcctctccctgtcacactggcatctctgaatcccaagggcacaggcagcagcgggacccgtgactggggatacgggcttgctcatcatttaaccgtg

SEQ ID NO: 608302 - DNA, 546 bp, Homo sapiens
tctctacagattttatttgactttatcatacacagcgtcattagtaaaatccaaagctgactcacctcgggaagaattactggttcttggaacagyggtgtgaggtgcccacagtggagccttttgaaccccgctgcatctgcaagtggcctcttctccccctccattttgttcgagttccattttattcgtgatttggttgggagggtttgtcccactcctgttggaaagatctcctcttggggaaagttattttcctcctgttgacctcagctccaaggtttggatgaggggattttgtccttcatttggagaaggcctatcgtccttcctgggaggtacacactttattttccatctgcacttgcattcagttggcctctgcatattcagtgctacatttaattggctttgtgtatttggcattaaactagagcacccataaaatgtaactgttaaaaacaaagaaattagatgattgtaaataaaaataaatgtttataaataaacttttcatgtaaatgttaaaattatgttatgtaaaat

SEQ ID NO: 608303 - DNA, 566 bp, Homo sapiens
gcacgaagtattttagaaaaccaaggaaattgtttctgccrctagtgtcatgagctgagatctaaagatcagagcagaaggcaggaatcagcaagtgtgaaggccccgaggtaggaagtaactttgcacattaatgacactaagagaatccagggtctggcacacagtacatatgagggatgatggaggaaagttgagcccggagaatcaggctgacagacagaccccacagagcttaggaagcttagctaataatggcagagattacttaagagtaattatattagtcagaaacagtaattaaacagggagctcattaaacatgattcagatgcaataattaaacatagatactataattaaacataagctgagtatagcaattcaaatggcattaaacaagaaaggtcaatttgggtgcctaattggattgaaaattttaactttggaatcaattatgtgaattagttggccttattaattaaatcttggaacctaacagatctttgaaaaagaatgattatgaacttattctatccccccaaaaaattcccccaaaatatgaa

SEQ ID NO: 608304 - DNA, 566 bp, Homo sapiens
gcacgaagtattttagaaaaccaaggaaattgtttctgccactagtgtcatgagctgagatctaaagatcagagcagaaggcaggaatcagcaagtgtgaaggccccgaggtaggaagtaactttgcacattaatgacactaagagaatccagggtctggcacacagtacatatgagggatgatggaggaaagttgagcccggagaatcaggctgacagacagaccccacagagcttaggaagcttagctaataatggcagagattacttaagagtaattatattagtcagaaacagtaattaaacagggagctcattaaacatgattcagatgcaataattaaacatagatactataattaaacataagctgagtatagcaattcaaatggcattaaacaagaaaggtcaatttgggtgcctaattggattgaaaattttaactttggaatcaattatgtgaattagttggccttattaattaaatcttggaacctaacagatctttgaaaaagaatgawtatgaacttattctatccccccaaaaaattcccccaaaatatgaa

SEQ ID NO: 608305 - DNA, 504 bp, Homo sapiens
catcttccataatgaaatgaaataaacacattcagaataccaaaaattttgggtgaatagataaaccaatcttagactcaaactatcactgttacctggatcctctctattaagccttgtctttcttgctcatgtcccttcccttagatccccaattccataaatctcttgggcatattccctaaggacacaggcaattcctgtaatgatgactcacggtaaatgtgtcatcttgcacactaatcatctaacgattctatgatcattttacaakgatatcattttaacatcttaaatatgtccagagttttcatacttgatatagccaactcaatctcaagggacctactacgatctttcaagcttcagttttaaaaggacatctctccacagtgtcctggacccatttagatcaattgtaccagttggctttctgaggttttacctcccctagactttactatttctagctagtgcttctgatacagtaagaactaacagagc

SEQ ID NO: 608306 - DNA, 504 bp, Homo sapiens
catcttccataatgaaatgaaataaacacattcagaataccaaaaattttgggtgaatagataaaccaatcttagactcaaactatcactgttacctggatcctctctattaagccttgtctttcttgctcatgtcccttcccttagatccccaattccataaatctcttgggcatattccctaaggacacaggcaattcctgtaatgatgactcacggtaaatgtgtcatcttgcacactaatcatctaacgattctatgatcattttacaaggatatcattttaacatcttaaatatgtccagagttttcatacttgatatagccaactcaatctcaagggacctactacgatctttcaagcttcagttttaaaaggacatctctccacagtgtcctggacccatttagatcaattgtaccagttgkctttctgaggttttacctcccctagactttactatttctagctagtgcttctgatacagtaagaactaacagagc

SEQ ID NO: 608307 - DNA, 565 bp, Homo sapiens
gtaggaatggccctagcttatctggttcactgcacaggattttcttgaatacatattacagtgtttaaagtcatttttgcatgaatgtaccattttcccacctttagtagcaaaaagaatgattcaaaacagtaagtaatcatagccccaaaaggtccacattcttactgacattttacaactttgtaggaatgtcctcttatatgtttaaatgccttttaagtcctagtcctctttgaaaaaaaatatatacatatttttgagatgtagttttgctcttgtcacccaggctggagtgtaatagcgtgatctctgctcactgcaacctctgcctcctgggttcaagcgattctcctgtctcagcctcccaagtaccttggattacaggtgtgtgccmccacgcccagcaaatttttgtactcttagtagaggcggagtttcaccattttggccaagctggtctcaaactcctgacctcaggtgatccgcccaccttgacatcccaaagtgccaggattacaggcgtgagccatcatgcccagcctgaaaaaaaataaatttaaat

SEQ ID NO: 608308 - DNA, 608 bp, Homo sapiens
tgaaaagaaatggacttagttattatmttattgttatttattgataaagcaactgagacagagaaattcagctgcttaaaagttatcataaaactgcaaagaggtagagccaggggtgatatcaagtactgtctgaattcaaagcccatattgtttcacataccatgctattttccaattaaaattacttattattttacttcaactgataaatgattgatagatgacagatagatagagagatagacagacagacagacagacagatagatacaaatgataggtagctacggttaaacatagctacatgatatgtatgatctacctgaaataacacatgagttatgacacttgaaatagtctacactgctcttcacttgaaactaattataactgcatttaatgtcattctttcatatattattattagcagtaaagcagtaatagtaattattataaactattgtgataacttaatggaaaaaaaaagctataactaggacaaagcacttaaataggctaaaaaattttaataacctacattatataatcagatcacgttatggcaaagttcagaatgctgatacatagtcgtagatactgtaagg

SEQ ID NO: 608309 - DNA, 602 bp, Homo sapiens
gctcagttttttccacagcctcacaaacactttgctactatttatctttgtttttattattttttttgagacagggccttgctctgtcacccaagctggagtgcagtggcgcgatcatggctcactgcagcctggatgtcccaggcttatgtgatcctcacacatgagcttcctgagcagctgggaccacaggtgtgccaacatgcctacctaatccttattttttttgtagagatggtgtctcgctatgttgctcaggctggtcttgacctcctaggcttaagcaatcctcccatcttggcctcccaawgcactgggattacaggctgagctatcatgtccagcttgtttatctttttaaatatagccaacctactcagtgtgaagcggcatctcactgtctcagtgtggttttgatttatatgccactaatgactaacaatgttaaacatcttttcatttgcttatcactcatttgtacagccttctttggagagtgtgtatgcccatcttctgctgggttaatttttaattgatgagttgtaagagtgtctaattgtattaattagtgcctgaatataaacattaacttagaccatgtc

SEQ ID NO: 608310 - DNA, 547 bp, Homo sapiens
acatgctttccacccaggtttctaagatatgtgctatatgtgttcatgtgactgacaattgccatattattcttagtggaataaaggttgaacattgctgaatcaggcaatactgatgttccatcagatttctgccaactctaaatgatgtttacacatgcaatttttataaaggcaagaataaaatatttctttataaatttcagcccaattaatttataacacaatgatttaggaaaatatggagtttatctttaagtagccctaacaggtatgttttacaaagtaatttatattgtaaaagcaatgytgaagagaatatatttaatatttaggagttttcattcaaaataaaaatgaatatagcatttccaaatatcattatttctcttttaaggccactgtgtattattagcaacaaactaattctgattactctttgagtttgtaattaaaaataaatttctgaacaaattatacagtttttatttgattttagagtagtttttctctgattcagttttattctttaaaacaaaacaaccaa

SEQ ID NO: 608311 - DNA, 547 bp, Homo sapiens
acatgctttccacccaggtttctaagatatgtgctatatgtgttcatgtgactgacaattgccatattattcttagtggaataaaggttgaacattgctgaatcaggcaatactgatgttccatcagatttctgccaactctaaatgatgtttacacatgcaatttttataaaggcaagaataaaatatttctttataaatttcagcccaattaatttataacacaatgatttaggaaaatatggagtttatctttaagtagccctaacaggtatgttttacaaagtaatttatattgtaaaagcaatgttgaagagaatatatttaatatttaggagttttcattcaaaataaaaatgawtatagcatttccaaatatcattatttctcttttaaggccactgtgtattattagcaacaaactaattctgattactctttgagtttgtaattaaaaataaatttctgaacaaattatacagtttttatttgattttagagtagtttttctctgattcagttttattctttaaaacaaaacaaccaa

SEQ ID NO: 608312 - DNA, 621 bp, Homo sapiens
aacaacatttttaccaatagagggtataagagaatgcgtcaccagctttagaagctagagttactaggagactctgaatgttgacaagaagcccttgcatttcattaggaagaggttggcagaaatctcaataccatttcagtgacamcttgacccaatcaactattcctctctgcctgcctagctcttccatcattcctagtggaatttatgcagcatcaccagcagtattccctataacctaaatcttttccctgaatttaacttcaccttcttgttctaactaaatagtagtttattttctcctatattatcttttgacatggactttttctttggcaggggaaagagtggtagaagagcaacaatatttatttttttctccacagtgtatttggtgataaagatcttaaacggtatctttctttcccagagattaggatgcagttttgtacttcataattagaaatattagaaaatttccagctgagttgacttcaatgcaacacatagctttctctttatttttgccatatttataatattagttaatttttgaaaagaacgatttcaatagctaatttggtttatcatacacaatatcttaatgtgctaattaac

SEQ ID NO: 608313 - DNA, 566 bp, Homo sapiens
ataaaaattattctgagcagaaggcatttgaaaatgggcctttttcttttctttctttcttttttttttttttgagacagagtcttgctctgtcacccaggctggaatgcagtggtgcgaccatggctcactgcagcctcaacctcctggtgctcaagtgatcctcctgcctcagcctcctaagtagctaggactacaygtgcgtgccaccaccggctatgttgctgttgttgtttgttttcagacacagggtttcgcaatgctgcccaggctggatgagaataggctcttttctgaactcctttgtctgcctaaatgcagagccctgcaaaagagctccattgtcataaatccccctcccaggagtttctcaaaaccagggaaaattgacttattgctggaggggagaatagttggcaccacacctaaacagtcaggtcacgaaactataatagctcccatcttttctcctaagggcccattcatctttcctaaaaattacttttctataagtgtcctttctcctcctccccttcttctattgagatggtacataacccgcaaat

SEQ ID NO: 608314 - DNA, 566 bp, Homo sapiens
ataaaaattattctgagcagaaggcatttgaaaatgggcctttttcttttctttctttcttttttttttttttgagacagagtcttgctctgtcacccaggctggaatgcagtggtgcgaccatggctcactgcagcctcaacctcctggtgctcaagtgatcctcctgcctcagcctcctaagtagctaggactacacgtgcgtgccaccaccggctatgttgctgttgttgtttgttttcagacacagggtttcgcaatgctgcccaggctggatgagaataggctcttttctgaactcctttgtctgcctaaatgcagagccctgcaaaagagctccattgtcataaatccccctcccaggagtttctcaaaaccagggaaaattgacttattgctggaggggagaatagttggcaccacacctaaacagtcaggtcacgaaactataatagctcccatcttttctcctaagggcccattcatctttcctaaaaattacttttctataagtgtcctttctcctcctccccttcttctaytgagatggtacataacccgcaaat

SEQ ID NO: 608315 - DNA, 644 bp, Homo sapiens
aagaattttaagtgggagatacagatttggaagtcataatattcaaggtgatacttgaagtcttgaatttaaataggatcacccaaggataatgtatagaaagaaaggcaggaggttagggaaggccctggaaaatactgccacttaagtcgcaaacaaaggaaaaaaaacctctgaaggtagttgagaataaatgtcccaagacataggaaaaagcagaagagagtagagtcctggaagcaaagcaagaagaatgtttctgaaacgagatgccacagagaaaacaagaaaaagaataaaaaaatatgtgcttttgctttagcaatgtagagatcattgactagaatagtggactggtggtacaaatttcatattatactaaggcaaacgcatgagttgtgaggaggtatgcacttagagaaaacaactctttcaagacacttgactatgaaaagaaaggtgacagstatagtcaaggagggttttatggttgtttaagattatagacttgcagatgttgaaatgaagttgcagtatcattttgagactagacgattaagatacaggagaaaggaaataaatgacaaaactctcaagaagggagaaagtatgaagaggaggcttcaaatatcacagaaggtggc

SEQ ID NO: 608316 - DNA, 585 bp, Homo sapiens
gcaagactctgtcaaaaagagaaagagaaagagagaaagaaaaaaagaaagagagagaggaagaaagacagagagagagaaaggaaggaaggaaaggaaaggaaaggaaagggaaagaaaagaaaagaaaaaagaaaaatgaatttattgagtttttaccagttttgttttttttttgtttttgtttytcccccccctcaaagaaaagggggatttcttgtactgtggataggtaggattgtccacactattttttatggaaacttaactttttttttttttgcttgcttttctttattgcagaaggagtaagaaatacaaatatttgtatgtacatgtgtatgtatatgctatatttatatctccaaggcttgagtattgagcaatttaaatgttttaaagaaaagtaaacatggttttgttgttgttgctcggattttatagcctatagaagacatatttgagagaatatggattttgaggcatgagaaaactcctgataaaaaatgttaatatggagggagtcaccccagattactaaaaagttggagaacaaatgtcaagtgaaggaatgtggaggcagcc

SEQ ID NO: 608317 - DNA, 585 bp, Homo sapiens
gcaagactctgtcaaaaagagaaagagaaagagagaaagaaaaaaagaaagagagagaggaagaaagacagagagagagaaaggaaggaaggaaaggaaaggaaaggaaagggaaagaaaagaaaagaaaaaagaaaaatgaatttattgagtttttaccagttttgttttttttttgtttttgtttttccccccmctcaaagaaaagggggatttcttgtactgtggataggtaggattgtccacactattttttatggaaacttaactttttttttttttgcttgcttttctttattgcagaaggagtaagaaatacaaatatttgtatgtacatgtgtatgtatatgctatatttatatctccaaggcttgagtattgagcaatttaaatgttttaaagaaaagtaaacatggttttgttgttgttgctcggattttatagcctatagaagacatatttgagagaatatggattttgaggcatgagaaaactcctgataaaaaatgttaatatggagggagtcaccccagattactaaaaagttggagaacaaatgtcaagtgaaggaatgtggaggcagcc

SEQ ID NO: 608318 - DNA, 585 bp, Homo sapiens
gcaagactctgtcaaaaagagaaagagaaagagagaaagaaaaaaagaaagagagagaggaagaaagacagagagagagaaaggaaggaaggaaaggaaaggaaaggaaagggaaagaaaagaaaagaaaaaagaaaaatgaatttattgagtttttaccagttttgttttttttttgtttttgtttttccccccccycaaagaaaagggggatttcttgtactgtggataggtaggattgtccacactattttttatggaaacttaactttttttttttttgcttgcttttctttattgcagaaggagtaagaaatacaaatatttgtatgtacatgtgtatgtatatgctatatttatatctccaaggcttgagtattgagcaatttaaatgttttaaagaaaagtaaacatggttttgttgttgttgctcggattttatagcctatagaagacatatttgagagaatatggattttgaggcatgagaaaactcctgataaaaaatgttaatatggagggagtcaccccagattactaaaaagttggagaacaaatgtcaagtgaaggaatgtggaggcagcc

SEQ ID NO: 608319 - DNA, 387 bp, Homo sapiens
gtgaggaaaataagctcagaaaggtgtaaacagcttgcccaagatcagtgttaagtgatagaggcaaaattttaaattcaagtctttggccgtctgacaccaacacctggaccctttggcctacattccatttcctcctatagtagaaagatgtgggccaggtgtggtggytcatgcctgtaatcccaccactttgggaggccaaggtgggcagattgcttgagctcaggagtttgagaccagcaacaaagtgagacccgtctctacaaaaattactaaaattaactaggtgtggtggtgtgtgcctgtggccccagctacttgggaggctgagattgcttgagcctgggaggcagaggtcgcagtgagccaagattgtgccactga

SEQ ID NO: 608320 - DNA, 434 bp, Homo sapiens
gcaaacttacatatcctatagtctctctccccaagatgatttgctgatgggaaactgaggatcagaaaggtgagggtacttgaccaacatcacacagcaaattaaaggcaagatttgatccaygcctgtgggaaaggcttcctaagtacatgaagtgggtttaccagttaccatcattccttcctctatcatggacttcaggtactgtgcctttgaggatgagtaggggcagatgagatctagccatcgtttgaaattacttgtatattattagtatttcaattagtttgttgcttactgtctgtctcctccaccaaaatgtaaatgttataatagtatggaccatgtggcttgtcctaagccatctggcacacagttggtacttgttatttgctgaacgaattggtggagtgctagaaatgacatttagtgta

SEQ ID NO: 608321 - DNA, 564 bp, Homo sapiens
ttctataatttttttttttttttttaattagccaggtgtagtggtgtgtgcctgtagtaccagttactcaggaagctgaggtaggaggattgcttgagcctggcaagtttggggaggtgggggtcaaggatttcagtaagctgtgagcatgctactgcactccaacccatgtgacacagtgagaccctgtctcaaaaaaaataaaaaataaaaaatactgtatttacagaaagacacagccagataaattattttctgttttaggtgtgaaaaccctgaagtcagtgttggagttaggagttgaacccagrtaggtccaactccacattctttctcctacatgaatcttctgaaactcagccttctcatctgtaaaatgggaacaatatctgtctaattctcagctctgtagatgactatgaggatataataacatgatatagaaatgtgttttccaaactctaaaacctaatgcaaacttattcattgtttattcattcaataaatatctgagtacctgctgcatgccacatactgagctgattattattatggcttttcttt

SEQ ID NO: 608322 - DNA, 553 bp, Homo sapiens
tgacagactactgcacattttcctaaaattttaagttatctgatatgcctgaatacataaactttgcttagaaatataagtgaaccagtctcatatctaattatagtatttcatttactactttagtaatagtgatatctatataatatttaaaatcacttatttataataaataaatttagaaatactgttcttgctcactcttttgtttcagtaaaactactttatygcaattcttcacatataattcttgattcagtctaacgtctctttctcaagcagttgctatttaaaataaattagttgagaaagtaaccttcatgtgtgagaaagtcatgcccaaattgacagagtcttagcttaggaacggttttaaggtgtagatgccagtcttatataccagcatttacagtactgtggtttgagggctgatgaattgttgacctggctggtgagagtgggtggggtggctgggagctggttgctggaagctctgagaatgaagaggtgagagcaaaagagagaaggcagatgaagccaagctggtcccggt

SEQ ID NO: 608323 - DNA, 589 bp, Homo sapiens
cctgggacagagcacctgggggaaggggcagctgtgggtgcagcttcagcaaactttaatgtccctgcctgatggctctgaagagagcaacggaccacacagaacagcattcgagctctgctaaggatcagactgcctcctcaagtgggtccctgacccccatgtatcctgactgggagacaccttcaagtaggggccawcagacacctcatacaggagagctctggctggcatctggcaggtgcccctctgggatgaagcttccagaggaaagaagaggaagcaatctttgctgttctgtagcctctgctggagatatccaggcaaacagggtctcgagtgaacctcaagcaaactccagcagacttgcagcagatgggcctgactgttagaaggaaaactaacaaacagaaaggagtagcacgttcactcagagaccccgtacagatgtcaccaacatcaaagaccaaaggtagataaatccacgaagatggggagaaaccagcacaaaaaggctgaaaatttcaaaaaccagaatgacttttcttctccaaaggatcacaactcctcgccagcaagggaacaacac

SEQ ID NO: 608324 - DNA, 589 bp, Homo sapiens
cctgggacagagcacctgggggaaggggcagctgtgggtgcagcttcagcaaactttaatgtccctgcctgatggctctgaagagagcaacggaccacacagaacagcattcgagctctgctaaggatcagactgcctcctcaagtgggtccctgacccccatgtatcctgactgggagacaccttcaagtaggggccaacagacacctcatacaggagagctctggctggcatctggcaggtgcccctctgggatgaagcttccagaggaaagaagaggaagcaatctttgctgttctgtagcctctgctggagatatccaggcaaacagggtctcgagtgaacctcaagcaaactccagcasacttgcagcagatgggcctgactgttagaaggaaaactaacaaacagaaaggagtagcacgttcactcagagaccccgtacagatgtcaccaacatcaaagaccaaaggtagataaatccacgaagatggggagaaaccagcacaaaaaggctgaaaatttcaaaaaccagaatgacttttcttctccaaaggatcacaactcctcgccagcaagggaacaacac

SEQ ID NO: 608325 - DNA, 589 bp, Homo sapiens
cctgggacagagcacctgggggaaggggcagctgtgggtgcagcttcagcaaactttaatgtccctgcctgatggctctgaagagagcaacggaccacacagaacagcattcgagctctgctaaggatcagactgcctcctcaagtgggtccctgacccccatgtatcctgactgggagacaccttcaagtaggggccaacagacacctcatacaggagagctctggctggcatctggcaggtgcccctctgggatgaagcttccagaggaaagaagaggaagcaatctttgctgttctgtagcctctgctggagatatccaggcaaacagggtctcgagtgaacctcaagcaaactccagcagacttgcagcagatgggcctgactgttagaaggaaaactaacaaacagaaaggagtagcacgttcactcagagaccccgtacagatgtcaccaacatcaaagaccaaagktagataaatccacgaagatggggagaaaccagcacaaaaaggctgaaaatttcaaaaaccagaatgacttttcttctccaaaggatcacaactcctcgccagcaagggaacaacac

SEQ ID NO: 608326 - DNA, 635 bp, Homo sapiens
gcctgcctgcctgtatgctctcctagaggtttgagcagcggggcactgaagaagtgagccatacccctatcccatgccctgtgaggggaacaagggaaactttcctgcttcaaaagtgtaggggaaacactttaggagtataagaaaaatatggtttcaccaggaaagaaagagaggaagtgttctgaaaataatagaggaaaggagaaaagagtgggttcattgtaatctagggtaaagatggtttcactggtgattcaagcatccaattcagtgaacgagttttaatgctctgatcacttaaatttgatttgaccaaaatcccaatagttaaatttataaaaacccagcttattttggagtgatttgaatctcagttccacaattttcaggtcacgggaccttgaataagttaattaaaaccttaatcccttcagttttccctcatctacaaattaagaatctgtgtctttctatgtggtaggggcrggagcaaggagggagaaagattgagaaagacagagagagagaaataaatagctggtgctcaattaaattgaaaaatctgtcctcatgtgcttatgcactaatacatttttttttctaattccagaattcccagtgttttgaatctg

SEQ ID NO: 608327 - DNA, 628 bp, Homo sapiens
tgaatgatgacattctaaataccacgctcaactgaatataaaaataaagaagcagagaatttttagtctgtccaacagcttctttgtagccaatattcattcaatatttatgtttctagggcctattgtattgcagaaaaacatggaagattgcttttaagttgaggactaggattaaaggttaggaattatgaagagaaatatcttcactcaatataaaagagaaatgtttaatgcaacatgaaaataacactggactttgggtctaaaaatgttatttatttatttatacttagctaaaaggcatttctcaagttttctsagttcttctaacctgaatttcttcatcattttgtcccagaatgcagttgggagaatcaactttggtactttcaaaatgtcaacttcatatttaatataaattttattagctttaaaatacgaaactattatataataaatattaacgttaacattgtatagtataatattaaatggattactatataatactcaatagatagaatttaacaactatgagcatatgtatgtatatatgatttatattatgtttgtgtgtgtaaatatctatctatctgtctatctataaatagataaggccctccaa

SEQ ID NO: 608328 - DNA, 185 bp, Homo sapiens
cactgaagaactacccacttggctgctgttgactgagataattggttagagtttctccaagactgagaaatgcaacasctccttgtggagaatgtaaaccctaaagtgaaatctctcacatctgtagttcatagagtgccttctgtttccttgattaaattctgagcatacatttttctgttatt

SEQ ID NO: 608329 - DNA, 613 bp, Homo sapiens
atttggcattttaatctgtgccatgttaatttgaatgaaggtatactttgaggctttgcaaaatgtagaaaatcacttccaaactgcagtgcaatttagtgggcctttacaggtataagaccttagggtgaacctctctttcatgggtcctgagtatagcgtctttaccttaatattttgacctggtggagcaatcagctttatcatgtgcctacagatgttgcttgactatacttgtatgaaagtcaagtaagagaggataggacagcaaagtttaagagctgagctcttgaattcaaacttaactcatcctggttctgccattttttaggtatataaaaactatggtgttattgaaattttcttagctgtcaaatgaagataatactatggaatgattgaataattatcataagtaaaaaattaaaagaattggatacgaagtattcagcacaatatccatggtaaaaatttataagtaatgatagtgatgatgayatgataaccatgatgttgatggtaatgatgctgatgttatgatatcatcaggatttccatgttgacttcttatgtctttatgctattttttctgctataatcaatagctgtggac

SEQ ID NO: 608330 - DNA, 586 bp, Homo sapiens
tacattatttatgtagtaagtcaaagggcaaagaaaataagatgaattggattgatttcatctgctttttattatttgaggagtgactcaaccttttttatcttttcatacacacagtttgcttaacttaaaatcagctttaactttaaatgtccaaagaaatatggtactgtattcctgttttgggttcactgtgtcccctaaagttcatgtgttagtarttcaataccgaatgcaacactgttgataggtggtacctttaaaagggggactaatggtgttatcatggaggtgggctagttatcacaggagtgggttcctgataaaagaatgagtttgaatctttctatcttgctcttgctcttaccctctcttgcccttctgccttggaatgacacagcaagaatgccctcacctgatgcaggttcaaagaccttcgacttctcagcttctaaaactgcaagaaaaaaaatctattgtttatcaattacccagtctcagttactctgctacagaagcacaaaacatactaaatccatctttaaagttaaatttgatgagtatgaccacatagccaataaatgaa

SEQ ID NO: 608331 - DNA, 586 bp, Homo sapiens
tacattatttatgtagtaagtcaaagggcaaagaaaataagatgaattggattgatttcatctgctttttattatttgaggagtgactcaaccttttttatcttttcatacacacagtttgcttaacttaaaatcagctttaactttaaatgtccaaagaaatatggtactgtattcctgttttgggttcactgtgtcccctaaagttcatgtgttagtaattcaataccgaatgcaacactgttgataggtggtacctttaaaagggggactaatggtgttatcatggaggtgrgctagttatcacaggagtgggttcctgataaaagaatgagtttgaatctttctatcttgctcttgctcttaccctctcttgcccttctgccttggaatgacacagcaagaatgccctcacctgatgcaggttcaaagaccttcgacttctcagcttctaaaactgcaagaaaaaaaatctattgtttatcaattacccagtctcagttactctgctacagaagcacaaaacatactaaatccatctttaaagttaaatttgatgagtatgaccacatagccaataaatgaa

SEQ ID NO: 608332 - DNA, 586 bp, Homo sapiens
tacattatttatgtagtaagtcaaagggcaaagaaaataagatgaattggattgatttcatctgctttttattatttgaggagtgactcaaccttttttatcttttcatacacacagtttgcttaacttaaaatcagctttaactttaaatgtccaaagaaatatggtactgtattcctgttttgggttcactgtgtcccctaaagttcatgtgttagtaattcaataccgaatgcaacactgttgataggtggtacctttaaaagggggactaatggtgttatcatggaggtgggctagttatcacaggagtgggttcctgataaaagaatgagtttgaatctttctatcttgctcttgctcttaccctctcttgcccttctgccttggaatgacacagcaagaatgccctcacctgatgyaggttcaaagaccttcgacttctcagcttctaaaactgcaagaaaaaaaatctattgtttatcaattacccagtctcagttactctgctacagaagcacaaaacatactaaatccatctttaaagttaaatttgatgagtatgaccacatagccaataaatgaa

SEQ ID NO: 608333 - DNA, 586 bp, Homo sapiens
tacattatttatgtagtaagtcaaagggcaaagaaaataagatgaattggattgatttcatctgctttttattatttgaggagtgactcaaccttttttatcttttcatacacacagtttgcttaacttaaaatcagctttaactttaaatgtccaaagaaatatggtactgtattcctgttttgggttcactgtgtcccctaaagttcatgtgttagtaattcaataccgaatgcaacactgttgataggtggtacctttaaaagggggactaatggtgttatcatggaggtgggctagttatcacaggagtgggttcctgataaaagaatgagtttgaatctttctatcttgctcttgctcttaccctctcttgcccttctgccttggaatgacacagcaagaatgccctcacctgatgcaggttcaaagaccttcgacttctcagcttctaraactgcaagaaaaaaaatctattgtttatcaattacccagtctcagttactctgctacagaagcacaaaacatactaaatccatctttaaagttaaatttgatgagtatgaccacatagccaataaatgaa

SEQ ID NO: 608334 - DNA, 606 bp, Homo sapiens
attgtcacttgctctcaaattaggccagaaaagaaggaatttagtctagagaggagaatatttagtcttaatttttatgttttaagacttttaaattggctctatttttccawattacttgagaacagaaggaaaggaaattgttttgataataacaggggatcatagttactattattttaaatttgaagatttgaatttttttttccacgtgatatattttatttgggactagttgtctccctgtcctcatgactgtcttgtatacttgcatctataaaatctcaggttttctcccatttctttgacacattcttctttagcaaacattctctctattcctgtcatctgaataaaattatctccttagtgactgggccaatttatttttcacagatcgattaagaacctgcaatgagtttgtaacccattaacagcagtttggtataatttgttccagaaactaaataggtttgatttcttagttagtgtaactctgaaattcaagtaaagaatgcattatcataacccatttttaaagagtttgggaacaatattatactgactctcctccaatagtcccttattgggaagtacgcattgtag

SEQ ID NO: 608335 - DNA, 541 bp, Homo sapiens
aattaccacaaagctagacgcttaatacaacacaaatttattttctcatagctcagaaggctacaagtccgaaatcaagatgttgtcaagtttgattycttcttgaggctctgagaagctgttccatgcctgtctcctagcttctggtggctctggtgatgcttggcagtcgttgacatttcttgatttataaatgcatcacttcaatccctacttctgtctttttcttattttccctctgtgtctctctgtttcagttctctccctgctttctcttataacaccaccagtctttggattcagggtccactctgaatacagcatgatcagtatctttaaattatatctgccaagaccctttttccaaaataggtcactttctgaggatctgggtgggcatatcttttgaggagtactcttcaacacattacattagaatttccatcatgtgagacaactggacaaaaatctaaatgcatctgtcttttaataacatgtagatatgtagggaacatgaaataattacatattttaaaacctg

SEQ ID NO: 608336 - DNA, 541 bp, Homo sapiens
aattaccacaaagctagacgcttaatacaacacaaatttattttctcatagctcagaaggctacaagtccgaaatcaagatgttgtcaagtttgattccttcttgaggctctgagaagctgttccatgcctgtctcctagcttctggtggctctggtgatgcttggcagtcgttgacatttcttgatttataaatgcatcacttcaatccctacttctgtctttttcttattttccctctgtgtctctctgtttcagttctctccctgctttctcttataacaccaccagtctttggattcagggtccactctgaatacagcatgatcagtatctttaaattatatctgcmaagaccctttttccaaaataggtcactttctgaggatctgggtgggcatatcttttgaggagtactcttcaacacattacattagaatttccatcatgtgagacaactggacaaaaatctaaatgcatctgtcttttaataacatgtagatatgtagggaacatgaaataattacatattttaaaacctg

SEQ ID NO: 608337 - DNA, 557 bp, Homo sapiens
tgcttccccttcaccttctgccacgactgtaagtttcctgaggcctccctagccatgcagaactgtgagtcaattaaacctcttttctttataaattacccagtctcaggtagttctttatcacagtgtgaaaatggactaatacagtgactcaaccatcaactctcccatctactctgaacactggtcaagtataaaaaaatgcaaaataagctatgctaatgagatatatttacttcttacaatttgagtcaggaagtatagacaaaaaaagatcacmtagttgaagcaatgaagttgaagctaaaaggatgaaatgagaaatgaggttatggggtaaagaagaggtcatatcccattatgaacaggcaaaagtaatgagagaaaaacaactaaaatgagtagatcacgtagaagggggaacacacagaaagtgagaaatctggttgtcactaggtatagaaggagacaacaaacatgttcacacatgaaagaatttactcttgctattccctctgctaagattgctctttctccagatatcatcatagtttatc

SEQ ID NO: 608338 - DNA, 556 bp, Homo sapiens
ttcaaaatcgagttttgatatgattgagtttgcctctggtctgtgtgctatgccctctcctggagcaggttgaacagctctactggaataacatgaactaaaagtaggggaaggactgtgttcaaaagacagtcaagggtggacagattaatatttatatcaaaggacaaatattgagtattgccattaaaaaataggtagaaatagatttagagatagagctaaatatataaacacatgacagaaattaggaatccacacctatcataaccactttttctcagaaggaatattttttcaaaagaaaacaaagaatgataaatgaactttcatgatgacaactgaactttggcaccaaataatgatattaaattcagcgaacagaacttcaacccaaggagaactcctagtagggctgaatatttctcagctaacatacstcactctgatttttactcactcaacttgcactcagaggtgtgaaaaggtgtgtctagaccccagcgcatgccagcccagaagaagtaagagatcacaaaaccagaataattttctc

SEQ ID NO: 608339 - DNA, 498 bp, Homo sapiens
ataaaaatgagtgttggaatcaaaacgtttaattacagctaggacattaaaagggctaaatcttaacagagaatagattttagaagttatacctattagaaaacaatatgctgatttgtcttttcctgactgggttctagggaaaatgtctcctctgagaatttataaccatggttcttcatcatgagtgttttgcaggtttgaatttacattatttgcatagtttgtgaacttcaaacagagaaataaagtgtaaactgatggcaagttgatgacattctaggggaagttagtggacacaaagaaaaaaaaaatctggaaatgcaaaactttaacctaaaacacataaaactatcacagataaaagcctactgaatgtgaaygcacattttgaacctaaaaaacatacagcaaatcgtcaaacattagtgagtcagcaggcaatacacagaaatgttatcacaccaagatgtccagatgatagaataattttacaaa

SEQ ID NO: 608340 - DNA, 278 bp, Homo sapiens
agtgctcttgaataaattcttacatttaagatacattggtatttgatgacagtttcaagacaattcaatggaggaaatacaaactcttcaacaaatggatattcacatgcaatagaataaatttagacttttacctcataccatatatatataaattaagtcaaatggattaacaaattaaatttaagctaaaactrtaaaaaatttggaaaaaaacatgaggtgcgttctccttgacctagatttggcaatggattatcagctatgacaccaaaacg

SEQ ID NO: 608341 - DNA, 644 bp, Homo sapiens
gacacacttttaatcacacaatatgtttttctttttcttattgactaagagacagaaattcaatttattttgagatccttttttaacaattggtataatattatatgttttaaacttaaaattcctgttcctttattacaaacatttttctctttgcctaatttttctttcttattcaacgtttatcttgttttgttgtattatttttatactttacatatataccaaatacatgtctacatttatataaatatgacaatattttgatatctttcttaacatacataatctctttttataattaccaattattatgtacttaaggtttttttctaatcttttaaagcatatgaaaatgtatgcatttcaattgtgaaagtattagggatttcagaacacgtcaactggctataaggctttatgttgcaagggcaatttagtcttagtgaaattgctcactgcttcagggtacctaattagaaattaaaatacgtaggtgcttttttttwaaaaaaatcttttctccagctctatttcagcatattttaatctaaactatatctgttaaatatgattactgagcaatgacataacccatggacattcatttctcattaattacaagttttcatttagatttgaaa

SEQ ID NO: 608342 - DNA, 208 bp, Homo sapiens
ggtattctcttgctgggctttgactttcagccttctctaacaaaacccaccccttaactagtcctgtgtgacattgtggtgttttccttcattcctctcgctgcastattaagattgcattgtttttttaaaatttctgattgtttctcaaaggcagtatggcagaagggaggaggtaaactttgcacaaagggtacagtttacaaat

SEQ ID NO: 608343 - DNA, 533 bp, Homo sapiens
tgacaaaggtgacattacaacttattccacagaaataccaaagatcttcagaggctattaygaacagcactatccacacacactagaaaatctagaggaaatggatgaattcctggaaacacataatatcccaagattaaatcaggaagaaaaggaaatgctgaacagaaaaatatgaagttacaaaattgtcagtaataaaaaactgccaagtaaaaaagccccagaccagatggatttaaagccaaattctctgagacattcaaagaagacctagtaacagttctactgaaactattccaaaaaaatcgagtaggggaactcctccccagtagattctactaagctatcatcaccttgataccaagtctgggagagagacaatgaaaaaaagaaaactataaccaaatctccttgatgaacatacacaaaaatatcttcaacaaaatactagcaaactgaatccaacagcacatcaaaaaattaattcacaatgatcaagtaggcttcatgtgtaggatgcaaggttggtt

SEQ ID NO: 608344 - DNA, 451 bp, Homo sapiens
aatatactatttaacacattttttcattccgttatcaccaagaatcatttattgaaccatgatataccccacttatatttcttcatgtttttggtactgaattatttatggcttgaaatctcttactctattttctatttctgctatcttttacaaaataaaaaagttargatcatgcggtggactttggtcatactttttggtactgaattatttatggtttgaaattccttactctatattctatttctgctatcttttacaaaataaaaagttaggattatgatgtagactttggttatagttctctttggaccctgcattctcttatttaacatctcagttgctaggttttaaatatgggactaggagagtggtcagccattatattttttaatatctcattctaaatttatgtacagcttatatagtgaaaatacaaagttcagtg

SEQ ID NO: 608345 - DNA, 448 bp, Homo sapiens
ttaaatatggtcgttagagaatgcctccacaaactagatgtcttttcagcgaacacytaaaaaggcaagtagttgagtcgttcttataactgaaggaaaagcactctaggtaaaacaaagagcaatgagaattccctaaggtagtaggacaattggattaagacacagaaaaaaaatgcttgtatgactggaacagaatgaacgaagatgagaatagtaggaatgaaatcagtcacaggaataataaggatatagatgttgtacaacattttttaggcctggattcatgagacgatttttaatggatcatcttcatctactgggaattttcaaagcttcttatgagacttagtcccaatttcagcaatattccatagtgtttctgtttattctcccactaagtattttaaaaccacacactgattctcttaatataactgtgagaaat

SEQ ID NO: 608346 - DNA, 562 bp, Homo sapiens
aacttttttgtctatgatgcaatttgagttaaatttttgcatgcaatagtggtgagttttttttttccaaatacgtatcaagtttttcagccgtttctccactgaaatattctgaaacgttgtcaaaaatcaatcgacagtatatgaatgaatttatttctatgctgtcttttctagcccatttatttatgtatcaaaccttacttaaattccacaatgtctcaatcactgtggctctgtgctaaacctgaaatctggtagttaaggtcccttaatcttgttctgttccacccccacccgcccaraatcatttggctcctttaggttcctggcatttccacattaattttaccatcaccttgtcaaattacatgaattggatttgtagatttgattggaattctaaatctaccagaaattttggttgaaaaagcatcttaaaaatattgaatcttccaaatcaattacatggtacatctctttatttaggtcatcttccatttttcttaaagctgttttatagttttcagtgtataagtgtaaatttttaattaaatttatt

SEQ ID NO: 608347 - DNA, 648 bp, Homo sapiens
ttgagataaaatgcaaaaacagcaattaagtagcttttgaagctaactctggaattaaaagagaagtatgtaaacaactatgttttgtcaaagctttataggaaccaggaagtttggctagcatcatataagacaccattacccaaggacaaaagtttcacaaacctccctggacccttgctggcgcctaaacatatgccattatcagccccctcctttcctagacataaaagacaaggcaaagcctgcataattctaagatggtactttaggatgctagtctgccatcttgtcagtatgctggttctgtgaaataaagtcgctttcctggctccaattccttgctttcaacttactgactcttgtgcagtaaacagaatgagcttggactcagttgcagtagcaaagcttgcctttcatgtgcaaaccaaytaattcacagtctatacaccccaaacatctcatctaacccacactccaagtcaatatttcccctgccctaaatcatcccaaggccagatagcaggatactggagaccaccgtatgacccaaagcccaccagagttattcacactagccagtcctaaacggtttactctgccctgcactgccttttccacagaaaccccaataaaggctgtggccta

SEQ ID NO: 608348 - DNA, 589 bp, Homo sapiens
gtagaaatgaaaggtaacagttagaacatagagggatataggtttaaaagataagaaaaaagggagaaaagagaaaaaaaggaagaaaggaaagaggtaaagacaaaaaccattatagtccaagtagttgaactagaactacagaaactcatggtgagaaggggcatacatgaattagcgtcattaatatgatgccgttcctaatctaggtgtgtcttggccgggggttaytgaggtgaagaagtcactgaagatgaggcagctaaggaattgaacagcttgttgatgggtcacccaagggtatggtgaaatgactcaggatgatggcaggatttgggatggagaaagcctgagcaaagcacttagtctttcatgaatgaggggtggtaaccaggggacagtaggagattgccatggagagaggaagagggagatagaagcagatcattgattctcaaaggcacaagagttttacaaaagggagaggaaataatatgctggtagtgatgatagggagaaagaaagatgtttagatgggactttcacttaataggactgtagaagacacggtatccctgagggatgactc

SEQ ID NO: 608349 - DNA, 589 bp, Homo sapiens
gtagaaatgaaaggtaacagttagaacatagagggatataggtttaaaagataagaaaaaagggagaaaagagaaaaaaaggaagaaaggaaagaggtaaagacaaaaaccattatagtccaagtagttgaactagaactacagaaactcatggtgagaaggggcatacatgaattagcgtcattaatatgatgccgttcctaatctaggtgtgtcttggccgggggttattgaggtgaagaagtcactgaagatgaggcagctaaggaattgaacagcttgttgatgggtcacccaagggtatggtgaaatgactcaggatgatggcaggatttgggatggagaaagcctgagcaaagcacttagtctttcatgaatgaggggtggtaaccaggggacagtaggagattgccatggagagrggaagagggagatagaagcagatcattgattctcaaaggcacaagagttttacaaaagggagaggaaataatatgctggtagtgatgatagggagaaagaaagatgtttagatgggactttcacttaataggactgtagaagacacggtatccctgagggatgactc

SEQ ID NO: 608350 - DNA, 589 bp, Homo sapiens
gtagaaatgaaaggtaacagttagaacatagagggatataggtttaaaagataagaaaaaagggagaaaagagaaaaaaaggaagaaaggaaagaggtaaagacaaaaaccattatagtccaagtagttgaactagaactacagaaactcatggtgagaaggggcatacatgaattagcgtcattaatatgatgccgttcctaatctaggtgtgtcttggccgggggttattgaggtgaagaagtcactgaagatgaggcagctaaggaattgaacagcttgttgatgggtcacccaagggtatggtgaaatgactcaggatgatggcaggatttgggatggagaaagcctgagcaaagcacttagtctttcatgaatgaggggtggtaaccaggggacagtaggagattgccatggagagaggaagagggagatagaagcagatcattgattctcaaaggcacaagagttttacaaaagggagaggaaataatatgctggtagtgatgatagggagraagaaagatgtttagatgggactttcacttaataggactgtagaagacacggtatccctgagggatgactc

SEQ ID NO: 608351 - DNA, 534 bp, Homo sapiens
taatttttgcccaaagctctattgtgggggactatctggaataccatytatccttttaggattcctcctcagacaagcaggcctaacaaaggctatcccgaagctagaatatggggagcctcagaaatgatatccctcctattcatatgaggagaagtgagaacaaaaggtgtcactcttccaaccctagagatcccttccctccctcagggtatggccctccactccattttgaggcataatatctttataggacaagggtaagttcccagtaccaacaagagaaaatgtttaggactctaacaggtttttgagaatgcgtcagtaagggccactaaatccgatttttcttggtcctctttgtggtctcagaggaaagggaagagtgcaggtttttgagaatgcattggtaagggccactaaatctgaccttcctcagtcctctttgtggtctaagaagaaaactagtgtttctgctgctgctgcgtcattgagcacaactattccagtcagcagggttcagggactgttgca

SEQ ID NO: 608352 - DNA, 534 bp, Homo sapiens
taatttttgcccaaagctctattgtgggggactatctggaataccatttatccttttaggattcctcctcagacaagcaggcctaacaaaggctatcccgaagctagaatatggggagcctcagaaatgatatccctcctattcatatgaggagaagtgagaacaaaaggtgtcactcttccaaccctagagatcccttccctccctcagggtatggccctccactccattttgaggcataatatctttataggacaagggtaagttcccagtaccaacaaragaaaatgtttaggactctaacaggtttttgagaatgcgtcagtaagggccactaaatccgatttttcttggtcctctttgtggtctcagaggaaagggaagagtgcaggtttttgagaatgcattggtaagggccactaaatctgaccttcctcagtcctctttgtggtctaagaagaaaactagtgtttctgctgctgctgcgtcattgagcacaactattccagtcagcagggttcagggactgttgca

SEQ ID NO: 608353 - DNA, 534 bp, Homo sapiens
taatttttgcccaaagctctattgtgggggactatctggaataccatttatccttttaggattcctcctcagacaagcaggcctaacaaaggctatcccgaagctagaatatggggagcctcagaaatgatatccctcctattcatatgaggagaagtgagaacaaaaggtgtcactcttccaaccctagagatcccttccctccctcagggtatggccctccactccattttgaggcataatatctttataggacaagggtaagttcccagtaccaacaagagaaaatgtttaggactctaacaggtttttgagaatgcgtcagtaagggccactaaatccgatttttcttggtcctctttgtggtctmagaggaaagggaagagtgcaggtttttgagaatgcattggtaagggccactaaatctgaccttcctcagtcctctttgtggtctaagaagaaaactagtgtttctgctgctgctgcgtcattgagcacaactattccagtcagcagggttcagggactgttgca

SEQ ID NO: 608354 - DNA, 597 bp, Homo sapiens
aaaatatacatacaacaaaatgtacatcttagccatttttaagtgtagagttcagtagaattagtacattcatgctgttgtacaaccagtctctggaactcttttgataatacaaaactgaaaccttacactcatttaaaaacaactctctatttctcccttcccccagccactggcaaccaccattctactttctatctctacgaatttaactattctgtgtacctgatacaagcagaattatacaagtcatacaaatcatcaatttgtcttttgtgagtgatatatttcacgtaagcataacatcttcaagattcctccatgttgtagcattgtcagaatttccctcctattaaggctgaataatgttccattgtgtgtgtgtgtgtgtttatcacattttgtttattcattcatcatttaccaagtttctgtggacacctgggttgcttctaccttgtgggtattgtgaatratgctgctatgaacatgagtgtacaaatatcttttcaagattctgtcttcaattcctttgggtgtatgctcaaaagtggaattactgaatcatgtgataattctatttttaattttttgagg

SEQ ID NO: 608355 - DNA, 483 bp, Homo sapiens
tatgttctccattcagtctactacaactctgacagcgtgttcagcagtgaccattttgtttttcaattcacctgttgaactttaaaatgcacagttaagcccaagcgcagtggctcacacctgtaatcccagcactttgggtggccgaggcgggtggatcacctgaggtcagaagtttgagaccagcctgatcaacatggtgaaacccatctctactaaaaatacaaaaattgccaggcatggtggtgcacgcctgtaatcccacctactcaggaggtcraggcaggagaattgcttgaaaccgggaggcagaggttgcagtgagccaagatcgcgccattacacttcaccctgggcaacagagcaagactctgtctcaaaaaaaaaaaaaaaaaaaagcacagtcaagttctgtcctttcagaaaacttcttttgtgctttactgctatgtccttcaacactcactacattactattaaagt

SEQ ID NO: 608356 - DNA, 483 bp, Homo sapiens
accattctggctaacacggtgaaaccctgtctctactaaaaaatacaaaaaaaaattagccgggcgtggtggcaggtgcctgtagtcccagctactcaggaggctgaggcaggagaatggcatgaaccygggaggtggagcttgcagtaagccaagatagtgccactgcactccagcctgggtgacagagggagactccatttaaaaaaaaaaaagaaaagaaaagaaaaaaagaaaacaaaaaagaaaaaggaaaaaccccaagtagttatctgagtatgtgtatgtgtatgttacataaatgtgtatctgagtgaatgtgtatggaaaatgtgacatacatacgcaaaagggcttcacaataattctatatcctaatgatatagtagcagacagccaggtaaaaaaattatggtgatggcaatttttttaggccgagggaacagcatgacgaatatcttgaagagggaagtagatggcctg

SEQ ID NO: 608357 - DNA, 483 bp, Homo sapiens
accattctggctaacacggtgaaaccctgtctctactaaaaaatacaaaaaaaaattagccgggcgtggtggcaggtgcctgtagtcccagctactcaggaggctgaggcaggagaatggcatgaacccgggaggtggagcttgcagtaagccaagatagtgccactgcactccagcctgggtgacagagggagactccatttaaaaaaaaaaaagaaaagaaaagaaaaaaagaaaacaaaaaagaaaaaggaaaaaccccaagtagttatctgagtatgtgtatgtgtatgttacataaatgtgtatctgagtgaatgtrtatggaaaatgtgacatacatacgcaaaagggcttcacaataattctatatcctaatgatatagtagcagacagccaggtaaaaaaattatggtgatggcaatttttttaggccgagggaacagcatgacgaatatcttgaagagggaagtagatggcctg

SEQ ID NO: 608358 - DNA, 492 bp, Homo sapiens
gacaaagtaagtatattagggttctctacagaaacagagcaatggtgtctctctgtgtgtgygtgcacacacatgcgtgagagagagagagagagatgttgattataaagaattggcccacagggttatagtggctgggaaatcccaagctctataaactggagacccaggaaagaagatggtatagtctctgtctgagtctgaaaatctgagaaccagcaaagtcaatggtataagtctagatctgaaggcaggaggagactgatgtcccagcttaagactgaccatcaggcagagggaggaaattctcccttactcctcctttttattctattcaggccttcagtgggttagatgaagcccacccacatgggttgggttgagggttgttgggggagcaatctgctttactcactccacaaattcaaatgttaatctcatgcagaaacaccctccaccctcaaagacacacccagaataatgtttagccaa

SEQ ID NO: 608359 - DNA, 559 bp, Homo sapiens
  misc_feature 117: n = A,T,C or G
gtaccccatttggagacagtaaaattgatctttttgtcagacaccatgcataaggcagacctgtctcagcattggttctttctttttcagagtaatctccataaagaactaccatcngaagataagaatcatcactcaaatgctgcagtatcacaacaaggtaggagtgcgagagcccgctccaggtctgaagacccatccacaggtccagcctcttcttcctcattatacaggctcacacacacacacacacacacacacacacacacacacactctcacatgcccacatgtgcgcaactcaaagacctgggtaaagaggtgtgattgttaaaaatcttcctgggacatttctttctttctttctttytttttgggatggagtcttgctcttgttgcccaggctggagtgcaatggcatgatcttgactccccacaacctccacctcccaagttcaagcaattctcctgcctctgcctcttgagtagctgggattacaggcatgcgccaccatgccaggctgattttgtacttttagtagagatggggtttctgcatg

SEQ ID NO: 608360 - DNA, 602 bp, Homo sapiens
ccttgcttcacagtttgctgtgtttcctgagatgtttcctactctttcaatacattttcttcctcttccctttcaacattttttttctgcctttcttggcactttttgctgcactcatcctagatgcttagagatctccatgcattacaatttgctttcaggaaaggacctggtatgtgcctgtaaagtcatgtcactatgaacatattccaagagatagctgatttcataattggacaacgggcttgaaatatgaagcatttcaatcccctatgatccagtaatagtaatattctagggcctagagggatgtagggaagctgcctactttctctccatgtaaaactggccctgagtttgtcatcatcataattgtagacatgtgtgtcatattttatggttttaaaagagctttgacatccattrtcttctttagtactcgttggaccatctgtgcattttagcatcccagggtaacttcagagcagggcatctaagctctgtatagacagcgcagctctgctgggcacaaatcatggccaccactctgcagccagcgagcggggagacagaagagcttactgccaccgactctttaaatg

SEQ ID NO: 608361 - DNA, 626 bp, Homo sapiens
tgctctccaaagtgtatcttttaatatcactagaattcttggagagaaacgctttcatgctggccatcttttaaatgctggccctgcatcttctgatttgagtgtaaatggctcaaagctcttcaaggaaagattggtttataacttcttggaaaagtatcactcctgatgatttacctstcagtggattttttatttttcccaaagactctagtgaaagaggcctttatctctggaagccaagtcccatgagcccagtgcagatagaggcaagttctttgagctttttttttccactgtccaccctgacacttgggcaattgtattaaatcgtttcctctttcatggccttctttgttcctcatagtggcttcccaaaattgtatgtagtgagagatggaactaggactgaaatccatctctcctggttttccaggacagcgtatttccagttccttctccatgagaggagggaggggtggtgaagtagcagaaatgaagggcagccaggtctgccagacctgctctttatattctccaagttagggagagaggatttgcctccagacttctgggcactaacactggcatttttcatcagactcaatttacttcaaatggaaaag

SEQ ID NO: 608362 - DNA, 608 bp, Homo sapiens
ttgggaacaattaggatttytggaagccaaggtaaagtgttagctcaccctctcccttcccctaggccggtcgtgtctgttttttggtgcggcagaacccctgttaaaataagagaaacaagactgtaacagcaaagatgtggcacaggcagaagcacagtgactatccactgggctttttaattttattttaattttttgtagagaccagtctccctgtgttgtctaggttggtctcaaactcctgggttcaagcaatcctcctgcctcagcctcccaaagtgctgggattatataggtgtgagccacttccactgggcattttatcatgcatgagaccaaaatgccaagactgaaagtgggggtgatatgtttaataaaagaaagagggattactggccaggtgtgttggcccacacctgtaatataagcactttgggaggccaaggcaggtggatcacctgaggtcaggagttcgagaccagcctggccaacatggtgaaatcccttttctactaaaaatacaaaaattagctgggcctggtggcgcatgcctgtagtcccagctactcaagaagctgaagccggggaattgcttgaacccagga

SEQ ID NO: 608363 - DNA, 456 bp, Homo sapiens
catttgttggcatttgtaagtattgctattaatcttttcatgcacatatatttgatcaaatctagtagcagtttcctctagaagtggcaccaagcttggcacaatggtgcacatatcccawttcattaaatatctgattaatcggtgattaaccgataagagaatttcctaaaggttaaaagtaaatataactgggatacacatatagctcgcaatgtgtttctttctttctaagtgcttctattatattcaatgagaaagataaaggtagaaggaaaaggagaggagggagaggggaaaagacattaacccgtactgacagataagtcatagcactcctatttcagagaaggagattggagtaagcatctgtgatggttaatattgagtgtcaacttgattggactgaaggatacaaagtattgttcctgggtgtatctgtgagggtgttaccaa

SEQ ID NO: 608364 - DNA, 562 bp, Homo sapiens
attcaaaatattctttttaaaaatacttgtccagcttgtatttggaggacaggcagagcagtagatggggtgatagagagaggaatgatccctggtcagagtcttcagctactgaccctagtaattcaatcttgagcccaattttgcatactcagcaaaagaaaagttttgcagtcaagcagacccatgctttttagaaagcaagttataaaatatctgtcattacttgaacatgccatttgggaggaggagactcatccctcctagccgaaaaacmgtatcaaagtattcccccaaataccttattaaagtattcaaagtaatctcaaactttctgcctcctgagaagagttctgggaagcacacttttctatttcttgttgcatttctagaatgttttaccactcattgtagttcagcatccccagaaaactgacaggcaggccatcaccctgcagttggtataagatggaaagagggagaggacttgctatgatcctgtttgggcaaagagacccctccctgtccccatgctcacctgtcccatgagcaagttcaagtc

SEQ ID NO: 608365 - DNA, 535 bp, Homo sapiens
atagaaatgtccttctcattgccaaattttagccaaaacaagaaatcaacagaagcttcttaagaaactatacctatttgtcccagtctagaaaaaggagaaaggatagaatccatcaccctaaaaagcaatgccacaggtatgggggccaggaataaacagacttccacagccagactgacaacaaagagcttctgcacaccagcatcagtgggcacagagatatatgttacttctcagtgggcagagataccctatctacttacagggtatggaaaaaagagaggaagtgatgactcttattcatagatattaattagttacatccacttcccatcctccagtgtatacagagtacagccatcaagacaggacccctgtatttctccgaacatgaaaccctaatcactgggactgcatcactcgttaccatgaaatacatgtggcagttaatgataaaaaccacaaaaattacactcagttcaaaygttttattgcatgccattcttcaagatggcagatggctgcctaaatt

SEQ ID NO: 608366 - DNA, 548 bp, Homo sapiens
acaataactaaaacattcactgaatgggctcaacagcagagcaaagatgatggagggaagagtcaatgaacttgaagctaggtcaatataaattgtgcaatttgaacaacagagagaaaaaagtattgaaaagtttcacacagagcctcagggtcctctgatacatcagaaaaagatttagcatttgcatcataggaatcctagaaggaaagcagaaataatatggtgcaggaaaaaaaaatttttttgaggaaacaataagtgaaaacttctttaacttccccagagacaaacctagcagttgaagaatctcaatgaactccaacaggataaacccaaaagaataatgcctagacacattgtaagcaaacaacagaaaactaaagacaaagagaaaatctagaaggcaatcggagaaaaatgactcattacttataggtaaccacaattcaaatsactatggatttctcatcagaaacaatggaggcaagaagaaagtagaacaacacttttaaaatgttgaaccctgaattctatatccaccaaaa

SEQ ID NO: 608367 - DNA, 371 bp, Homo sapiens
cccagaaaacagaaggaagggaaagatttccaactcattttataaagccaacattacctgacactaaaatcaaagacagtctaagaaacgtacaaactaatatacaccaaaaaacaaacacacacaaatcttcataaaaatattaacaaaccaaatccaccaacatgtataagaaataatcacactaactagggtctctcccaggaatgtatggtggctggttcaatattgtataatcattcaatgtaatttaccatattaacagtctaaagaagaaaaactacatgatcctatacattgakgcaggaaagcatttagcaaaattcaacctccattcatgattgaagaaaataaaactctcaccaaaatag

SEQ ID NO: 608368 - DNA, 579 bp, Homo sapiens
aatatcttacctgctccattttgatcaggaagcaatcgataaagtcccgaggattgttaacatccagtgatgcttggtgttcttttactttctccctaatgtaacttcgtgtaagagcaacatttttaagcactttgttgtgagttcctgggaaacaatcaatgagtagagggaaattattgcagacctaaaagagaaaagaatattaaatataaacatgtcataagatatatgtatcttacaccaagccctgattgaaattataactataaatatgaataagacatcatgtccattttgaagggaaatttttatacatatatacattttttattayactttaagttctagggtatatgtgcacaaagtgcaggtttgtcacatatgtatacatgtgccaggttggtgtactgcacccaataactcgtcatatacattaggtatatctcccaatgctatcccttccccctccccccaccacacaacagaccccagtgtgtaatgttccccttcctgtgttcaagtgttctcattgttcaattcccacctatgaatgagaatatgcagtgtttggttttt

SEQ ID NO: 608369 - DNA, 568 bp, Homo sapiens
ttggctgtgtgtttgtcatagataaactcttattattttgagatatgtcccatcaatacctaatttattgagagtttttagcatgaagggtcgttgtattttgtcaaaggccttttctgcatctattgagataatcatacggtttttgtcattggttctgtttatatgctggattatgtttattgatttgcttaaaagaaaatgtttgttgaatgagtggaaaaacaaggtgatgtttgagtctacagtgctcaaaagcatgggggcttcagaaaagaacaagatcaatttcamatccctgtacttcaaatttctacttcatgccatgcaaaattactttacccctcttaacctcaatttccttctgtgtgaaatgggaaaaataaagtttcatttttcattcagtttctgtcaatatttcatgagataaaacatataaaacatccaacttgcttaaatgtatgattattcctgtcattattagtagtgggatcaatttcactattattgtctatacagttctgtgcctaaaacctacaaaacaagaaaatgttaactctagaaagtg

SEQ ID NO: 608370 - DNA, 543 bp, Homo sapiens
gtgggtgacttttttttttcctgaaaaatgttttctaaaatttattttaatttatttttagattgatacataacttttatgcatatttatggggtacrtgtaatattttgttacatgcacagaatgtgtaatgatcaagttaggtgtttaggatatgcatcactttgagcatttatcatttctatattttgagaacagacctgtgttctagctatcttgaaatacgcaatactttgacattaacacactgctatgttctctaatgacatccctggaaacctcctaggggcagccagatctttcatgatagtggttgtcagtcctcatatggagggtggaggtttgaagcagagagccaagggaggttttgtgcacctatgcttgttgtgtttgtacacaatgactatgcatacgctgtgagtataaaaggctcatttaatcctattgtgtcccaggcttggtttgttttcaaatcattacagcatgaatttagaaggttttgtctcatttttttcaaattattaaagagcaatgtttttccca

SEQ ID NO: 608371 - DNA, 520 bp, Homo sapiens
  misc_feature 1, 2, 3, 4, 5, 6: n = A,T,C or G
nnnnnnaaccagatgcataaaagaacaggaactatcactatggaaatgattcccaaaaaatgaggaggagggatacctcagtaacccattctttaaggccaacattttcccaatattaaaacttggcagacrcaaacacaccaaaaaaaaaaaaaaaaaaaaaaaacttcaggtcagtatctttgatgaacattgatgcaaaaatcctcatcaaaattccagcaaacagaatccagcagcacattaaacagctaatccattacagtcaattaggctttatctctggtatgtaagattggtttaatgtacacgaatcagtaaacgtgattcatcacataaacggaattaaaaacaaaaactatgtgattatctcaatatatgcagaaaaggcctttgataaaatcctacatcccttcatgttaaaaacccctcaacaaagcaggcttttaagaaacatatgtcaaaatagtaagagctatcttatccaataaacaagaataatttaaaaagaaagagagaa

SEQ ID NO: 608372 - DNA, 520 bp, Homo sapiens
  misc_feature 1, 2, 3, 4, 5, 6: n = A,T,C or G
nnnnnnaaccagatgcataaaagaacaggaactatcactatggaaatgattcccaaaaaatgaggaggagggatacctcagtaacccattctttaaggccaacattttcccaatattaaaacttggcagacgcaaacacaccaaaaaaaaaaaaaaaaaaaaaaaacttcaggtcagtatctttgatgaacattgatgcaaaaatcctcatcaaaattccagcaaacagaatccagcagcacattaaacagctaatccattacagtcaattaggctttatctctggtatgtaarattggtttaatgtacacgaatcagtaaacgtgattcatcacataaacggaattaaaaacaaaaactatgtgattatctcaatatatgcagaaaaggcctttgataaaatcctacatcccttcatgttaaaaacccctcaacaaagcaggcttttaagaaacatatgtcaaaatagtaagagctatcttatccaataaacaagaataatttaaaaagaaagagagaa

SEQ ID NO: 608373 - DNA, 520 bp, Homo sapiens
  misc_feature 1, 2, 3, 4, 5, 6: n = A,T,C or G
nnnnnnaaccagatgcataaaagaacaggaactatcactatggaaatgattcccaaaaaatgaggaggagggatacctcagtaacccattctttaaggccaacattttcccaatattaaaacttggcagacgcaaacacaccaaaaaaaaaaaaaaaaaaaaaaaacttcaggtcagtatctttgatgaacattgatgcaaaaatcctcatcaaaattccagcaaacagaatccagcagcacattaaacagctaatccattacagtcaattaggctttatctctggtatgtaagattggtttaatgtacacgaatcagtaaacgtgattcatcacataaacggaattaaaaacaaaaactatgtgattatctcaatatatgcaraaaaggcctttgataaaatcctacatcccttcatgttaaaaacccctcaacaaagcaggcttttaagaaacatatgtcaaaatagtaagagctatcttatccaataaacaagaataatttaaaaagaaagagagaa

SEQ ID NO: 608374 - DNA, 520 bp, Homo sapiens
  misc_feature 1, 2, 3, 4, 5, 6: n = A,T,C or G
nnnnnnaaccagatgcataaaagaacaggaactatcactatggaaatgattcccaaaaaatgaggaggagggatacctcagtaacccattctttaaggccaacattttcccaatattaaaacttggcagacgcaaacacaccaaaaaaaaaaaaaaaaaaaaaaaacttcaggtcagtatctttgatgaacattgatgcaaaaatcctcatcaaaattccagcaaacagaatccagcagcacattaaacagctaatccattacagtcaattaggctttatctctggtatgtaagattggtttaatgtacacgaatcagtaaacgtgattcatcacataaacggaattaaaaacaaaaactatgtgattatctcaatatatgcagaaaaggcctttgataaaatcctacatcccttcatgttaaaaacccctcaacaaagcaggcttttaaraaacatatgtcaaaatagtaagagctatcttatccaataaacaagaataatttaaaaagaaagagagaa

SEQ ID NO: 608375 - DNA, 629 bp, Homo sapiens
ggagttgaacaataaggacacagggagggtaacatcacacaccagggcctgtgggggatgttggggctaggggagggataacattaggagaaatacctaatgtaggtgacaggttgatgggtgcagcgaaccaccatggcacgtgtatacctatgtaacaaaactgcacattctgcacatgtatcccagaacttaaagtataataaaaaaaaaattgaaaaaaaattttttttgactgtgttgatatctaattctgaatgaaggtagaaggtgttgcataattctgtctgcctagcatgggagggatgaaccctttctggaagaagatgaacctcatctgacattctgcattttttcatacatcataactggcacttaaccaaaatttatgagtcactccaaagacagaactaagtgagcacaaaaagaatagagaagggagaaaagattataaaaacaaccacaatacagaacattatcttccttattttaygaagccaacatttcctcaatatcagaaatctgacaagaaaattttgaggaagaaaaattgcaaaccaatgtctcttgtaaatataagttcaaacatcctgaaaatcatagcaaataaaacccagctgtgtatgtct

SEQ ID NO: 608376 - DNA, 629 bp, Homo sapiens
ggagttgaacaataaggacacagggagggtaacatcacacaccagggcctgtgggggatgttggggctaggggagggataacattaggagaaatacctaatgtaggtgacaggttgatgggtgcagcgaaccaccatggcacgtgtatacctatgtaacaaaactgcacattctgcacatgtatcccagaacttaaagtataataaaaaaaaaattgaaaaaaaattttttttgactgtgttgatatctaattctgaatgaaggtagaaggtgttgcataattctgtctgcctagcatgggagggatgaaccctttctggaagaagatgaacctcatctgacattctgcattttttcatacatcataactggcacttaaccaaaatttatgagtcactccaaagacagaactaagtgagcacaaaaagaatagagaagggagaaaagattataaaaacaaccacaatacagaacattatcttccttattttatgaagccaacatttcctcaatatcagaaatctgacaagaaaattttgaggaagaaaaattgcaaaccaatgtctcttgtaaatataagttcaaacaycctgaaaatcatagcaaataaaacccagctgtgtatgtct

SEQ ID NO: 608377 - DNA, 467 bp, Homo sapiens
aatctgtgcaacatagcaagactctgttttgaaaatatatttttaatattatatatatttatttcatattatatatattttatattatatattaaatacacaacttacaattacatagaaatatcatttcagaaaaaaaaygtaatacatgagaaagccactgaactgaagacaaaacattactgacacaatagaagaaagcccaaataaataaagagcataatcatatccatgaattgaaagattcaacctgtcaggacatcaattatttctaaattgatctaaagatttaatgtcatcatgataaaaatcccagcacagtgttttgggaaattgacaaaatgatactttcaacacttacttggaaatgtaaacaacctgagaatagccacaaaaaaaaaatactaaagaagcagaacaaatttggaagacatacactgctagatactgagacctgttataaacct

SEQ ID NO: 608378 - DNA, 575 bp, Homo sapiens
aagaagaaaagaagtaaaattgtctctgtttgctgatggcatgatcttacatacagaaaaccttaaacacatcaccaaaaaactcttagaactgataattaaattcagtaaagttgcaggatacaaaatcaacacacaaaaattaatagtgtttcaacacattaacaacaaatgatatgaaaaagaaattttaaaaataaacccatttacaatagcatcaaagaaataaagtatttaggagtacatttaaccaaaaaagtgaaagtcaccaaaaaatataaaatattaattaaaaaaatgaagaagacacaaataaaaaagrgataccatatgcatggattggaagagttgatattgttaaaatgtccatactatctaaagaaatttatggtttcattgaaatccctatcaaaattccaatgttatctctcttagaaataggaaaagtcatccccaaaaaattcatatagaaccacaaaaatacccaaatagccaaggcaataattagcagaaagaagaaagctggaggcatcacattacctgatttcaagctatactacaaattaatagtaatt

SEQ ID NO: 608379 - DNA, 589 bp, Homo sapiens
tgagtatagttgtaacatttttcattgcaattacagaaatccaattcaaaccattggattaaatcaaatgaatttgctgtttttgtgggtccaaattaggaaatattggcaattttatgtaatttacctaaattgctaaagcaaagagggagaaagacaatgaaattttctggcatctagcacttatgactgttagttgcaatcggatcatagtctcaaatgactctcactcaggtctgcatggtgtggctaggacatgactacagactacccaaatttataccatttaagtttaacaacaccaaaaaaaatggaaagctctctcttcttaccagtgaagagctcatattcatcttgctcaaacatgtgctgacctatgaaccaaaccctgtgaccagaaggagagatcccaatgattattaacactaagtttgtgtggtcaaatttgtgactgctgggtcaaggtagtatgtgattagaaatttctccagattcaagtggaatgggtattgagmagggaaaagttatcccaaaaagaaagaaagaaaattatccagaaaaatatgggaaacaattgttggcagaaaaa

SEQ ID NO: 608380 - DNA, 568 bp, Homo sapiens
tgtgtttatatttttttgtgtctgtgtgagcatagatgggcatcttyagctcacctgcactcccaccactcgtttccctatgggaaaaggtgattttttgccccccttttaccattacatactgagagtgctgatgtcgggtattgggagtcattcttggtcattaaaacaggatttttttttctgccaattacctgaatgttctacatgaaattgttcttggtttcaatagatatataattatttccatattaactgaccagttttttagttttgaattaaagatatgttgctttagttttcgttgtaatttctggcatcttgttttgattttgtttaaatgtgtgttttaagttttgcttaatctgaattattttattaggtttttggttctcatgccagagtaaaagaaatgataaattcttttttcctcatttaacacatgtatataaaatactttgagtaacttcacatataaaaatatttagaagagtttaagctgggttttttgttttgtttggctttaaaaacaaaaaaagttacaggtgccagggataatatcttggct

SEQ ID NO: 608381 - DNA, 568 bp, Homo sapiens
tgtgtttatatttttttgtgtctgtgtgagcatagatgggcatctttagctcacctgcactcccaccactcgtttccctatgggaaaaggtgattttttgccccccttttaccattacatactgagagtgctgatgtcgggtattgggagtcattcttggtcattaaaacaggatttttttttctgccaattacctgaatgttcyacatgaaattgttcttggtttcaatagatatataattatttccatattaactgaccagttttttagttttgaattaaagatatgttgctttagttttcgttgtaatttctggcatcttgttttgattttgtttaaatgtgtgttttaagttttgcttaatctgaattattttattaggtttttggttctcatgccagagtaaaagaaatgataaattcttttttcctcatttaacacatgtatataaaatactttgagtaacttcacatataaaaatatttagaagagtttaagctgggttttttgttttgtttggctttaaaaacaaaaaaagttacaggtgccagggataatatcttggct

SEQ ID NO: 608382 - DNA, 530 bp, Homo sapiens
cttaatatctctaccagccaattaacttatgtatagctactaggaatgaagaaggtggcactcgtgaaacagcattatccaaggctctgtgacagctggttgtgggaactacaccgtatagagaggctgtatctatggagatggaatgaaattctaaggttctgttggaatgattcccacaatagaatcttgattggtaaaatatggaagcctttcattcttatcctgctttattagagaaaccatctgcattaacaaaagatgcatctactcaatggagcagtttctgagaggtccctggtcactgtgagccttatagytacaggattaattgttgctgggagactagtgtgtttcccgctgcctcttccctgggctgcccttaacgcggctcttccggcccctagtggcacctctgccttcagggtgcatgtccctgcacctcgcatggccaggcctgcctggatggttgtgactcctcaggttgtattacaggctatgccagctactgatcatttgtttttgtttac

SEQ ID NO: 608383 - DNA, 530 bp, Homo sapiens
cttaatatctctaccagccaattaacttatgtatagctactaggaatgaagaaggtggcactcgtgaaacagcattatccaaggctctgtgacagctggttgtgggaactacaccgtatagagaggctgtatctatggagatggaatgaaattctaaggttctgttggaatgattcccacaatagaatcttgattggtaaaatatggaagcctttcattcttatcctgctttattagagaaaccatctgcattaacaaaagatgcatctactcaatggagcagtttctgagaggtccctggtcactgtgagccttatagttacaggattaattgttgctgggagactagtgtgtttcccgctgcctcttccctgggctgcccttaacrcggctcttccggcccctagtggcacctctgccttcagggtgcatgtccctgcacctcgcatggccaggcctgcctggatggttgtgactcctcaggttgtattacaggctatgccagctactgatcatttgtttttgtttac

SEQ ID NO: 608384 - DNA, 598 bp, Homo sapiens
tcagcacaaaattatgaggaatacaaaaatgcaagaaaacaatacacacctaaaagacaaagcagtgagcaaaaccaaataattcagatatgacacagatgttggaactaaatgatggggaatttaaaataactgtgattaacatgttaaaggccctgatgaaataggaagacaatgcaagttcagaggggtaatgttataggctgggtgttttcattcctcccaaatttatatgttgaagccctaaccttcgatgtgacgacatttggagggaagtctttgggagataattagggttagattaggtaatgagagtggggcccttgtgagggattactgtccttgtatgaggagagcaagatccstccctcatttccttcctctctctccatgtgcatgcaccaaggaaggccacgtgagagtgcagtgagaagatggccacaggcagccagaaacggagccttcaccaggagcagaacaagctggcatcttaatccttgacttcctagcctcctaaagtgtgagaaataaatttctgttgttcaagtcatctagtctatgatttttgctatggcaccctgagatgactaagacaggt

SEQ ID NO: 608385 - DNA, 466 bp, Homo sapiens
ctgacagaagaataatggactaaagtggaccacacgcaatttgaaggggatgattttaaagtactgtggtgggtccatcaagctcatcttcataatacaagatatgtttatgttgacattggcttttgggtgacagggaccttgactggagacaagagaggcagtaaaatagactccaaaacagccattcaacgttcagcgtttagagcaccgtacagtgtggtgccattctgccctcttgggtcagaccaaacstgcattagtctgctggataacaaattaccctaaaactcagcagatgcaaaccacaagcgcacacttgctctcctgattcctgtgacttgggaatttggtagcagcttgcctaagttgttctggcttgggggtcttgtgagattgcagtcaagatgagagccaggagcagtcatttgagggcttgatgggggctggaggatattccatggct

SEQ ID NO: 608386 - DNA, 466 bp, Homo sapiens
ctgacagaagaataatggactaaagtggaccacacgcaatttgaaggggatgattttaaagtactgtggtgggtccatcaagctcatcttcataatacaagatatgtttatgttgacattggcttttgggtgacagggaccttgactggagacaagagaggcagtaaaatagactccaaaacagccattcaacgttcagcgtttagagcaccgtacagtgtggtgccattctgccctcttgggtcagaccaaacctgcattagtctgctggataacaaattacccyaaaactcagcagatgcaaaccacaagcgcacacttgctctcctgattcctgtgacttgggaatttggtagcagcttgcctaagttgttctggcttgggggtcttgtgagattgcagtcaagatgagagccaggagcagtcatttgagggcttgatgggggctggaggatattccatggct

SEQ ID NO: 608387 - DNA, 597 bp, Homo sapiens
gccttcttaagagcatccactttttaaaaaaatcctttgtcatttcctttaattaaagcctggttagtattgtagagtggcctcatgccctcatgcacgaattgtacatgtctgtccctgtatgtcactgtatagtctaaatgtccttgaaaaatgatttatgcttcattttctcttattgctgataaatcttaaattctgtgtagtatttttaaaaagagatcacttaacatgctaattggactcaaaatgcacctagaagagttcgtaaaactagtctcagagtttctaaggtcagttgaattggccaataccacattgcttaattaccytgaaaagcatttctgaggattccttgtttcctaatcctcgttagctacatacatttggtttaaagagtcatgctgactttgggggttttattttcttcctttagaaggaggaattgttttggttgaccagtgattagaagttcacattttgcacattaaactcaccatgcagccttcccaaactatacattcctggtcccaagcccgagggtgctaatttagacaaaaatatggttggagccggcacttctgcttaagtgttgca

SEQ ID NO: 608388 - DNA, 594 bp, Homo sapiens
tgtgagattgttcccaaggagtggctgatttctgctcttcccatatttcctcaacacctccttgtccctagaatagaaagtatcaattatgccactgttcagtgggcaaaggcccgattgtttttcaggatgatctcaattttggtgactatttgggtctatgatatttcccaacttgtattttgtaggatattaaaattgygcctatgacagcctccatgacgtggagctgctttgattgtgttcatgacatgcgctccaaaggatgatttccatttggttcttcttgcatgagcaatgggactacagatctgggtccacatcagcctgtgttccgggagagggggttacgggggtttacccttttttttcttttttttgagatggagcttcattctggttgcccaggctggagtgcaatggcgcgatctcggctcactgcaacctctgcctcctggattcaagagattctcctgcctcagcctcctgagtagctgggattacaggcgcccaccacaacgcctggctaatttttttttttgaatttttagtagagacggggtttcaccatgttggccaggctggtctcgaatt

SEQ ID NO: 608389 - DNA, 594 bp, Homo sapiens
tgtgagattgttcccaaggagtggctgatttctgctcttcccatatttcctcaacacctccttgtccctagaatagaaagtatcaattatgccactgttcagtgggcaaaggcccgattgtttttcaggatgatctcaattttggtgactatttgggtctatgatatttcccaacttgtattttgtaggatattaaaattgtgcctatgacagcctccatgacgtggagctgctttgattgtgttcatgacatgcgctccaaaggatgatttccatttggttcttcttgcatgagcaatgggactacagatctgggtccacatcagcctgtgttccgggagagggggttacgggggtttacccttttttttcttttttttgagatggagcttcattctggttgcccaggctggagtgcaatggcgckatctcggctcactgcaacctctgcctcctggattcaagagattctcctgcctcagcctcctgagtagctgggattacaggcgcccaccacaacgcctggctaatttttttttttgaatttttagtagagacggggtttcaccatgttggccaggctggtctcgaatt

SEQ ID NO: 608390 - DNA, 500 bp, Homo sapiens
taaatctgtttatagcagtgtatctgcagcctatagtttttatggtggctacacagaaaaagattagacaaaaagatgcccagaggattaaaatattacccttgctgagttagaggtagggtcgtttgaatgggctgataactgttgaaaaaaatacttaacagtggccagcctgtgacatcctatgctgcctgaatgtactttttcctcattttcagatctatcaccacaataccaaatayttcctagagcagtcaaaattctttcccctcagatctcagctaagggtcctgtggcttccaattaaaactctcaggatttagttttcattacctttccactagaatatttatgacttcctgtagagctagacttcaacagcttttaaccatatggaaatttgggggaatttgttgcattgctttcttacctgaaaatgtttacaggcctgaaagttgagttgatagaaaatagattccttaatttcatgaaaatctgca

SEQ ID NO: 608391 - DNA, 330 bp, Homo sapiens
ttatttcatttccttgaacataggctctttctcatcagaggatctttgcacatgatattccccagtcctggaatacctcttcccactacaccctgccattaggcaactaactccctctttcagttcaacctcaattgcacctcttgyaattataaattcttcccaaccttcctaagtagatgaagtctccccattatttgctgtcatagcacttacgcatcttcctcaagacatttatcactttaaagtctttaagggtattaaacgtttgcattgctctatatccccaatacctaacatacagtaggtattcatcaaatatttattgac

SEQ ID NO: 608392 - DNA, 653 bp, Homo sapiens
ccattgcactccagcctgggagacaagagcgaaacttcgtctaaaaaaaaaaaatcataactaaccccctttgtacagcatagatcacagagcaaaaaaaaaaattatcaaaatagagaagtgactgtatttatggttcccaatgttatttcttttttaaagagtctaagaataaaaatgaattttagtcacttatttttaacttcctaaaataygtaccttccttgatggcgctgggattattcagtgagttttctttttggttcctaatattttgttttgataaattataaaatttccctttctcacctgtctagtcaacaccatctcatgtgagttacattcacactggcaactagatgctcattctaccaaacatgaattaaaaatggaaataatacatttgaactgacaaattgctttgcgaattgatctcaagcaccagttttatgcaactttggaaacttttccagtatttaatatttgtttgatggctgcttaaataaacatttttcaccctagcaatattaaattgaccaaacacaaggtattacacattttttgttagtgatgggaagagttttgtgtctgcctggatagacttaaataaaatgttcatctttttactattaaagttaatttgatattatgca

SEQ ID NO: 608393 - DNA, 612 bp, Homo sapiens
tgaaaataggatggttgaaattgaagccttcagtggtagagtttcagatgattgccttcaggaaagatgaaccaagatggagaagggaaagagggttttatgcttctgttggtagcgttaacattttctattaaacacacacacacacacacacacacacacacattttggaagcagggaatacagatttagctgagaagcctatcttttgtatcatatrcccttggttggtataaagtccaggcatcctgattcaagtgaattctgtgtaaaaataaaaatgagttgtcaagcttttacccaataaaattggttatgtttttctttatgaactgaaaagtatgtctattgtagcataaaaataataacaacaattcttaaggtttattttatgtttatgaatttatttttctcacagaaaaatttatttttctctttaataattgccttcagcactcttcctcctaggaggaacaaaagcaaggcacactagaaagtactagactgaaagtatagcagaaactctattaattgaaacacagttcaagtcaacacagacaataaagccagtggctggggtaaaatttaactgacccgttcaaggttgagaaa

SEQ ID NO: 608394 - DNA, 612 bp, Homo sapiens
tgaaaataggatggttgaaattgaagccttcagtggtagagtttcagatgattgccttcaggaaagatgaaccaagatggagaagggaaagagggttttatgcttctgttggtagcgttaacattttctattaaacacacacacacacacacacacacacacacattttggaagcagggaatacagatttagctgagaagcctatcttttgtatcatatgcccttggttggtataaagtccagkcatcctgattcaagtgaattctgtgtaaaaataaaaatgagttgtcaagcttttacccaataaaattggttatgtttttctttatgaactgaaaagtatgtctattgtagcataaaaataataacaacaattcttaaggtttattttatgtttatgaatttatttttctcacagaaaaatttatttttctctttaataattgccttcagcactcttcctcctaggaggaacaaaagcaaggcacactagaaagtactagactgaaagtatagcagaaactctattaattgaaacacagttcaagtcaacacagacaataaagccagtggctggggtaaaatttaactgacccgttcaaggttgagaaa

SEQ ID NO: 608395 - DNA, 612 bp, Homo sapiens
tgaaaataggatggttgaaattgaagccttcagtggtagagtttcagatgattgccttcaggaaagatgaaccaagatggagaagggaaagagggttttatgcttctgttggtagcgttaacattttctattaaacacacacacacacacacacacacacacacattttggaagcagggaatacagatttagctgagaagcctatcttttgtatcatatgcccttggttggtataaagtccaggcatcctgattcaagtgaattctgtgtaaaartaaaaatgagttgtcaagcttttacccaataaaattggttatgtttttctttatgaactgaaaagtatgtctattgtagcataaaaataataacaacaattcttaaggtttattttatgtttatgaatttatttttctcacagaaaaatttatttttctctttaataattgccttcagcactcttcctcctaggaggaacaaaagcaaggcacactagaaagtactagactgaaagtatagcagaaactctattaattgaaacacagttcaagtcaacacagacaataaagccagtggctggggtaaaatttaactgacccgttcaaggttgagaaa

SEQ ID NO: 608396 - DNA, 612 bp, Homo sapiens
tgaaaataggatggttgaaattgaagccttcagtggtagagtttcagatgattgccttcaggaaagatgaaccaagatggagaagggaaagagggttttatgcttctgttggtagcgttaacattttctattaaacacacacacacacacacacacacacacacattttggaagcagggaatacagatttagctgagaagcctatcttttgtatcatatgcccttggttggtataaagtccaggcatcctgattcaagtgaattctgtgtaaaaataaaaatgagttgtcaagcttttacccaataaaattggttatgtttttctttatgaactgaaaagtatgtctattgtagcataaaaataataacaacaattcttaaggtttattttatgtttatgaatttatttttctcacrgaaaaatttatttttctctttaataattgccttcagcactcttcctcctaggaggaacaaaagcaaggcacactagaaagtactagactgaaagtatagcagaaactctattaattgaaacacagttcaagtcaacacagacaataaagccagtggctggggtaaaatttaactgacccgttcaaggttgagaaa

SEQ ID NO: 608397 - DNA, 602 bp, Homo sapiens
tcctctctactgttatggttaagtttggcattagatctaagattttagacttccatatatataatttatatttatgtaaatctatatataatttatatttatattatttttatatttatatkatttatacttatttttataatataaaaattaaaaggttctatatataagacatacaagtaacaatatacaaataaaacgaggatttttttacacaaaaggatatttatggtttgctctattatacttactatcaatgtcactggcctgccttcagggttaaatccaccagtaagtattctgcagtaaatgagttaccataaacatggtgttaacttgcgcttcctggaaaatggaaacaaatttctctggaagttgaggatgtgattattcatcataatgaagtatcttctattggctccatttttgttttctaagctctcaattattttagccacaatcacagccagtgcacagggtctcaagctggacacattaaaatcaatgggtggctcgaaatgattcaacatgatgtgcctttttcatttcaaaatgaagaacaacaaaaattatcactttacttctactgattcaagctggaa

SEQ ID NO: 608398 - DNA, 601 bp, Homo sapiens
ctcttgtttttaagttgcatttgtccttacagtggctactaggtgttgggaacactgcccgggagctaggaagagcaattagggctggaggctgtttggcgccaacaggctgttgctgagtgcggatgaaagtccagagagagagtggaaggtgggggtcaaagggcatggtggtgccctgcatggcagatggtggagaaactgcaccaggcaggtgcctcaggctttctgggtcaggggagagggtcaggtggccyttgaagttctgtttgctgttagcctgactgagttaactgcatgggtacctgactgtctttgctcagtctcctagtggacaaccacatttccggaaggcttttcacgagtgatatagcaactaatgctctcccagggctcactgcctggcaggctctgctccaaatgctttcatatgttaactaattcaatcctcactatgaggattctctactcccatgagacagggattcaagggagtataaggttgtgttggatgtgtttcctggcattagtaaaagaggatgtgaggcaagagcaaaactaatgcatgtgctgaaagagctatggtgcaaagagtacacac

SEQ ID NO: 608399 - DNA, 595 bp, Homo sapiens
tttattgtaggttttgctgaaattttccccaagggggaggatgacttagttgggtgatgggggkagcaaacatccctgtcgtcagggttgggtgcaaggagcataagcctgcctggcctctgggagagccctcactgtgtggcctggagccttcctaactgtgcatcatctccccaggaccatccacctgaccatgccccaactggtgctgcaaggatcttatgacctgcaggacctgctcgcccaggctgagctgcccgccattctgcacaccgagctgaacctgcaaaaattgagcaatgaccgcatcagggtgggggaggtatgtgtgagcctgtgtctgtgcctgacctgggttccaagtgtgcacagggtgggaggcatggatgtaagggacacagaggaggctatgggtggggccagcagggcaagagggagcggagagtagggccaaaggtgggagagaagtagccagagcattctggggccttccaggtgcagagcagcaaatccctccccatccctgctgtgcctcctcctgctaggtgtgtgttccatggtcctgcttggccttgccttgcctcagggtcctcca

SEQ ID NO: 608400 - DNA, 595 bp, Homo sapiens
tttattgtaggttttgctgaaattttccccaagggggaggatgacttagttgggtgatggggggagcaaacatccctgtcgtcagggttgggtgcaaggagcataagcctgcctggcctctgggagagccctcactgtgtggcctggagccttcctaactgtgcrtcatctccccaggaccatccacctgaccatgccccaactggtgctgcaaggatcttatgacctgcaggacctgctcgcccaggctgagctgcccgccattctgcacaccgagctgaacctgcaaaaattgagcaatgaccgcatcagggtgggggaggtatgtgtgagcctgtgtctgtgcctgacctgggttccaagtgtgcacagggtgggaggcatggatgtaagggacacagaggaggctatgggtggggccagcagggcaagagggagcggagagtagggccaaaggtgggagagaagtagccagagcattctggggccttccaggtgcagagcagcaaatccctccccatccctgctgtgcctcctcctgctaggtgtgtgttccatggtcctgcttggccttgccttgcctcagggtcctcca

SEQ ID NO: 608401 - DNA, 587 bp, Homo sapiens
tctttttttttttaacttgcgaaatctgttttattcaagtttctttcaagccaagtggctagaactaaggttaggtttcatttttgagtatgagattagcagttgtcttagctcgagagctaaaacattaattttgaagcaggaaaggtaaaacacagaagtatcatctcagcaagcaaaataagctttttttccccccttgagtctttaatgaagaaaggaagtgaaaagagataaaaagaggcctgtctctgcatactgtactaggcatcttccatgtcagtatcagcattctgccttcctcgayaagactctcagcctgggaaagaaggaaaccaagaattatcctcacaaccagaattgttctagagattttgtggaaacacatttattaaagactgatatagtttggctgggtccccacccaaatctcttcttgaattgtagctcctataattcccatgtgttgtgggagggacctggtgggagttaattgaatcatgggggtgggtctttcccgtgctgttctggtggtagtgaataagtctcatgagacctgatggttttacagggggaaacccctttca

SEQ ID NO: 608402 - DNA, 647 bp, Homo sapiens
aagttgttaattcttttgactatggggaatcacgcaaaaggaacatatcagatgtgaattttaaataaataggtcagaattcaaagaactctgaggaagctggttttgaaagacacattaggaggctatggtctaggtaacaggtaatgaggactttaattaaagcaagtgtagcagggaaaaagatggaacaatttcagtatttaatatggaatatacaaataattacctaaccagaaaactgtgctaaacatttttaattctgaacagatgttattaaatatattgtagaaccagggacaatggcatgtgcctgtagtcttagctgcttgggaggctgaagcaggaggatcgcttaaggccaggagttcaaagccagcctgagatgtatagcaagaccctgtctctaaaagaaaatygtttaataaacaatttttaaattatagataagccatctgctagccttctattggttaatccaataaaatgccaccaaaaatgtagctcctaatatttcgtaggatgatcttaattttctctgtttattactccgttatcccttctaatttcatgtctatactgtattcctttgaccttgattgaagtatttggtggtttagctgttttatttttacatttgggggttt

SEQ ID NO: 608403 - DNA, 555 bp, Homo sapiens
gagcttttcggtaaagtggcagatattaaacatttttggctttgcaggccatacagttgcaactattcaactctgttattgtagccagaaagcaactatgggcactacgtacacaaatagacgtggttatgtttcggtaaaactttatttataaaaactggtagcaggcagaatttgaccctatagtttgcccactcctgacctagagtattggctttagtttgcatctatttaaggagcctctgcagtacttggaagtccagaaacaaatgagagaaaaagtagagatacttctttttttcttttcttttctttctttttttttttttttttttttttttttgagacagagtctcattctgtcacccaggctggagtgcaatggkgggatcttggctcactgcaacctccactccgccgggttccagcaattctcctgcctcagccttctgagtagctgggattacagacacccaccaccacatccagctaatttttgtatttttagtagagacggggtttcactatgttggccaggctggtcttgaactcctg

SEQ ID NO: 608404 - DNA, 555 bp, Homo sapiens
gagcttttcggtaaagtggcagatattaaacatttttggctttgcaggccatacagttgcaactattcaactctgttattgtagccagaaagcaactatgggcactacgtacacaaatagacgtggttatgtttcggtaaaactttatttataaaaactggtagcaggcagaatttgaccctatagtttgcccactcctgacctagagtattggctttagtttgcatctatttaaggagcctctgcagtacttggaagtccagaaacaaatgagagaaaaagtagagatacttctttttttcttttcttttctttctttttttttttttttttttttttttttgagacagagtctcattctgtcacccaggctggagtgcaatggtgggatcttggctcactgsaacctccactccgccgggttccagcaattctcctgcctcagccttctgagtagctgggattacagacacccaccaccacatccagctaatttttgtatttttagtagagacggggtttcactatgttggccaggctggtcttgaactcctg

SEQ ID NO: 608405 - DNA, 658 bp, Homo sapiens
tctttctacttgcaaaaaacagagggaaaagtaaagaagactgtcttgcaccttaggtaccagctctactgcagtgaggtagagcaccaggcaggctcttggggtccccagctccaggtcttagctgttagatggcatttctagacctgctctgggcaagaggagagtccagtgccctgaagggtgagtcccaggcctggcagctttcaccacaagctgtttgaagagcccttgggccttaagtaaacatcggtggtagtctggcagtactccctgtgggccagttgttttcatgaccatgagatgaggctcttctgcctgtggaaaggaagggaagagaggraaggattgtgtctcatggtttgagggtcaactcaatcacagtagactagaacatcaggaagacttctaaggtttttgactctagtccttagctcccagatggcatctctggacccatctggggtctggaagaactcaatgacctgaagggaaggatacaagcctggctggcttcaccacctgctgattgcagagccataagcccttgagtaaacataggcagtagccaggtagtggctacatcaggccttgcacaagacccagtgctatgttggcttcaggtctgacccagcacagtcccagtggtggtggccac

SEQ ID NO: 608406 - DNA, 658 bp, Homo sapiens
tctttctacttgcaaaaaacagagggaaaagtaaagaagactgtcttgcaccttaggtaccagctctactgcagtgaggtagagcaccaggcaggctcttggggtccccagctccaggtcttagctgttagatggcatttctagacctgctctgggcaagaggagagtccagtgccctgaagggtgagtcccaggcctggcagctttcaccacaagctgtttgaagagcccttgggccttaagtaaacatcggtggtagtctggcagtactccctgtgggccagttgttttcatgaccatgagatgaggctcttctgcctgtggaaaggaagggaagagaggaaaggattgtgtctcatggtttgagggtcaactcaatcacagtagactagaacatcaggaagacttctaaggtttttgactctagtccttagctcccagatggcatctctggacccatctggggtctggaagaactcaatgacctgaagggaaggatacaagmctggctggcttcaccacctgctgattgcagagccataagcccttgagtaaacataggcagtagccaggtagtggctacatcaggccttgcacaagacccagtgctatgttggcttcaggtctgacccagcacagtcccagtggtggtggccac

SEQ ID NO: 608407 - DNA, 574 bp, Homo sapiens
gaaaatttaagcccaagagcattgccaaaagcaacagagcaatttggtggaaattagtgaagcctaataatgtaacaatgaaaggatccatgaagatttaactattagaaacatatatgcatctgacaacagaggcccaaaatacacaagtcaaaacctgacataattaaactgagcaacacacaattcaataataaagctaaagactttaatacttctccctcaatgatggatagaacaaccaggcagaagaccaataaagaacatagaaaatttgaataagtctataaaactagacatgacagacatctataacacactactcaacaatagaaggctacacattcttctcaagtgcacattattctccaaacgatacatatagtaggtcatgaaacaagccgcrgtaaatttaaaagcaacaaaaatcctcaataaaatactggcaaaccaaatccagcagcacatcaaaaagcttatccaccatgatcaagcgggcttcatgcctgggatgcaaggctggttcaacatacacaaattaataagcgtaatccagcatataaacagaaccaaa

SEQ ID NO: 608408 - DNA, 451 bp, Homo sapiens
acaaggtgctgcaagaggaaagcagaatccgccgggatgtcttaaaaatactcctgggaggatgagggataaaaaactacatattgggtacaatggacactactcagatgatgggtgcactaaaatttcagacttcactatacaattcatccacgttaccaaaaaccacttgtaaccctgaaactattgaaataaaaataaataaataaaattaaataaacaaaaaatactgttgaccagatctcacctcatacaaatgtgaaagaaaaatagaatctcaggaccccaaattcactatgccaaagggaaagttaaacttgggaactgagtcatgcaaaaactkccttccttttgttcccagatagctgtaatttcggcatgcttactttagcttatgtaaaatgtagatttcctgagcgctaatcagagcctcacaagaatgtaacactgg

SEQ ID NO: 608409 - DNA, 592 bp, Homo sapiens
tgtagattctggaatgcagccatacacaagtccctggttcgtttaaccttgatctcaagatcaagctttactcttgatgattttctatgcccttcgcctatgggtaaagcctcccataatcttatccaaactgacctaggggttggagcccctacaagccaaatcacttcagctttctgatcttttgtcctcaagctcctagcatgtgtttctaatcactgcattgtgccccctgtactctgagccacttcatgtcaagactcccaaaagagcttgtttctgtctgtattatctgatgccctagaagtcagcaaataatagccagaggatgaaatctgacctgtggtctgtctttgtatcctgtgagctgaaaaagtttttaaatggttggggatagagaagaatcaaagaagaataatatttcatgacatgtaaatgttacatgaaattcaaatttgtgtccataaataaagtcttactggaacacagccwcattcatttgtttgtgtattgcctatgatcatctgtgaccatagcagagttgactatttgcagtagagactgtatgtcctgcaaaacctaaaatatttgc

SEQ ID NO: 608410 - DNA, 576 bp, Homo sapiens
agccattttaaaatacgacagagcattcattctgttcttaataagaccagcactcaagagcaacaagtttaccagtgcctaactaactgcggtttcaccacacgttaactaacctaggagaaaagaaatactcaactccagcctctctagctttcctgtctcacccaaaatgaaaaagcaacaaaacaaaaccgagaagcactttcgaaggtcacagcacagattccctaaaagtcagagtccccatcataggactacgaaatacttcccctccccaatatcttaccaccatatccttggggctcccgtatgataacaggcagatacagccraagaactgtgcctctctgacattatttcagaagtctttaggagaacccaaagacaacaggagagacagaaacaaggacaccagagattttaacctctgacacctaaagtgacagcaaacagcaaacacagcctaattcgtagctaagtaaacatgaaacctcacactaaatgtctatttacctctgttccctttatccactacgtcagcagttcccaacctttttggcaccagggaccagtttc

SEQ ID NO: 608411 - DNA, 421 bp, Homo sapiens
tatgtgcaataatgaatgtttttgatttacaagaaattcacctctcatccattaaatctaagctartgctatctcgctccattctactttcgcttcttcagtaagtctttcagccctcattggtgtcatgagaatgaaagaatttctccacagaaaattatttacccatcaccagttttttgtttgtttgttttgttttgttttgttttgttttgaggcggagtctcgctctgcagcccaggctggagtgcagtggcgcgatctcggctcactacaagctccgcctccggggttcatgccattctcctccctcagcctccggagcagctgggatgacaggcgcccaccaccacgcccggctaattttttttgtatttttagtagagacggggtttctccctgttagccaggatggtctcga

SEQ ID NO: 608412 - DNA, 462 bp, Homo sapiens
accctacatgtttctagtgcctttcttatttcctatgtttttcttctattttctttctcatatcatttttgaaataaatgattctagaagtcaaagaatctctgaaccaaaagagagcttacataacattcagtccatatgtctcctaccatgtccttataaagttatatatacaacawacaactgttgagcatcttctatactacataccagccaacataccagccattgttctgtaacaatggccccctaattttgagcctaaatctatttccctgtgaccatcactcattggttccacgtcttctatctgaggcgacacaggatgatccttcaaagtccacaccctctcttttccaagctgtataacttgagggtctttcaaccctgactcacttgcagtgatttcgaaacccttcatcagtttagtcttaatctcctgcagttagtcaacaccctcct

SEQ ID NO: 608413 - DNA, 549 bp, Homo sapiens
caggtatggtgactcacacctgtaatcctaacactttgggaggctgagatgggagtttaagaccagcctgggcaacatagtgagactctatctctaccaaaaaaaaaaaaaaaaaaaaaaaaactttaaaaaatattaggcgagcattgtggcccaggcctgccctagctactgaggaagctgaggcaagaggattgcttgagcttaggagttcgaggctgcagtgagttataatcctgggcaacagagtaagaccttgttaccaaaaaaaaaaaaaaaaaaaaaaaaaatcaaaatttgttcaaagttcatatttaaaatatcaactttgctgcattacaagttctatgatcaagtgactagaaragcaataaatgggaaagcagcaattttacatcttattcttagaagtactcttctttgactctttgggagcaaactgatttggtagaaagctggacaaacctaggtttgactcccagctctaatgcttaacaggcaagctccttcactcaaagctgtctatgcaccatttctccactcacaaaa

SEQ ID NO: 608414 - DNA, 549 bp, Homo sapiens
caggtatggtgactcacacctgtaatcctaacactttgggaggctgagatgggagtttaagaccagcctgggcaacatagtgagactctatctctaccaaaaaaaaaaaaaaaaaaaaaaaaactttaaaaaatattaggcgagcattgtggcccaggcctgccctagctactgaggaagctgaggcaagaggattgcttgagcttaggagttcgaggctgcagtgagttataatcctgggcaacagagtaagaccttgttaccaaaaaaaaaaaaaaaaaaaaaaaaaatcaaaatttgttcaaagttcatatttaaaatatcaactttgctgcattacaagttctatgatcaagtgactagaagagcaataaatgggaaagcagcaattttacatcttattcttagaagtactcttytttgactctttgggagcaaactgatttggtagaaagctggacaaacctaggtttgactcccagctctaatgcttaacaggcaagctccttcactcaaagctgtctatgcaccatttctccactcacaaaa

SEQ ID NO: 608415 - DNA, 615 bp, Homo sapiens
gctttctccaacccatggaattccatacttccgtgctacagtaggctgaataaaagctcccaaaggtatctagttcctaacccctggaacctatgaatgttagcttacatggaaaatgggactttatagacatgattaagttaggatcttgagataggagggttatcttggatcatctaggtgagccctaaatgtagtaacaagtatccttatgcagaggggcggagggagatttgactacaagagaaggaggcaatgtgatcactggaagaagatgctacattgctggttttgaaggaggaatgggtcatgagctgatgagttcatagaatgtagctctagatgctggaaaaggcaaggaaagagactctccctcagagcccctaaagggagcgtggtcctgccaacatstggattttggcccagtgaaattgattccagatttctgacttccagaactgtaagggagtaactgcatgttattttaagccaccaagttcctggtaactggttacagcagcctgtggacactaatatatgtgctaaagaagaaggaacctgggaccttggaattgattcatgaacccttgagaaactgtattaacatgccttatg

SEQ ID NO: 608416 - DNA, 594 bp, Homo sapiens
tttttcccttccctttctttctcctatttgcacgtcatgttgtggagggcagaatgaaggaaaagagaataagaagtgaagaattaaacaaattaggtgcaataatagccaacagaaattacaaccaccacagttttcaggcacaagtagcattatataaaggaaaaaaaaaaagatcatgagttttagaatcagaaagcctagcttcaaatcccaagcctgggtttaaatcatttagccttaattttgtcaactaaaccaaatagattagtttgtgaaaatatgtgagttattggtatgtaataggtgtttaacagctgttcattttccagacatcttataatctgtgaaatgacttatgatttcatgatttgaaaygattaaatgtgaactatttatttataaaatagaaaatgtattttcttaagaaaatctatttttcttaaatgtatggcttactaaaagttaaatgaaatatttttctttccaattagttaatgatatatctggattttgttgaaagctgataaagggactcaggttacctagcttttgggttaatgaatttaacatctacaagagtagagctacgat

SEQ ID NO: 608417 - DNA, 567 bp, Homo sapiens
gccaccgtccttccatcaaggatataccatgacaatggttgcaactgagttctgttccacttccatccattgttagtccctaaggacattccagggttaactcctcagaatcctgctgctggatgacaccacaggcaaagttcagcagcttcacttacagagtaagacttatcactactgccaagatgtgtttttaaagtatgcactcagcttttattacaccatcctgttactttttaaatcaactgaaatcttgctatgtttcagaaagttcaataattccataaacaaaaatcacactatttaggttactgatctatttcccttattgaaaggtgagaatgcaaattacagaacacygaagattaggacatattaggtcaggtagtaaattgatagactcgagctattattttttagcttttcacccaagcacaatgaaatatttgctataagggatgttgaaatttctctgtgtgttgtcatattaaacaatgttgtgtgctagtgataccactgtataaaaagtcaaagaatctttccgagactatttcagaaacaacttac

SEQ ID NO: 608418 - DNA, 567 bp, Homo sapiens
gccaccgtccttccatcaaggatataccatgacaatggttgcaactgagttctgttccacttccatccattgttagtccctaaggacattccagggttaactcctcagaatcctgctgctggatgacaccacaggcaaagttcagcagcttcacttacagagtaagacttatcactactgccaagatgtgtttttaaagtatgcactcagcttttattacaccatcctgttactttttaaatcaactgaaatcttgctatgtttcagaaagttcaataattccataaacaaaaatcacactatttaggttactgatctatttcccttattgaaaggtgagaatgcaaattacagaacaccgaagattaggacatattaggtcaggtagtaaattgatagactcgagctattattttttagcttttcacccaagcacaatgaaatatttgctataagggatgttgaaatttctctgtgtgttgtcatattaaacaatgttgtgtgctagtgataycactgtataaaaagtcaaagaatctttccgagactatttcagaaacaacttac

SEQ ID NO: 608419 - DNA, 576 bp, Homo sapiens
ctgaaacagtccatttagaaatcttttttaggagataaaatatggacctaaaaaaagaagatacacacacacacacagataattccaaggaattaagcattgttcacaagtgtaaggtagactgctctgcatccagataatgcatgaaaaaaataatgttttaaaactacccataaatggattacacattaaaagaaaaagaaattgaattatctttcagtgataagaattctttcaattattatacaattttcacattgtggcattttcagcatttgtgattaaattcatacgttgttcgttgaattattgatttacattgattaaatttgatgtttatgatagaattttccagagttgggtagagaggggtgctcccaggattaaagccaagtatattatcactgtcaagtttctcaccatatcctagctgggagataataaagtcgaattcctcaatggtgtggatacttgcgaggtcacygccttccttcctgcaggtggtcagagcatccctctggatttttttctcatctctgtgaatcttgtaacagtgaccggcatacggccaccact

SEQ ID NO: 608420 - DNA, 520 bp, Homo sapiens
gtgcacttccagtggttacaaaaaaaaaaaaagaagaaaaagaaaaagaaagcaagcttagtacagctttggagccctctggtgggttattttaattttgctacctaggaaattgaaaatagtatcagccaatgctgagtccttcaaaaactgaaatgatgaactttaaamatatttgaaagcatgaaaacaaccaacttgagtgaaatgaaggggagttccctggggcagccacagaagatgatttgttcctctagccacagctcatgtgctcagtggccacatgcggttaagtggctgctaagccagagagtacagccctagagacctgaggattatggacaaacgggttagagttacaagaattcacagggtttgaggttgaattcttgcctaaggctgttgctaatcccgtatgctgcataatttgaactctgatacgcttttccaagctctggtttatttgagtttatagataaaacagaatcattaacccagggagtatagagatgttcagaaa

SEQ ID NO: 608421 - DNA, 520 bp, Homo sapiens
gtgcacttccagtggttacaaaaaaaaaaaaagaagaaaaagaaaaagaaagcaagcttagtacagctttggagccctctggtgggttattttaattttgctacctaggaaattgaaaatagtatcagccaatgctgagtccttcaaaaactgaaatgatgaactttaaaaatatttgaaagcatgaaaacaaccaacttgagtgaaatgaaggggagttccctggggcagccacagaagatgatttgttcctctagccacagctcatgtgctcagtggccacatgcggttaagtggctgctaagccagagagtacagccctagagacctgaggattatggacaaacgggttagwgttacaagaattcacagggtttgaggttgaattcttgcctaaggctgttgctaatcccgtatgctgcataatttgaactctgatacgcttttccaagctctggtttatttgagtttatagataaaacagaatcattaacccagggagtatagagatgttcagaaa

SEQ ID NO: 608422 - DNA, 520 bp, Homo sapiens
gtgcacttccagtggttacaaaaaaaaaaaaagaagaaaaagaaaaagaaagcaagcttagtacagctttggagccctctggtgggttattttaattttgctacctaggaaattgaaaatagtatcagccaatgctgagtccttcaaaaactgaaatgatgaactttaaaaatatttgaaagcatgaaaacaaccaacttgagtgaaatgaaggggagttccctggggcagccacagaagatgatttgttcctctagccacagctcatgtgctcagtggccacatgcggttaagtggctgctaagccagagagtacagccctagagacctgaggattatggacaaacgggttagagttacaakaattcacagggtttgaggttgaattcttgcctaaggctgttgctaatcccgtatgctgcataatttgaactctgatacgcttttccaagctctggtttatttgagtttatagataaaacagaatcattaacccagggagtatagagatgttcagaaa

SEQ ID NO: 608423 - DNA, 520 bp, Homo sapiens
gtgcacttccagtggttacaaaaaaaaaaaaagaagaaaaagaaaaagaaagcaagcttagtacagctttggagccctctggtgggttattttaattttgctacctaggaaattgaaaatagtatcagccaatgctgagtccttcaaaaactgaaatgatgaactttaaaaatatttgaaagcatgaaaacaaccaacttgagtgaaatgaaggggagttccctggggcagccacagaagatgatttgttcctctagccacagctcatgtgctcagtggccacatgcggttaagtggctgctaagccagagagtacagccctagagacctgaggattatggacaaacgggttagagttacaagaattcacagggtttgaggttgaattcttgcctaaggctgttgctaatcccgtatgctgcataatttgaactctgatacgcttttccaagctctggtttatttgagtttatagataaaacagaatcattaayccagggagtatagagatgttcagaaa

SEQ ID NO: 608424 - DNA, 597 bp, Homo sapiens
ttttctataaactactgtcgagaaacctctaatgaatttttatgctagtatggaatatcataagctgtaactgagatagtatttttaagccgatgttattaaatcaaaaacaggaaaagtgggtgttaatgtagatgttaaaatcactgtcacaaggacagcaatattgcaaatacctcatgactcaaggtacagtcataaaaaatctctccaacccaaaataatttcaatccacttgtcaaactttacaaagagatgttggctaatcctctcaaggatgttgacaaagtcaatgcaacagcaagtatatagtaacaatgcaagtagcatatttagtaaatcatgtttaagagtagccacaacatctgcttttgaatatagtacccaacacatcagggatactctgagaaytgaaactttaaacagagacctttattgttttgtgtgagaatcctggcagacaaatccctatcccaggaagctggtataaccttacaattcagtatatggaaatctagcatagatttcaaaacaaggtgaaatgaactgtatttgatgaagtctcccaattcttctctttgagatcaacaggtgaga

SEQ ID NO: 608425 - DNA, 682 bp, Homo sapiens
tagggaacatttgtaatatcataaaacaaaacagaagaaaaaccccagatctcaaaataaaatgtagatctttcagttgaacaaatttagctgactaaaaaaggcaatcacatgagtaacatttttctcacttctgtgcagacgtttgaaaacttgccacagatcactgattcttctagcacaccaccacacttgtcctgcatctttcttcctctttccaacaactttcgtcctcgtctcttttttttttcgtgagacagagtctcgytctgttgcccagggcagtggcatgatctcggctcactgcaacctctgcctcctgggttcaagcgattctcctgcctcagcctccagagtagctggggttacaagcgcccaccaccacacccggctagtttttgatttttagtagagacggggtttcaccatgttggccaggctggtctcaaactcctgacctcaggtgatccgcctgtcttgccctcccaaagtgctgggattacaggcgtgaaccactgcacccggctcttgtctctttccttaagcaaaaaaaaactgtctacaaaatttcgggaaacccagctaatctctgaagttctcctctgtaacatgttgcacccatcctcaagtccaccttcgctgtgggctccctcactgggggagactcaggctgacctgagag

SEQ ID NO: 608426 - DNA, 682 bp, Homo sapiens
tagggaacatttgtaatatcataaaacaaaacagaagaaaaaccccagatctcaaaataaaatgtagatctttcagttgaacaaatttagctgactaaaaaaggcaatcacatgagtaacatttttctcacttctgtgcagacgtttgaaaacttgccacagatcactgattcttctagcacaccaccacacttgtcctgcatctttcttcctctttccaacaactttcgtcctcgtctcttttttttttcgtgagacagagtctcgctctgttgcccagggcagtggcatgatctcggctcactgcaacctctgcctcctgggttcaagcgattctcctgcctcagcctccagagtagctggggttacargcgcccaccaccacacccggctagtttttgatttttagtagagacggggtttcaccatgttggccaggctggtctcaaactcctgacctcaggtgatccgcctgtcttgccctcccaaagtgctgggattacaggcgtgaaccactgcacccggctcttgtctctttccttaagcaaaaaaaaactgtctacaaaatttcgggaaacccagctaatctctgaagttctcctctgtaacatgttgcacccatcctcaagtccaccttcgctgtgggctccctcactgggggagactcaggctgacctgagag

SEQ ID NO: 608427 - DNA, 606 bp, Homo sapiens
ctattgccttctcttttaccatgtcacctctcagctatggccttttatgttgatccatgattgagtcaactatagaagacataattaattcatataaaccatatacaaatataaaatattcattgaagagtagtatgtatcgtggttagaaacaaggactccagggccagcttgcctgggtttgaatggcaactccatcacttcccagctgtgtgtccttgggaaagtcacttaatctctctgtgcctcagtttcctcatctgtaaaatgggaataataatatctaccttgtagcattgttaggaggattaaatgagctgataaatgtaaaatgtttacaacagagcctggtatatagtaagtatcctgcatttactattattattgcatacattgtgcacatcagctttctgaaggaagatcyagaacttactctccagagtggtaggtggcagctttgcttgttggtccttgggtaagtggcaggagcagctgaggagctgctggatgatccctggactcatttgcttaaagtcctccttagaaatgagtgagaggcccttctgtagaaatatctccaccagctgcctagcagagaagcaggtc

SEQ ID NO: 608428 - DNA, 542 bp, Homo sapiens
aagagaaacaatggcaatacctgatcccaggaaattggaccatcctcagactctttttccatggatgaagagaaattagaatagtcctgatcatgggttattatgttgttttgtttcctttgaaattgatggattttctcatttttgatacaagtacttctggtccagagagtgttgaggagttggtctagttctagaaatttcatataaaatctggtgtcacatagaatagataagttcmgaatagtcacaatttcacatagctacagcatagatattcccttacaaagaattcttatcattttttaagccctagagatgacagaatggacatttccacccacgaaaatgccttccattgcgtcaaggattttctttttctataaaaatgtaaattaaagatgaaactggcctaatccttaggaaattattccctggaggcattatacatccatcatagattaattattactttagttaagtcaatcaaattgttttccttttaagtgtatatgcaaaagaaagaaaagccgtgaaaggga

SEQ ID NO: 608429 - DNA, 482 bp, Homo sapiens
ctttgtttttggcatagtttatttagcaggtgtgacttggaagttaaattcgtgaaaacatccttacctgataggcggagkgtattcgtacgattcaaggaactgaaaatatattctgtaaagtagtctggggaaggcaagtttccttgtcccagacaaacaccctggagggacaaagtaatgatcatggctgccaactgaggaagcgtactttcattagcaccttcactgctcactattccagattttttctgcagcgttttggtttccatacactgaaatcagatacaaaataaagagaaaattgtaacatctgaagttattttgattctaacatctctgaaatttccccctaaagggataaggaatcgtttttctaaaagaaaattgaatcatttgaggaatatgactatcatctttctcctgtctcagatacaactctatttgaaaattatgtgtttatctaccatggcactgaattt

SEQ ID NO: 608430 - DNA, 385 bp, Homo sapiens
aatgatcatggctgccaactgaggaagcgtactttcattagcaccttcactgctcactattccagattttttctgcagcgttttggtttccatacactgaaatcagatacaaaataaagagaaaattgtaacatctgaagttattttgattctaacatctctgaaatttccccctaaagggataaggaatygtttttctaaaagaaaattgaatcatttgaggaatatgactatcatctttctcctgtctcagatacaactctatttgaaaattatgtgtttatctaccatggcactgaattttctaaccctcatctcactggtccttatttatccagcttttctccctatccttttttttttcttttttttagaccgagtttag

SEQ ID NO: 608431 - DNA, 628 bp, Homo sapiens
gaacttctcatggtacaattcagaaacgcccagggtcgcacagctagtaggtgccaycagaaatcaaggtctctctgtgtcaatttgtgcttgtactactgggcaactacctgttgcaatgggaccccatatttttatctgtaatctaagattctttttacactgctgtacggatacacaaatgactcagacaaacactcatcaaaaagggaaataacctactacattttaatttttgcattctctccaaagcctcttcagcccaaagtctcagaaaaaattaatttaaaaaaattgtagaactttattactctagctagtggtccttctgttaatcttttcaaaaaacaagctcctggatttttttaagggttttcatgtctctatctccttcagttgtgctctgatcttagttatttcttgtcttctgctagcttttgaatttgtttgcacctgcttctctagttcttttaattacgatgttaggatgtcaattttagatctttccagctttctgttgtgggcatttagtgctataaatttcccgcttaacagtcctttagccatgtcccagagattctggtacattgtctcttggttcttattagtttcaaataacttctttatt

SEQ ID NO: 608432 - DNA, 657 bp, Homo sapiens
ggagttttggttgaatgaaaccaataaactcctatccccaagagattgtttttatcaagttttctgttgatttgagccaaaggcaaacactcacagagcttgagacaatgatatgtcttgtcatcttgtttcttaaagtgacactttcaggcataaaagaggctggtggaaatggagaattggtatcaagaggcctggtgggtgtggrcacttcatttcatagctattctgagtcactctgagtgaatcactgtgcacacaggtgtattcattatctatttctgcatggaaaatcaacacaaacttaatcacttacaacgagtggattatttcataatttctgtgggttagaagtccaggcacagctcagctgggtcccttgcttctgggtctgtcagaagactgcaatccaggtgtcagctagggctgatgtttcttctgaaggctcaactggggaaggatcccctttcatgctcatgtgattgttgacaatctaatgtaatctaatcacagaatgacatcctatattttactggtcagaagtgaattgcaggccccgcccacacttaaggggaggagacaccatataggcatgaataccaggaggtggggatcactgggtgccataaggcatcgagggtaggggtagaaaattat

SEQ ID NO: 608433 - DNA, 587 bp, Homo sapiens
ttggtgtcaattgatggatgtatcaaaattgtgtgactcattctaaaattcctatctttaaatagcccttaatgatactttttaaaacataaactcaattatttccaagaaagaatatttgatgttatttatgtggattgaactaatggcattgacagcattctaccaaataaattgttcaatgattattcaatggatttyagtctcagtataaaaagggatcattccaatatttaattattagcacaacatataataaaatgtaaagcatttatgcataatacacagattaaaactatgtaaaatatattcatggcaaaaacattgggtatcaataaagtattaatagtaacccactagtggtaggaatattggtgatttttccttcttttatattttccaaattctattgaaaacttgtataatttagtacagccagaaaaaaaatcattgtcttagtctgttttgtgctgctataacagagtaacacggattggtaatttacaaacaacagaactttatttggcttatggttctagaggttgggaagtctgagtttgagggtctgcatctggtgaagcccttct

SEQ ID NO: 608434 - DNA, 393 bp, Homo sapiens
tctgagtttgagggtctgcatctggtgaagcccttcttgctgcatcatgacatggcagaaggcatcacatggtgtaagagcatgagagcaagagkgttgaccttgcttttataacaaacccactcccatgaaagtgatatttattcaggagggcagagccctcataatctacttacctattaaaggtcctacctctcaacactattgcactggcaactaagttttcaacacataaatgttgggggacatattcagactgtagaaataatttttaaaagataattatccaaaatcactgatatttatttgcctaatttgttttagcatcaaaagtcttcttttaaaagacatcttgaaaagaactctaatatataaatttgagaacaattattg

SEQ ID NO: 608435 - DNA, 440 bp, Homo sapiens
tttctaaagttcttaaaacgggctgtaagaattctgtgctccataatattttgtttttaatcctacctgtcccatggtgtaatttacatgttcatacctatatctcagccattactggggcatgggtctcaggcatctttgtgtcccctggaatctagtactgtattttgtggctagtaagtatccatgaattggaaataatggccactattagtcaactttaatatggacacttaactccattagacatagactattaccattttttttttttttttttttttttttaagtacgagtctgacagacctagggaaaaraatccttgctccggataggacttattaaggggcctctgagccttattctcttcatttttaaaatgggggcatcatctttccttatgacatcttggtacctagcacatccatgagctcatcaa

SEQ ID NO: 608436 - DNA, 425 bp, Homo sapiens
tcatccagaatcacccttacacacacacgcagaaataacatttcaccaattatctgggcaccctgtggcccagttgacactaaaattaataatcacaccaatgtaatattattaaaactcagcatcctattatattagaacttctggaaacttaagcttctctttagggatacgtaayatttcgcatttgatatggtttggctctgtgtccctacccaaatctcatctcaaattgtaattcccatgtgtcgagggagggaggtaattggatctgggggcagtttccccccatgctgttctcatgatagtgagttctcatgagatctgatggttttataagcatctggcatttccatgcttgcacgtgtctctcctcaccatgtaaagaaggtccttgcttccccttcaccttccagcataatttt

SEQ ID NO: 608437 - DNA, 561 bp, Homo sapiens
aaatatgtaacaagacttctggttaacatggtatatatttatctcaaatctttcctccaaacacatttataatgaaaataggggatgataaaaaagcataaataattgaataaagagaacagagaagggacaacaacaataaaaaaaatctaaaagctgaaaatggaagagtagtcatgtcttcacatgccaaattggaaatctacttgcatgaagaggagggcactgaagagaaacaaaaccctttrtcatagtccaacaaggaggctcaggaatggagcacgatacctttgaagacctggactagggtgaacgtaaaatggggactggctggatgtggtagtgccccaatttacgtgtaactgatgtgaaaggtgaggagcacctcccaacgatggctgatgaggagcacctcccaatgatggctgagttctgtagtatgaatactcctactgtggctcatttcaggctaccaataaaagaacactgaaccatctatcgcgaagagccaggtgtaagcccactccagcacaccactagctgaaagtcatagcaagaaat

SEQ ID NO: 608438 - DNA, 561 bp, Homo sapiens
aaatatgtaacaagacttctggttaacatggtatatatttatctcaaatctttcctccaaacacatttataatgaaaataggggatgataaaaaagcataaataattgaataaagagaacagagaagggacaacaacaataaaaaaaatctaaaagctgaaaatggaagagtagtcatgtcttcacatgccaaattggaaatctacttgcatgaagaggagggcactgaagagaaacaaaaccctttatcatagtccaacaaggaggctcaggaatggagcacgatacctttgaagacctggactagggtgaacgtaaaatggggactggctggatgtggtagtgccccaatttacgtgtaactgatgtgaaaggtgaggagcacctcccaacgatggctgatgaggagcacctcccaaygatggctgagttctgtagtatgaatactcctactgtggctcatttcaggctaccaataaaagaacactgaaccatctatcgcgaagagccaggtgtaagcccactccagcacaccactagctgaaagtcatagcaagaaat

SEQ ID NO: 608439 - DNA, 561 bp, Homo sapiens
aaatatgtaacaagacttctggttaacatggtatatatttatctcaaatctttcctccaaacacatttataatgaaaataggggatgataaaaaagcataaataattgaataaagagaacagagaagggacaacaacaataaaaaaaatctaaaagctgaaaatggaagagtagtcatgtcttcacatgccaaattggaaatctacttgcatgaagaggagggcactgaagagaaacaaaaccctttatcatagtccaacaaggaggctcaggaatggagcacgatacctttgaagacctggactagggtgaacgtaaaatggggactggctggatgtggtagtgccccaatttacgtgtaactgatgtgaaaggtgaggagcacctcccaacgatggctgatgaggagcacctcccaatgatggctgagttctgtagtatgaatactcctactgtggctcatttcaggctaccaataaragaacactgaaccatctatcgcgaagagccaggtgtaagcccactccagcacaccactagctgaaagtcatagcaagaaat

SEQ ID NO: 608440 - DNA, 487 bp, Homo sapiens
gtaaatcccagtccaaaagcaggataagacccagctccagcaggcagaaagaagcaaaagcaacaaattccccctccattcttctgccttttgttctattcaggcttcaraagattggatgacaatcacccataatggagagggcaacctacattactaagtacaacatttcaaatgcaaccttatccaaaaccaccctcacagacacactcaaagacaatgtttaatctgggcaccccatggcccagtcaacttgacacatagaatcaaccatcacaaataccaagcgtcgagagggtagggatactgctgaaaatatcaaaactagacttggggagggatcattttgaggtctctgagtgtcaatacatgatcttcagagagacctaaaaatgtacagtttaatgaattcttttctgcctaggtcatgaatcttgatgtggaatcacagagtaattccgtatctattctcattcctagtcaagca

SEQ ID NO: 608441 - DNA, 487 bp, Homo sapiens
gtaaatcccagtccaaaagcaggataagacccagctccagcaggcagaaagaagcaaaagcaacaaattccccctccattcttctgccttttgttctattcaggcttcaaaagattggatgacaatcacccataatggagagggcaacctacattactaagtacaacatttcaaatgcaaccttatccaaaaccaccctcacagacacactcaaagacaatgtttaatctgggcaccccatggcccagtcaacttgacacatagaatcaaccatcacaaataccaagcgtcgagagggtagggatactgctgaaaatatcaaaactagactyggggagggatcattttgaggtctctgagtgtcaatacatgatcttcagagagacctaaaaatgtacagtttaatgaattcttttctgcctaggtcatgaatcttgatgtggaatcacagagtaattccgtatctattctcattcctagtcaagca

SEQ ID NO: 608442 - DNA, 487 bp, Homo sapiens
gtaaatcccagtccaaaagcaggataagacccagctccagcaggcagaaagaagcaaaagcaacaaattccccctccattcttctgccttttgttctattcaggcttcaaaagattggatgacaatcacccataatggagagggcaacctacattactaagtacaacatttcaaatgcaaccttatccaaaaccaccctcacagacacactcaaagacaatgtttaatctgggcaccccatggcccagtcaacttgacacatagaatcaaccatcacaaataccaagcgtcgagagggtagggatactgctgaaaatatcaaaactagacttggggagggatcattttgaggtctctgagtgtcaatacatgatcttcagagagacctaaaaatgtacagtttaatgaattcttttctgcctaggtcatgaatcttgatgtggaatcacagagyaattccgtatctattctcattcctagtcaagca

SEQ ID NO: 608443 - DNA, 613 bp, Homo sapiens
gagcctggcacggccagataaagtcagggtttttttttttttttttttttttttaataagactcaagatcagtaacacaaaaagctcagagactgtagaagcttagctcctcttttagcctggaacttccttgagggaatcaaaccttgccagataaaccatcatattcagagaactggttccagcagacgatcagtcccacacttctwctctgctggaaactttaaatccacctcctgtccccacccattcaagagccaggacctctgagttttggaattaacactagggtcttacatggcagccagcaaaacacacttgggaaatacatgaaatcccacttgactgcatgccactgtgcctggtatatgataggcacttagtttccctatcacttttatagccaagtgttactctgactttcagaaaattgagggagaataagagatggaactctcttcaaaatatttattgcaattttcctccaagaactggatgtgttttcttctgccctctaactttgagagaataaagctgaattatctagttttgatggtcaggagtatcagaaagtttccattaacttccttttagaaggtgagcaaaccttggc

SEQ ID NO: 608444 - DNA, 613 bp, Homo sapiens
gagcctggcacggccagataaagtcagggtttttttttttttttttttttttttaataagactcaagatcagtaacacaaaaagctcagagactgtagaagcttagctcctcttttagcctggaacttccttgagggaatcaaaccttgccagataaaccatcatattcagagaactggttccagcagacgatcagtcccacacttctactctgctggaaactttaaatccacctcctgtccccacccattcaagagccaggacctctgagttttggaattaacactagggtcttacatggcagccagcaaaacacacttgggaaatacatgaaatcccacttgaytgcatgccactgtgcctggtatatgataggcacttagtttccctatcacttttatagccaagtgttactctgactttcagaaaattgagggagaataagagatggaactctcttcaaaatatttattgcaattttcctccaagaactggatgtgttttcttctgccctctaactttgagagaataaagctgaattatctagttttgatggtcaggagtatcagaaagtttccattaacttccttttagaaggtgagcaaaccttggc

SEQ ID NO: 608445 - DNA, 600 bp, Homo sapiens
gcaaacttttagtttcttattgaaaatttctcatttcaataagaaaacttagtttcaatcacctctcgaacaccccacctgtcaatattattgcattgacccttaagtttcaacatctgagttttagaagaaacacgtacaaaaactaaaggttttaagaaaactaaaagttgtctcagtatttaaatatgaattttctttaaaaaaaaatcacagaagcatgaaaagttgaaaattataatatgaaattttttggttatatcctctctttggttaaaaaaaaaagatttggggtagccattctacatcagtgaatttaccaactgttttcccataattgtgrgagagatttactatgttgtaccaaagagagaatactgaggattaataccttcaaaccagtacccgttaactttatttcttcctatctcaatccatttgtgctgcagacacaggggtgacttataaagaacagagattcattttcctcacagttctggagactgagaagcccaaggtcaagtcacctgcataggggaagaaccttcttgctgcatcctctagaggggagaaacgtcacgtcctcacatagtagaaggc

SEQ ID NO: 608446 - DNA, 600 bp, Homo sapiens
gcaaacttttagtttcttattgaaaatttctcatttcaataagaaaacttagtttcaatcacctctcgaacaccccacctgtcaatattattgcattgacccttaagtttcaacatctgagttttagaagaaacacgtacaaaaactaaaggttttaagaaaactaaaagttgtctcagtatttaaatatgaattttctttaaaaaaaaatcacagaagcatgaaaagttgaaaattataatatgaaattttttggttatatcctctctttggttaaaaaaaaaagatttggggtagccattctacatcagtgaatttaccaactgttttcccataattgtgggagagatttactatgttgtaccaaagagagaatactgaggattaataccttcaaaccagtaccmgttaactttatttcttcctatctcaatccatttgtgctgcagacacaggggtgacttataaagaacagagattcattttcctcacagttctggagactgagaagcccaaggtcaagtcacctgcataggggaagaaccttcttgctgcatcctctagaggggagaaacgtcacgtcctcacatagtagaaggc

SEQ ID NO: 608447 - DNA, 501 bp, Homo sapiens
tgtagataaagcctcttcctttcccaggtaaactattctgaggcatatttcttgagcctcatcagaaggtcctgtgtgatggtgttcccatagtcctggtcaacttaataaaaacacagatggtattgacctttcttccttctctgtttcagtttgccggyccttcacttctgctccctgggatcacctccaaaatgacttgctttcaccctgtcctttgtcttcccagctgctttgaaggaaacccagtctaggacactgatcttcataacagagcattaatttcctctggccacccagagaggcattcattcttaacttcctttagccatgcttcagtgcaatttggagttagtatacttgaataagccaattctactttggagaattaagtttggcacttttccccagaaaggactttcttctttgctgacctcattgctaatggcctcatttatgtctctagttcttcttcttttgggagtttgaaataacacaccc

SEQ ID NO: 608448 - DNA, 453 bp, Homo sapiens
actttacagccccatggagaataagccaccccatgatgcttattgaatagatggatggactgctacgctgaagtatgacttcatctatttcaagtgccttgaggcccatggatcaacacctgtatggacacgccaatggtcttcagagtcactgcctgggtcccttacagggatgggtgtgtcartgaggtctggcactgcagctacattgggagaatgttcacattcatctcttgtttatttcgtgtggattactttgccttctcaaaacccattacccaacattgctctcttcagcctgtggaccctgccccactcctgccctacccctggtgaatgtctccaggtgtgttttctctggcaaaggagtgatctagatttgaaacttgccttgccactggccatctgtatgacttgggatgagttactgcatctctcagaatctcagttttt

SEQ ID NO: 608449 - DNA, 598 bp, Homo sapiens
ccaacaatgtgcaagagatggagttgtttcccatcctctccagcaactagtattatcagtctgtctcattttagcctttctagtatatatgcagtagtatctcaggagggtttggatttgcatttcccctgtgactaaggatgctgaacatctttgctttgtgtgttgggaattggcacatgtttgttcatttgtttttggtagtgtgtgtatttatttatttgtttgtttgtttgtttgtttatttttgagatggaatcwtcttctgttatccaggctggagtgcagtggtgcgatctcagctcaccgcaacctgggcctcccaggttcaagcaattctccttgcttcagcctcccgagtaactgggattacaggcacatgccatgcttggctaatttttgtatttttagtagagacacggttttgccaagttggccaggctggtctcaaactcctgacctcaggtgatcctcccacttcagcctcccaaagtgcggggattataggtgtgagccaccatgcccggctgcgtctgtcttttttttttttacaaaaattttatttcagtagatttttttgggaacaggtggtttttgg

SEQ ID NO: 608450 - DNA, 257 bp, Homo sapiens
atgttgaattttatcaaatgctttttcaacatcagttgaaaggattatatggtttttgtccttcattctgttgacataatgtatcacattgattgatttatgtatactgarctctccttgcatccgtggaataaattccacttgatcatcataaatgatcattttaaggtgttgtggaatttgatttgctagtattgtgttgaagatttttgcatcaaagttcatcagggatactggcctgcagctttctctttttg

SEQ ID NO: 608451 - DNA, 257 bp, Homo sapiens
atgttgaattttatcaaatgctttttcaacatcagttgaaaggattatatggtttttgtccttcattctgttgacataatgtatcacattgattgatttatgtatactgaactctccttgcatccgtggaataaattccacttgatcatcmtaaatgatcattttaaggtgttgtggaatttgatttgctagtattgtgttgaagatttttgcatcaaagttcatcagggatactggcctgcagctttctctttttg

SEQ ID NO: 608452 - DNA, 257 bp, Homo sapiens
atgttgaattttatcaaatgctttttcaacatcagttgaaaggattatatggtttttgtccttcattctgttgacataatgtatcacattgattgatttatgtatactgaactctccttgcatccgtggaataaattccacttgatcatcataaatgatcattttaaggtgttgtggaatttgrtttgctagtattgtgttgaagatttttgcatcaaagttcatcagggatactggcctgcagctttctctttttg

SEQ ID NO: 608453 - DNA, 640 bp, Homo sapiens
ttttgcaggatactatctctgtgtgctgtgttttttggacacttggcagaagagccatggtagtggccaaaaggggaagaaatgaaagcaccagatggttgtgtttaacctttttactcagaatgtgtatcagccttagcctggaagcatgggcagtggtcatagctgcaaatgctgattttcctgggtacctttgggaaayactgtgacccaacactgggaggggagatttgtatgccaccagttttgtagaactcaacagtaaaactgtccctggtatcactagtgactcactagagttgtctggatagggtaaaaaaagggtcacaataatagagatgagtattgctctaattctgcccacccccagcaacccctctaccccctattctgtgggcatcttatctctatatttctccctactcgttcaggaagttcccacaggtatctccaggtggtcatgattaagatttgtttttcaactcatcacattgtgcctagcagtttttctcctttcctgttctggttgtctaattttaatatcatggaagctgttgtggaagattgattacattgatgacaccatttcatggcctctctgccctttgccctgtaacactgtaggcaactcccgctctga

SEQ ID NO: 608454 - DNA, 470 bp, Homo sapiens
atccagctgccctctgagccagaggctttggtaatatctatttataccagggctgtaccatcttagaaggggtatttctgctgaggctgagcartgagccaccagaagcaatggctcattgctcaggcccagcaggaattccccccatccaccacctctgccacctccctatggctcctctcgatgagataggcttgaagagggctctttagatttaaggaaaatggaggcagaaatgaacagtttatggaaaatgatgagtggcatctgagttgaagtcagaggtccagaaatcaagcaagacaggtgcagcactttggggcttactgaaatttctgctgtacaagatcttgagaccattagggaaataaatctcaattatgttaaacctatcaagaccttgaacaaatgctttcctttttacagatgtctgtctccttgactgtaaaatgtgtaggtgggattgagat

SEQ ID NO: 608455 - DNA, 562 bp, Homo sapiens
tttactaacttagatattgttacagaagcaatattaatcaaaagaatcatgttcatttagaacaaaatccatagaagctacasaattgatccctaaggatattaaaacactgctagtgatcaggaaggagaaaccaaaaagtaattgatcctctagtttgatgaatttaatttttatattgaaatcttttattgttctctaattcctgatcctcaataaatccttgtaatttctctctttaccaccattattaagcaatagttttggttaaccacatattctaatcaatgaggacctgtcatatacatcatgtatagatcaccaattgaaaataacttctaaaaaagaaaatatacattggtgccttgcattcattcagcaaaattggggtgcttttagcaaaagaagagataattggtgttaggcaaacaaaacaaaaacaatcttgcagaaacccaaaactaatatgtccattttaagggggcgtagtagtgaggaactattgtggtaaattaggttcgagcagatgcttagggtttaaaccaaggcagggatagtagaa

SEQ ID NO: 608456 - DNA, 562 bp, Homo sapiens
tttactaacttagatattgttacagaagcaatattaatcaaaagaatcatgttcatttagaacaaaatccatagaagctacagaattgatccctaaggatattaaaacactgctagtgatcaggaaggagaaaccaaaaagtaattgatcctctagtttgatgaatttaatttttatattgaaatcttttattgttctctaattcctgatcctcaataaatccttgtaatttctctctttaccaccattattaagcaatagttttggttaaccacatattctaatcaatgaggacctgtcatatacatcatgtatagatcaccaattgaaaataacttctaaaaaagaaaatatacattggtgccttgcattcattcagcaaaattggggtgcttttagcaaaagaagagataattggtgttaggcaaacaaaacaaaaacaatcttgcagaaacccaaaactratatgtccattttaagggggcgtagtagtgaggaactattgtggtaaattaggttcgagcagatgcttagggtttaaaccaaggcagggatagtagaa

SEQ ID NO: 608457 - DNA, 642 bp, Homo sapiens
gactaatttgaaagatactcaggaagtgaaattcactggacctcacagaggtggtagggacagagtaggagaaggagagagaggaattagagatgtttcttaagatttctgtcttggaagactgggtgaatgctagtgccacccacaaaggagagattatggaagagaaagattgctttgggaaaaagaagacaaatatgtcttgacattttgcatgtcaggtacatatgcgcatccttgaagtgaagtacctattaggcagataatatccagttgtatgaacacatgagtaatagtgaaagttataggcatggatgggatttccaagggacaccaaagaatgggaaaacaaagtggtatccccrgggataccccataaaggagataaaatagggcatatcagagtattaggaggaaaacctagagaagggagtttcttgaaatttgaggcaaaaagattttccagaggaatgaaaggtcaacagtgcaaatatcccagacagctcaagtaaattagagatgcaaacagtaactcttagaggggagcatcttttttccagtcttctagtttctgtgaggggctattgcccccacatgctctgcatctacttcctcatctctttcttgggtcttaggtaattg

SEQ ID NO: 608458 - DNA, 580 bp, Homo sapiens
gcgcatccttgaagtgaagtacctattaggcagataatatccagttgtatgaacacatgagtaatagtgaaagttataggcatggatgggatttccaagggacaccaaagaatgggaaaacaaagtggtatccccggggataccccataaaggagataaaatagggcatatcagagtattaggaggaaaacctagagaagggagtttcttgaaatttgaggcaaaaagattttccagaggaatgaaaggtcaacagtgcaaatatcccagacagctcaagtaaattagagatgcaaacagtaactcttagaggggagcatcttttttccagtcttctagtttctgtgaggggctattkcccccacatgctctgcatctacttcctcatctctttcttgggtcttaggtaattgctattggtctattttttcttgattggagcttactagtcacaaacatgatcactggaacagggtgatagttgcactctttctccttccccttctacttacaatagtgagacagaaacctgggttaagtgtatttgcagtcttggatccaagagcgtagggagttaata

SEQ ID NO: 608459 - DNA, 552 bp, Homo sapiens
actcaaaggccacacacagaccacatattctgtattttcttcctctagacattaaaatggcttcttcttatttcatttttatggatatttcaattttaccccagggagcatatgtgtcctggcattggattatctctctgtaatggaaagaatttttgaaaattacgtgactttttggaagtcatctatgcttcttattttaaaataattttttaagtaatttcttctttcattaacaaagaaatgcatacccatgataaaagttccagcactttcactaaagtttaagcacagaataatrtaatataaaaagaaacaaattatctacctcccccattccttaatcaacttctctgaagtaacaattaacagtatttttatataaaaagctgtttgtttcagcggaaatagccttcaccaaccttagttaagcttcacaactacagttgtgcctttactttcctcacccaatgtagacaatgtgaatttttttaattgcatatcattgagattttatcacaatgacctttatatgaaccaaagcaccagata

SEQ ID NO: 608460 - DNA, 572 bp, Homo sapiens
aagtcgcccagtttaaataaatgattcaattatttttagtatatttgtaaaaccgtcatcaaaatcggtgttagaacatttctaccactcccaaactatcccttgtacctatttgcagtcagtacctgttctcatatccagccccaggataatactaatctattttctatctttttagatttacctttttcagcggttgatttttctggaggttttattcacttggattcatattgattggaagaatgcatgagaccagatttgttagtagtactgacacagtggttgctgttggcttcctggtgatgaaaatgagcttctttgcagctgctctgagagctcccagtcttattgatgagaaatagtaccagaaagcaactagctggggacctgtaccattagggtccaggcaggaaacagaaaccactgcaatcattttaacagaaagaatttaatataaacaattgcaaagggtatcgaagaattgaaagataaacagaactaaagtattagagaagggagcaamagtaggaattaactaccagctcctgggttgggaaacaaaggtaaat

SEQ ID NO: 608461 - DNA, 685 bp, Homo sapiens
ctcaaattcaggtctgtctgatttcaaagcctgtgttctgtatcactactccatactaattttaattttaaattaaaatttaattttattattattgttttttagagacaaggtctggctctgttgcccaggctggaatgcagtggtgcaattatagctcaccagcaatcttgaactcctggactcaagtgatctgcccgcctcatcctccctagtagctgggactacagctgaatgccaccayaccaaggtaattagaattttttttttttttttttttttttttgtagaaacaggatctcactggtctgaaactcctggtctcaagtaatcctcctgccactgcctaccgaagcactgggattacaggtgtgagccatagtgcccaccccatactatttttatgtttatagtctacgtcttgtttatgaagtcccaaacattggtatacttcagtagttcaatgtctcagttttccacagatgcaggcattgagaattagaatatatagttttttcctgtttaaaattcatactttgctttatagatttcttctttagtctttcattcaaaaatgccaacttggaatcatatttttttcatctgagttcaaaatttcgttgatactccaggtttccacaagctcctcattgagctatccttaataatccaagggaacaataca

SEQ ID NO: 608462 - DNA, 597 bp, Homo sapiens
ctggccctttcataattgtaatagatattgaaatgaagcacattctattctctccacagggagagcttttttcttttttccccttcrgttcaaagacttctcctggtaccctgatagcataataattggtttttctttcctctttatgcatgcttatagacacaaactccggtgtttttgtcctatttcaataaaaattgacacaaactttacaataaatggctctgatataactgattgttctcccgttgagtaataatactcataaaaagaaatggaaggcacaagaagatcagggagtgggcagaaattggaatcagagagggaaactgtttagcatttataacttccataaactcaaccttgtatttgtgtcagctactttatagttttccaatttactttttaattgagtcctttttgtcagccatgtttggaagacgtaattctacatcgtctttcaaaaccgtaccactttagttcagttcaattgatctctctttgtatttattattcttgagcccaacatatatcactttccatttggccaactgcaaatgcaatttaccatgcatcaagccacttacacagcagatc

SEQ ID NO: 608463 - DNA, 536 bp, Homo sapiens
atacagtagtctctataaaaaacagtttggcccttcctcaaaagagttaaacatagaattaccatatgacctagcaattccactcttacatgtatactcaaaagaattgttttcaagcaaaaacatagacattattgttcacagtagcactattcaaactttctaaaaggtagaaacaatccaactgtgactggatgactgggtaaacaaaatgtggttataactgtacaatagaatattattctgtcataaaaaggaacaaagtactaatacatgctgcaacatgattaaacctcaaaaatgcttttttaattgacataaaagtatatgtattgatcatgaacaaggtgataatttaaaatatatataatttggaaatggctacatcaagcttattaacatatgcaacacctcacaaagtcatcctttttgtggtgagaacaactaaaatctactctctaagcatttttcaagaatgtgatatattattattctccatactcgccaygttgtacaacagatatctagaacttatt

SEQ ID NO: 608464 - DNA, 626 bp, Homo sapiens
gacacataatgtcacaatgtggtacttaacagatcagttcactgatgcaccaattaaagaatagcagctatattatacttcttatttttccttttgctcctccctcccttkcttttattttttctaattataaaaacaatgcagattcatgtaaaaaattagagaaaacaaaaatttaaaaaataagaatcatccagagtcccacaattcaaaaaaaattcactaggatattaacattttaaccactaacttctaatttatatctaatgatttagaaaagttttgataaacattttccattttactgtctttctctgcaattgagatcttagataataaatcaaaaaatattttcattatcaaacactagagtgtatgtctcacaaacaatgctcaatcctcaataaaaattttgaatagtgcagccccttttgagaaaaacagccctatcttataatcagctttttgcatgtcccaatgcatatgtcacctccatagggaaacctttctgactcttcagatgaggttaggcttccactgtgtactcttgtagtagcatcctgtgctttctcttcatagcaactattacaattaaccatgtggatcattatctgctgcagtcccca

SEQ ID NO: 608465 - DNA, 486 bp, Homo sapiens
agtagatgttcaacaggagattgtgaagggagatgtttcagacaaaggcaacaggatgagaaaagtgtgtagctcttagcatttttaatgctactgaaatgttcatgattcagtagtgcttccatgtgccacatattcctatgggcatacccattctcactgcagctctttctcccttctttctcttatttctcaaatttcaggtaaatgagtgctatgttattgtatgtagaatcttgagttggctctaatttatttaaaaaataatttggaaatgcaacactcgtaccattgttaaatagtgtatggaasttctcacaatatatttaaatataacaatggcttagcactgcagctgagaactgattagtaagcacaaagaggtgtgagattggatactttagtgggcattgtcaagtaataaagtggcagtgaagtctagattctgagccatgcaggttggtctgagaagcaacatcaaattta

SEQ ID NO: 608466 - DNA, 603 bp, Homo sapiens
tttgtttcatttctgcctgtttctgtttcataatgtcttgttcttaatgaatttattctttcctttatatcttcaagaatgtaaaatattattttaggattattttataattgctctattactgtcattgtgggggctggggaaggagttaatagcctattgttgattttctaggttctctgtcttagcattaactttctcaagtatgttggaactttatgtacaggcttaacttgagttagtattttttatttttctctgtactagccccaccctgaatagagatttttatggtttccttcattgagtagtttgggtctcctgttcaccatcagggctcatattgatgacttagagctcatgttctattgtgctatgaaggatgttacaaatgctgtctttctggggggtcctcaaggcccacccacacatttggtgattttttagaaagcctcatgggactcagcatatagttgtactcatkgctaaggtgtattactgccagagaatagatgacacgatgagcaagggccaaagaaacaggaaaagtctggagcaattcatgcacggaccgttttataccctcttattccacgaggagac

SEQ ID NO: 608467 - DNA, 511 bp, Homo sapiens
acagtttcgcttggctggggaggtctcaggaaacttacaatcatggtggaaggcaaaggagaagcaaataccttcttcacaaggtggcaggagagagagagagagagagagagagggaatgagaacgcaggggaaatgtcaggtacttatcaaacaatcagatctcatgagagctcactcactattatgagaatagcatgagggaaaccacccccatgatccaatcacctcccagcagatatctctctcaacatgtgagaattacaatttgagataagattgggtggggatacagagccaaactagatcaggctgccataacaaataaccacaaacttgatggcaaaaaacaacagaaatgtattctctcacagttccagaggccagatrtctgaatttaaggcattgagaggttgattacttgtggagaatttgagtggggagccattctttgcctctctcctagcttctggtggctgccagcaatcctcagtttccattgacttgttga

SEQ ID NO: 608468 - DNA, 392 bp, Homo sapiens
acgtttttatgatctactctggaaagtcccaaagaatttcttttattgtatttcattggttgaagcagtcacaaagacctgcccatggtcaagaggaggggaaatagacttgacctcttgatggggaagtggtgatgtttcaggagagcatgtgtgatgggagatrctgctgccatctttggaaaatgcaatttgccataaagtatagtaaaaataagacgatttaggactcagaattttgaattttaaggtgaatcacatgcctttgtgtgctgttctcatgctgctatgaagaaatactcaagactgggtaatttataaaggaaagaggtttaactgactcacagttccacatggcttaggaggcctcaggaaacttacaatcatggcag

SEQ ID NO: 608469 - DNA, 622 bp, Homo sapiens
tctcccactgggtccctcccaccacatgtggggattatgagaactttaattcaagatgagatttgggtggggacacagccaaactatatcaaaaggtacagatttgtgttcactcagtggtcagtacaacgactgggttctaaaactagaacatggtsaaggttctccctgatggtctaaccaatcaaggagaataagagggtcaagtaaagtcaaaatgcatttcgataagaagacagtcaaatgccaatgagaccaattacaaatgccatgtgcaagtactctggtgcatcattaacctcaggttgtagaacaaagagtacaggtttttcttagttggttgttgtgtgctatgtggatgtatcagagcccaggtgaacagacattcaaattaaagggaaccttgtagagtatagggcttaatatcataaaatagtgttacttgctcatccaagacacaaacagcctcacatgaaagtctcaggatagggatactgatacagtcttggagaagatttggattcagaaatctttcacaaacccatagaaaagaggtagtgtcagaaaaatgttggagaaggcatgaatggccacctcctccacagaacttgccattcagaaa

SEQ ID NO: 608470 - DNA, 622 bp, Homo sapiens
tctcccactgggtccctcccaccacatgtggggattatgagaactttaattcaagatgagatttgggtggggacacagccaaactatatcaaaaggtacagatttgtgttcactcagtggtcagtacaacgactgggttctaaaactagaacatggtgaaggttctccctgatggtctaaccaatcaaggagaataagagggtcaagtaaagtcaaaatgcatttcgataagaagacagtcaaatgccaatgagaccaattacaaatgccatktgcaagtactctggtgcatcattaacctcaggttgtagaacaaagagtacaggtttttcttagttggttgttgtgtgctatgtggatgtatcagagcccaggtgaacagacattcaaattaaagggaaccttgtagagtatagggcttaatatcataaaatagtgttacttgctcatccaagacacaaacagcctcacatgaaagtctcaggatagggatactgatacagtcttggagaagatttggattcagaaatctttcacaaacccatagaaaagaggtagtgtcagaaaaatgttggagaaggcatgaatggccacctcctccacagaacttgccattcagaaa

SEQ ID NO: 608471 - DNA, 613 bp, Homo sapiens
gaaatttggagagattttattttaacactgacagtttaagstgactaataacttcctgcatgcaagtatataatgacattggaaaaatcgaagtcacctttggaaatctgatttaaagagattaagaaattcgaaaacttaaacttgaaatgctccaaggttagtatgtgcagtagcaattattaccgctatttgctaggcaatgttcaaataagatctaaaatttatttattcttagtgttcctcaacaagggacaattttgcaacctgccctcccagagacatttttggttgacaaaactgtgtgtgtgtgcgttgtgtgcatgtgcatgaatgtgcatgcatactactagccagagaggctgttaaatatcctacaatacatagggcacctcttttcacaaaagaataaccaatccaaaatgccaaaagttctgagattgaccatccttggtttcggttcagacacaaggaattgactagtgcaactgttatgaaagaccttgtctcctctattactgccaagtcacccaaattagatggttatatatctagttggacaaaaatgtttctcctttcacacctgaataggattctttgagtactgtagaca

SEQ ID NO: 608472 - DNA, 613 bp, Homo sapiens
gaaatttggagagattttattttaacactgacagtttaagctgactaataacttcctgcatgcaagtatataatgacattggaaaaatcraagtcacctttggaaatctgatttaaagagattaagaaattcgaaaacttaaacttgaaatgctccaaggttagtatgtgcagtagcaattattaccgctatttgctaggcaatgttcaaataagatctaaaatttatttattcttagtgttcctcaacaagggacaattttgcaacctgccctcccagagacatttttggttgacaaaactgtgtgtgtgtgcgttgtgtgcatgtgcatgaatgtgcatgcatactactagccagagaggctgttaaatatcctacaatacatagggcacctcttttcacaaaagaataaccaatccaaaatgccaaaagttctgagattgaccatccttggtttcggttcagacacaaggaattgactagtgcaactgttatgaaagaccttgtctcctctattactgccaagtcacccaaattagatggttatatatctagttggacaaaaatgtttctcctttcacacctgaataggattctttgagtactgtagaca

SEQ ID NO: 608473 - DNA, 463 bp, Homo sapiens
aaacatgtctggcaaagtgccactaggaagtctattttttcttaagaccaccttttctttctatcatcttttcttattccacagttggaaaatttccctttatctaagaaactagsagaactatacttaatatggcaaatctatggatccctctcaaacaactgctactccagaagtgaaattatttttatcttttctaaatcttttttaactcttccttggtctgttacaagtgatttgactaaacaagtatagacatattggttaagtttctgggtcatacagaactagaaagagcagttattactgtgtaatgataatttgaatggttaaaatggtagaaaaccacttagtctttctatgtatccacggagacctggattttagagttggggcatttggcaagattcccagagcactcaccctattactctaagaaggacaagtgtgggctacagatcct

SEQ ID NO: 608474 - DNA, 592 bp, Homo sapiens
tcagaaaacactttttagatatgtaatggctccatggctagtgcaaagagatataatgagaggggatgaagggcagggagagaagaagaaaagcatttttttttccttaaacacagaggggctgggcgtggtggctcatgtctgtaattccagaactttgggaggccgaggcgrgcagatcacgaggtcaggagattgagaccatcctggctaacatggtgaaaccccgtctctactaaaaatacaaaaaattagccaggtgtggtggcggccacctgtagtcccagctactcgggagcctgaggcaggagaatggcgtgaacctgggaggtggagcttgcagtgagccgagatcgtgccactgcactccagcctgggtgacagagcgagactccgtttcaggaaaaaaaaaaaaaaaaaaaacaaacaactaacacagaaaacagataatagagactatgatgaggccattatttatggctaagcaagaagaatatgcctgcctaacacattggttcccttgaacagcccctttcaataatggtaacattaaagaactgaggcacaaccaaagacgttggaaaggcaagtc

SEQ ID NO: 608475 - DNA, 592 bp, Homo sapiens
tcagaaaacactttttagatatgtaatggctccatggctagtgcaaagagatataatgagaggggatgaagggcagggagagaagaagaaaagcatttttttttccttaaacacagaggggctgggcgtggtggctcatgtctgtaattccagaactttgggaggccgaggcgagcagatcacgaggtcaggagattgagaccatcctggctaacatggtgaaaccccgtctctactaaaaatacaaaaaattagccaggtgtggtggcggccacctgtagtcccagctactcgggagcctgaggcaggagaatggcgtgaacctgggaggtggagcttgcagtgagccgagatcgtgccactgcactccagcctgggtgacagagcgagactccgtttcaggaaaaaaaaaaaaaaaaaaaacaaacaactaacacagaaaacagataatagagactatgatgaggccattatttatggctaagcaagaagaatatgcctgcctaacacattggtwcccttgaacagcccctttcaataatggtaacattaaagaactgaggcacaaccaaagacgttggaaaggcaagtc

SEQ ID NO: 608476 - DNA, 592 bp, Homo sapiens
tcagaaaacactttttagatatgtaatggctccatggctagtgcaaagagatataatgagaggggatgaagggcagggagagaagaagaaaagcatttttttttccttaaacacagaggggctgggcgtggtggctcatgtctgtaattccagaactttgggaggccgaggcgagcagatcacgaggtcaggagattgagaccatcctggctaacatggtgaaaccccgtctctactaaaaatacaaaaaattagccaggtgtggtggcggccacctgtagtcccagctactcgggagcctgaggcaggagaatggcgtgaacctgggaggtggagcttgcagtgagccgagatcgtgccactgcactccagcctgggtgacagagcgagactccgtttcaggaaaaaaaaaaaaaaaaaaaacaaacaactaacacagaaaacagataatagagactatgatgaggccattatttatggctaagcaagaagaatatgcctgcctaacacattggttcccttgaacagcccctttcaataatggtaacattaaagaactgaggyacaaccaaagacgttggaaaggcaagtc

SEQ ID NO: 608477 - DNA, 553 bp, Homo sapiens
gtttcgtgggctggccccagggttcctytgctgtgtgcagtctaaggactgggtgccctccatcccagctgctccagccatgactaaaaggggccaaggtacagctcaggccatggtttcagagagtgcaagccccaagccttggcagcttccagatggtgttgagcttgggtggatcacagaagtcaagaactgagatttgagaacgtctgtctagatttcagaggatgtatggaaatgcctggatgtccaggcagaagtttgctgcaggggtggggtgctcatggagaacctctgttggggcagtgctgaaggggcaggtggggcaggttgactccacaaagagtcaacactggagctttgcctagtagagctatgagaagagggccactgtcctccacactggcagcttgcaccatgtgcctgggagggagcctgtatcctgcaaagccataggggcagagctgcctaagactatgggaacccactccttacatcagtgtgccttggatgtgagaagtggagtcaaatgaggtcattttggagctttaag

SEQ ID NO: 608478 - DNA, 381 bp, Homo sapiens
tctggttcctgccccacattgatattttttgtctttgttgcattaagtgacctatcctctkggatcatgggttttttttttctgtcacttgattctgagcaaattttgtctgcctggttccctctgtgaaagagaaagctgttcatatgagggacacttttcaagtaaatggaacttctacccataacaacaaaaacaacaatgatgatgacaacaccaaaacaattgatttctgatggaaagtgaaacagaagtgagccttgctatcattcacattgtctagaatcaatgacactttgaaatagtgttaactagccaattcacatatacaaataggttctctccattgattgctgctgagttcaatgacaattgtttgcc

SEQ ID NO: 608479 - DNA, 514 bp, Homo sapiens
gaaagataaatattgactaaagcaaggacttattgccttgacgtttttatttgtagaactagtatcaccttcaaatccatgttactagcttccrtaaggtttggtgtgaattttctttattccagttcacaatccactttccaattaatgatgtaactgcactcactgtatatctataattgggatctgtaggtattggaaggctgagagtaaaacctttgtgtacctcctccaccaacagaaatgaaacaattcagatatcagggaagaacttgactttactggtgaggcaggacttgacctgtgtgttcttgagctgggagacccatacaacctaagatccaatcccagacattattttacccaagcatacctaagacttaccaagaatgaagagtaacaacctcagaaaacaacttaaaagtcatctcgcccaactctttgctagatgcttgaaaccagctaacttatccttagctccttccatttctcaagtctttttattcattacctg

SEQ ID NO: 608480 - DNA, 514 bp, Homo sapiens
gaaagataaatattgactaaagcaaggacttattgccttgacgtttttatttgtagaactagtatcaccttcaaatccatgttactagcttccataaggtttggtgtgaattttctttattccagttcacaatccactttccaattaatgatgtaactgcactcactgtatatctataattgggmtctgtaggtattggaaggctgagagtaaaacctttgtgtacctcctccaccaacagaaatgaaacaattcagatatcagggaagaacttgactttactggtgaggcaggacttgacctgtgtgttcttgagctgggagacccatacaacctaagatccaatcccagacattattttacccaagcatacctaagacttaccaagaatgaagagtaacaacctcagaaaacaacttaaaagtcatctcgcccaactctttgctagatgcttgaaaccagctaacttatccttagctccttccatttctcaagtctttttattcattacctg

SEQ ID NO: 608481 - DNA, 518 bp, Homo sapiens
gggttgaatctaattggacaggcctttaccctggtggactgcagccgcatcagggagtcggggttggagctgaggaagatcacctctggcaccttctttctggagactgccttcaaccaagtgatgagccacatggtgttgtataaatgttaatctcctgttcctctccttgcagccctgtgaccttcaacattgcctctcggaggctgctgtggtccagcttagacytccccctagaaattctgcattggcttcttgactgctcctctcctgttttcttcttgatatgatccttgacttcttctttgctcctcttacctcctttgcttagttttctccccctctttctgctgctcttaatgctcggacatcctctttttttcttgtggctgtggatatgtattgatatggtttgtctgtgtccccacccaaatctcaccttgaattgtaacttccttaattcccaaatgttgtgggagggacccggtgggagataattgaatcatgggggtggtttt

SEQ ID NO: 608482 - DNA, 543 bp, Homo sapiens
caagtgagaaattgtcctacgatcaagaaattagcagccagaacattaaaattttcaggaacattggctgctgggacattactttcatccagactttctcttaggtccttgttccygcttaatcccttcgaagttgctcacagacctattacagctctcatctcaccctgtgcactctttctgggttgccctaggtacaaccaggaaactctgtttcatgattcatgaaactctattctttgtgctcggtatattcagatctgtttctttaaattggggtaagaaatttctttttactttcttaaatttaaggccattgcttttaaatataagagtaaaacattattattatggaaggctgagaaagcggagatgagcaaaaaatactaaaggagtcggtcactgttaacatctgtgtgtatatccttctcaactcttgttctttctttaaagatatttcgtccagttttttatgtacataaatatggttttgtaaaaatgtgatcatagccatatgaacagccactatcattctccatggaa

SEQ ID NO: 608483 - DNA, 543 bp, Homo sapiens
caagtgagaaattgtcctacgatcaagaaattagcagccagaacattaaaattttcaggaacattggctgctgggacattactttcatccagactttctcttaggtccttgttcctgcttaatcccttcgaagttgctcacagacctattacagctctcatctcaccctgtgcactctttctgggttgccytaggtacaaccaggaaactctgtttcatgattcatgaaactctattctttgtgctcggtatattcagatctgtttctttaaattggggtaagaaatttctttttactttcttaaatttaaggccattgcttttaaatataagagtaaaacattattattatggaaggctgagaaagcggagatgagcaaaaaatactaaaggagtcggtcactgttaacatctgtgtgtatatccttctcaactcttgttctttctttaaagatatttcgtccagttttttatgtacataaatatggttttgtaaaaatgtgatcatagccatatgaacagccactatcattctccatggaa

SEQ ID NO: 608484 - DNA, 543 bp, Homo sapiens
caagtgagaaattgtcctacgatcaagaaattagcagccagaacattaaaattttcaggaacattggctgctgggacattactttcatccagactttctcttaggtccttgttcctgcttaatcccttcgaagttgctcacagacctattacagctctcatctcaccctgtgcactctttctgggttgccctaggtacaaccaggaaactctgtttcatgattcatgaaactctattctttgtgctcggtatattcagatctgtttctttaaattggggtaagaaatttctttttactttcttaaatttaaggccattgcttttaaatataagagtaaaacattattattatggaaggctgagaaagcggagatgagcaaaaaatactaaaggagtcggtcactgttaacatctrtgtgtatatccttctcaactcttgttctttctttaaagatatttcgtccagttttttatgtacataaatatggttttgtaaaaatgtgatcatagccatatgaacagccactatcattctccatggaa

SEQ ID NO: 608485 - DNA, 513 bp, Homo sapiens
ctgttcttggccttgatggtgccctttgtcgtgacccatcccaaaccagaagcctggtttcacattgtgtgtatgttccaggagggctggactacaggttggacagaggcctgcaggttttgttggttctgggtctcttggccacattattatgtcattaagggggtccctctggttgcctcttatttaayaacttttcgtctgcattattggtccaggaatttgggaggggtaaacacaccactgctgggaaattggattgtaagtacctcagtctcttctatgtatgccaattaccacaagtccactctagagttttgtctcctcttggtttgcaaatgcatttgtaggccccattcttgagagagagaaaaagagagagagagaaagggagccacaaggcttttgagaagtaaagaaaaagctttctggagccccaaagttcccctttctatcctggccctgagttttagtcacctctgagattcttggctgaggtagtgtctttttcta

SEQ ID NO: 608486 - DNA, 564 bp, Homo sapiens
ttattttccaaagtggtgaatctgtcatttttttttcaattgccaggggtgctaaatgcacctctagccatttatgggatttgagtggaggacagaatatgtaggtggcctagagaaaaatgattgaacaaatggtttctttcccaaacaatcaaactcaggtttataaaccacagactcaagataagtggctaagtagttaatttctggatttttatcccccacgtgttatttatgtactctggtcccctcttttgtttcagactacacatgcctttcacctacagatccagcaaatccctggaaaggcccttattacttctctgccaaaggcttaacaggaagtaataggctcaagaattcagtttacagaagcaagcattcctgccttgccttcttcatttatttatttctttttttaattatactttaagtttygggatacatgtgcagaatgtgcaggtttgttacataggtatacatgggccatgttggtttgctgcacccatcaatccgtcatctacactaggtaattcctcctaatgctatccctcccttagcccc

SEQ ID NO: 608487 - DNA, 646 bp, Homo sapiens
cgtgtcttcctatccatgagagtggaatgtttttccatttgtttgtgtcctctcttatttccttgagcagtggtttgtagttctccttgaagaggtccttcacatctcttgtaagttgtattctcaggtattgagtgaattgccttgccttttgccaacttctgcctcaaataataaaaccagtatttaartaacttgtatttccccgaagttcgaaaattatttaacacacatgcacacacccaccctcctaccttaattccatgaggtgtatggtaatttggctagagagagaaaacagaaatctggttcgatttactaattgaactttgatgtcaggatgggccaactcaaaaaatagctgagtcctgaatagagaaagaggcacagcaggcaaaaccctggggtgaagcagagggtcctgtcagagtcagaatgaagacaggggaactgcacaccacactccaggctgtaagtttactatcctttacctacatgtccacttacacaaaaggagagggagaactagggacaacagaaaaggagaacgctaatctgcacaaaaagggccacctgtaatcctactcctccaaatcttgcaccacaaagggttggtatgtggaggtcagccatcacactgaccctt

SEQ ID NO: 608488 - DNA, 636 bp, Homo sapiens
aacgtgtcttcctatccatgagagtggaatgtttttccatttgtttgtgtcctctcttatttccttgagcagtggtttgtagttctccttgaagaggtccttcacatctcttgtaagttgtattctcaggtattgagtgaattgccttgccttttgccaacttctgcctcaaataataaaaccagtatttaagtaacttgtatttccccgaagttcgaaaattatttaacacacatgcacacacccaccctcctaccttaattccatgaggtgtatggtaatttggctagagagagaaaacagaaatctggttcgatttactaattgaactttgatgtcaggatgggccaactcaaaaaatagctgagtcctgaatagagaaagaggcacagcaggcaaaaccctggggtgaagcagagggtcctgtcagagtcagaatgaagacasgggaactgcacaccacactccaggctgtaagtttactatcctttacctacatgtccacttacacaaaaggagagggagaactagggacaacagaaaaggagaacgctaatctgcacaaaaagggccacctgtaatcctactcctccaaatcttgcaccacaaagggttggtatgtggaggtcagccatc

SEQ ID NO: 608489 - DNA, 570 bp, Homo sapiens
tgtcaaggaagttcagggatgggattttttccagctgaacttttaaacttaaggtaattaattctttgtagtggaagccatgattccaagtacaggctctgtttatctaattcactatttttagataattcacatgtatctaatatcagtttttttcatttccatcaccatgtagctctttagatacacatatagatatgcatatcaagatttttttcagtcggagtctccctctgttgtccaggctggagtgcagtggcaacatcttggctcactatatcaatatttwtatctaaatatatctatataaacctgatagaaggtattattattagaaggagattgtctccagaataggccttagaggaccaggatgttttgagagagaagagataacaaggagcatcttattattttttgagatggagtttcgctcttgttgtccaggctggaatgcaatggtgtggtctgggctcactgcaacctctgactcctgggttcaagtgattctcctgcctcattctttgagtaattgggattacaggcatgtgccaccataccaggctaatt

SEQ ID NO: 608490 - DNA, 570 bp, Homo sapiens
tgtcaaggaagttcagggatgggattttttccagctgaacttttaaacttaaggtaattaattctttgtagtggaagccatgattccaagtacaggctctgtttatctaattcactatttttagataattcacatgtatctaatatcagtttttttcatttccatcaccatgtagctctttagatacacatatagatatgcatatcaagatttttttcagtcggagtctccctctgttgtccaggctggagtgcagtggcaacatcttggctcactatatcaatatttatatctaaatatatctatataaacctgatagaaggtattattattagaaggagattgtctccagaataggccttagaggaccaggatgttttgagagagaagagataacaaggagcatcttattattttttgagatggagtttcrctcttgttgtccaggctggaatgcaatggtgtggtctgggctcactgcaacctctgactcctgggttcaagtgattctcctgcctcattctttgagtaattgggattacaggcatgtgccaccataccaggctaatt

SEQ ID NO: 608491 - DNA, 609 bp, Homo sapiens
tttagaatgtctttcgtatcataaattacttaattttaataaataaagtgtataaattaaaaaaagaatacatcgtttcaaatgaaattctcttaaacattttcatttgatatgacagtagtttgtcctcaaaatgatgaaagtttgttatctgatattggaataattaatgttcagccacttaagaaaaaaataaaaactcaaagcattgaaagaaattgaatttatatttgcagagtagactcctgcagtgtatttatctttactgagctcaatgtcattataaccaaattatcagagcatgctcatcttttatacaaatgaaatttcttacttcattaatatgatgaaagttacatccaaaagggaaaatgcataaagtaaacttctggtgtcctttgaagcccaatcatatcactgaaaacaaacctgctggagcctactcagtatgcctttgagtttaaaaggtactgataatctagaatttttaaaaacatagttacttctaggggwagttaagtcccttaattgtatggtaacagagcagtagtatctgggctactaaatgtgatcattgttttccttagttccctagtactgtgtatttag

SEQ ID NO: 608492 - DNA, 625 bp, Homo sapiens
aataattcaactgtttccatgtaactgaaccatgtcccagaataaagctcaagaatatttatagaaaaaaatagccagtaccctaaaggttaaaatatctggtatctaataaaaattatcatgcatgtaaagaagctggaaagtataacccataatgaggagaaaaatcaatcaattaaaactcagaaatgacacagattatagaattagtataaaaagatataaaaacagtgattataaccatattccatgtacttaagaagacagagggaatactgaacataagtagagacatgaaagatgtataaaagaccccaaagtaggcacagctaacctaaagtgatagaagtcagaataatatttagtcctggggaatattaatggtggggaacatgaggatgtcttttgagatgctgaaaatgttttatatcttkatcttggtggctttatatgtgtgcgcacatatgtaaagatcctctgagctgtacatttaagatatatgtactttatgtaagttaaacctcaaaataaatttcatattatctgatactgtttgcaaagcaagtcagccaatatgagtaagtaaaccttttattccattggatggatggaattggatgcatgt

SEQ ID NO: 608493 - DNA, 625 bp, Homo sapiens
aataattcaactgtttccatgtaactgaaccatgtcccagaataaagctcaagaatatttatagaaaaaaatagccagtaccctaaaggttaaaatatctggtatctaataaaaattatcatgcatgtaaagaagctggaaagtataacccataatgaggagaaaaatcaatcaattaaaactcagaaatgacacagattatagaattagtataaaaagatataaaaacagtgattataaccatattccatgtacttaagaagacagagggaatactgaacataagtagagacatgaaagatgtataaaagaccccaaagtaggcacagctaacctaaagtgatagaagtcagaataatatttagtcctggggaatattaatggtggggaacatgaggatgtcttttgagatgctgaaaatgttttatatctttatcttggtggctttatatgtgtgcgcacatatgtaaaratcctctgagctgtacatttaagatatatgtactttatgtaagttaaacctcaaaataaatttcatattatctgatactgtttgcaaagcaagtcagccaatatgagtaagtaaaccttttattccattggatggatggaattggatgcatgt

SEQ ID NO: 608494 - DNA, 598 bp, Homo sapiens
tttctgaacaggaaaaagaattaaacccaaaccacctagtcaggttcaaaacaagctccaaacccaagatcttttaattccctctaataactgctttccacagggatgtaactggggtcccctacccctggggcacaaaaaaccaatcagcgccataaattccctttgccttcaaccctctctcccttttacaggggggcagggtrgggggagggggtgacccaacatcaacacttacactctacagaaatatgctggcttatttcctttgtttgctcatgttatacttgatcaagtgtgaacgattaaactggtttcattaaaggcaagtgcattcacggctaacatccaacttcaatggcaactgtaagcatattttgcaagaaagagggcctgtttttttgcttgaaatctaccatctcattaacttttcttttgggggcaataaaaagggcactaggggtttttcaggagaatgtcagagcagttcagagatctgatgccagacaaaagaatatttagcgtttcaactctacgatacagtctctgctaaagaaaaaaattctgtttcaacattaaagcagctatgactgaaaat

SEQ ID NO: 608495 - DNA, 328 bp, Homo sapiens
gcgggggcctcggtggcaggggccgaggtcctgtcgcggtggctcggggtccgctgctcccctggcccttcatcctcctccgccccttccacgtggggtaccgggcagccggccacgtgggggaacgcgagccccgggtggccccggtcccatggggccccgcccagccagcggcgccraccagcccccttcccggcccccgggctccaacttcctcctggtgccccgcaccggccgcttctgccttctcaggcccgcggggtcaggcgcgggccggccacagggggcacttgcgctccccaaatccagatccgggagaccgtgccgg

SEQ ID NO: 608496 - DNA, 632 bp, Homo sapiens
tgactgcatttggagacagggtcgttacagagaaaatcaagctaaaataaggccatcaaggagccctaatccaatagaagtagttttcttataagaagaggagatcaggacacagrcacgcacagagggaccaccccgtgaggacagagagaagacgccttctacatgccaaagaaagaagcctcaagaggaaccaacccagccgacactttgaccttgactttgaacagtgagagaaaaaatctttgccgtttaggcagcccggtctggtttgtggtccttactacagtatccctgaggattcatgcacctgccccatccctggactccccagtgctagggcgagcagaggagggaaatgggagcagctactcctctcctgaaactcttggtcatgtcttccctgtgttggaggaagatgagagggtggtaaggggagtgaggtgaaaatcacatctgacataggattttgcaaattaaaccttttaacattaccagaaaactgcttagaagtgctaaaaaaaatgatttagcaaaatatagtagaaaaccatcactggaaaaattattgctaactatggtccaagactgcaaaataaaccatactaataggttcttttaatacatcaaag

SEQ ID NO: 608497 - DNA, 632 bp, Homo sapiens
tgactgcatttggagacagggtcgttacagagaaaatcaagctaaaataaggccatcaaggagccctaatccaatagaagtagttttcttataagaagaggagatcaggacacaggcacgcacagagggaccaccccgtgaggacakagagaagacgccttctacatgccaaagaaagaagcctcaagaggaaccaacccagccgacactttgaccttgactttgaacagtgagagaaaaaatctttgccgtttaggcagcccggtctggtttgtggtccttactacagtatccctgaggattcatgcacctgccccatccctggactccccagtgctagggcgagcagaggagggaaatgggagcagctactcctctcctgaaactcttggtcatgtcttccctgtgttggaggaagatgagagggtggtaaggggagtgaggtgaaaatcacatctgacataggattttgcaaattaaaccttttaacattaccagaaaactgcttagaagtgctaaaaaaaatgatttagcaaaatatagtagaaaaccatcactggaaaaattattgctaactatggtccaagactgcaaaataaaccatactaataggttcttttaatacatcaaag

SEQ ID NO: 608498 - DNA, 556 bp, Homo sapiens
aagaagcctcaagaggaaccaacccagccgacactttgaccttgactttgaacagtgagagaaaaaatctttgccgtttaggcagcccggtctggtttgtggtccttactacagtatccctgaggattcatgcacctgccccatccctggactccccagtgctagggcgagcagaggagggaaatgggagcagctactcctctcctgaaactcttggtcatgtcttccctgtgttggaggaagatgagagggtggtaaggggagtgaggtgaaaatcacatctgacataggattttkcaaattaaaccttttaacattaccagaaaactgcttagaagtgctaaaaaaaatgatttagcaaaatatagtagaaaaccatcactggaaaaattattgctaactatggtccaagactgcaaaataaaccatactaataggttcttttaatacatcaaagaaaagattaaaaatgaaaatgcgtgaagatttgtctgcttcttagggcctgaactatcagaggtgcagggtctgcacaccagactctaatcctaaatcc

SEQ ID NO: 608499 - DNA, 641 bp, Homo sapiens
aggggaacaaaagggcttcgaaggtgctgttagtattttgtatcttaacatgggtgctaattaatgctgtgtgtttagtttgcaaaaatttattcaaccatgacctatattgtatttccttkcagggtatatctcataacctcaatgaaaattttcattttaaaaaagtgttttttggggaaaatatgtattaagcaaattctgtattgtgtagaagtatgactgtgaaggctatgaagatttgatgtataaatgaggaaagctttgaaatgggcataaaagggaaaggagaggcactggaaaaagtatattcaacgaaacatgccagagctttagatgcagccatagttatctctctgagaaccacctggttgtctgaatgaggagagctggctcataggcagaggaaaagctttaaagagaaatgtgacttttatttctaggctcctctctttgggcatcaacagctttccccaacaaatacctgtccacaattctatattcacagcaagatggagtccccctccagttttgtgtacttcctatgctaatattggcagccaagaaaaacaaaaggacagcactcttaaagttattcacaaaaaaggcatcagggtctctaaaattgtcatcctaccacc

SEQ ID NO: 608500 - DNA, 641 bp, Homo sapiens
aggggaacaaaagggcttcgaaggtgctgttagtattttgtatcttaacatgggtgctaattaatgctgtgtgtttagtttgcaaaaatttattcaaccatgacctatattgtatttcctttcagggtatatctcataacctcaatgaaaattttcattttaaaaaagtgttttttggggaaaatatgtattaagcaaattctgtattgtgtagaagtatgactgtgaaggctatgaagatttgatgtataaatgaggaaagctttgaaatgggcataaaagggaaaggagaggcactggaaaaagtatattcaacgaaacatgccagagctttagatgcagccatagttatctctctgagaaccacctggttgtctgaatgaggagagstggctcataggcagaggaaaagctttaaagagaaatgtgacttttatttctaggctcctctctttgggcatcaacagctttccccaacaaatacctgtccacaattctatattcacagcaagatggagtccccctccagttttgtgtacttcctatgctaatattggcagccaagaaaaacaaaaggacagcactcttaaagttattcacaaaaaaggcatcagggtctctaaaattgtcatcctaccacc

SEQ ID NO: 608501 - DNA, 544 bp, Homo sapiens
tggtcacattcattagtgatggataatactcctgatacaaaattatgctttttaaatgaatgagaataatgtgtcactttcttaaacagtcatttgatagaatgggaccctgttatggtttgagttgtgtcctctcaaaagacatgtagaagtcctagcctttgtaaacgtgaatgtgatcttttttttttcttttctgcccagcaaccatctgtccaaccttggacttgtaattcacttatttatttattttttgagacaaagtctcactctgttgcccaggctggagtgcagtggtgcaatcatagctcatcrcagcttcgaatgctggggcccaaaggatcctcccacctcagcctcccgagtagctgaaatcaaaggttggcaccaccacccttagctaaatatctatttcttttattttaggttcaggggtacatgtgcaggtttgttatacaggtaaacttgtgtcatagaggtttgttgtacagattattttgtcacccaggtattaagcctggtacccactggttatggaaatagg

SEQ ID NO: 608502 - DNA, 412 bp, Homo sapiens
gcccgcctcggcctcccaaagtgctggaattataggcgtgagccaacgcgcccggccacaactcttaattaaacactatgagctgtttaaatagctgtttcccttgaactaaaggctagtatactaatgaaaaaaatttataagaattctgtattctgtctcctaaggcatccaaccatgtgttttacattcagtgttaaatcattccatttaaaatgaactaaatatagctattactaaagaaagaaaacgggactggggatatttattacataaatcattttctaaaacaaatcacagtygttgttattgttgtatgtcagattcctagctacccgccagaaactgaggccagctctctcagcaaaaatctctttctaggagtaaagtgctgtctctttaacacttcttc

SEQ ID NO: 608503 - DNA, 599 bp, Homo sapiens
ttattttatttgaaaagtttaaagtctgtgtctggattcattttattgttgttccagccacatttatagaaaaaactctttgctccactgaattgccttcggtctttkatgaaagactagttgagtgtatatgtttgagtctatttcagggatctctattatgttccattgatctatttgcccattattttgtgaatatcacactttctagatcactgcagctttgtagtaagttctgggtcatgtggtttgtgtcctccagggtcgctgctcagtactgtgtgggttatgctgggtcctttgcctttccatatgaactttagaatcaatttttctatgttaaaaaataatttcctgtgattttgatagagattgtggtgaatcaatacatcaagttggggaaaatcaacatcttaataatactgagacttcctatccatattgtggaatatctctccatttatttggatcttggatttctcttactagagttgtgtcattttctcatataaatcttgtacatacttgttagattaattcttacatactcaatttttgtctgctgatataaatgttattgtcatggaattcaaatttcc

SEQ ID NO: 608504 - DNA, 599 bp, Homo sapiens
ttattttatttgaaaagtttaaagtctgtgtctggattcattttattgttgttccagccacatttatagaaaaaactctttgctccactgaattgccttcggtcttttatgaaagactagttgagtgtatatgtttgagtctatttcagggatctctattatgttccattgatctatttgcccattattttgtgaatatcacactttctagatcactgcagctttgtagtaagttctgggtcatgtggtttgtgtcctccagggtcgctgctcagtactgtgtgggttatgctgggtcctttgcctttccatatgaactttagaatcaatttttctatgttaaaaaataatttcctgtgattttgatagagattgtggtgaatcaatacatcaagttggggaaaatcaacatcttaataataytgagacttcctatccatattgtggaatatctctccatttatttggatcttggatttctcttactagagttgtgtcattttctcatataaatcttgtacatacttgttagattaattcttacatactcaatttttgtctgctgatataaatgttattgtcatggaattcaaatttcc

SEQ ID NO: 608505 - DNA, 599 bp, Homo sapiens
ttattttatttgaaaagtttaaagtctgtgtctggattcattttattgttgttccagccacatttatagaaaaaactctttgctccactgaattgccttcggtcttttatgaaagactagttgagtgtatatgtttgagtctatttcagggatctctattatgttccattgatctatttgcccattattttgtgaatatcacactttctagatcactgcagctttgtagtaagttctgggtcatgtggtttgtgtcctccagggtcgctgctcagtactgtgtgggttatgctgggtcctttgcctttccatatgaactttagaatcaatttttctatgttaaaaaataatttcctgtgattttgatagagattgtggtgaatcaatacatcaagttggggaaaatcaacatcttaataatactgagacttcctatccatattgtggaatatctctccatttatttggatcttggatttctcttactagagttgtgtcattttctcatataaatcttgtacatacttgttagattaattcttacataytcaatttttgtctgctgatataaatgttattgtcatggaattcaaatttcc

SEQ ID NO: 608506 - DNA, 471 bp, Homo sapiens
atatctttcgttgcgtagcttgtgtgatttacatcccaagctaaacactttttcttatgacgcccaaagtaaagataaataacagcttgttgccgtatctgyaggtaagctttctgaagctaaggggactctagttgaacttcagtttctattattatgttcttgtgggccctatattccattcttatacagccctgattttatttgtttcaaatatttttgaggacctcaaatggaaacaattgtaaaaagtgattggctacggttaaattggtcaatgtcttcagtacattaggactttcaagatgttggaatatctgggtagattccagattaattacaaaattgaataacaaaatatatacagagaagtgtgattcattaagtaagctacaatattctctagaacttttggccacactctgcagctttccattttcagaggctggatggaggtaattattagggaag

SEQ ID NO: 608507 - DNA, 471 bp, Homo sapiens
atatctttcgttgcgtagcttgtgtgatttacatcccaagctaaacactttttcttatgacgcccaaagtaaagataaataacagcttgttgccgtatctgcaggtaagctttctgaagctaaggggactctagttgaacttcagtttctattattatgttcttgtgggccctatattccattcttatacagccctgattttatttgtttcaaatatttttgaggacctcaaatggaaacaattgtaaaaagtgattggctacggttaaattggtcaatgtcttcagtacattaggactttcaagatgttggaatatctgggtwgattccagattaattacaaaattgaataacaaaatatatacagagaagtgtgattcattaagtaagctacaatattctctagaacttttggccacactctgcagctttccattttcagaggctggatggaggtaattattagggaag

SEQ ID NO: 608508 - DNA, 588 bp, Homo sapiens
ccatgcatcagccaaatattatgcacaggtgaaaataktctcataaagtcataacactgtgcttggaaaatgtttgatgaatgctgggagaccagagggcagattacaaacacatttctggaagatgacattgaacctaggtgtgatattaaatcagatttcagtacacagaaatagaagatggtgtttggaggatgacggaataaatagagtgagtgaaagctacatggcgttacatgtccaacatggcagaaccccagatgcttgaccttatgacagaagacaagtgaaaaaggaaaacctggcttcacatcacaaagtgataaaatcaccaaactaataattcgtatgcaccgtggacccactgaagatttttgaggcataggatgtactgagatttaagaatgtgaatgcatctaaaagatgaatgtgaggatctggactgaagactgaggctgcaggcctcatggaagtcaaagacgaagaagtgagaaacagcgggagtggctggacccatccagcagagctgaaatagaatggggactgttgggagaaatcacttggattctaaacccacagagacttgcc

SEQ ID NO: 608509 - DNA, 588 bp, Homo sapiens
ccatgcatcagccaaatattatgcacaggtgaaaatattctcataaagtcataacactgtgcttggaaaatgtttgatgaatgctgggagaccagagggcagattacaaacacatttctggaagatgacattgaacctaggtgtgatattaaatcagatttcagtacacagaaatagaagatggtgtttggaggatgacggaataaatagagtgagtgaaagctacatggcgttacatgtccaacatggcagaaccccagatgcttgaccttatgacagaagacaagtgaaaaaggaaaacctggcttcacatcacaaagtgataaaatcaccaaactaataattcgtatgcaccgtggacccactgaagatttttgaggcrtaggatgtactgagatttaagaatgtgaatgcatctaaaagatgaatgtgaggatctggactgaagactgaggctgcaggcctcatggaagtcaaagacgaagaagtgagaaacagcgggagtggctggacccatccagcagagctgaaatagaatggggactgttgggagaaatcacttggattctaaacccacagagacttgcc

SEQ ID NO: 608510 - DNA, 624 bp, Homo sapiens
gttaggatatttttactgttatttatgattataattaattaagtgcacagtaaaagattatttttctttgaaggactatttctgaacaaaatatgtaatcatctgtttcattataacaagtctgatttggatttttaagattaggttttcttctcttttttattacttggcacatcwgtggaaagtgtgtttaaacaatataaaacatgtcagtctgtttttagggttaatgtggaaaaaagtaaagatgaaaatgacagatgaaaaagtaaagatgaaaatgacagataaaaaaagtagatcaaaacagtagatggccaagaatacataaacaaaagaaaaaaaaaagaaaattggttagtcagcaggattatataagaaatatggcaaacataaaaagtagaaaaccccagacatatgagctatttgatatgagtaaagaattttgaaataaaagtaagctgtatgatgaccaaacctaggaatgcaatagtggcaaaatcctgttctttcttgcagaatcaaatataaaatttttagaagatattttcttataagacggtaggaaacagggcacattttgatcttgttcattgttagtgaagttcgaattgtatgtgacac

SEQ ID NO: 608511 - DNA, 611 bp, Homo sapiens
tcaaaacagtagatggccaagaatacataaacaaaagaaaaaaaaaagaaaattggttagtcagcaggattatataagaaatatggcaaacataaaaagtagaaaaccccagacatatgagctatttgatatgagtaaagaattttgaaataaaagtaagctgtatgatgaccaaaccyaggaatgcaatagtggcaaaatcctgttctttcttgcagaatcaaatataaaatttttagaagatattttcttataagacggtaggaaacagggcacattttgatcttgttcattgttagtgaagttcgaattgtatgtgacacattttctaccctaagtggttttctagaatacttagcattcatattcaagaataaatcacaatttgtttaaaccactgttaattttatgtgttttgaaatctacatttttttcaaaaatttctcactgcctctaaatgttcccatataggaattttgtatggcccaatttaacatgcatgattatatacatatatatgatatatatctttcatattttctatatgagataaatgatatgtctcacattttatatgtgagataatcatttatatctcatattttatatat

SEQ ID NO: 608512 - DNA, 611 bp, Homo sapiens
tcaaaacagtagatggccaagaatacataaacaaaagaaaaaaaaaagaaaattggttagtcagcaggattatataagaaatatggcaaacataaaaagtagaaaaccccagacatatgagctatttgatatgagtaaagaattttgaaataaaagtaagctgtatgatgaccaaacctagsaatgcaatagtggcaaaatcctgttctttcttgcagaatcaaatataaaatttttagaagatattttcttataagacggtaggaaacagggcacattttgatcttgttcattgttagtgaagttcgaattgtatgtgacacattttctaccctaagtggttttctagaatacttagcattcatattcaagaataaatcacaatttgtttaaaccactgttaattttatgtgttttgaaatctacatttttttcaaaaatttctcactgcctctaaatgttcccatataggaattttgtatggcccaatttaacatgcatgattatatacatatatatgatatatatctttcatattttctatatgagataaatgatatgtctcacattttatatgtgagataatcatttatatctcatattttatatat

SEQ ID NO: 608513 - DNA, 611 bp, Homo sapiens
tcaaaacagtagatggccaagaatacataaacaaaagaaaaaaaaaagaaaattggttagtcagcaggattatataagaaatatggcaaacataaaaagtagaaaaccccagacatatgagctatttgatatgagtaaagaattttgaaataaaagtaagctgtatgatgaccaaacctaggaatgcaatagtggcaraatcctgttctttcttgcagaatcaaatataaaatttttagaagatattttcttataagacggtaggaaacagggcacattttgatcttgttcattgttagtgaagttcgaattgtatgtgacacattttctaccctaagtggttttctagaatacttagcattcatattcaagaataaatcacaatttgtttaaaccactgttaattttatgtgttttgaaatctacatttttttcaaaaatttctcactgcctctaaatgttcccatataggaattttgtatggcccaatttaacatgcatgattatatacatatatatgatatatatctttcatattttctatatgagataaatgatatgtctcacattttatatgtgagataatcatttatatctcatattttatatat

SEQ ID NO: 608514 - DNA, 611 bp, Homo sapiens
tcaaaacagtagatggccaagaatacataaacaaaagaaaaaaaaaagaaaattggttagtcagcaggattatataagaaatatggcaaacataaaaagtagaaaaccccagacatatgagctatttgatatgagtaaagaattttgaaataaaagtaagctgtatgatgaccaaacctaggaatgcaatagtggcaaaatcctgttctttcttgcagaatcaaayataaaatttttagaagatattttcttataagacggtaggaaacagggcacattttgatcttgttcattgttagtgaagttcgaattgtatgtgacacattttctaccctaagtggttttctagaatacttagcattcatattcaagaataaatcacaatttgtttaaaccactgttaattttatgtgttttgaaatctacatttttttcaaaaatttctcactgcctctaaatgttcccatataggaattttgtatggcccaatttaacatgcatgattatatacatatatatgatatatatctttcatattttctatatgagataaatgatatgtctcacattttatatgtgagataatcatttatatctcatattttatatat

SEQ ID NO: 608515 - DNA, 608 bp, Homo sapiens
tctcacttgtccatttttgcttttgttgcagtttcaactattttttaatccatagtaastttgtataacttttcttttatttactcatagcttatttgtgcctttatatttaaaaagggtccctcgtgggcattctgtatttgcctatttattttttagccagtgttacaattcttgccttttaattgttctgtttggaccatttatattaacataattatcgattcagttggatttaaatctactatattcattgtttttcctgtttgattaatcttttgtttgtcctcctattttttcttcttttattgggttaatttaataatttcattatttaatcattctaattgacttattcaattacataattttccttgctgacttataaactgtatctctttggggtgtgtgtgtagtgtagtataataaaaaaaatcattgttattcacacagttaacatttttaatgttctttatttcattgtggagatccagatttttcatctcagacattgtgggttttttgcaagaagtttaattggagtcttttataatattatccaagtctctatataacatgctcatattttcctctagttttttgaatac

SEQ ID NO: 608516 - DNA, 608 bp, Homo sapiens
tctcacttgtccatttttgcttttgttgcagtttcaactattttttaatccatagtaagtttgtataacttttcttttatttactcatagcttatttgtgcctttatatttaaaaagggtccctcgtgggcattctgtatttgcctatttattttttagccagtgttacaattcttgccttttaattgttctgtttggaccatttatattaacataattatcgattcagttggatttaaatctactatattcattgtttttcctgtttgattaatcttttgtttgtcctcctattttttcttcttttattgggttaatttaataatttcattatttaatcattctaattgacttattcaattacataattttccttgytgacttataaactgtatctctttggggtgtgtgtgtagtgtagtataataaaaaaaatcattgttattcacacagttaacatttttaatgttctttatttcattgtggagatccagatttttcatctcagacattgtgggttttttgcaagaagtttaattggagtcttttataatattatccaagtctctatataacatgctcatattttcctctagttttttgaatac

SEQ ID NO: 608517 - DNA, 490 bp, Homo sapiens
atgattgttagctgttattttaattgtagatcaaaataaacattaaaaataaaagaatgagaactatgtgggtattagagaagcatattggattgacctgctgttcctgagttgggggcataaatagggcaggtagcagttattcactaagtccccattgttggggagcaattgctgcagaggttgtgggtcagarctctgtcgtcacatgcgatctgtctattgtcctgtctctgtattgtctctcagcagtgattaactctcaagaagatctcaggggttgtagctcaaattaaagtatcataaagatgtacgataagaaagcaggagaaatgaagagcctaatttcacttttaagtgcctattcagttacaagaactactcatggcacttatttttatgtattgaaactgaaaaagaaaagatatagattattgatcctaaactgaggtggaggtgtagactcggcacatttaatagtttgtccagg

SEQ ID NO: 608518 - DNA, 618 bp, Homo sapiens
ctcacatatatgtcaccatttgactaagagccccttatgtttgtttgtgacaaattaccatcagttagtatatgggcaatttatggtggtgatgagaacaaacctgggaaggatatggtttgaggtttataaagtaagcttacctaatgttggttgtgactaataaatcaacgtttaatgctccactatcaaatactaattaattctttctttcctccttcatattaatttcgtgtcattccaagtcttcaggggaaagtgtttgcagcttgaagcaagaacaytcttatgccttgccagagaattttattaattgcagtaagtgcagtggctttggacacccgaatttaaaaaagaaaaatgattttggaagacaattctcccctatggcaaatatgatattttaggatctcaataaatccttttgaacctaatggaagtaattttctcatatcttttttggtactcagatactctggtaatccaattactaagacccttgtattccaacactcatattaaaagcaacttcaaaatacaaaataaaataaattcaacaaatttgttcagagacctagtcattatatgatatttcactccgatggcaaaggctatatt

SEQ ID NO: 608519 - DNA, 618 bp, Homo sapiens
ctcacatatatgtcaccatttgactaagagccccttatgtttgtttgtgacaaattaccatcagttagtatatgggcaatttatggtggtgatgagaacaaacctgggaaggatatggtttgaggtttataaagtaagcttacctaatgttggttgtgactaataaatcaacgtttaatgctccactatcaaatactaattaattctttctttcctccttcatattaatttcgtgtcattccaagtcttcaggggaaagtgtttgcagcttgaagcaagaacattcttatgccttgccagagaattttattaattgcagtaagtgcagtggctttggacacccgaatttaaaaaagaaaaatgattttggaagacaattctcccctatggcaaatatgatattttaggatctcaataaatcctttkgaacctaatggaagtaattttctcatatcttttttggtactcagatactctggtaatccaattactaagacccttgtattccaacactcatattaaaagcaacttcaaaatacaaaataaaataaattcaacaaatttgttcagagacctagtcattatatgatatttcactccgatggcaaaggctatatt

SEQ ID NO: 608520 - DNA, 438 bp, Homo sapiens
accagtgtcttagcctctcacagataccaatgcctccatctctaagggctgaatcctaaatatttcctacccagaggaacagcatgagggaaattctgagccctctgcaaaccatgttatgtgggtagttgcctatttacgtactggaggggtaagtcctatttgagctccgttcaattttctgtcaacaggtaaaaagaaataattagaaaaacagagaaagtgacaagtgtattagattcttaaaaycgttctatgtggatgaaagtagaatgtcaccatcatgtattattaaatttaaagctgtaaagagaaaataaactctctcttcaccattcccaatatagacatatgtttctcatctcaatggcaaagctaaagaaagggacctctccaagagtgttctaccgagggcttcacctcctcatagatttctgc

SEQ ID NO: 608521 - DNA, 586 bp, Homo sapiens
gtctggtgccaggttttcttttaaccttttagttttgtgagtcaatcaatctcctttttactgaatgcaggttgagtcctgtttttgtttctgggtcacatatgcagtaagacatagataccagtacaacatctgctctactcattgggtactttattagctctcacccagggttgttaataaacacctgtgtaggtgtttttatctctgcagatagagtgtaagttccttgagaggatgatactaccttctacctttttatttatttatttattgttggtgactgctatgatgccttgtagagtacagagtagtgaacatgttattytatagtgaataaagaagaatgagtttaagaacattaatttgcaatgtttaaaatggtcagaggagggaggacatttagttcatcaaattttcactggacgctgtccagggccatagactaggctgtgcattggcgatgcagaggtggttaaagtatgactccagacatcaaatatactacagatcatggggggaatcacagtaactttttaataattttcaacggatgtaggataattcatagcactcttatgctgta

SEQ ID NO: 608522 - DNA, 211 bp, Homo sapiens
gatacggacaaactctacaccaccaacaaccaactgtgtctaattgaagtgtawtgaacatccaaaaaacaacagcagaatatacacttttttaagggcttatggagcattagccaaaatagactataacctaggccatacagaaatcttcacctatttaaataattgaagtcatacagaatatatactctgaccataacagaatgaaacc

SEQ ID NO: 608523 - DNA, 594 bp, Homo sapiens
ggtacacctacatgtaggacatgaatcataaagtcacacttgatgaacttttgtggacatttaatctgtgacccacatcatgacacaagacacctccagccttcctcataccacctcccagctaatgaagaccctcaactcaggtgactgcttttctgacctcaagacaatagaagagcttcctgttttggaatttcaaataactgaaatgtgtgcttttgtgtctggctgtattatcccaagattaagttagtgaggctcattcagttgcacgtaacagcagtctgttcttgtcccccactgtggtatatttcacagcagtttatttattcttctactggtcatggatatttagattatttctactgtgggactattatgaacagtgctgctttaaatgttatgtattttggcagtcataggcacgcacgtctacagggtacatacctggagatgagattactgaagatgacggtrtgcatatgttggcttctagttgatgctgctaatttatgggctctccaattgtttcttgtgctcactgacattggttactgtgtgtcctattaattatagtcagtttggtagaggcat

SEQ ID NO: 608524 - DNA, 577 bp, Homo sapiens
taaattttgttttgtaaacagtattcattggattaaagaagctctcttccattctcaatttgtaaatatttttaacatgtgttcaattctatccgatatttttctgcattaataagatgatcatttcacttatttttgtcagtttatggacattgtaaattacattgatcatttttayaccaaaaaacttgctggagtgatcctgcatcgtttttgatacatttgtgagattagacatccatttcccttccttatatttatttcttctgtttgtgatagcaaagcaaaatttgtctataaaatatttttaaaatattttctttctttacatcttctcgaaagagttctgtaagagaaattatatttactatatgttgggtagactttgcaaaactccctgagatttttttttttagtgcaaatattgtgaatgactgagataattttttaatgatcctggattatccatgcttttatttttttcttgagatagcattttgtaagaacaatttttaatgtccaattgtttgcttattttattcttattacttcctaactacattgtttttgtgttctg

SEQ ID NO: 608525 - DNA, 577 bp, Homo sapiens
taaattttgttttgtaaacagtattcattggattaaagaagctctcttccattctcaatttgtaaatatttttaacatgtgttcaattctatccgatatttttctgcattaataagatgatcatttcacttatttttgtcagtttatggacattgtaaattacattgatcatttttacrccaaaaaacttgctggagtgatcctgcatcgtttttgatacatttgtgagattagacatccatttcccttccttatatttatttcttctgtttgtgatagcaaagcaaaatttgtctataaaatatttttaaaatattttctttctttacatcttctcgaaagagttctgtaagagaaattatatttactatatgttgggtagactttgcaaaactccctgagatttttttttttagtgcaaatattgtgaatgactgagataattttttaatgatcctggattatccatgcttttatttttttcttgagatagcattttgtaagaacaatttttaatgtccaattgtttgcttattttattcttattacttcctaactacattgtttttgtgttctg

SEQ ID NO: 608526 - DNA, 577 bp, Homo sapiens
taaattttgttttgtaaacagtattcattggattaaagaagctctcttccattctcaatttgtaaatatttttaacatgtgttcaattctatccgatatttttctgcattaataagatgatcatttcacttatttttgtcagtttatggacattgtaaattacattgatcatttttacaccaaaaaacttgctggagtgatcctgcatcgtttttgatacatttgtgagattagacatccatttcccttccttatatttatttcttctgtttgtgatagcaaagcaaaatttgtctataaaatatttttaaaatattttctttctttacatcttctcgaaagagtyctgtaagagaaattatatttactatatgttgggtagactttgcaaaactccctgagatttttttttttagtgcaaatattgtgaatgactgagataattttttaatgatcctggattatccatgcttttatttttttcttgagatagcattttgtaagaacaatttttaatgtccaattgtttgcttattttattcttattacttcctaactacattgtttttgtgttctg

SEQ ID NO: 608527 - DNA, 577 bp, Homo sapiens
taaattttgttttgtaaacagtattcattggattaaagaagctctcttccattctcaatttgtaaatatttttaacatgtgttcaattctatccgatatttttctgcattaataagatgatcatttcacttatttttgtcagtttatggacattgtaaattacattgatcatttttacaccaaaaaacttgctggagtgatcctgcatcgtttttgatacatttgtgagattagacatccatttcccttccttatatttatttcttctgtttgtgatagcaaagcaaaatttgtctataaaatatttttaaaatattttctttctttacatcttctcgaaagagttctgtaagagaaattatatttactatatgttgggtagactttgcaaaactccctgagatttttttttttagtgcaaatattgtgaatgactgagataattttttaatgatcctggattatccatgcttttatttttttcttgagatagcattttgtaagaayaatttttaatgtccaattgtttgcttattttattcttattacttcctaactacattgtttttgtgttctg

SEQ ID NO: 608528 - DNA, 593 bp, Homo sapiens
tttgttcctatgatgacttattaagagtcatggagatgaagatgctcaaatctcttcggttctggaaattcagtaattagcgcttcaaatttttttttattgcattctctccatttagttttccagaactcccactgatttataagttgaatattttcactgtatcccaactgcacatcaactcttctacttgtgagctcctaggtttttttttttttttggagtgtgtgtgtgtgtgtgtgtgtgtgtgtgtgtgtatgtgtacgtgtggtgcaattctgtgctgttttccctggatattcttcttctaatctgttttttaaatttcattgtgtttatacttgctgttaaatccatccactaattttatagtaaagattatattattatttctttaagttccactgggtttcatttattcactttttcaacatgccktattgttttcttaggggtttgattatatttatccctggaaacatcttaatttttttttaaaaaaatactttttcagattgccattttattatctcaaattgttggtctgaggattaattttcatggtacatgccagctcttgtgaatgttgggtt

SEQ ID NO: 608529 - DNA, 593 bp, Homo sapiens
tttgttcctatgatgacttattaagagtcatggagatgaagatgctcaaatctcttcggttctggaaattcagtaattagcgcttcaaatttttttttattgcattctctccatttagttttccagaactcccactgatttataagttgaatattttcactgtatcccaactgcacatcaactcttctacttgtgagctcctaggtttttttttttttttggagtgtgtgtgtgtgtgtgtgtgtgtgtgtgtgtgtatgtgtacgtgtggtgcaattctgtgctgttttccctggatattcttcttctaatctgttttttaaatttcattgtgtttatacttgctgttaaatccatccactaattttatagtaaagattatattattatttctttaagttccactgggtttcatttattcactttttcaacatgccttattgttttcttaggggtttgattatatttatccctggaaacatcttaattttttttwaaaaaaatactttttcagattgccattttattatctcaaattgttggtctgaggattaattttcatggtacatgccagctcttgtgaatgttgggtt

SEQ ID NO: 608530 - DNA, 618 bp, Homo sapiens
tgacgccaagagcttccacctttatgtgcatcaacttctaaaatcatgtttcttctttcatcataaaaatgtgaattrctggttttcagtaaatgctttgatgtacctaaaagattgttcaactttttcccaacttttgttaactccagtgaccaaccacttatcattaaaaaatgtccaaatccttgcttctcaatcactaattatggtggcccatgaaagagatggtcgaggatccactgacccaagaacaagggtggataccaagcccaagtactccacaaaataacaaattctgtgaaagcaatgccaacatctaatgaattagagaatgaatagagtccatgtaaatatgtattttgagccaacaagataaaggcaatgagaagtgagagtagagtccatgagggttattgctggatggaagagtgttgagtcactgaagaaagagaataatgtactgcatatttccctccaataattttgagcccaaaagatgatatgcagaggggaatcggccaatttttgagacaaatatagttgaaccaatttgtgttttcagacacagcccaaaataaaatgcattgtcacatttagccaatactgaaaataaattaa

SEQ ID NO: 608531 - DNA, 618 bp, Homo sapiens
tgacgccaagagcttccacctttatgtgcatcaacttctaaaatcatgtttcttctttcatcataaaaatgtgaattgctggttttcagtaaatgctttgatgtacctaaaagattgttcaactttttcccaacttttgttaactccagtgaccaaccacttatcattaaaaaatgtccaaatccttgcttctcaatcactaattatggtggcccatgaaagagatggtcgaggatccactgacccaagaacaagggtggataccaagcccaagtactccacaaaataacaaattctgtraaagcaatgccaacatctaatgaattagagaatgaatagagtccatgtaaatatgtattttgagccaacaagataaaggcaatgagaagtgagagtagagtccatgagggttattgctggatggaagagtgttgagtcactgaagaaagagaataatgtactgcatatttccctccaataattttgagcccaaaagatgatatgcagaggggaatcggccaatttttgagacaaatatagttgaaccaatttgtgttttcagacacagcccaaaataaaatgcattgtcacatttagccaatactgaaaataaattaa

SEQ ID NO: 608532 - DNA, 634 bp, Homo sapiens
attttgttttccatcctgtatcatgaaagagttggaataagaatgtaataggacacaaagacagcgctattatcttacaaattacttcattagacagagaaagtatgcatgttggtgagaatttaaaaatgcattttgcttggatagtgtacaattcataacagggacttaaatgtaaagcgtacaaaacaggaacaaatattgtaaaaatcacctttactaakgcatatgaattctatcagctgcctggcatactgtgggcacaatttacaagtattaatacatttacttctcattcagtgctttcagggagctactagaaattctcccattttacaattagggaaattcaggctcagaaacttctgcatcctgctcaagatcatctcctgtcgtcttgaatcagtatttgaaggggaatagcctgagctcatactccacaagcgtggccacaactccatgccacttgttcatttatcttttgggatgccttgtaatgattggcttcatgtcctctctaccttctcagctaacagctcagtgacagcagggttctttgtaccttattcacccttacgctgcctgtgcctcacacagcgccagacaccaaggaggtggagaatagatactcgtc

SEQ ID NO: 608533 - DNA, 542 bp, Homo sapiens
tacatacacataagaaaacccagtgatgagtcactctactgggtggtttgaacttgggcttctatagcatcttaacaaaagaacaattaattattacagtgatggcaagagaaagaaaacggacatttagtttccagagcagcaaactgggagatagtaaacatatgaggctacaaggcaagggctagtgagtgaggtttgttaggtcaacttctgtggaccctacaggatgataaggggctagagttttttcggtgattaactcctgtccttctgggtagagagaaagggagacacctttacaaatgatgccctgccttaggcataygggaagggtttgaaagattttcttgtattagcatattctcaattgtctttagcccaaaagaatccttatgccaaagtggcatattttggggtagcatgttctgtacctccaaagcttgaattgattttatttcttctctgactgtgcaaaggcactaaaatgcaaggatgcaaatcaaatctcaggctgtctctaagacacaggccaagggaca

SEQ ID NO: 608534 - DNA, 630 bp, Homo sapiens
cactagaagtttgggaaaagtgataaaaacttagggattatgtctgttaaaatatattacaggataatgcccatcaatcaacaagggaaaaaagaaaaggtggtatatatttataccatggaatactactcagccgtaaaaagaaacaaagtaatagcattcacagcaacctgggtaggattggagacyattattctaagtgaagtaactcaggaataggaaaccaaacatcgtatattctcactcttaagtgggcattaagctatgaggaaacaaaggcataagaatgatatattggactttggggactgacgggaaagggtgggaggggggtgaggaataaaagactacacattgggtacacagtacactgctcaggtgacgggagtgctaaaatctcagaaatcaccactaaagaacgtattcatgtaaccaaacaccccctgctccctaaaaacctattgaaatttaaaaaaattaaaaaacaagaaaattccatatacataacataaattcgaacatttttaagtgcacagtgttaagtacattcacattcttgtgcaagaaaacagaagtaattagataataacaagtgttggtgaagatgtggagcaattggtatcctcatat

SEQ ID NO: 608535 - DNA, 630 bp, Homo sapiens
cactagaagtttgggaaaagtgataaaaacttagggattatgtctgttaaaatatattacaggataatgcccatcaatcaacaagggaaaaaagaaaaggtggtatatatttataccatggaatactactcagccgtaaaaagaaacaaagtaatagcattcacagcaacctgggtaggattggagaccattattctaagtgaagtaactcaggaataggaaaccaaacatcgtatmttctcactcttaagtgggcattaagctatgaggaaacaaaggcataagaatgatatattggactttggggactgacgggaaagggtgggaggggggtgaggaataaaagactacacattgggtacacagtacactgctcaggtgacgggagtgctaaaatctcagaaatcaccactaaagaacgtattcatgtaaccaaacaccccctgctccctaaaaacctattgaaatttaaaaaaattaaaaaacaagaaaattccatatacataacataaattcgaacatttttaagtgcacagtgttaagtacattcacattcttgtgcaagaaaacagaagtaattagataataacaagtgttggtgaagatgtggagcaattggtatcctcatat

SEQ ID NO: 608536 - DNA, 636 bp, Homo sapiens
aacggaatagaaatcagtagaaatatctgtggaagccagtgtgaactttatggtgcctttgaacctcacagggtaaagttcttatggcacactgctcagtaatatgatcttcctgttggcctcagggatctcagaaagggaaatcctctattttcagtggcccagctacacaaacagtkcaaggaggcaagttccatatgcagaatccagacacccaccaggcctggctgccctggttcctgtttcttccccgtcaccaccacatttctatgctgtcagcaggactcaaaaggcaaattgatttagctcattacaattaggatgaattaaaagcaatatttttacttcactcaaaaagtcagcaggtcacaaaatatattgctctgcatatatagtaggtaatgcctcacatatgatttattggagaatgagctagttcatttccaggaatcttctagataaatgaagttcaccactaatatgttagaactttttttaaaagttaacttttattttcctagtagccatttaaaaatatattaaccccccctccctgccttctcccttaatcatggcatttattgctcaggttattccaaaattactgccgtaacattagcaatgagaagttaatag

SEQ ID NO: 608537 - DNA, 379 bp, Homo sapiens
tctttctttcttttccttttctttcttctttttctttcttttctgactctctctctccttccttccttctgtccatccttccttccttccttcctctctctctttttttctttctttcttttttttttttttttcaagacaaggtctcactctgtggcccaagctggagtgcagtggcacgatcttggcccactgcagtctcaaattcctgagctcaagcaatccttccacctcagcctccctagtagctagtagctaggatcayggatgtgcaccaccatgcttggctacttttttttttttttttgagacagagtcttgctctttcgcctaggctggggtgcagtggcgcgatctcagctcactgcaacctccacct

SEQ ID NO: 608538 - DNA, 508 bp, Homo sapiens
atccttattcagaggaccagtgaccagttgtgacactcagaggacttcatggacatactggcattttcacatcagctcacatgactaaagcagcccctggctgagaaacattccattacgtatccctccccaggtggtcagtcagctctacaagcatagcctttcctaacagtctttctccactccactctgctgtttgaaaatgcctccttggctctcccamtatcttctgtccccttctcagtctcaataatagtaaccagaatttactgaattattactacttatgtgtcatgcatagttcttttctttccttttttttttttttttttttttgagttggagtcttgctctgttgcccaggctggagtggtatagtactgtgatcttggctcactgcaggctcaacctcccaggctcaagagatcctcccacctcagccttccaagtagctgggactacaggcttgcaccaccacacccagctaatttttcaagtttttgtagag

SEQ ID NO: 608539 - DNA, 476 bp, Homo sapiens
actgaaatttctccataatcaatagaaaactttctattttctcaacactagtgaaacctgcttttctttggtgacaccagttgataaaactatttttgattcaatatgttgctttcccctttggttatcagtagtttaattgaattattgactacagttttatggcaaatgtgaattctgggttgaacaaactaaattgagatgcaaataccaatttgtaacattgatcctgtgggtgaataatttcatagtcccaacaaatgtacttatgtttaccaacttgcaatacaaggtctttttaaaagtaattaatttatttttatttttatttttttaaagacagggtctcattctgtcttgcaggctgttgtacagtggcctgattatagctcactgtagcctygaaattctgggccgaaatgatccgcctgcctcagcctccaaagtagctgagactacaggtatgtgtcaccaca

SEQ ID NO: 608540 - DNA, 476 bp, Homo sapiens
actgaaatttctccataatcaatagaaaactttctattttctcaacactagtgaaacctgcttttctttggtgacaccagttgataaaactatttttgattcaatatgttgctttcccctttggttatcagtagtttaattgaattattgactacagttttatggcaaatgtgaattctgggttgaacaaactaaattgagatgcaaataccaatttgtaacattgatcctgtgggtgaataatttcatagtcccaacaaatgtacttatgtttaccaacttgcaatacaaggtctttttaaaagtaattaatttatttttatttttatttttttaaagacagggtctcattctgtcttgcaggctgttgtacagtggcctgattatagctcactgtagcctcgaaattctgggccraaatgatccgcctgcctcagcctccaaagtagctgagactacaggtatgtgtcaccaca

SEQ ID NO: 608541 - DNA, 469 bp, Homo sapiens
tttctccataatcaatagaaaactttctattttctcaacactagtgaaacctgcttttctttggtgacaccagttgataaaactatttttgattcaatatgttgctttcccctttggttatcagtagtttaattgaattattgactacagttttatggcaaatgtgaattctgggttgaacaaactaaattgagatgcaaataccaatttgtaacattgatcctgtgggtgaataatttcatagtcccaacaaatgtacttatgtttaccaacttgcaatacaaggtctttttaaaagtaattaatttatttttatttttatttttttaaagacagggtctcattctgtcttgcaggctgttgtacagtggcctgattatagctcactgtagcctcgaaattctgggccgaaatgatcckcctgcctcagcctccaaagtagctgagactacaggtatgtgtcaccaca

SEQ ID NO: 608542 - DNA, 427 bp, Homo sapiens
aaaaggctgtacactgtataattccaatgatacaacattcttaaaaaggggaaaactgtaaaaagatcagaatttccagtagtctccaagggaagggatgaataaatcaagcacagaaatttttaagaaagtaaaactattcttataatattgtagtagtggttacatgacatatgcatttgtccaaacgcatgaaatgtataatgtcaagagtgaaccctaatataaaactaatgtatggactttcatttataatatgtcaatattgatgcatcaattataacgaatgtaccacactaatccaagatattaatcataaagaatatggagagtagaagaaagtgtatggaaattctctctgctttgttagtttctactataaacstaaaattgttctaaaaataaaatctattaattaaaaaaagaa

SEQ ID NO: 608543 - DNA, 441 bp, Homo sapiens
catggatggaaccggaggtcattatgttaaatgaaataagccaggcacagaaagacaaacatcacatgttctcacttatttttggatctagaaatcaaaacaattgaaaacatgaaaatagagagtagaaggatggctaccagaggctgggtagtgtaataggggtggggtgggtagggaggtgaggatggttaatgggtacaaaaaaaatagttggaaagaatgaatamagccgagtatttgatagcacaacagggtgactatagtcaataataatttaattgtactttctaaaataactaagagtataatgggactctttgtgacacaaagaataaatgcttgaggtgatgaatactccattctccgtaatgtgattattacatattgaatacctgtatcaaaatattacatgtaccccataaatatatacacctataa

SEQ ID NO: 608544 - DNA, 527 bp, Homo sapiens
tgcaccaggaggtgaactgcctgatggatttcctgggggaatgtgaggaggaactgcaggcattaaagaagcttaagaagagtgagagaggccttctctatggggtccccatgagcctcaaggacacctatgacagcatggtgagcctggggtgtacatgcacacgaatgtgcatatgcacgcttgtgccaccagcctggagcttggtgtgtgacactggggggctcagtgtgtgacaatgggtgagtcatttaaaactgcacagctacgaagcggcaaactgaggtttatacccagaatttgggttccaaaccccaaattctcagccaccacactcttttgccatccgtgaagtgctgcgcttgtgtccccaggggtgtgagagtgtgtgtgagtgggggtggaatggggctgaaaatcagccagctggctggttccaccctgacccccatggctggaggcaatgttccttccctgcagggccatgactgtrcatgccgcctggcctagttcctggagaagcctgc

SEQ ID NO: 608545 - DNA, 484 bp, Homo sapiens
tgccagcatgcctaatttttgtatttttagtagagacggggtttcgccatgttgaccaggctggtctcaaaatcctggcctcaagtggtycatctgccccagcctccccaagtgctggaattacaggcatgagccaccatgcccagccattagcaggtattttttgtagcaactcatgtctatcatgttgaaaggtgatggtgtcgctctccatttatattacatgctttagaaattatataaagcccacccaataagaaatatttattgagcacttgttatgtgctagacaagattctaaatgctttctcgattttttaataatatgataatgttacaaagtcagaattatttcctcatttcacagtggagaagatgaagtcacagagagatggcgctgtaaatcaccaaagggtgcaatctgatggagattttcaactttggctctgttgaccatacggttttgcttcactaaagttaaaat

SEQ ID NO: 608546 - DNA, 594 bp, Homo sapiens
gtgccagcatgcctaatttttgtatttttagtagagacggggtttcgccatgttgaccaggctggtctcaaaatcctggcctcaagtggttcatctgccccagcctccccaagtgctggaattacaggcatgagccaccatgcccagccattagcaggtattttttgtagcaactcatgtctatcatgttgaaaggtgatggtgtcgctctccatttatattacatgctttagaaattatataaagcccacccaataagaaatatttattgagcacttgttatgtgctagacaagattctaaatgctttctcgattttttaataatatgataatgttacaaagtcagaattatttcctcatttcacagtggagaagatgaagtcacagagagatggcgctgtaaatcaccaaagggtgcaatctgatggagattttcaactttggctctgttgacyatacggttttgcttcactaaagttaaaatatgcagacataaaaaagaatgagttcatgtccttttcaggaacgtggatgaagccggaaaccatcatcctcagcaaactaacacaggaacacaggaacagaaaaccaaa

SEQ ID NO: 608547 - DNA, 566 bp, Homo sapiens
gccttcaccaatctggggaaatttttcattatttattttaccatttyctccctggtccattttctctgttctctcttcctggaatttctactatttggatattgaaccctctgaattgacccttaaattttcttttttttccatattttcctttcctttatactctttttttggaggagaaggggttgaatttatattccagtatttttgtcaatgtctaaaatttttgagtgttgtattataatttcctaaatcccttttttcctctagtcattactttttcacagactccaggtatatattctaactctgcacatattaaatagaattaaatgtttctcttcagctctctatgtcacttctgtttcatcagggttatatttttctatcagaatctgttgatttactagttttatctgactttcttattagtggcgttctcccacatttggttatcctcggctttctgggtgcattgatgactaaagccctgaaaaaatgatcactggatgtctagcgtgggctggattgggtgactgaagggctatgttttaggtcaccaacct

SEQ ID NO: 608548 - DNA, 573 bp, Homo sapiens
gggaaggatacaaaaccatcacttaccattttggcaaaatattattcgatccgtatctacattggtgcaatacattgatttagtagcaactatgctcttagatcctctaaattaaaaataaaaacaaaccagatcgatagatagctcacaacaaaactgcaagtgcttgtaagcagagtgaataaaggtattacagcaaatgacactgtgtgtgtcataatgaaragagtcccaaaataaaatgcttcaagaagacaaggtcaaggtcactactggacaagctgatagacaccctaatgaataaatggttgtctgctctaaaatcatcataccactcataaagcaggtatacagctgagaaatgttcccagaatgccaaatttgtatctattgggaaagtttttgcaagattacatggaggctgcagataaatatacagggcaaaggttaatttgagtcagacagaaaaaaaaaatgtttgctgtgtgaaatactgccagggttgcttgggccacagtagcaaaaggaatactgagaatgaatggtggcccttcagcaagaagtaattggccc

SEQ ID NO: 608549 - DNA, 633 bp, Homo sapiens
cttcagaaatctccaaactgcaaagcaacttttatgtcatagcratttcattatacatcccaaaagacagaaagatctttttaaaaaaatctgaaatgattaccagtcactttggtgttggtagtggtgattttgcttttctgaggctgtcatgtgagtagtgtggataaagcaagtgagaaatggtgttggtgacattgagatccagatttttatcatgtgagaaaaaggaaattgatgagattgtgtaaaactctagtcctgattttgaaatggaaataccagcataaatgtatgacttaatttatacttaaaagaaaatactttaaatgtcccaattttgtatcctgcaaagtcctagaaacaaccaatccagtagtaattagtattcctcactcaccagtgatggatctagatactatttcccactaaaaagaaccaacccccttaaataaatggtcacaccaggaagcaaagaaattaaatgactactaagagtgtttcaaacagattcaggagaaactgaatagttcttattcctggggtcagacaatttgatcccaaattaggataaaactgtaatggatgaattgaaacatatcaaatttgtttgactccataaatgaataatga

SEQ ID NO: 608550 - DNA, 633 bp, Homo sapiens
taatttatacttaaaagaaaatactttaaatgtcccaattttgtatcctgcaaagtcctagaaacaaccaatccagtagtaattagtattcctcactcaccagtgatggatctagatactatttcccactaaaaagaaccaacccccttaaataaatggtcacaccaggaagcaaagaaattaaatgactactaagagtgtttcaaacagattcaggagaaactgaatagttcttattcctggggtcagacaatttgatcccaaattaggataaaactgtaatggatgaattgaaacatatcaaatttgtttgactccataaatgaataatgatgctttaaataaattcatcagtcacatttgkatgatgctaggcatggtaaaaattggtgaattttgaaaattggtgaataaaggggagtttcctgttgtgggtatattctaactaataaatgatataggaatgatagaataagaatgacaacatttgcaatccctaaagaattaatggagttaggcagagatcaacagatgatgatatcacaaaaagagagcaaaccagacatatataaccctgggtggaaggagataccaccactgataatgtagtcttgccaaatttacaagaaatac

SEQ ID NO: 608551 - DNA, 568 bp, Homo sapiens
atatgtatatagataattttgaatgtatttaygcatatatacatatttaatcaattctcaataatcttttttattgggtgaccccagctctaagggtctgtccctgacccctggaatttggtagcttaaatagtacactattcaatgactacggtttggtgtgacaattctttgtttgaaccaaagaagctgacacgctttggatggatggcttcatttatattctaattttatagaatttatcccttactcttacgtgaaagtgtgaaattcagaagatcccagtgccaaccagagtagaatcctcagaggaggggcaggttaaacgcaggtggctgagccccccttggagagtctgactcaggaggtccgtgagtgtttgcaatgctccccgggacaccgtggcatggggccgggttgagaaccgctggattagctgcgttctcaccgtggaactcacctggccactgtgagccccctcctctacgcaggtccatcttcatgtggtaacaatgggggaagaggagaggcagtggggagatgctgggaggggttcagaattggaggc

SEQ ID NO: 608552 - DNA, 555 bp, Homo sapiens
cttggtgtcaatgttatgcacatcctgtaaaataatttgagaagtatttattcttcctctattttctgaagaaatttgtataacatttatattatttattccttacctgttttatacaatttgccagtgaagccttctagacctggcgctttctttgtgagaaggtattcaattacaaattcaatgtctttaatacatataggattatatttattttctgtttcttcttgagtcacttttcataatttgtatcttttgagaaatttgtccattttaactaagttgtcaaatttattactataaagttgttcagattttcacctgtaatttttttatatgtgtaggattcacttgcatatgtgtaggatatatcctttccctctttcttttacttttcttttttatcagacatggccttgttctattgcccatgctggagtacagcagtacaatcaagactcactgcagccttggcctcctgggcttaagtgatagtcccacctcagcctactgagtarctgggaccacaggtgcatgccatcatgcccagctaat

SEQ ID NO: 608553 - DNA, 478 bp, Homo sapiens
ctgtttccaaccaattattgaacatattatctggaaaaaccacaggctgctcattctcagcatgactaaaactcacctaatcatattcctctgtgtagcctggtttccttcttaaaatcttartcattcagtgggaattttattttcctgtttcctctgtctctacctgacctgcaaatccattccacccttgtcatgtaagtctttttgatctatacgtctaactcttattttcatttccactgccattgttccactcccactgcctgatgctcattttacccctgcctattataatagcttccaaatttgtctccctgaaactgtgatttcttaacttcaagcacacgtccttattcacactgggtgcaatctttcaaaggctcaatagtaagtatgagttttaaccccacagtatgttagaaaacgcctttccccttctgtcctctgcatacctcaccaatcttgtcttctttgc

SEQ ID NO: 608554 - DNA, 479 bp, Homo sapiens
ttactaattctgacaaaaatcttaaaattagagaaaaaagggcacattccatacagggaacaacataaaaataattacaacagagttttcrgaaactatgcatgtcagaagacaatggagtaacatctttaaaatgctggaacaaattttgtcaatctaaaattctagacccagagaaaacacctttcaaacatgaaacatgtctttccttagacaaagaaaagttgtgagagttggccagcacacctgcagtacaaggcttgttaaaggaagttcttcaggcagaaggaaaatgatacctgatgataatgtggatctacacaaaagaataaagagctctgaaagtgataaatatgtgggtaaactaatttcatcatttaaaaaattttaaaaaggcaacagtagactgcttaaaacaacaaacagcagcaacaatatattgggggaattcatgacatgagaaagtaaaatacatgaca

SEQ ID NO: 608555 - DNA, 627 bp, Homo sapiens
tcatcttgcagcttaggtaccagctcagccacagcagggtagagcactaagtgggctcttggggtccccagttccaagccctggctcttggacagcatttctggacgtcccctaggccagaggggagcccacttccctgacatatgagtcctaagcctggcaacattcaccacaagctgactggagatcccttgggccttaagtgaacatcagcagtagcctggcagtactcctcacaggcctgtagcagtggtcaccatgaagagagactcctctgcttgtggaagggggagggaggagtatgagggactttatattgtagtttgggtgtcagcacagcagcagtagaatagagcaccagggagattcctaagatttccaactctaggccctggctcctggatggtatctctggacctgcctggggcctggggggagcttgccatccttaagcgaaggacatgagcatggctgttttcaccayctgctaattatagaaccttagggccttgagtgaacacaggcagtaggcagatagtggttatagcaggctttgagcgaggcccagagctctgctggcttcaggtctaacctagcacagtcccagtggtagtggccacaggggtg

SEQ ID NO: 608556 - DNA, 658 bp, Homo sapiens
aagtaactaggactacaggtcacacaacaccacacctggataatttttaaattttttgtaaagatgagactctcgctatgttgcccaggctggtcttgaagtcctagcctcaagcaatcctcctgcctctgccttccaaagcactgggattacaggtgtgagtgactgtgcccagccccaaaagctagaggttttaatacatgggaaagagcatctcagagagaggtagcaaagcaacaactaagatagcayagaaacgtaatagggaaaacagagaacactttgtcaatggtattttggctaccagaaagaccagcagctgttttctgagaggcttacctgggtgatattcattatcttgggtagttgtctagggtctggtccttagcttacatgcttggaaattttattttctcatgtatccaacagaactttctggggcaaactcacatgaattaagtttatgcaactaatatataaaaagaaaatggcaattccttaattgataaagacaaatagaagagttttatcttctggaatactcaatttaaaatgtttagcacacattctccttgtaggcaaacctaatgggaaatcaaataatgctgagaaagttgattcctaaggatggaatcataacaagtggaaatatataaat

SEQ ID NO: 608557 - DNA, 658 bp, Homo sapiens
aagtaactaggactacaggtcacacaacaccacacctggataatttttaaattttttgtaaagatgagactctcgctatgttgcccaggctggtcttgaagtcctagcctcaagcaatcctcctgcctctgccttccaaagcactgggattacaggtgtgagtgactgtgcccagccccaaaagctagaggttttaatacatgggaaagagcatctcagagagaggtagcaaagcaacaactaagatagcatagaaacgtaatagggaaaacakagaacactttgtcaatggtattttggctaccagaaagaccagcagctgttttctgagaggcttacctgggtgatattcattatcttgggtagttgtctagggtctggtccttagcttacatgcttggaaattttattttctcatgtatccaacagaactttctggggcaaactcacatgaattaagtttatgcaactaatatataaaaagaaaatggcaattccttaattgataaagacaaatagaagagttttatcttctggaatactcaatttaaaatgtttagcacacattctccttgtaggcaaacctaatgggaaatcaaataatgctgagaaagttgattcctaaggatggaatcataacaagtggaaatatataaat

SEQ ID NO: 608558 - DNA, 610 bp, Homo sapiens
atggctctttggttccaagtaacagaaattgactaaattaaggagaatgagaaattgctggaggatgttgagaagcttacagaattggtgagaagtttggaggactaggcttggaaataagacaggaaccaagtcagtagaaactgctcagggtgccaatcctggcacaaattctaaactggtcccttcccctccatattctcatattctgctcaggatgcaaagctgtgggagagaggagctcattgccaagtttagttgcatgcctttcttttggttattctgtgaagagaaagaggaatcttccatgggaaattattataccaactcctcactacagttgtgtttaaaattcaaattcctaatattgacacattatgacaattccaatccaaggaagtaacctaacaactagttttgaacatgtaaaatccagcagaagcaaatacaagccttctctatagggatatacttgcrcaacagacttttttttttttttaaagaaataaactccacaggtggtagatgaagtctttgtgtatcttacctaacaggtccaagataagatgagatgagtgttgtgctgagggcacaaaatttaaggaagcac

SEQ ID NO: 608559 - DNA, 542 bp, Homo sapiens
ggccagatgacaaagagggtgggggccatgctaaggaatttagactttatcctggggcaatggagattatggggagatttcatgcagtagagctacatgagaagacttgcattttaaaaagttctaaccgcaatatggagaaaggattagagcagcactgccccactgaaaaataatgtgagccgcttataaattttaactttttccagaagccacatgaaaagaatgaaaagaaacacgtgaaattaatgttttattagtttattaattgtatgaattttactcatatagtttatgccacagtattagaagggggcctgcagagaagtgaacacactggagaagtgcttaggaaggagaatggccgaaatttgttacaggtgaggactcacttaactctggttccttttacacactaggatcaaattgatcttcctgaaatacagctccaattaagatattcctctgttttaatttttccattgttctccttttgccyactaaataaggcctagactctttagccagcagtgaaccctgac

SEQ ID NO: 608560 - DNA, 460 bp, Homo sapiens
tgaattcatctgggaacccccactcctcaccccaaggtttgagagttccccaaaacggagctggaataaattcagtaacccagtagaaatcccttcagttcttccttttggcacccactgggtccacaaataagcagcagctttcctcattgataggaaactcaaggatcctgggaatgcagctctaccctcccccggttatcttttagaaattcagttatctttagaaattyagtaccagtggaaaaggttcaggccggagaactagatatttctgtttatgattaaggtgggcaaagttgattcttgcatccagtacaatactcagcctcttgttccctgtaaagcagtgagatctacacatggacgtctgactaccctctcattttgccattgtctacacccccatggcactaggagagttaaggagactgtgcatcattactttgcactcattttc

SEQ ID NO: 608561 - DNA, 516 bp, Homo sapiens
aaaaacttaataaatattccataactattttaatgggtttctaagttagtgttttcaatagcaactgggtatgtggccaaagagggaagaaaaagagagttcttagcagagcaatccataatactttcagccagctaaggtaagggggaagtattccagtctacatagaagaaattgatctctccaaaaaaatgtttactgtgtgtgttaggaaggagaaggaagtggaaaaaagaagagtaataattgcttcatctgggttttcaattgaatttgatttttttctacttattttacttcagaaaagagattttgataagaggaactagtccatgcctgrgagtatgaagaaccaaaatgtcctagctatccataaagtcggaaggatcactcttatccctgccccatccctctggccaatggaaaggctagaaaagaggtgcttggaggaaatgttgacaaacctacttagcaataggccctgaagtgtgaggaatataaaccagctgcagagaa

SEQ ID NO: 608562 - DNA, 574 bp, Homo sapiens
ctggtgttttggtaacagattttggttcccttattgggaatgcatgggccaggagtttcagaagccctcctaggcagctgcctaaccccttttttggccagagatgggtttcagtctctctctctctgtctctctggtactatcactgctggctccaacttcattcctgatcacctaggaagaacagcctttgaaatttgtcatctgcatctggacagatgatgtctttcrtgggtaacagacagcaggatctgctcctctcaattaggggaattctgaaggagtttccttttgcaggttaaacaagcccaaccaattgagagagaaaagcacctggactgtttcagtctggacatgcttggggcttgttgctgcagcagttggatggtgttttgatgattgtctacatatgtgtgttaataaagtcatgggaaatcagaattttataaactgatcttttgtaatactattttgccccaatattctttgcaatctagagaagtgtggcctttccatgggcctcattttgatgtttaaagaaaaagtgggatggaatttcatgtatccagacttt

SEQ ID NO: 608563 - DNA, 591 bp, Homo sapiens
gtttgtaaactggtgagtttgtattactatctcatggctacagagttccaaagtaaaagctattggagctttatgtttgtgtatcatgtttacatgtttatgtattgtgtaacatttattatgttatatgttgtgtctaccaaattggcttataaataaaagaaagctcataattaaatctatccaagcatgtttcaagttcatgtgacttatgtaaatctttaataagcaatctagctttaaaattattggtragataaaagtagatgtgactttggaattgtcagcatacatttttgtctgggttttgtatttgtctctgtagatattttgaggtgtcagggtttggcacagaagattataaagctataaactcagccaaaacaaaatgatctttgtgcaatttttgccaaataagactaatttaatgttgttggtttaatgaatatagctgagtcttctgagtattggtgaaaatacccatgtagttaactttaaggaccttactgctattcacaggttacaaaattgttaacaaggaaatgacaactagctttgtctaatatctcagttctcataagtaatctaggt

SEQ ID NO: 608564 - DNA, 603 bp, Homo sapiens
tatgggtgaggggtctggcatcccattgtccagatgtggtgatctggtaagtttcagttccttgatactatctgggagccctaatggtttcctgagaaaggaactcagataatacaaatataagtttttcaagttttaatactgagagggtcaatttctatatttattcaaaagaaaccataaacatcacttctatgggacaattgggctggttccagtccygatctttctatttatcagttcctcaatcatggagaatatggttgtcgatctttcgggctgcttcatgctaaaaagggggcattgtgagcagctccataccatgggtaaccacgtggccacccaggaatcaaacgttaatttaataccatagttttcttctgtgatacaatctttatgtctccaatccactacttccaccaaagacaaatcatagcaggactaacctacctgaaaaataagcatcagtcccactatacttggcctgattacccatataaagtgcagcaagaatcattgtccatataggctcttctacattggctttgctggaacctctcacaaggaatcagattcaacctccaaaggcctctcaagcctagc

SEQ ID NO: 608565 - DNA, 555 bp, Homo sapiens
  misc_feature 256: n = A,T,C or G
gccaatcatagtgcctggagtgattttcagatgcctttttttcttcttttacttacacagggcactcgggaatcttgcactctggatgaacccagtttacattttggttgggatggggaaagtagagctttagactttaytttgaaggcaaaaacccttttatttacataggaaacatttcaattctatatgggttttttttttctctttgttttcttttcttctttccctctatccttccttccttccttctttnccatcctcccaccctccctcccttctttccttcctacctaccaacctacatttttttttctctcttttggtatcttggaacatatctaaggcttttggaaaatggacattgttgaagaaaaagcgttatcactattacaaaaatatgatttagaataatggaacctcagatttggaaagaacccaaggattcctttatttcagccatttaactaatgcttaaattctttccaatctagtcacagcccatgatgggatacctacatcacctgcaagtgttgggaaacttctgtgtcctgc

SEQ ID NO: 608566 - DNA, 552 bp, Homo sapiens
aatttgcagtattttataatatttttggattttttttgtgagtattaaatgagttaatacatgtaaaggacagaaaagggcatataataagcacttagcaatcccaaatatttttaaagcaatatcagcaaattattgattcattgaacatttcatcaactcagacatgtagagctttcagcatgtgtataaatagtgtgattatatgtcccattgtgcccagggtagccctagtttttacctattgtcctggcataattaatggtatcccctttcattctcaaaggctccaacagaacctcagatttgcttattccaaatcgtatttttgcagtaggaattaatattttcctcagytgtgtgccatcctagataaaagccacaacttctctcactaaatatttaatcaattttggatttacttggaagatgggatctctctctctttttttttctactgaagtttcacctgagcccgctgcccattgctatacctcctttccttgccaagtggcagaagttagcttcagactagaaactccaaaggggagg

SEQ ID NO: 608567 - DNA, 613 bp, Homo sapiens
tttttttaaaaaagttgtgatgtttgaaagaatgagtctatttcctaaggctttggcttttggagaggtctggttagcttctttgaagatccagtctcacactgactggttacctgcatgacagaaggggtagaaaacagcctttccaagggtgagacaaagacctcttaactgtcactgttagtccccttttacaagcccaaaatagttactgaagccgctagggctgggcatttgccatattaacacctccagcttttaagtggaaagactaggagacgtgagtaccaaagtggatggaagagcatttatatataggtcctaagcatatcagagggaggaaaggctaagcccatcatttgttcctggctcctcctgctgatgcctttgagatgtgagggtcaggttgcttcagcagagcctaaaacttagtctttcccttgtagaaccttttaaatttctacctaagttataattcacatccgaaagcacaccagtctttgatttaagtatttttatatttacatttattatttatttttattatactttaagttcygggatacatgtgcagaacatgcaggtttgttacataggtatacatgtgccgtgg

SEQ ID NO: 608568 - DNA, 580 bp, Homo sapiens
gaggtgagcagaaacagacacactgcctgtctgcatggagtgggccatgtagtggtgagacagataatcaaataatcatatttgtaaaatacaaataataaacataaattacaataatgccaagcactacatgggaaaagggcaatatctastcaaggctatgaggggagctttatttatttatttattatacacattttttgagacagagtcttactctgtcaccaaggctagagtgcagtggcatgaccatggctcactgcagcctcgatctccagggctcaggtgatcctcctgcctcagcctcccaattagctgggagcacaggtgtgcactaccacatctagctaattttttttttttttgagatggggtcgccctatgttgcccaggctggtcttgaactcatgggctcaagtgatcctcccgcctcagcctcccaaagtgatgggattataggtatgagccactgtgcctggttgaggaggatctaatttagatagatggggttaggaacagtttctctgagaaagttaactgaatgaggagtttggtgaatgggaaggataggagacgagca

SEQ ID NO: 608569 - DNA, 580 bp, Homo sapiens
gaggtgagcagaaacagacacactgcctgtctgcatggagtgggccatgtagtggtgagacagataatcaaataatcatatttgtaaaatacaaataataaacataaattacaataatgccaagcactacatgggaaaagggcaatatctactcaaggctatgaggggagctttatttatttatttattatacacattttttgagacagagtcttactctgtcaccaaggctagagtgcagtggcatgaccatggctcactgcagcctcgatctccagggctcaggtgatcctcctgcctcagcctcccaattagctgggagcayaggtgtgcactaccacatctagctaattttttttttttttgagatggggtcgccctatgttgcccaggctggtcttgaactcatgggctcaagtgatcctcccgcctcagcctcccaaagtgatgggattataggtatgagccactgtgcctggttgaggaggatctaatttagatagatggggttaggaacagtttctctgagaaagttaactgaatgaggagtttggtgaatgggaaggataggagacgagca

SEQ ID NO: 608570 - DNA, 580 bp, Homo sapiens
gaggtgagcagaaacagacacactgcctgtctgcatggagtgggccatgtagtggtgagacagataatcaaataatcatatttgtaaaatacaaataataaacataaattacaataatgccaagcactacatgggaaaagggcaatatctactcaaggctatgaggggagctttatttatttatttattatacacattttttgagacagagtcttactctgtcaccaaggctagagtgcagtggcatgaccatggctcactgcagcctcgatctccagggctcaggtgatcctcctgcctcagcctcccaattagctgggagcacrggtgtgcactaccacatctagctaattttttttttttttgagatggggtcgccctatgttgcccaggctggtcttgaactcatgggctcaagtgatcctcccgcctcagcctcccaaagtgatgggattataggtatgagccactgtgcctggttgaggaggatctaatttagatagatggggttaggaacagtttctctgagaaagttaactgaatgaggagtttggtgaatgggaaggataggagacgagca

SEQ ID NO: 608571 - DNA, 580 bp, Homo sapiens
gaggtgagcagaaacagacacactgcctgtctgcatggagtgggccatgtagtggtgagacagataatcaaataatcatatttgtaaaatacaaataataaacataaattacaataatgccaagcactacatgggaaaagggcaatatctactcaaggctatgaggggagctttatttatttatttattatacacattttttgagacagagtcttactctgtcaccaaggctagagtgcagtggcatgaccatggctcactgcagcctcgatctccagggctcaggtgatcctcctgcctcagcctcccaattagctgggagcacaggtgtgcactaccacatctagctaattttttttttttttgagatggggtcgccctatgttgcccaggctggtcttgaactcatgggctcaagtgatcctcccgcctcagcctcccaaagtgatgggattataggtatgagccactgtgcctggttgaggaggatctaatttagatagatggggttaggaacagtttctctgagaaagtkaactgaatgaggagtttggtgaatgggaaggataggagacgagca

SEQ ID NO: 608572 - DNA, 424 bp, Homo sapiens
aatcttttgcaacagatggggaaattgagatttagattgatcaattgttgcccttgagatcacacacagatttgttgataggatagatcctaggttttggttttggggaataacaatccactgtcccagggacttccaaccatttgatgaaagaatggtttttagttctctgaagycttaaggtaatttaatttcagagctggtctggaactgaccttggagattgcctggttattagtctaaaccctcattttcaaggtactgatgacagagaataggaggtgtgttccatttccctaccccggattgtatgactgatgggaatggagaggtagagtaggacagaggtgtatggtctatcaagaaaggcttgaagtcctctctcaatcttttgtgcaaccagttttattaaatggatggaatt

SEQ ID NO: 608573 - DNA, 441 bp, Homo sapiens
attcattcttttttatggctgcaagattaaagaatcttttgcaacagatggggaaattgagatttagattgatcaattgttgcccttgagatcacacacagatttgttgataggatagatcctaggttttggttttggggaataacaatccactgtcccagggacttccaaccatttgatgaaagaatggtttttagttctctgaagccttaaggtaatttaatttcagagctggtctggaactgaccttggagattgcctggttattagtctaaaccctcattttcaaggtactgatgacagagaataggrggtgtgttccatttccctaccccggattgtatgactgatgggaatggagaggtagagtaggacagaggtgtatggtctatcaagaaaggcttgaagtcctctctcaatcttttgtgcaaccagttttat

SEQ ID NO: 608574 - DNA, 425 bp, Homo sapiens
aatcttttgcaacagatggggaaattgagatttagattgatcaattgttgcccttgagatcacacacagatttgttgataggatagatcctaggttttggttttggggaataacaatccactgtcccagggacttccaaccatttgatgaaagaatggtttttagttctctgaagccttaaggtaatttaatttcagagctggtctggaactgaccttggagattgcctggttattagtctaaaccctcattttcaaggtactgatgacagagaataggaggtgtgttccatttccctaccccggattgtatgactgatgggaatggrgaggtagagtaggacagaggtgtatggtctatcaagaaaggcttgaagtcctctctcaatcttttgtgcaaccagttttattaaatggatggaattc

SEQ ID NO: 608575 - DNA, 635 bp, Homo sapiens
taggagacgagcataccaggcagaggaagtagcatgtgcaaaggccctgtgctagaaggagcagagtggcagagggaaagccactgtgactaggactcagagatgaaggatgggcagtgaggctgaagacagaggtcaggccacacaaaattgtgtggccatattgaagagtttggatttgatactaaaagcaatgggaagcctttaaagccttttaagaagtagaaaaatataattttgattttaaattttttgattaaaaatatcttgctgtgtagagaattggttgaagatcaccagtcaggagaccagttatgcagttaacagtaatyttgatattgttatcatcaaatagcatgtttacaattcccaggcatagttagccttttgcttggtattctttaaaaagagtaatttctatagacatagtttctggcctcccagagtctaccccctaaaaaataaaaacaaaatttaaaaaatggtaggttcaaatagaataacatgcagacacataagatagatgaaaatttgagaaatgaatccaggtaaaacccagatcaatccatcaattagcacataaaggaaatataacttacttgaaaacctactagataagccagacatatggcacg

SEQ ID NO: 608576 - DNA, 609 bp, Homo sapiens
gaagatcaccagtcaggagaccagttatgcagttaacagtaattttgatattgttatcatcaaatagcatgtttacaattcccaggcatagttagccttttgcttggtattctttaaaaagagtaatttctatagacatagtttctggcctcccagagtctaccccctaaaaaataaaaacaaaatttaaaaaatggtaggttcaaatagaataacatgcagacacataagatagatgaaaatttgagaaatgaatccaggtaaaacccagatcaatccatcaattagcacataaaggaaatataacttacttgaaaacctactagataagccagacatatggcacgccttattgatttatgcctcataacaacttcatgttgtagatgatattatrtttactttacagacgaagaaacaggctcagaaaggttaagttactggacagaggccacatagcttgttgaatctgtttttccaaagtaaaaactcgttttttataccacattgcccatacttcttataagactctatttgcagtccttcttgaagtgaaaaaagtcttgttaataatcagacacctaaattctagttgatcaccgtaacgtg

SEQ ID NO: 608577 - DNA, 609 bp, Homo sapiens
gaagatcaccagtcaggagaccagttatgcagttaacagtaattttgatattgttatcatcaaatagcatgtttacaattcccaggcatagttagccttttgcttggtattctttaaaaagagtaatttctatagacatagtttctggcctcccagagtctaccccctaaaaaataaaaacaaaatttaaaaaatggtaggttcaaatagaataacatgcagacacataagatagatgaaaatttgagaaatgaatccaggtaaaacccagatcaatccatcaattagcacataaaggaaatataacttacttgaaaacctactagataagccagacatatggcacgccttattgatttatgcctcataacaacttcatgttgtagatgatattatatttactttacagacgaagaaacaggctcagaaaggttaagttactggacagaggccacatagcttgytgaatctgtttttccaaagtaaaaactcgttttttataccacattgcccatacttcttataagactctatttgcagtccttcttgaagtgaaaaaagtcttgttaataatcagacacctaaattctagttgatcaccgtaacgtg

SEQ ID NO: 608578 - DNA, 475 bp, Homo sapiens
gaaaaaaattgctcacagccagcttactggcacgtttcaagataygctaggcctagactgcaggacagtgtgtgctggagatagagttgcagtctacaaaaggtctgcacatgcattaagtatggacagacaaaagctcgtgctgccaaaaatggtaaggcttgttacctctgggggttggaattacttctgttttttgtttttgtttttgtttttgagacagggtcttgttctgtcacccaggctggagtgcagtggcacgctcttggctcactgcaacctccgcctcccagagcgattctccggtttcaagtgattctcttgcctcagcctcccgagtagctgggattacaggcgcccgccaccatgctgggctaatttttgtatttttagtagagacaaggtttcaccatgttggacaggcatgtctcgaactccggacctcaggtgatccgcctgcctcagcctcccaaag

SEQ ID NO: 608579 - DNA, 475 bp, Homo sapiens
gaaaaaaattgctcacagccagcttactggcacgtttcaagatatgctaggcctagactgcaggacagtgtgtgctggagatagagttgcagtctacaaaaggtctgcacatgcattaagtatggacagacaaaagctcgtgctgccaaaaatggtaaggcttgttacctctgggggttggaattacttctsttttttgtttttgtttttgtttttgagacagggtcttgttctgtcacccaggctggagtgcagtggcacgctcttggctcactgcaacctccgcctcccagagcgattctccggtttcaagtgattctcttgcctcagcctcccgagtagctgggattacaggcgcccgccaccatgctgggctaatttttgtatttttagtagagacaaggtttcaccatgttggacaggcatgtctcgaactccggacctcaggtgatccgcctgcctcagcctcccaaag

SEQ ID NO: 608580 - DNA, 585 bp, Homo sapiens
caacagtctctgggccttttgcctggtttgcctcattcccccagggtgagcacaccacttttacctgttctgttgtgtcttaccctcagaagaaaaggaatgactatttgtctgagtgcacatggctgcccttctaggctggcaggtctgggtgataaagaaactgctgaggggaaagaccctcatgcccagtagcaaatccaaggagatgtggacaaggcttttacaataactttagtgaagaataactcggccaggcatggaggctcacgcctgtaatcccagcactttgggaggcygaggtaagtggatcacctgaggtcaagagtttgagaccagcttggccaacatggtgaaaccccgtctttactgaaaatacaaaaattagccaggcgtggtgttgcatgcctataatcccagctactcgagggcctaaggcaggagaatcgagacagagagagactccgtctcagggaaaaaaaaaaaaaaaaaaaagagtaactcctggctgggcatggtggctcatgcctataaccccagcactttgaaaggccgaggcaggaggaccctttgaggccaggaggt

SEQ ID NO: 608581 - DNA, 552 bp, Homo sapiens
gaattcacaggaaacaatttctgaagaccaggtgcctgctgccacctctccaagcaggccagagtccagtagagaatgcgattcaggaagatggctcctcagagggcagggaggttagctacggaggccgctcacrtggaaatgtccagtgaaccaatgccaaggaagaagataaaattctctggggctgaccacaacagtgggggtggataaagacaaaccacttgcctgtacttctcaccttctatttgttcatttcactgctggaaggtgacctcttttcccctaatcttctttcaacccagagagtttaagtcttctccagctcaatcctaatccaccccatttcccatggtctctactcctgggagaccagccctggtggcatctcttcctcctgtccctgggccagaatctgctggagtcagggtctgctgggtagaggcgagtccaggtactgactgtagtggtttgctactgaagtcttgcttgctgtcctgatctctttacctaaagaaatagaaggaataactgctttaaaatgcccttctt

SEQ ID NO: 608582 - DNA, 552 bp, Homo sapiens
gaattcacaggaaacaatttctgaagaccaggtgcctgctgccacctctccaagcaggccagagtccagtagagaatgcgattcaggaagatggctcctcagagggcagggaggttagctacggaggccgctcacatggaaatgtccagtgaaccaatgccaaggaagaagataaaattctctggggctgaccacaacagtgggggtggataaagacaaaccacttgcctgtacttctcaycttctatttgttcatttcactgctggaaggtgacctcttttcccctaatcttctttcaacccagagagtttaagtcttctccagctcaatcctaatccaccccatttcccatggtctctactcctgggagaccagccctggtggcatctcttcctcctgtccctgggccagaatctgctggagtcagggtctgctgggtagaggcgagtccaggtactgactgtagtggtttgctactgaagtcttgcttgctgtcctgatctctttacctaaagaaatagaaggaataactgctttaaaatgcccttctt

SEQ ID NO: 608583 - DNA, 509 bp, Homo sapiens
tcacgtggccctctcgtagctgacaccaggaggaaagaaaacagggtcagcagacggccttaatcactgttctccagctcacagttcccctttctggaccatcaaacccatcccgctgcccagctgaggccatagagaggaaagcgtatttatttccctcaggcccaacaggtggcagcattgaccttcccaacggatccagcggcctctatatgtccccacccctgcccaggacctgcccagccacttctgtccagccgcctagaggctaccagggccctatggccaggccagggccagccgcccttccatgcatcacctgtagggtgatggtgctgcgccccctggtgatggcctgcagcaggacaccgtcggcctggcgcgtgcggaacatgaggctgaggtrccagggttgggagatgggcagcgagaggccatgccaggccaccaggctgctgcccaggaagtgctgtggattggccatttctggggaggcaggaaaaggcaga

SEQ ID NO: 608584 - DNA, 634 bp, Homo sapiens
agacagtctcactctatcgcccaggctagaatgcagtggcatggtcttggctcactgcaacctccgcctcctgggttcaagagattctcctgcctcagcctcctaagtagctgggattacaggcgcccaccaccgctccggctaatttttgtgtttttagtagagacagtgtttcaccatgttggccaggctggtctcaaactccctgcctcaagcaatccactcgcctcggcctcccaaagtgctgggattacaggcatgagccactgagcccggccagtttccttacattcttttaaaagttaatattgttttaattgtaaatgatttgtgtgtgtgtgtgtgtttagggcttttaaatttcataatttaactctgtctttcacatttggccagagatctaatctgaaaagtgaaaagtttgaactaaaatagcattactgttttgttttgytccaaaatatgttctgcagggccttggagttaaagagggaagctcagaaagacaagctggttagtggttccctgtgttagggggttggaaatgtagtccactaaggcaggcattatgctgacctttatgatttattgcattaattctcacaatgtacaaaggtacatattattacacaga

SEQ ID NO: 608585 - DNA, 690 bp, Homo sapiens
agtgattcctctagcctgtggtgttagtaagtcaatcagattctctgggccttagtatattgyacctatattaatgaagaattatattagatcggtgatttttaaactggatttcttggagaaaaccctcaggttgaggggtgattgaggtatatgggaggagagatcaagtggatttttcaggggtttggagccgaatttcgctactataattccagacctgtctcaacttctatttctaatccattctattaagcaggatttttttgttcattttttaagtaaaatttttcatgtcaaagagattgtgttgccagaatctgatactgatttggtactactgtatttgatgatgatacataatttatgctcatatttgttattaagcacatacttgctaacaacatttttaaattaagggagaaggatcctctgttagaacagaatacttgtatgaaaattcctgaggggagttgggatataatttgaccatgagggtatactctctataagtagatgataaagtgaattccttctatgtgggaaagaaggacataaggaaacacagatcaaatttgaaattcaatagttaatagaaaaagattcatggctttctgaataattatgtagcactttgtttttagaataacagttttcactttgttgaacctttggagaaacatgaactat

SEQ ID NO: 608586 - DNA, 504 bp, Homo sapiens
accttgaggggaaaacaatgtagtatgtcaagctcacttctctgctgttgcctttttttcstaggatcttgctcctcaaactctgaccttcttagtatccttgaacttcagttgtcttcttggccccacaaggtgctggaagctctgagttacttacttctacttgctttctagcctgcaccacttaaaaatagcaaatatctgaagagaaaaggcagtgggtattgttgagtccacttcagtatctttctgtgatcttggacccttgagcctggctgccttgattgctcaccactgcattcagttagcttttatctatcttttatggtttctgtagtgggagtgagggtgggggcagggggtggggagtgatctgatattagctactctatgatagcaaaaagcaaaaatctaaaagtagaaatctcaattattggtcttttgaaatttaaactctgcttaccacccccaaatatttgagtcaacttccaatgaaatacacat

SEQ ID NO: 608587 - DNA, 399 bp, Homo sapiens
tttagttttagcaaggtttgtggagatttctctgggccataaggacctagagttgtctctggtgattaatttctgtctttcctgttagagacgggagaggggacacctttacaaatttatgttctgcttttaggcaaataaggggagggcagagagctttttatgtgtctgtttcttctcaattgccttcagctcaaaataatccttatgctgtattttggggtggcattttctgccacccttcacagccataatgtgacttccagcctagactgaagmaggattatcaaaccaccagtcctagatattatacacttattgacgccatacttttaagcatgataatgtacagagaagcaataattgactgatgccacgaataggtactagagagagaaa

SEQ ID NO: 608588 - DNA, 595 bp, Homo sapiens
gcattaccttgtgaaattccttctcctggctcagaagctccctcactgagcaccttgtgacccctgccccgcccgccagaaaacaaccccctttgactgtaattttccattacctacccaaatcctgtaaaatggccccacccctatctcccttcrctgactctcttttcagagtcagcccacctgcacccaggtggaataaacagccttgttgctcacacaaaacttgttctgtggtctcttcacatggacgtgtgtgacaatatctattgcaactgataaaaattttatacaaaatgatgagctactatgcatttccaacttcacattgagtgatgtcacattagtaacttgaaatcagtcatgatgggtgtatttacaccaagaaaattggccagctctatcagtcagggtttcctccctgcatcccccagggaagccagtggttaaacatttagcagcacactcctgattgcaatccttaagacttactcactattcggtatttactggctaagaccaactacagtataaggtcctcacaactgagcatatgaagagcacctttcctcaaagacccaccataaggcaggtg

SEQ ID NO: 608589 - DNA, 391 bp, Homo sapiens
attagacaaccacgtcaaagctctgcagggctgcagagatggagcccagctggacacctttctctaactctcctagtactctcttgttttcactgccagctgcaagaattgaccagatctcccagatgaagatgaatcctccaagatataataaagacctcagtattcaagtcawctaggaatgtcccatattgaaaatgccaaaatcccaagtgattcagctctttagtgatatatgtgtgattagtagttttatatataacatttgttgagcatttattatgtgctacatatagcactcagtactttacatcaattgtttcatatttattcctcatttaaatattaggagttatgcatattattattatatgtcctcttcatagatgag

SEQ ID NO: 608590 - DNA, 540 bp, Homo sapiens
tactaatattgtatttatagtcaatattcagtaggtttacccacatagttattctttctgttgctcactttgccttctcacatttccatgatttcaactgggattatgttccctctatttgaagaaccccctttagtacttatttttggtgcaattaattctttttcccttgttgagaattggttgaaagcatgtttatgttgccttcctatttgaggattttttttctctgtatagaatcctaggttggtggttacttcctttcatcactttaaagatgtcattctgtggtcttctcatgagcatcatttccgttgaaagttagccatcagttgtattcctgttcctttctctgcctttcagtagttttgctrtgatttacctaggtgtggttttatttgtatttattctgtttatgatacatatcttatcttgcatctgtggcatgatgtcttttgttggtttaagaaaaatcttagccattatctcttcaaaaattatgcctaattctactacagtctctccctgtccttctgggcc

SEQ ID NO: 608591 - DNA, 626 bp, Homo sapiens
ctcacttgccccagggcttatgcaatgggctcacagacagagtggccaaattgcagagatggaagttttgggctaacagcatgggctttctgtcatctaggctgacctagctactactgctgccaaagttctgatgtgtcagagatagggacccaaactgagtccccaataaagtattgtgacttaaagaaatgaacctgccatttcatggcaattttacttgaatggattcgacccygggaagacaggcgattcatgcttatcggacataatatattctgaatacaggtttacctttcctttccatcccaaatgcctttgccagtaccattactcagtggttcagagagagtctgatttacagacatgaactccttcataacgctgtttgggaccaaagaattcacttgctgaataggatatgtgacactgagcatatagctttggatcccttggtactaccacagatcacaccatccagaagcttccagtctggcagggcatggaaatagatgcttcaagatacaactaaggtgatgtcttggagaagagcctctgtaggcttgagatgttatccttcgagtgtgatatgtaacttagtgtgatatgtatccttcaagtgtgat

SEQ ID NO: 608592 - DNA, 583 bp, Homo sapiens
tccatttggggctgtttgtgttttgtatcatttcaactctctgttgtcaagaggtcctcattctcagaaggataattccaccaggaaacccaggcaggcttaagttaaacttaaaactatctgccaccagttcatactggcctcctcataatatygtacaaacaggtaaagaattgaatcactgtcacacaggggtaattgacctttgtcgtcatgatgagatagggtcaaagccacttaaaatcagtaaagaggaatcactcctacctagagtagatcatcaggtgatccattgggatgtctcttggtgttgtcatgttcagttttaactgggaatgggtaattaccatctaacaagagcattaacatgggctcagatcctttctggatgaaagtcagtcaaccaccacacaagacatctgggccagaagaaatgctagatgagagtattgggtatgggtggtagaggagagataaaacaagtattgataattatgaccttggaaataacttcaatcatgggttataggttgttccattaactatcatcttatagaagtttttaacctagaaattattaacc

SEQ ID NO: 608593 - DNA, 641 bp, Homo sapiens
tcactgtaagctccgcctcccgggttcatgccattctcctgcctcagcctcctgagtagctgggactacagacgtccgccaccacggccggctaattttctttttgcatttttagtagagacgggrtttcaccgtgttaaccaggatggtctcgatctcctgacctcatgatccgcctgcctcagcctcccaaagtgctgggattacaggcatgagccaccgcgccccaccccaaacttgcaaagttatttaaagggctacccacttgcaaacttctttaaagggctacttttaggttattggagctgcttcctctgttgcaccaagagtcacaagtgtctggcagttctatttccctccaggtagcccacttccaatgactgactgctgaaagaggatgaaagcccagcttctttgcctccacaagcaacaaactccacagtgaaatgtatgttctgaggcttctcgtgggatcaggctgagccctgaactttaccttgtttggcttatttcccctccttttcctgcttcttctacttcttactactaggtgtaacttgttaataaattacttgcatagacattcgtattttagaatatgcttctgagaagtctgaactaagactgtaaaaattttttga

SEQ ID NO: 608594 - DNA, 641 bp, Homo sapiens
tcactgtaagctccgcctcccgggttcatgccattctcctgcctcagcctcctgagtagctgggactacagacgtccgccaccacggccggctaattttctttttgcatttttagtagagacggggtttcaccgtgttaaccaggatggtctcgatctcctgacctcatgatccgcctgcctcagcctcccaaagtgctgggattacaggcatgagccaccgcgccccaccccaaacttgcaaagttatttaaagggctacccacttgcaaacttctttaaagggctacttttaggttattggagctgcttcctctgttgcaccaagagtcacaagtgtctggcagttctatttccctccaggtagcccacttccaatgactgactgctgaaagaggatgaaagcccagcttctttgcctccacaagcaacaaactccacagtgaaatgtatgttctgaggcttctcgtgggatcaggctgagccctgaactttaccttgtttggcttatttcccctccttttcctgcttcttctacttcttactactaggtgtaacttgttaataaattacttgcatagacattcktattttagaatatgcttctgagaagtctgaactaagactgtaaaaattttttga

SEQ ID NO: 608595 - DNA, 641 bp, Homo sapiens
tcactgtaagctccgcctcccgggttcatgccattctcctgcctcagcctcctgagtagctgggactacagacgtccgccaccacggccggctaattttctttttgcatttttagtagagacggggtttcaccgtgttaaccaggatggtctcgatctcctgacctcatgatccgcctgcctcagcctcccaaagtgctgggattacaggcatgagccaccgcgccccaccccaaacttgcaaagttatttaaagggctacccacttgcaaacttctttaaagggctacttttaggttattggagctgcttcctctgttgcaccaagagtcacaagtgtctggcagttctatttccctccaggtagcccacttccaatgactgactgctgaaagaggatgaaagcccagcttctttgcctccacaagcaacaaactccacagtgaaatgtatgttctgaggcttctcgtgggatcaggctgagccctgaactttaccttgtttggcttatttcccctccttttcctgcttcttctacttcttactactaggtgtaacttgttaataaattacttgcatagacattcgtattttagaatmtgcttctgagaagtctgaactaagactgtaaaaattttttga

SEQ ID NO: 608596 - DNA, 580 bp, Homo sapiens
agtagtcttttctaggcatcaaatcaatgcccaagagaaaaattaggaaatagaatcrcaaactaatataaagttttctaacaagcaaaagatgctttatgttaaaaaagatgaaagacagattgaaaaaatatatgcaagactgccaagaccagctcggtcagggagaccataacccagtggcattagaggaattgaagacacacacacacagaaatacagaggtgtgaagtgggaaatgaggggtctcacagccttcagagctgagagccccgaacagagatttacccacgtatttattaatagcaagccagtcattagcattgcttctatagatattagattaactaaaagtatcccttatgggaaacaaagggatgggccgaaataaaggaataggttgggctagttatctacagcaggagcatgtccttaaggcacagatcactcatgctattgtttgtggtttaagaacgcctttaagtggttttctgccctgggtgggccggtgttccttgccttcattcctgtaaacccacaaacttccagcgtgggcgttatagccatcatgaacatgtca

SEQ ID NO: 608597 - DNA, 580 bp, Homo sapiens
agtagtcttttctaggcatcaaatcaatgcccaagagaaaaattaggaaatagaatcacaaactaatataaagttttctaacaagcaaaagatgctttatgttaaaaaagatgaaagacagattgaaaaaatatatgcaagactgccaagaccagctcggtcagggagaccataacccagtggcattagaggaattgaagacacacacacacagaaatacagaggtgtgaagtgggaaatgaggggtctcacagccttcagagctgagagccccgaacagagatttacccacgtatttattaatagcaagccagtcattagcattgcttctatagatattagattaactaaaagtatcccttatgggaaacaaagggatgggccgaaataaagkaataggttgggctagttatctacagcaggagcatgtccttaaggcacagatcactcatgctattgtttgtggtttaagaacgcctttaagtggttttctgccctgggtgggccggtgttccttgccttcattcctgtaaacccacaaacttccagcgtgggcgttatagccatcatgaacatgtca

SEQ ID NO: 608598 - DNA, 450 bp, Homo sapiens
aaactttgtctttccgcttgaagtggttctttcaaaccttgcaaattttttcctagtcccatactagggacataaccccatttcatgcatcatctgttgattctgagggctatgtaattgttctggaattagaacttgtgctccccattgttgtaataaatctctcccccataaatttatagatacagaagttataattggttgaatagtcccaggttgtccatcgggcccttcacaatgcaaaatataactgctttgatatayttcaggggctttaccaactccaactatgttaaattgagtgggttgaattggccacgcggacggccagtgctgtagagaaatgattgaaatgtccgctccggtatctaccaaacctttaaatttctttccctgaatagttgtttcacaggtaggatgtttatcagtaactcgatttacccaataagc

SEQ ID NO: 608599 - DNA, 549 bp, Homo sapiens
  misc_feature 221: n = A,T,C or G
caggttctcacagaatgccaatgctgctggtctggggattacacttaaagaagctcttgttgcctcatttatgaaaaggtgaaaggaaaataacataagaatgtacctcctccacaaagctgtccttccacactgtcacacttctgacaccattctttggaaatccacatacaatgtatttccttaatrccatttctaaattctgcaggttttgtttttgnttttgattttggttttggtttgagacagagtctctctctgttgcccaggctggagtgcagtggcatgatctcggctcactgcaacctcacttcctgggttcaaccgattctcctccctcagtctcctgtaacttgggttagccagcaggcccagctaatttttgtatttttagtagagacagggtttcaccatgttggccagactggtctcgtactcttgacctcagacgatccatctgctcaatctcccaaagtactaggattacaagtatgagccactgcaccaggccaattctgcaatttttatatcctccattattgactaatg

SEQ ID NO: 608600 - DNA, 549 bp, Homo sapiens
  misc_feature 221: n = A,T,C or G
caggttctcacagaatgccaatgctgctggtctggggattacacttaaagaagctcttgttgcctcatttatgaaaaggtgaaaggaaaataacataagaatgtacctcctccacaaagctgtccttccacactgtcacacttctgacaccattctttggaaatccacatacaatgtatttccttaataccatttctaaattctgcaggttttgtttttgnttttgattttggttttggtttgagacagagtctctctctgttgcccaggctggagtgcagtggcatgatctcggctcactgcaacctcacttcctgggttcaaccgattctcctccctcagtctcctgtaacttgggttagccagcaggcccagctaatttttgtatttttagtagagacagggtttcaccatgttggccagactggtctcgwactcttgacctcagacgatccatctgctcaatctcccaaagtactaggattacaagtatgagccactgcaccaggccaattctgcaatttttatatcctccattattgactaatg

SEQ ID NO: 608601 - DNA, 525 bp, Homo sapiens
cctgctgtcctgggtcctgggtccacccctgcagagcaagcccacccatccagtccccgccgcaccaccaggcacagccctccacagccctcagcagtacaatctgaaatcttcggsacttgttcttcctggctgtttgcctctctccccgcggggaggcgcctctgagtccccagggcctgactctcacagtgctcagtgattatttgttgaatgaataaatgtccttgacaccccatccagcagtctcccctgcttgcttctgagctggtttctctctttcacgactgtcctgactccgctggctcactttcccaccctattctgcgaccctatcatcttttgttttcttgtatttcttcttaggttttgtttttcttcatgatctgtgttctttgtcccaatgttttattatgggatagttccaacattagggacaaattacatagggtaatatgaacccaccacctggactggacaaatattagcattctgccatattcgctttaggtaatcatttttaga

SEQ ID NO: 608602 - DNA, 525 bp, Homo sapiens
cctgctgtcctgggtcctgggtccacccctgcagagcaagcccacccatccagtccccgccgcaccaccaggcacagccctccacagccctcagcagtacaatctgaaatcttcggcacttgttcttcctggctgtttgcctctctccccgcggggaggcgcctctgagtccccagggcctgactctcacagtgctcagtgattatttgttgaatgaataaatgtccttgacaccccmtccagcagtctcccctgcttgcttctgagctggtttctctctttcacgactgtcctgactccgctggctcactttcccaccctattctgcgaccctatcatcttttgttttcttgtatttcttcttaggttttgtttttcttcatgatctgtgttctttgtcccaatgttttattatgggatagttccaacattagggacaaattacatagggtaatatgaacccaccacctggactggacaaatattagcattctgccatattcgctttaggtaatcatttttaga

SEQ ID NO: 608603 - DNA, 547 bp, Homo sapiens
ggtttttattaaatgtggcttgctttccacttgactttggtataatatcacatgacaagtagcagactctaaaggaaatattaataaaagtattttaccacaaaatatattttttaaacataccttgaaatggctgccatagtgccaacagattaaaatgaccctgcaaagccaccttttatggggaaaatttgcagctatagaaartctccatgaatgtaaccaggtattttcccttccaggctttctcagctctaggagagattaactgagagcctgacacctttaaagtctgaaaagagtcattcaccaactattatagctctgagagctgccacccatgaggcttcatctacacaataacctcagcctccaaaacttcctaatcttaactcaggccttcctttctactgatttcaagtccttagacaatagcttaactgtctcaaccaactggcaactgaagaatcccctaaacccacctatgacttgtaagcccccgctttgagaagtcccacctgttctggccaaaccaatgtgcaccctt

SEQ ID NO: 608604 - DNA, 572 bp, Homo sapiens
aaatgaaaccctttgattgacccaagatgccgttagtcactgctcattagaaaaggaagctctaggtggcrgggcagcatgactcaggtctgtaatcccagcactttgggaggccgaggcgggtggatcacgaggtcaggagatcgagaccatcctggctaacatggtgaaaccccgtctctaaaaattagctgggcgtggtggcgggcacctgtagtcccagctactcgggaggctgaggcaggagaatggcgtgaacctgggaggcggagcttgcagtgagccgagatcgcgccactacactccagcctgggcaacagagtgagactccgtctcaaaaaaaaaaaaaaaaaaaaaaattggatgtgagaaatgcagactttgcagagctagtgttggctcttgggcatgtggggaagaaacctttccttctaccctttaaggttcagtagttgaggcctgtaagttaaaccaacaacaaaaaagggcaacatttatttatgaacatacatgggaactcacagactatgtggctcaaagaggaggttagaatttagggctcatatattatc

SEQ ID NO: 608605 - DNA, 557 bp, Homo sapiens
acacatttttgaaatatgcatacattgtcaaatttctacactgaagtagttaaacattacttcacatacttatatttttgatgagaacataaaatttactctcttattttcaagaatacaattgttatgaattataatcatcatgttgttcaatctcttgaacttattcctcctgtctgacattttgtatsctttaatcaacatctccccactccccattagcctcaccccatttgttttgttctccagggctcagtattgtgtgttttctgcaagggaagaagcttcctggatacgtccacatttaggggatgcagtagctgacagtgagcaatattaaggctgtacacggggcattgtactaaagtctacctgagtccttagtgattttgttatagggccaccaggttcaattgttcattgctcagtaacagaccaatacttcgaaacagcaggagttgtagcaataaagagtttaacaatcatgtggaagccaaatgaggagatgaaaggaaacttcaaatctgcctccccaagaagactggggataggatttt

SEQ ID NO: 608606 - DNA, 623 bp, Homo sapiens
aattgttatgaattataatcatcatgttgttcaatctcttgaacttattcctcctgtctgacattttgtatgctttaatcaacatctccccactccccattagcctcaccccatttgttttgttctccagggctcagtattgtgtgttttctgcaagggaagaagcttcctggatacgtccacatttaggggatgcagtagctgacagtgagcaatattaaggctgtacacggggcattgtactaaagtctacctgagtccttagtgattttgttatagggccaccaggttcaattgttcattgctcagtaacagaccaatacttcgaaacagcaggagttgtagcaataaagagtttaacaatcatgtggaagccaaatgaggagatgaaaggaaacttcaaatctgcctccccaagaagactggggataggattttaaaggatgagtaatgagctaaagtgtggatatttctgattggtcaagacatgagggatgaaatcatgggacacggagatgaagaaaccacattcacattcatgtgctgagtcagttccttggagagggtcttcagactggctrgtgtcagtggactcattgaaatgcaggatctgaaaaaaactc

SEQ ID NO: 608607 - DNA, 598 bp, Homo sapiens
ttcacattcatgtgctgagtcagttccttggagagggtcttcagactggctggtgtcagtggactcattgaaatgcaggatctgaaaaaaactcaaaatgaaaaacttgaaatttcttaagatcaaaggtgtcccccatagaagttaggacattgtgacaggggtgactttgaagcagtaagcagctataagaaagtggccttggctgggcacggtggctcacgcctgtaatcccagcactttgggaggtcgaagcaggaggatcatgaggtcaggagatcgagaccatcctggctaagacagtgaaaccccaactctactaaaaatacaaaaaattagccaggtgtgatggcaggcgcctgtagtcccaactactasggaggctgaggcaggagaatggcgtgaacctgggaggtggagcttgcagtgagccgagatggcgccactgcactccagcctgggtgaaagtgggagactgtctcaaaacaacaacaacaaaaaaaagaaaatgggctttagggaaagctggttaacaacttagctatgcttctacttacaggttatactctttttaaaaatctagcaatttagttttatt

SEQ ID NO: 608608 - DNA, 556 bp, Homo sapiens
gaattctcttattcattttttactgttttttttttcttggatttgctagatatgattagcttgtcagcaaacaacagcaggttttgcctctttgcagtatttatagcttttatttatttatttatttttttggagacaggcttttgctctgtcacccaggctatagtgcggtggcactaatgtggctcactgcagcctcaaactcggggctcaagtgaacctcccccttcagcttctagtgtagctggarccacaggtgtgcactgccatgccaggctaattttcttatttttttgtagagaaggcgtcttggtcttgctttgttgcctaggctggtcttgatctcctggactcaagtaagcctcccacctcagcctcccaaagtgctgggattacaggtatcagctaccatgcctggctcttatatctcttaaaaatcatcttgagttgacttggcctcccatgtggaatacagcatgagtgttgatgtcctcatcttgtcccagattgtaatgggtgcctcaggtgctttaccaagcatgaagttttctctgtt

SEQ ID NO: 608609 - DNA, 556 bp, Homo sapiens
gaattctcttattcattttttactgttttttttttcttggatttgctagatatgattagcttgtcagcaaacaacagcaggttttgcctctttgcagtatttatagcttttatttatttatttatttttttggagacaggcttttgctctgtcacccaggctatagtgcggtggcactaatgtggctcactgcagcctcaaactcggggctcaagtgaacctcccccttcagcttctagtgtagctggaaccacaggtgtgcacygccatgccaggctaattttcttatttttttgtagagaaggcgtcttggtcttgctttgttgcctaggctggtcttgatctcctggactcaagtaagcctcccacctcagcctcccaaagtgctgggattacaggtatcagctaccatgcctggctcttatatctcttaaaaatcatcttgagttgacttggcctcccatgtggaatacagcatgagtgttgatgtcctcatcttgtcccagattgtaatgggtgcctcaggtgctttaccaagcatgaagttttctctgtt

SEQ ID NO: 608610 - DNA, 468 bp, Homo sapiens
atgattagcttgtcagcaaacaacagcaggttttgcctctttgcagtatttatagcttttatttatttatttatttttttggagacaggcttttgctctgtcacccaggctatagtgcggtggcactaatgtggctcactgcagcctcaaactcggggctcaagtgaacctcccccttcagcttctagtgtagctggaaccacaggtgtgcactgccaygccaggctaattttcttatttttttgtagagaaggcgtcttggtcttgctttgttgcctaggctggtcttgatctcctggactcaagtaagcctcccacctcagcctcccaaagtgctgggattacaggtatcagctaccatgcctggctcttatatctcttaaaaatcatcttgagttgacttggcctcccatgtggaatacagcatgagtgttgatgtcctcatcttgtcccagattgtaatgggtg

SEQ ID NO: 608611 - DNA, 556 bp, Homo sapiens
gaattctcttattcattttttactgttttttttttcttggatttgctagatatgattagcttgtcagcaaacaacagcaggttttgcctctttgcagtatttatagcttttatttatttatttatttttttggagacaggcttttgctctgtcacccaggctatagtgcggtggcactaatgtggctcactgcagcctcaaactcggggctcaagtgaacctcccccttcagcttctagtgtagctggaaccacaggtgtgcactgccatgccaggctaattttcttatttttttgtagagaaggcgtcttggtcttgctttgttgcctaggctggtcttgatctcctggactcaagtragcctcccacctcagcctcccaaagtgctgggattacaggtatcagctaccatgcctggctcttatatctcttaaaaatcatcttgagttgacttggcctcccatgtggaatacagcatgagtgttgatgtcctcatcttgtcccagattgtaatgggtgcctcaggtgctttaccaagcatgaagttttctctgtt

SEQ ID NO: 608612 - DNA, 605 bp, Homo sapiens
taatacaattgctgttcccacacgttcttatctacatttggtacatcaaacttgtttttttcaatcagatgactataaaataatatcttttggatttgattataagagagtttgaacaatttttaaaatctgtttgttggcagtatagttttcaagttctgtggatgcccactgtatcccttgaaagtatattggctgatacaacattggctagtttgtcttttccttgcccccatttgtatgaggttaataaaacatatatgtattctgtataatattcctgtattggtcttgccttgcagatatctttctccaatctgtggctcatcttttctggtcttcaccacagttaataagccatctcctggggcaagtgtctttttatgtatttggatttctcctttcagtactgattttctcttggtttctcctcgtgcactagaatcctgtctttgtcagaagctgctaagtgcctgtcttagtccattcrtgttgccataaagtaataactgaggttgggtaatttataaagaaaagagggttatttggctcacagttctgcaggctgcacaagaagcatggcgccagcatctgcttccagggag

SEQ ID NO: 608613 - DNA, 412 bp, Homo sapiens
gaattcatataagagcataatgctayagtgcgcttccaagacaaaaacagcttacagaaccaaaattttacatccatccatagcctcaaatgcttgaaactagtattctcgcgagttacctttgagtcctttgcatagtaaagggtgcggcctcgaagtttgaagtatcgctttttccacctttggaaagaactggtttgcttcaatagctgtccctctttaatactggtctagagagaagcagaagcacaatgacacgattaaaatgaaattcaaaaccaaatgaaattcagagccaatggtgcattttcattaacattttgaataatatttctcatgtcttacaaattacaggagaatattttactctcaccacagctttgcatatgtgcaaagccccaaagagcaaaag

SEQ ID NO: 608614 - DNA, 377 bp, Homo sapiens
ttacagaaccaaaattttacatccatccatagcctcaawtgcttgaaactagtattctcgcgagttacctttgagtcctttgcatagtaaagggtgcggcctcgaagtttgaagtatcgctttttccacctttggaaagaactggtttgcttcaatagctgtccctctttaatactggtctagagagaagcagaagcacaatgacacgattaaaatgaaattcaaaaccaaatgaaattcagagccaatggtgcattttcattaacattttgaataatatttctcatgtcttacaaattacaggagaatattttactctcaccacagctttgcatatgtgcaaagccccaaagagcaaaagtgaatgtgacatggtt

SEQ ID NO: 608615 - DNA, 408 bp, Homo sapiens
gacaaaaacagcttacagaaccaaaattttacatccatccatagcctcaaatgcttgaaactagtattctcgygagttacctttgagtcctttgcatagtaaagggtgcggcctcgaagtttgaagtatcgctttttccacctttggaaagaactggtttgcttcaatagctgtccctctttaatactggtctagagagaagcagaagcacaatgacacgattaaaatgaaattcaaaaccaaatgaaattcagagccaatggtgcattttcattaacattttgaataatatttctcatgtcttacaaattacaggagaatattttactctcaccacagctttgcatatgtgcaaagccccaaagagcaaaagtgaatgtgacatggttccccgccctcaaagaattc

SEQ ID NO: 608616 - DNA, 609 bp, Homo sapiens
tgataatagccattctaacaggtgtaaaatgatagctcattgtggttttgatttgcatttccctgatgattagtgatgttgagcattttttcatatacctgttggccatttgtatgtcttcttttaagaaatgtctattcaagtattttgcccatttttaaatcrgattttttgttgttgttattgagttgtttgagttccttccatattctggttattaatcccttgtcagatgaacagtttgcaaatatttcctcccattctgtaggttgtctcttcacttcattgtttcctttgctatgcagagctttgtagctcgatgtaataccatttatctatttatgcttttgttgcttgtgccttacacaaaatgatttgtatatctttgaagaaatgtctattcaagtcctttgcccatttttttaattgggttgtttgtatttttgttgaattgtaggagttcttttcattttctggatattaactgcttatcagatatatgatttgcaaatatcttcacccattcttaggataccttttcaaccttgatagtgtcttttgacacacagaagtttttaattttaatgtggttcaatttatttatttttt

SEQ ID NO: 608617 - DNA, 580 bp, Homo sapiens
gacaaaccttcctctctttaaatatttaaatatcttaccttcctcaattattgtgactgctactgatgctgttattgtggctggtttgtgtcagaggctaatggtgcagtttggtgtattatggctggaggatccaggaatggccaaattcgacttcatttcagccatccctcctcttgctgaagtttctaagggtgatatattgacaaagtacaatagtgggtggaaactacataaacggtaaatggaaaatggaaaacctgtrctttgcctgaaaacccagtgctgaactctctggtaaaatgggttctagagatcagggcagtgattgacctagcctgggaagttcctcagtgtcatttccacgacattcagttggtattcaattggtatgaatgagtcactaaggccagccaggcttcaagggggccacagacattaagacagtcgtgtcaaaggatttgggacatgatttaaaacctacacacagtaagattactcttcctttcttgtgcagtctctcactcccatctctggagttaataactttgttttttcagttatctaaattgcctcaggt

SEQ ID NO: 608618 - DNA, 609 bp, Homo sapiens
aaattaaatacctaagtatcaacttaaccaaagaagtaaaagatatctataataaaaaattatacaacactgatagaataaattgaagaagacacaaattaaaaacagatattcaatgttcatggattggcagaatcaataatgttaaagtgtccatactactcaaagcaatttacagattaaatgcagtctctttcaaaataccaatgacattctttccagaaatagaaaaaaatatgaaaatttatataaaactgcaaaagacccagaatagccaaagacattctaagtaaaaacaaacaaacaaacaamcaaaactaatggtatcacattgcctgacttcaaattcaaatttgtgtgctacagagctatagtaaccaaaatagcatagtactggcataaaaacagacaaatataccaagggaacagaatggagaaccaagaaacaaatccaaacacctatggtgaacttattttttacaaagttgccaagaacatacactggggaaaagacagtctttttagtaaatggtgctgggaaaactggctatctatatgcagaagaataaaactggacccctattactcactgtatacaaaaattaagtt

SEQ ID NO: 608619 - DNA, 642 bp, Homo sapiens
tcctattacactggtctatatttcttcttaataggaagaaaaacctcagatcctgtgcagaaatcaagtcagtaagtcagcagtgttatcctgatgtccctatcaaagaggttctcaaccctgactttcaaaatagaattacctgtggaatttaaaaaatatccatgtctgaccaaccccagagaaagctccccaagtaattctaatgtgcaagccaaggtttagaaccatccctatgtgaagcaaataaggttaaataaggttaatctttttggggggggktttgtatttttttaagttgaccagcagtgaactccacttcttgtgaacatactgtcttctacatgtttgcagtttatctgataatgtatttgcagaattttcccctagatgtattgtcacattttactgctctgtagtttgtagatctcactttttttgaagattggatcatttagcatctctcctgttctctatgacatctcaaaagattgtcattagaaattacgcattcttggcttttgattttctttgaaaagttgttttttccactctttccagttagaagatgattctcattgttgaataaaatagaaacaaaatggaagttgagtgactcttccgtcttctgttaatatacct

SEQ ID NO: 608620 - DNA, 460 bp, Homo sapiens
agtgaagtaaagggcacataaataataagtggcaagttctaagttgcgtgtgtgtgtgtgtgcttgcacatgtgtgcatgcattgaggtgggtaggaagtttttctggaagcatatgagaggcaagggatctggattcgctattaagataaccatcagtctccacgaatcaaataaaaccaggcagcaagcctaataaaaattaagcaatggatcaaaaagatactgactgtgcactacctttctgcctccttctctattcggcttgtgttcctgcaagaagacttrtttcatttcactatatatagcacattttgctagatgctatgataggagagggtcaaggggagatagagaacgatgtctcatgtctgtatgtcttatgtctgtatgagcagacatacatacactcatgccatacttgaatcaaggtagaccatgacagatctaccttgattata

SEQ ID NO: 608621 - DNA, 584 bp, Homo sapiens
ggggagtagactaggtttcttttttctgattttcttttgacccatactgctttctttgctgtcttgtgggcacatacataggtattcaagtgaaacaagcccagacttcaaagttaagaacttcaggagtggaatttctccactcttggtacagtggggagtctggagcaagctgtttgccttctttgcaccttcgttacagatcaggcatcaaggaatgaagattaacccttgaccttgctggaagatggcatgtttacctgatccctgatgttccaatctcatagtgaccacaggagcctggagcatagtaccaagtgtgtgagggcatgccatagataatgcagctgggaataagggaaataacgttagatggagggtcagaagacccaaagttaggcctacttctggtcttctggtactaacttgcttcgtatccttggrgaagacattcaaactcttcagcctcaatttctttctttgcaaaatagggtacatatagcataatagctaagagcaaagaccttattgtcagacagacctggattggatgccaactctaccacttactagctgtgtgacct

SEQ ID NO: 608622 - DNA, 421 bp, Homo sapiens
atcatatgggttttcttttaaaaaccctttaacaacttctcattgctcttaggataagatccaaaatgtctaatatgaactacaagctaattcgttgattagttgaagaaatattgattgagtgccttttaggtattttaggctgggaaaatactgctgagagggggtggggcaaagcctcagttctcacggagcttacgctggccagaagtgggggcgggccagcagaaacactgatagactataaacatataaatamaatcaacaaacaaaatgaacaaataacaagacaaattcctttctgatgagtgctatagagaaaataaaatagaatatttgctagagaaactaagctattctttcagttccccagtttcccttctctcatcccatggaatttgtacaagttattccctctccc

SEQ ID NO: 608623 - DNA, 575 bp, Homo sapiens
aagctttaattctctattggcacagctttgaatgatgtgtttctttgagaataatccaaatagaatgttctggactcacaaacagctgatgctacctcttatgtgtatgaaaagaacaagcagagtcttcacagtaatggaatgattctagaataatttgtactgctgctagaataatttgtacaactaaaataattggatcgctttaaagacaatgttattagaatcatatgttsagttcctgttatagtagatgcccgaccagagggaggaccttgacagaaataaagtgtcattatcaagagaagttgtgcaatgtgacagaatgaaaggaaaagaaaatcaccttagaatcacttagggagcctgtccttgaaaggaaaggctaccttgaggactttgaaggggctttagttactagggtaaagatgtgactagttctgtcttggaaaacaaaataatacttgggaatctgggggttatcaatgagtttaaaggagaggctggtatgacttgataaagtctgctgaagcaaacaagtctatatcaccacttcttgggccaatttccagcct

SEQ ID NO: 608624 - DNA, 586 bp, Homo sapiens
acttccaatttgacaggtgtttcctggtcatctactctttgttggacaggtgtggtggggagcctggagtgggagggtgggtgttgagggatggattagaaggcctaaataaaaaggccaagctctagcacccaccatttgcatgacttgagcaaatcataacctctcatcctcagccttcttttctataacaggggaaataaagataatgagtaacttagttaatcataaggctaaaaatgggttagtgtgtggcataatgttgagaagttcttaacacaaagagaagaaaaatatatctccgaatcatgagtatmaaaaatagctcaattataatatgtttaattaagtttattaattttattgaaagatgataatgggcttttgaattgactgttaactggtcaatcagcaaattttaccatcaggaaaaatttagagatgccatttagggatgaaattgattggttgcttgaatttctagaatcaaatatttatttttacatcacatatacccaggcttcaggtgtgtcgtgtctatgattgtttctgggatgaaatggggcatactgaggagggatgttga

SEQ ID NO: 608625 - DNA, 586 bp, Homo sapiens
acttccaatttgacaggtgtttcctggtcatctactctttgttggacaggtgtggtggggagcctggagtgggagggtgggtgttgagggatggattagaaggcctaaataaaaaggccaagctctagcacccaccatttgcatgacttgagcaaatcataacctctcatcctcagccttcttttctataacaggggaaataaagataatgagtaacttagttaatcataaggctaaaaatgggttagtgtgtggcataatgttgagaagttcttaacacaaagagaagaaaaatatatctccgaatcatgagtataaaaaatagctcaattataatatgtttaattaagtttattaattttattraaagatgataatgggcttttgaattgactgttaactggtcaatcagcaaattttaccatcaggaaaaatttagagatgccatttagggatgaaattgattggttgcttgaatttctagaatcaaatatttatttttacatcacatatacccaggcttcaggtgtgtcgtgtctatgattgtttctgggatgaaatggggcatactgaggagggatgttga

SEQ ID NO: 608626 - DNA, 586 bp, Homo sapiens
acttccaatttgacaggtgtttcctggtcatctactctttgttggacaggtgtggtggggagcctggagtgggagggtgggtgttgagggatggattagaaggcctaaataaaaaggccaagctctagcacccaccatttgcatgacttgagcaaatcataacctctcatcctcagccttcttttctataacaggggaaataaagataatgagtaacttagttaatcataaggctaaaaatgggttagtgtgtggcataatgttgagaagttcttaacacaaagagaagaaaaatatatctccgaatcatgagtataaaaaatagctcaattataatatgtttaattaagtttattaattttattgaaagatgataatgggcttttgaattgactgttaactggtcaatcagcaaattttaccatcaggaaaaatttagagatgccatttagggatgaaattgattggttgcttgaatttctagaatcaaatatttatttttacatcacatatacccaggcttcaggtgtgtcktgtctatgattgtttctgggatgaaatggggcatactgaggagggatgttga

SEQ ID NO: 608627 - DNA, 181 bp, Homo sapiens
ggttatttttataaaattcaarttaaaaaaggtttgattttttattatttctttttttcatagtaaaatcttcaaaatagtggtctgttttagtgaatgctcatggctggttatattttttattctttaattaaagaattagataaattcaactgattaatgtaatatgtatcaatgtagg

SEQ ID NO: 608628 - DNA, 622 bp, Homo sapiens
aaaggtccattgctttaacaggatctaaccacagagagctggcccatgtctaatgggaagattccagctgggagtgacactacttcttcaataatgaaagttttatttatttgatactctaaaaaagcttcctttgcaaactatgtattttaaagtttggaagtaatattggttaagaaacctgaaaaggccttgaagaatgtttagtattataaaaattcaaagtcctcgaagaatgtttagtattatacaaattcaaagtcctcatttgattttccttaaagggataatacaaagaaaatttaaaatgatagctggtaactgggttgttgaaagaactatgggtaatggccatgactactgtaacgtatctgttcacctctattccaggcacaggagaggaatacactctcttgcccttgaagttactcagggctatatgactttctggggaaagtttatagtgtggtgctgctgctccactctccaagrgctcccccgacactgcccttggtcccaccactgtgctcatagcggcatgtgtggatatggatagcagatgtgaattggaagcagcctggaacattgcatcaacacatgaagggcagctcccaggaaagac

SEQ ID NO: 608629 - DNA, 608 bp, Homo sapiens
gattttatcagtatggaaacactgaggatttctaagcaggagaataataaaataaaagtgtgtttggggataataaatctggtaccattttactggatgaaactacataatttttaaattaacagaaaggtgaaattggaaaaacaaataccccctattattttattacttgttctttttcttttaaaaattaatttgatccttcaagaagagaaatcaaaaggggagatttgatggtcaaggtgtatacagccattaacttgaaaaagaaaacaatctacaagtatataaactgaataacaccaccaaatctagataaagtcttaaaaagttgttactggtgtttcrcttattaagtacttatatagtgctttctgtatgttgaatggcttacaaatattcattaatttaatcctgtaacaaccgtataagtaagtatggactattaatatccccatttttcaggtgaggaaactaaggcataataagatcaagcaacttgtcccaaatcacaaggttgataagtgacagaatcaggatttaaactgagtctgattttgagttcatgcgcctaaccaatatgctgcctctccatgctattgtttccc

SEQ ID NO: 608630 - DNA, 471 bp, Homo sapiens
gaacctttgccaccacaaagcagctgctaagcccgaaagaagaaaatggcactgaaattaattgggtcattgaagcatgaaacactgacacgaattcaagtgattggaagtgaataaatctctctgactcctaaagatccaaatcagttcatatgatggcatttttaaaagcattaagagtattttgatgctaatctgagtagagggaaacttttataaatcagtaaggatatccartgggattagggactatatgaaccagcctcaaacatctgcaggggaagaatttcagcttatgttcaagaaaaaataattgggggtatggaaagaaccataaaccaaaaaagcaacagataaatgccatcctttggcaaatagattaaatactgttgcttagaaaaagcatgatacattcaagaatgagtattacgtgcttttcaaaagagttgaagaatgaaaagggagtgtctg

SEQ ID NO: 608631 - DNA, 620 bp, Homo sapiens
gttctctggcgggcaggggtcggggaggggggggtcacaaggtgctcagtgggggagcttttgagccaggatgagccaggagaaggaatttcacaaggyaatgtcatcagttaaggcaggaagaggccatcttcacttcttttgtgattctttagttatttcaggccatctggatgtatatgtgcaggtcacggggaatatgatggcttagcttgggctcagaggcctgacaatatggaaaaaatttggtaaatttaactgtatctcagttaagaatttccaacactaagagagtggaaggaaaatgacatctgtaacacacaattgaaagaaaagatacccagaatatatacagaactcctaaaaatcaattaggaaacaaaacaaaacactccttaggttaaaaaaaagaaagtaaacagaaaaaaagacataaaaggccagcaaacataacttgatgttcagcaacattgattgagtgagaaaatgtaaattgaggcaagaagataccataatacacctatcagattagcaacaaaagccaagagttggcagaaaagtagaccaaagggaagatgcacaaatcctatgatccaacaattctaatcccaggtatatat

SEQ ID NO: 608632 - DNA, 566 bp, Homo sapiens
tgaatattttaaaatataattggcttttatttttaaattagttttttttttcaaattaactgtcttataacatcaatcctatgcgggggrgaaacatccaaattcacattactgatttctgaagaacttatgaaacaaatctgttagtaagatggggacttaatttttcccaggcttcccctccactgcctcccaaccatatttacaatgatcttctactgttgcataccctgttattaccttaatattctcagtcactaaatgagcactcaattaaaagttttaaataggtgttttgtaggttatgtggctgggaaacccttgatttcatctacagagcagagcaggttgtagttattttaagagaactccatggagccgatttcattataatgtcattagagaccatacaggtttagatgcttcacctttctttgaaaaaatagactcagataagctgttgactttaggtaactgtattagtctgtcctcacgctgtgaataaagacatagctgagattgggtaatttataaagaaaaagaagtttagtggactcacagttcca

SEQ ID NO: 608633 - DNA, 573 bp, Homo sapiens
ctaattgttttccttcaaatatcacaatcctgtgataaggacctaaggaagatatctatttcatgtgtcctaaaacctgcactaagttttagggaattgggaatatgctgagatgaagggaactgtgaggcattgtgacaagtggtagtgtacttcagtgggttctccttaattcagtggaaccatgagcaagtagccttagcaacagagggaaggctgacctcatcctccttaaacctatgattagggagagtggggccaagtaccatgacagtgaaaacygaagcatggcgcagggaaaaacatttgccccaaatgaaacattaagtttttcttttggagagcctgctgttgcttgtgggaagacagttgggattcacagagtctgtgcaggcacaaggcagtaactgctatgtaattacagaaagatttgggcattttgtttggcagagttttgaaaagtaacatactaaattgggaaccgctttatggatttttaaataaagagaggagcttctgttgacataaacataaacagtgatgagctgggggatggtcctaacattttgcata

SEQ ID NO: 608634 - DNA, 536 bp, Homo sapiens
ggaatcatttgatgatccagggcaattgacgtattttgaaaacttcccaaagggtggtaatatgcagtcttgcttaaaaatctctagatgagatgttctctgagtcctttcctgacctaacactttcctcttcatggggataaccatatctgaagaatgttcacrtaactgcataatcgatgcttcctggaccctcagcccaactttagatctctgggggatggctttaaaaaatccttttctaggaagctcgtggtattttatcctgttttatactgtgcgaaaggtgtttgctaagagtgttgtctccttgggaaggcacgtgcttgatgatgactgaactcccaaggaaagtggcaacatgagagctagccttgcaatggcatatattagaccttcttatgaaggagctgtgtgcaccaggtagagaagcagcagctgcccaggaggtccttcctttggcacacagatggttgcctcttgactaagggagctgcatatatcaagacttctgagcacatctagccaggctctgg

SEQ ID NO: 608635 - DNA, 536 bp, Homo sapiens
ggaatcatttgatgatccagggcaattgacgtattttgaaaacttcccaaagggtggtaatatgcagtcttgcttaaaaatctctagatgagatgttctctgagtcctttcctgacctaacactttcctcttcatggggataaccatatctgaagaatgttcacataactgcataatcratgcttcctggaccctcagcccaactttagatctctgggggatggctttaaaaaatccttttctaggaagctcgtggtattttatcctgttttatactgtgcgaaaggtgtttgctaagagtgttgtctccttgggaaggcacgtgcttgatgatgactgaactcccaaggaaagtggcaacatgagagctagccttgcaatggcatatattagaccttcttatgaaggagctgtgtgcaccaggtagagaagcagcagctgcccaggaggtccttcctttggcacacagatggttgcctcttgactaagggagctgcatatatcaagacttctgagcacatctagccaggctctgg

SEQ ID NO: 608636 - DNA, 477 bp, Homo sapiens
gttaacataacagagaactttgtcaggcccaagtataggtaaagggtactcattactgatttaaaatgagaaaccccgtaaatcaatatttgagctatgtttcgtgcataaacccattagctctgtcctgaggaaaagtctcaatgcgtaattatttcaaaccagtgagctcatagctgtctgcttggcacagctcagcctggtttcttcatgaaaaatgagataactgccaggattttttctgtctcctacctgagccctcacaagtactgcttttcacctcagtggacttcgattccttaagtcaatggtatttattgtgcctcccatagagtacaaccaagaagtgagttgctattgagaagccaaaaatcggaatagaaagcaatgatttrtttctttttgaaaggagaggcacatttttagggaccatgagaaaggtcctcagccgttcaaattcaagtgttgaaactcaag

SEQ ID NO: 608637 - DNA, 605 bp, Homo sapiens
gtacaagttaaatctctcagatataattttttttttctttttgaaacagggcctcactgtgctgcccaggctgaagtgcagtggcatgatcrtagcccactgcagcctcgagcttttggtcagatataatttttaaaaagtagttttgttgttttcaaatatatatagttatttagggtaataataaaataggaaattagctttaactaacatgacaattgtgtctgcttaatgtctttattgtttgttggtatatgaattattcttctaaccaatttgttatgtagtatcctgcaatttataacatcttttgcttaataatgaaagctaatatttattaaacatttactgtttaccaagcattatgataatggttcccatgaattaactcattccgagctcacaacagccctgtgaaacacatagtagtagtagtagcctcatctcactaaggggaaactgaagttcagacaaattaagatttttccggagtgccatgcttaggacaaaacagtgacctgcccaggcccagaagtggttaactgtgatgctaatgaagcttgcactttagtctgcctgctccaggggcccatcacaatgtattc

SEQ ID NO: 608638 - DNA, 605 bp, Homo sapiens
gtacaagttaaatctctcagatataattttttttttctttttgaaacagggcctcactgtgctgcccaggctgaagtgcagtggcatgatcgtagcccactgcagcctcgagcttttggtcagatataatttttaaaaagtagttttgttgttttcaaatatatatagttatttagggtaataataaaataggaaattagctttaactaacatgacaattgtgtctgcttaatgtctttattgtttgttggtatatgaattattcttctaaccaatttgttatgtagtatcctgcaatttataacatcttttgcttaataatgaaagctaatatttattaaacatttactgtttaccaagcattatgataatggttcccatgaattaactcattccgagctcacaacagccctgtgaaacacatagtagtagtagtagcctcatctcactaaggggaaactgaagttcagacaaattaagatttttccggagtgccatgcttaggacaaaacagtgacctgcccaggcccagaagtggttaactgtgaygctaatgaagcttgcactttagtctgcctgctccaggggcccatcacaatgtattc

SEQ ID NO: 608639 - DNA, 514 bp, Homo sapiens
ctggctaatttaaagaaaamttgtggaggtggggttctcaatatgtgctcaggctggtctcaaacttctggcctcaaatgatcctcccgcctcaacctcccaaaatgttaggattacagggatgagccacaatgcccagatctgatacaatactttcatctacaatctacatgtcatcattttatgaattgttgtaatgtcatttatagaattttctttttaaaacaagatccagtctaaaatcatttatggcattaagtcattctgtctctttagtctcctttaatctgaattaatatttaatttcagcctttctctttgatactatcgatcttaaaaaaatacaggcctgtcatttataaaatattccactgcttctccaatgtttcctcatgattagcttttgtttatccatttggaatactgtataagtcacgtgtctttggtatcacatctgaaggttgacgtctgtttgcccctttctagtgatgttaattttgatcacttggttaat

SEQ ID NO: 608640 - DNA, 584 bp, Homo sapiens
agactgaaaagttgaaaggaattggcatcatatcacattctcagaatatatcacaaccagacggaaaccaaaagcaaaataactcaaaaattgccatgatttggaaaataaaagtcacaattataaataagtcaaggatcaaggaagaaataataatggaaatttagaaggccttgacttttattttactaaataagctaagaggtgaacttaagacatttgygggtaaaaaaacagaataaacccaaggagacaaggaagaaaataatgcatataaagacagaaattaatgaaatagaaactgaagatatcaaagaggactaataatccaatatatggttctatgaaaagaacaataaaataaaatcctggtaagactggtcatacaaacagtataaaggatgaaaaggagaatacataaataatgatgtaactaatattgagaatataagaatgctataaatacatttatactaataaatttgagaaattaggtaaaatatttaaaattctgagagaaatacatataacagtctgactcatgaagaaagaaatcctgcacgtttttataaacattgaagaaa

SEQ ID NO: 608641 - DNA, 600 bp, Homo sapiens
aagctttatttatttatttatttatttacttttttgagacagagtcttgttctgtcgcccaggctggagtgcagtggtgcaatctcggctcactgcaacctccgcctcccaggttcaaacgattctcctgcctcagcctcctgagtagctgggattataggcatgcactgccacacccggctaatttttgtatttttagtagagacaggatttcactatgttggccaagctggtcttgaactgctgacctcaagtgattcacccgcctcggccacccaaagtcctgggattacaggtgtgagccactgcgtcccgcccagcagctgtgttttaaaatagttttgggaaggtatttgtcaaacaaatgaatgtgttcctaagccagacgccgattcccagagaaactctgatcgtgggttttagaaaatcattcatgcctaaaatgtaaattacggccttaagatatttcaggtaaggccagagatactggcctgctcttctcatctgagatgacagaggtagaacggagctgactggctgaggtagttgctggtggtcatytgagggtctggacagaatgcagctgtgctgactgtgcct

SEQ ID NO: 608642 - DNA, 593 bp, Homo sapiens
ttggcttttacgtttatgcaagactgacttcttgctaagcctttactccaagacatttcacaatggaggtccccagtgtttgtccttgtcattttataggattaatttgatacattgtcattcacctaactgccttgtacctcttgttagtacacaatccctaactaagcctgagtatttgttcttcaaactttctaaaatgactcttccgttcactctcaggatgtatcatttatcataccttcaatggctggagaaaacatactctctttatgggcttttaaarctctgaaaaatcatttgttaaaggagaggtttcaaagaaagtattgtctttctggcttaaagtttatgctttttcatcacataccataaagggagcacatttataatcatattttttaaagaaggtaaaggaatggaattttaatctgaatgcttagagggaagatgagaggcagcaagaagacaaaagcaaaatgggaaagccaaagcagtaagaaaggaaagaaacctcagagatgaatcgtagcaaagaaatatgtttatcattactctcagaatatatagatttttaactaaaatattaagtc

SEQ ID NO: 608643 - DNA, 593 bp, Homo sapiens
ttggcttttacgtttatgcaagactgacttcttgctaagcctttactccaagacatttcacaatggaggtccccagtgtttgtccttgtcattttataggattaatttgatacattgtcattcacctaactgccttgtacctcttgttagtacacaatccctaactaagcctgagtatttgttcttcaaactttctaaaatgactcttccgttcactctcaggatgtatcatttatcataccttcaatggctggagaaaacatactctctttatgggcttttaaagctctgaaaaatcatttgttaaaggagrggtttcaaagaaagtattgtctttctggcttaaagtttatgctttttcatcacataccataaagggagcacatttataatcatattttttaaagaaggtaaaggaatggaattttaatctgaatgcttagagggaagatgagaggcagcaagaagacaaaagcaaaatgggaaagccaaagcagtaagaaaggaaagaaacctcagagatgaatcgtagcaaagaaatatgtttatcattactctcagaatatatagatttttaactaaaatattaagtc

SEQ ID NO: 608644 - DNA, 593 bp, Homo sapiens
ttggcttttacgtttatgcaagactgacttcttgctaagcctttactccaagacatttcacaatggaggtccccagtgtttgtccttgtcattttataggattaatttgatacattgtcattcacctaactgccttgtacctcttgttagtacacaatccctaactaagcctgagtatttgttcttcaaactttctaaaatgactcttccgttcactctcaggatgtatcatttatcataccttcaatggctggagaaaacatactctctttatgggcttttaaagctctgaaaaatcatttgttaaaggagaggtttcaaagaaagtattgtctttctggcttaaagtttatgctttttcatcacataccataaagggagcacatttataatcatattttttaaagaaggtaaaggamtggaattttaatctgaatgcttagagggaagatgagaggcagcaagaagacaaaagcaaaatgggaaagccaaagcagtaagaaaggaaagaaacctcagagatgaatcgtagcaaagaaatatgtttatcattactctcagaatatatagatttttaactaaaatattaagtc

SEQ ID NO: 608645 - DNA, 568 bp, Homo sapiens
tttcattttgattgtttactggctataataacattcacaagtcttacatatctgctatctttttcctacccaaggagctgctactttgtaaggtgtggagaatgggtatttttattccattatatggattagaaaactaaaactgggaatcacttgttatgtcacaaagaaaaattggtagaatttcagtaagaactatagtctcctgatttttcatccaagacwattttatttatccatacagtgtcattgattgagtgcctgttatgtaccaagtattattctgggtcctatgaataacactgtcctgccttttatcctattgttaactatatataaatgtatcaatgagcagtatatatataaatataaatgttacatatgtaaattaaaatatattactggaagacaaaacagttcaaatgaaactgaaactactagtattatcatcccattttcactgttatttgttgttattattgattcagtttaccaggatagttatttccattttaattaccctaaacaataagctccagaagtacaggaattattatctttttcttca

SEQ ID NO: 608646 - DNA, 498 bp, Homo sapiens
aggagaatcgcttgaacctgggaggcagagattgcaccactgcactccagcctgggtgacagagagacactccatctcaaaaaaagaaaagaaaggaaaaaaagaaaagaaaagaaatgttgaggcaaatgaatatacaaacacattttagattagcatttgaattagtaaactgcataaaaaagatccaacatgagctgacatcatccaatccattgagggcccaaatagagcaaaaaggcagaggaagagcaaattctctattcttgagctggagtatccatcttcttctgctctcagatatctgagctcctggttctcaaacattcggattctgggacttacacctccagctctctcagttcccacagttcccaggactttgawttcagactgggagttccaccactggctccaccagttctcaggcatttggattcagactgaattacaccaccagctttcctggctttacatctggcaggtggcagatagtga

SEQ ID NO: 608647 - DNA, 593 bp, Homo sapiens
gatgaacacttagattgattccaygactttgagattgtaaatgatgctgcgataaacataaaagtgtaggtgtctttttggtaaagtgatttcctttcccttaagtagataccaatagtgggattgctgggtcaaagagtagttctatttttagttctttgagaaatctccatactgttttccataggacttgtactaatttacattcccaccagaagtgtatggcattctcttttctgcacatcctcaccaacatctgttatttctttactttttagtaatagccattctgtctggtgtgagatgatatctcactgtggttttaatttgcatttccctgacaattagtgatgttgaacatttttcatatgtttgttggcctcttttctgtcttcttttgagtaatgtctgttcatgtcctttgcccactttttaaaggggttatttttctgttgatttgtttgtattccttatagattctggacattagttctttgtcagatgcatagtttgcaaatattttctctcatttcgtaggttgtctgttaactctgttgcttctttttctgtgcaaaagctctttagtttaattg

SEQ ID NO: 608648 - DNA, 597 bp, Homo sapiens
taggcacagaagacaaattaattttgacccatacctcataccatacttaaaaataaattccaaatggattgcaaacttgtatgtgaaaggtaaaacaatcatacttttagaattaaaagttttagaacatttccaggctttggcgtagacagagcattcttaaaggcaaaaaggtgctaaccccttaaaataataaaattaaaatttgaaaattaagaacttcttatcaaagacacacaacttaaaataaaatcctgcaaagttaaagaagatatttcccattcctatattcaacagagaacttcagactacttaaaggacaactgcaaatcaacatagacaaacaatagaaaaattaggtacttcagaaatagtcaatatacatatataaaagtattcaacttcatcagtaatcaagaaaaggacaatgaaaactacaacgagataccactactcacctgcaatattgactaaaatcagaaaggtcaaccaagttttarctagaatgtggcacagcggaaattctggctgtagaaatacaagttggtacaattactttacaaactggaaagcaatattaacaaaagctgcacatct

SEQ ID NO: 608649 - DNA, 555 bp, Homo sapiens
gagaaatcaacactgattttactaagtaattgtattagtgcattttcatgctgctgataaatacatacccaagacaactgggcaatttacaaaagaaagaggtttaatggacttacagttccatgtggctggagaagcctcactatcagggtggaaggcaaggaggagcaggtcacatcttacatgaatggcagcaggcaaaaagagagtttgtgcagggaaactcccatttttaaaactgtcagatctcctaagacttattcactataacgagaacagcacrggaaagacttgccctaatgattcaattacctcctcgccaggttcctcccacaacatataagaattgtgggagttacaattcaggataagatttgggtggggacacagtcaaaccatatcattcaacccctgacccttcccaaatctcatgtcctcacatttcagaacaaatcatgccttcccaacagtcccccaaagtcttaactcatttcagcattaactcaaaagtttacagtcctaattctcatctgagacaaggcaagtctcttccac

SEQ ID NO: 608650 - DNA, 588 bp, Homo sapiens
gggtccttattatagaaggctacctgccaatcaagaacatcccatttggaatttatgtgagagaaatcaacactgattttactaagtaattgtattagtgcattttcatgctgctgataaatacatacccaagacaactgggcaatttacaaaagaaagaggtttaatggacttacagttccatgtggctggagaagcctcactatcagggtggaaggcaaggaggagcaggtcacatcttacatgaatggcagcaggcaaaaagagagtttgtgcagggaaactcccatttttaaaactgtcagatctcctaagacttattcactataacgagaacagcacgggaaagacttgccctaatgattcaattacctcctygccaggttcctcccacaacatataagaattgtgggagttacaattcaggataagatttgggtggggacacagtcaaaccatatcattcaacccctgacccttcccaaatctcatgtcctcacatttcagaacaaatcatgccttcccaacagtcccccaaagtcttaactcatttcagcattaactcaaaagtttacagtcctaattctc

SEQ ID NO: 608651 - DNA, 588 bp, Homo sapiens
gggtccttattatagaaggctacctgccaatcaagaacatcccatttggaatttatgtgagagaaatcaacactgattttactaagtaattgtattagtgcattttcatgctgctgataaatacatacccaagacaactgggcaatttacaaaagaaagaggtttaatggacttacagttccatgtggctggagaagcctcactatcagggtggaaggcaaggaggagcaggtcacatcttacatgaatggcagcaggcaaaaagagagtttgtgcagggaaactcccatttttaaaactgtcagatctcctaagacttattcactataacgagaacagcacgggaaagacttgccctaatgattcaattacctcctcgccaggttcctcccacaacatataagaattgtgggagttacaattcaggataagatttgrgtggggacacagtcaaaccatatcattcaacccctgacccttcccaaatctcatgtcctcacatttcagaacaaatcatgccttcccaacagtcccccaaagtcttaactcatttcagcattaactcaaaagtttacagtcctaattctc

SEQ ID NO: 608652 - DNA, 537 bp, Homo sapiens
attggataaatacagccattccaaatgggagaaattggtcaaaacaaaggggctacaggccccatgcaagtccaaaatccagtgggaccgccaaatcttaaagctccaaaatgatctcctttgactccatgtctcacatccaggtcayactgatgcaagaggtgtgttcccatgggcttgggcagctccacctctgtggctgtacaggttacaacctccctcccagctgcttacatgggccggcattgagtgtctgtgacttttctaggcacacaatgtaagctggggtctggaggacagaccattctggggtctggaggacagtggccctcttctcacagctccattagttagtgcctcagtagggactctgcatgggccatgcaaccccacatttcccttccgcacttccctagcagagattctccatgaaagccctgcccttacagcaaacttctgcctggacacccaggcatttccatacatcctttgaaatctaggcagaggttcccaaacctcaattcttgacttctgtgt

SEQ ID NO: 608653 - DNA, 537 bp, Homo sapiens
attggataaatacagccattccaaatgggagaaattggtcaaaacaaaggggctacaggccccatgcaagtccaaaatccagtgggaccgccaaatcttaaagctccaaaatgatctcctttgactccatgtctcacatccaggtcacactgatgcaagaggtgtgttcccatgggcttgggcagctccacctctgtggctgtacaggttacaacctccctcccagctgcttacatgggccrgcattgagtgtctgtgacttttctaggcacacaatgtaagctggggtctggaggacagaccattctggggtctggaggacagtggccctcttctcacagctccattagttagtgcctcagtagggactctgcatgggccatgcaaccccacatttcccttccgcacttccctagcagagattctccatgaaagccctgcccttacagcaaacttctgcctggacacccaggcatttccatacatcctttgaaatctaggcagaggttcccaaacctcaattcttgacttctgtgt

SEQ ID NO: 608654 - DNA, 530 bp, Homo sapiens
tataattttatctgtaagcaacagagttgtttcaagttagcaaaatagattgctagaagattatgtattcggtctactacrtgatatccagaatttcacatcctccaatcttaccttaatgtacaggtaaggtgatacagacctgtaggagaccaatgagtgctgacatgttccagtagtctcacacatctacctggaagcagtagtgcagaacagagctgtgctcgacttttcataaaattcactgtaaactgcttttacaatagctaaattatagccaaaatattgttcatggtcaggcttggtgcaagcaggcactggatggttggcctaagaagaattcatacttttggcgttttttccagatgtaactagtgcagcaggagatatctcacttccaagtatgaaagctgtgttctcaacatgcttggcagaggaactcaggctctggattgctaagggtccttagtggtccttaagaactgcacactattcagattattactactaccttgccatgtagatcttaa

SEQ ID NO: 608655 - DNA, 416 bp, Homo sapiens
tacaatcaagatgagatttggatggggacacagccaaaccatatgagagggcaaaggaaaaaaaagaatttaaagatgattccaaggttctgaggctgcttggctagagaaatacttattcagtaattgtgctttcttccctacttcacatttaaatattctttttgacatagctcaagtcctaccatctctgtgaagcctcctttgatgactttgtctaattccttttgccctgattgtctctacttccagctagtacattataagcaccttattctttaattayaattaaattaggattttatcacttcataatataatgcagttctatttaatacagttaagtgtccacctgacttggccacaaatctttgtcctgttttccaaataaataggaaagtcctttgaggatacaa

SEQ ID NO: 608656 - DNA, 416 bp, Homo sapiens
tacaatcaagatgagatttggatggggacacagccaaaccatatgagagggcaaaggaaaaaaaagaatttaaagatgattccaaggttctgaggctgcttggctagagaaatacttattcagtaattgtgctttcttccctacttcacatttaaatattctttttgacatagctcaagtcctaccatctctgtgaagcctcctttgatgactttgtctaattccttttgccctgattgtctctacttccagctagtacattataagcaccttattctttaattataattaaattaggattttatcacttcataatataatgcagttctatttaatacagttaagtgtmcacctgacttggccacaaatctttgtcctgttttccaaataaataggaaagtcctttgaggatacaa

SEQ ID NO: 608657 - DNA, 564 bp, Homo sapiens
  misc_feature 406: n = A,T,C or G
cattacaattaatttctgtgagagaagtaaaatagaattacaatttcagtgattaataaaagctatgtaaaattttcatcaaaaaggagcttatatttgccgggcacagtggctcatgcctgtgatcccagcatctcgggaggctgaggtgggcggatcasctgaggtcaggagttccagacctgcctgaccaatatagcaaaattccacctctactaaaaatacaaaaattggccaggcatggagcaggcgcctgtaatcttagctactcaggaggctgagacaggagaatcacttgaacccaggaggcagaggttgtagtgaggtgagatcaccccagcgccactgcactccagcctgggcgacagaacaagactccatcccccacccccccacccccaaaaangagcttatattggttgtatatttgggtgatgtgtctcatattcttgtgctggatagtgtaataattaattttatgatcaacttgactgggctatgggatgcccagatcgctggtaaaaaattatttctgcatgcatctgtaccagtgtttgcaaaaga

SEQ ID NO: 608658 - DNA, 584 bp, Homo sapiens
gaatccataaacctgagtaaagaatatctgccctcaccagtgcaacatccaggctgctgaggacctgaatagaacaaaattgtggggcaagggtgaattcttcctttcttgttgagctgggacatctacttttttcttgccttcagacatcagagctcttgcttcttggacctttagacttccggacctatactagcactccttccacacccacactctggttctcaggtctttgggctttgaccttgtctcaatcttttggttctgtaataacaaaatacctgagtgagtaaattatgatagaaacttatttttcacagttctagaggctaagaagtccaagatcaaggtgtctggtgagggcctgttctctgcttccgacatgacgcctkgttgttgcatcttcacatggcaaaaagctgatggccaaaaggggcctaactagttccctccagcccttttataagagaactaatccattatgaacatggggccttcatgacctaatcacctcccgaagatcacacctctcaataatgttgcattggagattaagtttcaacatgaatttcagaggagacaca

SEQ ID NO: 608659 - DNA, 584 bp, Homo sapiens
gaatccataaacctgagtaaagaatatctgccctcaccagtgcaacatccaggctgctgaggacctgaatagaacaaaattgtggggcaagggtgaattcttcctttcttgttgagctgggacatctacttttttcttgccttcagacatcagagctcttgcttcttggacctttagacttccggacctatactagcactccttccacacccacactctggttctcaggtctttgggctttgaccttgtctcaatcttttggttctgtaataacaaaatacctgagtgagtaaattatgatagaaacttatttttcacagttctagaggctaagaagtccaagatcaaggtgtctggtgagggcctgttctctgcttccgacatgacgcctggttgttgcatcttcacatggcaaaaagctgatggccaaaaggggcctaactagttccctccagcccttttataagagaactaatccattatgaacatggggccttcatgacctaatcaccycccgaagatcacacctctcaataatgttgcattggagattaagtttcaacatgaatttcagaggagacaca

SEQ ID NO: 608660 - DNA, 584 bp, Homo sapiens
gaatccataaacctgagtaaagaatatctgccctcaccagtgcaacatccaggctgctgaggacctgaatagaacaaaattgtggggcaagggtgaattcttcctttcttgttgagctgggacatctacttttttcttgccttcagacatcagagctcttgcttcttggacctttagacttccggacctatactagcactccttccacacccacactctggttctcaggtctttgggctttgaccttgtctcaatcttttggttctgtaataacaaaatacctgagtgagtaaattatgatagaaacttatttttcacagttctagaggctaagaagtccaagatcaaggtgtctggtgagggcctgttctctgcttccgacatgacgcctggttgttgcatcttcacatggcaaaaagctgatggccaaaaggggcctaactagttccctccagcccttttataagagaactaatccattatgaacatggggccttcatgacctaatcacctcccgaagatcacacctctyaataatgttgcattggagattaagtttcaacatgaatttcagaggagacaca

SEQ ID NO: 608661 - DNA, 484 bp, Homo sapiens
taaatactgagtagctatatgtactaaacactaagttgagtttctaggaatgcagagattttggtgtcaaacaagctagagtaaatgccttcaaggaggcttgtaatctgaaatatgatagggacagacagaatgtcagggaacatgagagaggtttctatgaggaatttagtctgttccccatagctcttcccactgggttcttctctaagtcctgtttaatactgtacatcatcaaatcccaggcctcatacttttacttccatcccrttatttgaataaattctattagcatacacacccacatcacatacgcatgcatgtaacacagattttgtaaagagaactatacatctattttcttggtggggatgttagacttgacacacgttggccacacagaaatatctgacttaaacaagtaacttaattaattgcattgattgtaagtacctttggaaacagaagtgctcatttgttcgta

SEQ ID NO: 608662 - DNA, 512 bp, Homo sapiens
gccaccaaagaaatgatcatgcaataaaaagtgattattaaactgcctcctaggagggtgggtctgggtaaccagtggaattgtatgtgtcattgaccactgcgtggagacttgagcagctaaatttaatctcaggaggtgaataaagctgaattgctgtgcataacaaaagaggaagaaaattgactctccaaaagtaatttcgataaaaaagtgtttatttwaaaatagcaaaaccagaagtctgcatggatgccaggcaagaaaagggcaacatagattgctctctgcctaaatccccaacccattatcattcccattagttgacttggcaaaggaaggagtttggaaagaatgagcatttaaaatcatttaatttgttgtgatgcatttaaattcaccaacacctgagctctcctacaaaagtttgagttaattctcggttgaaaattaatgtttgtgaataagttggttctttaagaagatgcaagaggtgctcactttcacaatga

SEQ ID NO: 608663 - DNA, 584 bp, Homo sapiens
aagtaattctgaatatgaaagtggattgtctttattgtcttctaccaaaaaggaacttgaaactagttaattaagccacrtatgactacaatttgtaaggtagtaagatttcttagaatattataggcttctccatttttaaataattttctcttgaaaatgaaagttcactatcaaaatatcatagtttactttcaagtgtgttgtaatatattaatgctgtgtaatgcaatatttaatgctgtaaaactcagaaattttatttccttaggacacataagcttcacattaatatgctggagttaatgtgcaataaaaggacagtaacttcccctgtctacctgagttataataccagataacattcactgaaaattttaatgtacctgaggcttcttttatgctttgaatatgtctattcttactggtattgttcatctgtgtttgttcataaacatcaaaagaaaaataactaaaatttttgattacattgaatattagccaactgctaaatctcaaaaaaaataaagaaaaaaaaacaagtaggactcagctatatgtttaaactgggaaaagatgtgtta

SEQ ID NO: 608664 - DNA, 604 bp, Homo sapiens
agtagttgaaaatatcagctatttcacctgcttttaatcaaggttttctctggtcctgaactcctgagtctattttccaggtaattgctgtgttgtggagttctrtcctcttcctccactaatatccatctttaatacatctacatcataatcatcttgagttagttgctcaaaacgaatttagacccagacaattgaaataagttttcacttcctgatcattgttagatgagaagatcctgacctaatacctaatagtaactcctttttttctaacttgtttttattgtcttacatatttccattttgtgtgtaaaagatattccatacaccaaaattgtctagcattctagttaaatatccataaagaatgcacatgaacaaaatatctcaaattgatttgcgtttgcttgaatctaattagattctaaccaattgaagtaattacataatatactaagtcagatgagttaagtgctgcttcagaattgcacattgcttttatgaaagcttatttttgtttttaatctacatagaaataaggttgccagatttggtaaacaaaaatatagggcacctagataaatttgaatttcagacaaac

SEQ ID NO: 608665 - DNA, 566 bp, Homo sapiens
agcctttaaaaattcttttctgattttactacagtcagtgtcaggggactcttccattataagctggcacactaatctgtatgactagcatataaattcaacaaacacttctcttttttattcattttattcttttatctacttttgagacagattcttactctgtcatccaggctggagtgaagcagtttgattatgactccctgtagccttgacctcccctgttcaagtgatcctcccacttgagcctctcaagtagctggaaccacaagcacacaccatcatgtctagctaattttttattttttgtagagatgaggtctctccctatgttgcacaagctggtctcaaactcctgggctcaagtgatcccccgacctcagcctcccaaaatgctgggattacagaaatgagctaccaaacattacttttaaatacagtttgacaaatgccattctatatcctacaattgtgstgaagattatttttctggccagaggcactatccgtagagtacaatttgacctgtgttaaagcccaagggtataataacaatgcatactatc

SEQ ID NO: 608666 - DNA, 566 bp, Homo sapiens
agcctttaaaaattcttttctgattttactacagtcagtgtcaggggactcttccattataagctggcacactaatctgtatgactagcatataaattcaacaaacacttctcttttttattcattttattcttttatctacttttgagacagattcttactctgtcatccaggctggagtgaagcagtttgattatgactccctgtagccttgacctcccctgttcaagtgatcctcccacttgagcctctcaagtagctggaaccacaagcacacaccatcatgtctagctaattttttattttttgtagagatgaggtctctccctatgttgcacaagctggtctcaaactcctgggctcaagtgatcccccgacctcagcctcccaaaatgctgggattacagaaatgagctaccaaacattacttttaaatacagtttgacaaatgccattctatatcctacaattgtgctgaagattatttttctggccagaggcactatcygtagagtacaatttgacctgtgttaaagcccaagggtataataacaatgcatactatc

SEQ ID NO: 608667 - DNA, 431 bp, Homo sapiens
aatccttgtatgatctccaagtaaaataataacatgaggttgagaattataacagattgtatttttccaaagattgctcattcatatgtggccctgcttgccatgtaatgtcatgctcctccactgagaagtgggatctctgtgtcttctgctttatcttgcatgracttttgtaactgcctccatcaacagagtataatgtttaaatgctgtacagagctaaactgatgttatgtgtaatactgtacagaatttaaatgatgtgataacagtcaaggcaaagctacaaaatacaattcagcttccatctgtttcttgaaatacaactttgaagttctgaaccactttgtaagaagtctagctataatgaagttttggtgcagcagagaccactttgagatagaaatgcccagggatctccagttgttcta

SEQ ID NO: 608668 - DNA, 431 bp, Homo sapiens
aatccttgtatgatctccaagtaaaataataacatgaggttgagaattataacagattgtatttttccaaagattgctcattcatatgtggccctgcttgccatgtaatgtcatgctcctccactgagaagtgggatctctgtgtcttctgctttatcttgcatgaacttttgtaactgcctccatcaacagagtatartgtttaaatgctgtacagagctaaactgatgttatgtgtaatactgtacagaatttaaatgatgtgataacagtcaaggcaaagctacaaaatacaattcagcttccatctgtttcttgaaatacaactttgaagttctgaaccactttgtaagaagtctagctataatgaagttttggtgcagcagagaccactttgagatagaaatgcccagggatctccagttgttcta

SEQ ID NO: 608669 - DNA, 648 bp, Homo sapiens
atccttgtatgatctccaagtaaaataataacatgaggttgagaattataacagattgtatttttccaaagattgctcattcatatgtggccctgcttgccatgtaatgtcatgctcctccactgagaagtgggatctctgtgtcttctgctttatcttgcatgaacttttgtaactgcctccatcaacagagtataatgtttaaatgctgtacagagctaaactgatgttatgtgtaatactgtacagaatttaaatgatgtgataacwgtcaaggcaaagctacaaaatacaattcagcttccatctgtttcttgaaatacaactttgaagttctgaaccactttgtaagaagtctagctataatgaagttttggtgcagcagagaccactttgagatagaaatgcccagggatctccagttgttctagctctcagccatttgagtcaaacctctagacaggtaagtcagaagttttcagaagattcttgccctcaaccatgaactccctcagccatgatgagtgaaaaagaaataaaatatcctcacagagccctctccataatgccagtttttgtgatgtaagcaaaatacatgatgttttaaatcactaagctttaggtttgtggtgcagtcacagcaactga

SEQ ID NO: 608670 - DNA, 464 bp, Homo sapiens
gaatctgtggaattctaagaatccttgtatgatctccaagtaaaataataacatgaggttgagaattataacagattgtatttttccaaagattgctcattcatatgtggccctgcttgccatgtaatgtcatgctcctccactgagaagtgggatctctgtgtcttctgctttatcttgcatgaacttttgtaactgcctccatcaacagagtataatgtttaaatgctgtacagagctaaactgatgttatgtgtaatactgtacagaatttaaatgatgtgataacagkcaaggcaaagctacaaaatacaattcagcttccatctgtttcttgaaatacaactttgaagttctgaaccactttgtaagaagtctagctataatgaagttttggtgcagcagagaccactttgagatagaaatgcccagggatctccagttgttctagctctcagccattt

SEQ ID NO: 608671 - DNA, 610 bp, Homo sapiens
tgtcatgctcctccactgagaagtgggatctctgtgtcttctgctttatcttgcatgaacttttgtaactgcctccatcaacagagtataatgtttaaatgctgtacagagctaaactgatgttatgtgtaatactgtacagaatttaaatgatgtgataacagtcaaggcaaagctacaaaatacaattcagcttccatctgtttcttgaaatacaactttgaagttctgaaccactttgtaagaagtctagctataatgaagttttggtgcagcagagaccactttgagatagaaatgcccagggatctccagttgttctagctctcagccatttgagtcaaacctctagacaggtaagtcagaagttttcagaagattcttgccctcaaccatgaactccctcagccatgatgagtgaaaaagaaataaaatatcctcacagagccctctccataatgccagtttttgtgatgtaagcaaaatacatgatgttttaaatcactaagctttaggtttgtggtgcagtcacagcaactgaaacagagatgtctactccatacaattaccctgattgagtaaayatggcaaagaacagctacataattca

SEQ ID NO: 608672 - DNA, 608 bp, Homo sapiens
gaacaccctcctttactcatatgcagctgttctcacacaaaatattaaccccaaactataaatgtcacacaaaaggaagtggtcttgattttgcatgtgggacagcatgttctataaatgctgaaaggtgggagaagcacaaacacagtccactctttaaaaaaaatacttcaaagtagaattttctatcccctccattctccagtaaaaaagtagtgctgggatctggcagccagatttggtttttatcctgaccatttacaaagtgttcccccatatgacttgcatcattagggttatagataataataattaattcacttggaagaaaattgtgtctagtccttcctcctcttcttgccttcatgctcatattccatggggcggctgctatctgagggwcttttagagccaccgtgctgtttcacttcttccaaaaacttgtccaaaccaaaaggatcttcctcaaactgaactggtccttctcggcctctctgcttacagcctgaaccagaaaactctttgtcgggaacaaatctgttggtctttattctgggttctaggtcatcgttatacatgtccttgtccagatttttactgggcctata

SEQ ID NO: 608673 - DNA, 611 bp, Homo sapiens
atctgtctaatactgtcagtggggagctaaagtctcccactattattgtgtggttatctaaatgtcttcatagatctctaagaacttactttatgtatctaggtgttcctgtgttgagtgtgtatatatttaagatagttaggttttcttgatgaattgagccctttatcatcatgtacttcccttctttgtcttttttgatctttgttaatttaaagtccatgttgtctgaaattagaatagcaacatctgcttttcctttttttccatttgcttggtagacttttctccaccyctttattttgagcttatgggtgtcattgtatgtgagatgggtctcttgaagacagcataccactgggttttgcttctttatccaactttccattctgtgccttaaattggggcatttagcccatttacaccaaaggttagtattgatatgtgtgtatgtgttactgacatcatgatattagctggttattatgagacttatttgtgtggttgctttatagtgtcactgatttatatacttgtgtatgtttgtagtgactggtaacagtctttcctttccatatttagcactcttttcaggacctcttgtaaggcag

SEQ ID NO: 608674 - DNA, 536 bp, Homo sapiens
ggctttaaatcattcctccccagggactcaagatagaaggcagggygcaagacacttggtccagtgactaaggcccgttctcatccagctctttttcctttcaagtttagatgatctttattaagtaggatatggaggcaggggaaacagtgttaccttattattattttaaataattctgttcttacccagggatttaccaaaggattggtttgacctttaaaagcaagaattttacatttttcttctctattatgacttgcccctatggtaatgagctaccctaaggaaagatgatcacaaggcaaaaaggaagagagagaaaaacatgccagttaatatagtaccatatcaacccatcttagcacttttaggagatgagaaaaataatatttcgacaataatggtttacagcagtaagactctgttgttttcaagtattttcacatcatctcatttaattctcacaatggctctctggggctgggctcatttgcagatgtggaagtgtagttatattttcatttaatatgctg

SEQ ID NO: 608675 - DNA, 571 bp, Homo sapiens
agctggaagatagaagtaggagagacaagaaaatggaataggatgaagcaataagatgaaagggattaattacaaggtgctgtgtctatttcccagtcctgcccttttgactagttctgaaccttagagaaagagagctgtaattaaaaaatggaaggagctcttgtcaggagggactttatgagattctgctccaggtctcaggtgataaaatatacagaatgaggagaggktgttctctcagtatctgcctgtagcagcctggctttatcttagacaacactcagaagatgcaattgtgagcacagcttaatagttttcatgaaagtccatcctgggttcagcctcttgcatagttatagaggctgaaaaggctgtgaggaaaaatgggaagaaaagctcatcatagtttcacagaaagggaagcaaatcattttcttttcttaaaaactgaatggatcatttgaggtcaggagtttgagaccagcctggtcaacatggtgaaaccctgtctctactaaaagtccaaaaaatagccaggcatggtggcgagcgcctgtaatcccagcta

SEQ ID NO: 608676 - DNA, 571 bp, Homo sapiens
agctggaagatagaagtaggagagacaagaaaatggaataggatgaagcaataagatgaaagggattaattacaaggtgctgtgtctatttcccagtcctgcccttttgactagttctgaaccttagagaaagagagctgtaattaaaaaatggaaggagctcttgtcaggagggactttatgagattctgctccaggtctcaggtgataaaatatacagaatgaggagaggttgttctctcagtatctgcctgtagcagcctggctttatcttagacaacactcagaagatgcaattgtgagcacagcttaatagttttcatgaaagtccatcctgggttcagcytcttgcatagttatagaggctgaaaaggctgtgaggaaaaatgggaagaaaagctcatcatagtttcacagaaagggaagcaaatcattttcttttcttaaaaactgaatggatcatttgaggtcaggagtttgagaccagcctggtcaacatggtgaaaccctgtctctactaaaagtccaaaaaatagccaggcatggtggcgagcgcctgtaatcccagcta

SEQ ID NO: 608677 - DNA, 571 bp, Homo sapiens
agctggaagatagaagtaggagagacaagaaaatggaataggatgaagcaataagatgaaagggattaattacaaggtgctgtgtctatttcccagtcctgcccttttgactagttctgaaccttagagaaagagagctgtaattaaaaaatggaaggagctcttgtcaggagggactttatgagattctgctccaggtctcaggtgataaaatatacagaatgaggagaggttgttctctcagtatctgcctgtagcagcctggctttatcttagacaacactcagaagatgcaattgtgagcacagcttaatagttttcatgaaagtccatcctgggttcagcctcttgcatagttatagaggctgaaaaggctgtgargaaaaatgggaagaaaagctcatcatagtttcacagaaagggaagcaaatcattttcttttcttaaaaactgaatggatcatttgaggtcaggagtttgagaccagcctggtcaacatggtgaaaccctgtctctactaaaagtccaaaaaatagccaggcatggtggcgagcgcctgtaatcccagcta

SEQ ID NO: 608678 - DNA, 571 bp, Homo sapiens
agctggaagatagaagtaggagagacaagaaaatggaataggatgaagcaataagatgaaagggattaattacaaggtgctgtgtctatttcccagtcctgcccttttgactagttctgaaccttagagaaagagagctgtaattaaaaaatggaaggagctcttgtcaggagggactttatgagattctgctccaggtctcaggtgataaaatatacagaatgaggagaggttgttctctcagtatctgcctgtagcagcctggctttatcttagacaacactcagaagatgcaattgtgagcacagcttaatagttttcatgaaagtccatcctgggttcagcctcttgcatagttatagaggctgaaaaggctgtgaggaaaaatggkaagaaaagctcatcatagtttcacagaaagggaagcaaatcattttcttttcttaaaaactgaatggatcatttgaggtcaggagtttgagaccagcctggtcaacatggtgaaaccctgtctctactaaaagtccaaaaaatagccaggcatggtggcgagcgcctgtaatcccagcta

SEQ ID NO: 608679 - DNA, 591 bp, Homo sapiens
tgatctttcaaacttctttaagaagtctcagtacatctttgaaatccaagtgttttatttttagtgtttcactttgctctttttattagctgaaatgaccttcttgaattattgtggcatasaggaaagaggaagaaggaaaaagtcatctgaagaagtgttctttctaagcggttcatctattccacgtccttacaaataattcaactgtgtttattctcaaccaaaactctgctattattctaatgatggacagcctgttctttacagttctatcatatttcctgatccgtgccaattgcctagatggagctatgaatgtggtcacagtgataggtggctgtgagggttttgtgagaggcattttcttctgcagggcagatgaagtgcttggaatggaggattaaaaaaatagtaaagctcatttccattgcattatgtattttgatgtatttctaatgtattccttttcaaaacttatcttcactggagtagaggtaaagacagaatgagcaacagttgctgtttcatgcacatcaagtagccatttttaaaactcttaaaaatgcagcaaagcaatttaaaaagagc

SEQ ID NO: 608680 - DNA, 591 bp, Homo sapiens
tgatctttcaaacttctttaagaagtctcagtacatctttgaaatccaagtgttttatttttagtgtttcactttgctctttttattagctgaaatgaccttcttgaattattgtggcatacaggaaagaggaagaaggaaaaagtcatctgaagaagtsttctttctaagcggttcatctattccacgtccttacaaataattcaactgtgtttattctcaaccaaaactctgctattattctaatgatggacagcctgttctttacagttctatcatatttcctgatccgtgccaattgcctagatggagctatgaatgtggtcacagtgataggtggctgtgagggttttgtgagaggcattttcttctgcagggcagatgaagtgcttggaatggaggattaaaaaaatagtaaagctcatttccattgcattatgtattttgatgtatttctaatgtattccttttcaaaacttatcttcactggagtagaggtaaagacagaatgagcaacagttgctgtttcatgcacatcaagtagccatttttaaaactcttaaaaatgcagcaaagcaatttaaaaagagc

SEQ ID NO: 608681 - DNA, 587 bp, Homo sapiens
agcagcaaatttatatgtactttgttacatattttaaaaggcaagtaaaatataaattttatatggttactaatgggaagaggggagaaatttatttgaaggggcagagaaggaagatagattctttgactatacattattttgtagatttgatctttgaaccacataaatgctaaacataaatataaaaccaaattaacttaacaattcaattcctaaatttaatttaattagtgaactgttatggttataatacaagaataaactattctgattgactttaaaatacaataatttgtacacccctccaaggatacatgatacaacctaaacacactataaaaatatgctaaaatgttttaattgtttccagttttgattgtgattatatgaaaygatattaagtgtgattatgatgagattgttcatggtactgatagagcttttatactgaggttactatagatgttatataagataaaggaaatgagctgtgacatgatattctgttacctccagtgtttttgagaatgagaattctcagtttgggtgaaagcagatatacgagtgatagaaaagagagtaag

SEQ ID NO: 608682 - DNA, 584 bp, Homo sapiens
aaagtgtgtgtgtgtgtgtgtgtgtgtgtgtgtgtgtgtgtgtgtggtcattttcaagttcttattattcttcctttaccccacccccaccccaaccccaaattgtcatttttgctttttctaaaatacttttttaaagatttttttattaagtttctcaggaggaatattcatttcttatttcaattatggcatttgtcatgttttttaatgtaatacatttcaatgcttctttctataaaaatttagaaaggtaagatctaaaatatcttttgaaaatcataaattgtttttctgtcaaccatatggccaaatcatcatttgtgctttaaaataactggatcaaattcctactgggattttacttggtaatataagtcagtctattataaaaacttttcagaagatcagagtaaaccaatgtcatttaaaataagtacamcttatttaaaagatatttaaaagtacaacttaagaaaaatcacctcaacctatatatctagaaatttaaataaatacattttattattttataaatatctaaaatagataattatgtccagttgtggtggctcacacctgta

SEQ ID NO: 608683 - DNA, 584 bp, Homo sapiens
aaagtgtgtgtgtgtgtgtgtgtgtgtgtgtgtgtgtgtgtgtgtggtcattttcaagttcttattattcttcctttaccccacccccaccccaaccccaaattgtcatttttgctttttctaaaatacttttttaaagatttttttattaagtttctcaggaggaatattcatttcttatttcaattatggcatttgtcatgttttttaatgtaatacatttcaatgcttctttctataaaaatttagaaaggtaagatctaaaatatcttttgaaaatcataaattgtttttctgtcaaccatatggccaaatcatcatttgtgctttaaaataactggatcaaattcctactgggattttacttggtaatataagtcagtctattataaaaacttttcagaagatcagagtaaaccaatgtcatttaaaataagtacaccttatttaaaagatatttaaaagtacaacttaagaaaaaycacctcaacctatatatctagaaatttaaataaatacattttattattttataaatatctaaaatagataattatgtccagttgtggtggctcacacctgta

SEQ ID NO: 608684 - DNA, 495 bp, Homo sapiens
ttgtataagactataagatgtagcttcctaaaatctaaagctctcagaagtgccttcattactgcacatgactaggtgagctggttcctggcctcagcaggatgtgggtgagactcgggtccatcagacacatgtccattcccagagtggaaaggatrgggtagtgctggggctggagtcagtcagtggcaataggagaaagtcctagcagaagagaagcacctccaaaggtccagcagtagaaaaagggagccagggacagactgagttgtcttttagccacatctctcaatcagctggagggagatctgttaaatggatgggggaacagtgattaaggtacggattctaagattaggggaagagccaaaaaaagactttaggcttggatttaactggattcccccccaaaaaagttaccaaaatgtggtatcagaaacacacactaaggctaattttttaggaaggtgagcagagtccgaatatcaaaaacag

SEQ ID NO: 608685 - DNA, 495 bp, Homo sapiens
ttgtataagactataagatgtagcttcctaaaatctaaagctctcagaagtgccttcattactgcacatgactaggtgagctggttcctggcctcagcaggatgtgggtgagactcgggtccatcagacacatgtccattcccagagtggaaaggatagggtagtgctggggctggagtcagtcagtggcaataggagaaagtcctagcagaagagaagcacctccaaakgtccagcagtagaaaaagggagccagggacagactgagttgtcttttagccacatctctcaatcagctggagggagatctgttaaatggatgggggaacagtgattaaggtacggattctaagattaggggaagagccaaaaaaagactttaggcttggatttaactggattcccccccaaaaaagttaccaaaatgtggtatcagaaacacacactaaggctaattttttaggaaggtgagcagagtccgaatatcaaaaacag

SEQ ID NO: 608686 - DNA, 507 bp, Homo sapiens
ctcgacatgggcagttatgtgggacccgttccccaccacccttgccaagcctccaagttctattatgagccatggccccacatttgtaaatggctaggaggattgttctcccatgtgtaagatgttctcccccaatttctacccagcttacacctctgcaatacaatctccaagccttggctccttggccagggccttagaactgatgacccagtactttaacaactgggactatgtctacgacaacatactagatcaggatgaaaacgaattgagtaaattaaagggaggcccatattcctatagtggcaaatggggacaatgagcaaatgtccttccactgtgtttccaaaatccatctacaaagacagagagaaaagagagagggaaagaggcagagagacagagtcaaagagagaaagaaaaagatggaagtagtaaagaaaaaagygtgccctattcctttaaaagccagggtaaatttaaaacctataattgataattgaa

SEQ ID NO: 608687 - DNA, 614 bp, Homo sapiens
gcaggattggaactcggttttgtctaactccagagtccatgctctctcttctataccagcactatcgaacagagcattctgcaatgatggaaatgttctatatctgcattgtgcaatatagtaggctstagccctctgtggctattgtgtacttgaaatgtggctagtgcaatggaggaaagaaatgtttaattttatataatttcaattaacataaattaaaatcatcttacgtagttagtgactgccatagtagatggcttaacttatgccatgaaaattaactatgacaaggactcaattatagacctcctcgtctctttttctcttcctcctatccctctcctttttcctacattcattatttactgaggtccaaccatatataaggcagagcatggatgaggaggtggggtggagaaaagatggtcagtcctggtgcctgctctggcttctgttcaaggtagggagtttagacatgtgcataaataactaaaatacaaagttgaaggtttaatgttctaagtgccctgagagaggagcagataagggatgaggagataatgaggctcaccctggctccttatggactgtcaggaaaacatgagataact

SEQ ID NO: 608688 - DNA, 614 bp, Homo sapiens
gcaggattggaactcggttttgtctaactccagagtccatgctctctcttctataccagcactatcgaacagagcattctgcaatgatggaaatgttctatatctgcattgtgcaatatagtaggctgtagccmtctgtggctattgtgtacttgaaatgtggctagtgcaatggaggaaagaaatgtttaattttatataatttcaattaacataaattaaaatcatcttacgtagttagtgactgccatagtagatggcttaacttatgccatgaaaattaactatgacaaggactcaattatagacctcctcgtctctttttctcttcctcctatccctctcctttttcctacattcattatttactgaggtccaaccatatataaggcagagcatggatgaggaggtggggtggagaaaagatggtcagtcctggtgcctgctctggcttctgttcaaggtagggagtttagacatgtgcataaataactaaaatacaaagttgaaggtttaatgttctaagtgccctgagagaggagcagataagggatgaggagataatgaggctcaccctggctccttatggactgtcaggaaaacatgagataact

SEQ ID NO: 608689 - DNA, 614 bp, Homo sapiens
gcaggattggaactcggttttgtctaactccagagtccatgctctctcttctataccagcactatcgaacagagcattctgcaatgatggaaatgttctatatctgcattgtgcaatatagtaggctgtagccctctgtggctattgtgtacttgaaatgtggctagtgcaatggaggaaagaaatgtttaattttatataatttcaattaacataaattaaaatcatcttacgtagttagtgactgccatagtagatggcttaacttatrccatgaaaattaactatgacaaggactcaattatagacctcctcgtctctttttctcttcctcctatccctctcctttttcctacattcattatttactgaggtccaaccatatataaggcagagcatggatgaggaggtggggtggagaaaagatggtcagtcctggtgcctgctctggcttctgttcaaggtagggagtttagacatgtgcataaataactaaaatacaaagttgaaggtttaatgttctaagtgccctgagagaggagcagataagggatgaggagataatgaggctcaccctggctccttatggactgtcaggaaaacatgagataact

SEQ ID NO: 608690 - DNA, 614 bp, Homo sapiens
gcaggattggaactcggttttgtctaactccagagtccatgctctctcttctataccagcactatcgaacagagcattctgcaatgatggaaatgttctatatctgcattgtgcaatatagtaggctgtagccctctgtggctattgtgtacttgaaatgtggctagtgcaatggaggaaagaaatgtttaattttatataatttcaattaacataaattaaaatcatcttacgtagttagtgactgccatagtagatggcttaacttatgccatgaaaattaactatgacaaggactcaattatagacctcctcgtctctttttctcttcctcctatccctctcctttttcctacattcattatttactgaggtccaaccatatataaggcagagcatggatgaggaggtggggtggagaaaagatggtcagtcctggtgcctgctctggcttctgttcaaggtagggagwttagacatgtgcataaataactaaaatacaaagttgaaggtttaatgttctaagtgccctgagagaggagcagataagggatgaggagataatgaggctcaccctggctccttatggactgtcaggaaaacatgagataact

SEQ ID NO: 608691 - DNA, 566 bp, Homo sapiens
gattacataattgcatttgttaatgtcttcaggagatggctggtgggtgagtgcccatggactagagtgcccaagctgagagggcccttggggctcatccatcaaattctctatcttgcagatggggagactgaacttcagctaagtgtagtgacttgctcaggccacatagcaaactggtgtcttaattaaaaggtttgggctrggcgcagtggctcacgcctgtaatcccagcactttgggaggccgaggcgggcggatcacgaggtcaggagatcgagaccatcctggctaacacggtgaaacctcgtctctactaaaaatacaaaaaattagccaggcgcagtggcaggcgcctgtagtcctagctactcaggaggctgaggcaggagaatgtcatgaacctgggaggcagagcttgcagtgagccgagatagcgccactgcactccagcctgggcgaaagagcgagactccgtctcaaaaaaaaaaaaaaaaaaaaagtttgtgtccatttctggtaccagaagtgtacaacctaagaagcttgaagggagggcacattcc

SEQ ID NO: 608692 - DNA, 578 bp, Homo sapiens
gattacataattgcatttgttaatgtcttcaggagatggctggtgggtgagtgcccatggactagagtgcccaagctgagagggcccttggggctcatccatcaaattctctatcttgcagatggggagactgaacttcagctaagtgtagtgacttgctcaggccacatagcaaactggtgtcttaattaaaaggtttgggctaggcgcagtggctcacgcctgtaatcccagcactttgggaggccgaggcgggcggatcacgaggtcaggagatcgagaccatcctggctaacacggtgaaacctcgtctctactaaaaatacaaaaaattagccaggcgcagtggcaggcgcctgtagtcctagctactcaggaggctgaggcaggagaatgtcatgaacctgggaggcagagcttgcagtgagccgagatagcgccactgcactccagcctgggcgaaagagcgasactccgtctcaaaaaaaaaaaaaaaaaaaaagtttgtgtccatttctggtaccagaagtgtacaacctaagaagcttgaagggagggcacattccattaacacagat

SEQ ID NO: 608693 - DNA, 497 bp, Homo sapiens
catagtacatgcaataattttttaatgaatgaagtgattccaaatagcaaagcctgttacatttgaatacctgccttcctggccacatggccaaagctgctggcccaacctgagtctggtgtccatcccgggtccatttgatttctttctctaaggaatttggaattgagagttggagatggagtcagttgactgtaggaaacaagaccaagtcctctgaagttcaaggctatttctcttcccctggctataaaacaaattaccttagtagtgtatgtcaaccatttatttagctcatggattctgagggtctggaatttagaaagggcacagtggggacaacttatttctgttctactatatctggggtcttaggttgaacatgtaaaagttrgaggctagaattattgaaaaaccttatttactcatgtctggctgttgatggcagctgtcagctgatagcctcagtacctttccatgtggtctgatcacatggg

SEQ ID NO: 608694 - DNA, 509 bp, Homo sapiens
agtagtcacccagcatataacttgcatagtacatgcaataattttttaatgaatgaagtgattccaaatagcaaagcctgttacatttgaatacctgccttcctggccacatggccaaagctgctggcccaacctgagtctggtgtccatcccgggtccatttgatttctttctctaaggaatttggaattgagagttggagatggagtcagttgactgtaggaaacaagaccaagtcctctgaagttcaaggctatttctcttcccctggctataaaacaaattaccttagtagtgtatgtcaaccatttatttagctcatggattctgagggtctggaatttagaaagggcacagtggggacaacttatttctgttctactatatctggggtcttaggttgaacatgtaaaagttagaggctagaattattgaaaaaccttatttactcatgtctggctgttgatgscagctgtcagctgatagcctcagtacctttccatgtggtc

SEQ ID NO: 608695 - DNA, 621 bp, Homo sapiens
ccctattcttctcttggtctctccctttcttttctctctagagcccctggggcatatgggtagaaaatagtttgaaaacccctgggttagaggctaagggccttcttsccactgagattgtctaagagtcattcctttccattctgtcttaggccacaagttttgaatgacagtttaaaaggtgggtgctaagtgataaatgtctagctttcagaccaggggacagaaatccttggcccggtctgcctaggatcttaatatattaaaaggcatgaaaagaaacgggaatatctataggtagtgaaattgaccagaaagacaattctgcagccttgctagatttgtgattatagggaaattatttctctgtgggcctcagtttcaaatatgtctaaaggagttaggaatccctgtcttgctttctttcgggaaggattaaaatcacctaagatcataggaaaattctttggtgcctatgccagagtatagtaatattattacaggcaacatactacccatgtttattgtgagaataaaatgaggctgtatataaactctctcatatactgtcaggcacaaacattagctacaattatttgccattgaataggtccccaaaaa

SEQ ID NO: 608696 - DNA, 615 bp, Homo sapiens
aaacactgtaaaaaagagaaagggaaaagattgcattcttctcatcacttgatactgaacaaatatttattatatgtctaccatgtgccagctattaccctgggcactggatgcctaaggaaataagacatcaaccctgcccacatggaactcacagctaagcaggcagtgtaataagcactatggtcaaaacatgcagattagggcccccactgcagacttgggaaggttcccaagaaaatggcaatcaagctgagacctgagggatcatctcagagttactcatgtgagaatggtcaggagcagaggagggaagagtgtgttcccrtcagaggaaatgagtgagaaagcacagaggtaagaaagagcattggctattaaaacatgacatgtctctgcagtgggagcattgagaatgcagaggagtgatcatcgggatgctgcacaaataggcaaaggccctacagtgaagggacttaggagccatgctggatgctcagaccttttcctaagagcgctaaagatccagtcctttaagaaagatcctaaccaaaaatcctccatagatggatcctgtctgccacattcattactcaggagtctcctaagtcccag

SEQ ID NO: 608697 - DNA, 592 bp, Homo sapiens
  misc_feature 577, 578, 579, 580, 581, 582, 583, 584, 585, 586, 587, 588,589, 590, 591, 592: n = A,T,C or G
ccactgccctaaagcatacaactctcatcaaccatctcatcaacctcctcactttatgaatagaaaaacctgggtcctgcccaatgtcacgcacttcatcacattttcatttcagttaaattttgtttgtgtatctacagtgtgtcaggaacagggctatcttactggaatctaaagttagcagaggatctaacaatgacacatggggtgcagaaatcttgggaaggaggcaggaccacaactctgtcccatgcgatagagtgaaaaggaggagattctagagtcagaccaaccaaggttcacttcctggttctgcccctgtgaggtcttgggcaagtcacttaaacaatgagagtctttttaaactcattgcaaagtgggaacaatagtgtctacctagtgatggtgtagagagggttaaccaagagactgaacagaaagcctacagaggacatgagaggcacttgaaaattattagcaccttttaagcagtttgaggatgattagagcttggtctggaaaataactctgcaagtgaactgsaggccttgctggctgagctccatgggccaggggnnnnnnnnnnnnnnnn

SEQ ID NO: 608698 - DNA, 477 bp, Homo sapiens
tcacaggcctttagattcaggttgaattacatcaccagctttcctagttttccagcttaccaacagcagatcatgggacaacctagtctccataaccatgtaagccaatgcctattatctctttaaatatctctgtgtatattccattggttattttcctctggagactcctaatacagctatatacatttaaacttcaaattcaacagtcatggtcatttagaacatgtagtgtttcsttaatctgcaagagatggtgaggaagaagaaatgacaacttatgaaaattattctactgcaggtatgatggctaaattttacatgccaatttgattggtcaccatggggtgcccaggtaatttcattaaacctcgtgtctgtgtttctggagaagattagcatttgaagtagcagactgggtaaagcagatagccctcctcaatgtgagtgtgcatcattccatccatgtaggaccta

SEQ ID NO: 608699 - DNA, 477 bp, Homo sapiens
tcacaggcctttagattcaggttgaattacatcaccagctttcctagttttccagcttaccaacagcagatcatgggacaacctagtctccataaccatgtaagccaatgcctattatctctttaaatatctctgtgtatattccattggttattttcctctggagactcctaatacagctatatacatttaaacttcaaattcaacagtcatggtcatttagaacatgtagtgtttccttaatctgcaagagatggtgaggaagaagaaatgacaacttatgaaaattattctactgcaggtatgatggctaaattttacatgccwatttgattggtcaccatggggtgcccaggtaatttcattaaacctcgtgtctgtgtttctggagaagattagcatttgaagtagcagactgggtaaagcagatagccctcctcaatgtgagtgtgcatcattccatccatgtaggaccta

SEQ ID NO: 608700 - DNA, 620 bp, Homo sapiens
taggagcaagcaatggcagattctacaggtgtggacatacacagaagtgtggtcaggcttccagcagctgccaaatgccttgttctcacaacactcacccctgactacttctgctactagtttttcctcatgcttttattgagaacaactttatattgcatatatgtatgtatggatggatgggaaccatacacatatgtggcttgtttgagtcttgcctagtagctgatcctcaggctgtttgatcatgatttttacattgtacagmagcccagacatcagggagatatatgcaatagaaactgcaaagacaaacatgaataaaaaggcgcctggctcacgggccaaacttgatttcataatgggtattgaaaccaggacccaatcaaaaggtccactctccaggccaggtaacgagatgctgacatatcctctgttgcagtccaaataaacacaagaccctgcattgcatcttgatacctatgcaatgttctctgaaccaccgctttccctcatctatgtgtgtgagtacacaatacacacacattctacaaagaattcacgctgattgtcaacaggcttgtttcgatattgctgcagtcaggtatacgaaaaagtaa

SEQ ID NO: 608701 - DNA, 456 bp, Homo sapiens
tccttcccccttcttttcatttcattcccccaatattgtcatccgtatcacaactatatgtgttgtaaattcarttttactgaattatagctattgcttatgctttttttgaataaattaatagatgaaattaataggtgaatttctttttttaaagaaattaatagatgaataaaagtgcatattctggaatttttcattcgtactgtggatccaggtaatcatacagtatcatctcctttcaaccttaaggattttagtatttcttgtaggtcaagtatgctggcaatgaattcctttagcttttgtttatttggggaagtttcttcatttcacttttaacttttgaagaataattttactgggtatagaattcttgattgacaatttttctttcaacattttgaataaatcatccacttctacctggactctcttgtaaccatgaattgtttc

SEQ ID NO: 608702 - DNA, 456 bp, Homo sapiens
tccttcccccttcttttcatttcattcccccaatattgtcatccgtatcacaactatatgtgttgtaaattcagttttactgaattatagctattgcttatgctttttttgaataaattaatagatgaaattaataggtgaatttctttttttaaagaaattaatagatgaataaaagtgcatattctggaatttttcattcgtactgtggatccaggtaatcatacagtatcatctcctttcaaccttaaggattttagtatttcttgtaggtcaagtatgctggcaatgaattcctttagcttttgtttatttggggaartttcttcatttcacttttaacttttgaagaataattttactgggtatagaattcttgattgacaatttttctttcaacattttgaataaatcatccacttctacctggactctcttgtaaccatgaattgtttc

SEQ ID NO: 608703 - DNA, 557 bp, Homo sapiens
aaaaaataataataacaaggcatacaaagaaataaagtatggccctttcaaagaaaaaaataaaaatcaacagaactctccctgaaaaaatatctgatagcagatctactagacaaatactttaaaacaactgtattgaaaatactttgaaaactaaagggagatctgaagaaaatcaagaaaatgatatatgagccaaatggaaatatcaaagaaagagaacctaaaatgaaacaaaaaaaaaattctggggctaaaaggtagaataattgaaatgaaaatttcaccagggggacacaaaggcagatttgagtagaasactaaagaatctgtgaaactgaacatgggatgatagaaattatgaagtcttagaaaaaagagaaaaaaaagaaaaaagagtaaagaaaagtgaatagttcaagggaccgatgggataccaccaagcagatcaacatatgctttgtcagagatacaaaggagaagaaaggagcagagagaatatttgaaaatgtaatggctgaaaacttcccaagtttaatgaaatatataaatataaa

SEQ ID NO: 608704 - DNA, 569 bp, Homo sapiens
tatttcataattaaaagaatagcttaagtctataataatcactcctacctctgtgctactcttgtactgagccacactctcttgttatactctgcttctgcgggcatagaggtgagaaaaaactgcaaataaatcctaagttgtttacggtagtaggcagtctcccatacccttacagtacccagtatacgtgcgtgctcaataaatgtttattgataagagatgtccttacttcccaagattccctgtgctttcaaagctcaaaagacctgaaactctcaaagctccctgtacttttccattccatccaacattcatcaaacttgactataaatactcagttaacatctactttgcattgtgaggacagggagggtatctggtatataacacccccaggttatgttcttatgaactgaaactaatttataaagttcttagtatccattcttcactatcggtaactatmcaagattagccattcccaccagacatgaaacataaattgggttcacctcatccattacttgccttcaagagtgacattccaggtctgctccttcttggtt

SEQ ID NO: 608705 - DNA, 583 bp, Homo sapiens
cggaggaaagcagccctatgcaatgattgattccctatttagataacctgagggaactccctctgagggtcttgctgaggtctgatctcctgcctagagtgtattaaaggaaagaggagaaactgagccattccatattaacatccagataggctgtaggatcacttttaagtttgtctgatgaaattgtgttcagcttatagtatgcacccccttccttattttgcacagcttttgaggatagcaccataagcaatgcctgtggccgtagatccttggcccttcatcaccttcaacatcccagtccaccctcactttttaatgtcaacagcttacatagtctttttttttttaatataaaactccaaatgtactacaagggtcctcttctgatycagctggcagtccaaagctctgcctgtttataaatactatcatgtatcagaatcagggtaccatgcttctaagtcaagctgaagaactctgggagtatgtacttatcactggatgcttgcacactactgaaaaaaattaagttcttgtcagtcttggttttgtctcttgctgattgtccattctgtcc

SEQ ID NO: 608706 - DNA, 583 bp, Homo sapiens
cggaggaaagcagccctatgcaatgattgattccctatttagataacctgagggaactccctctgagggtcttgctgaggtctgatctcctgcctagagtgtattaaaggaaagaggagaaactgagccattccatattaacatccagataggctgtaggatcacttttaagtttgtctgatgaaattgtgttcagcttatagtatgcacccccttccttattttgcacagcttttgaggatagcaccataagcaatgcctgtggccgtagatccttggcccttcatcaccttcaacatcccagtccaccctcactttttaatgtcaacagcttacatagtctttttttttttaatataaaactccaaatgtactacaagggtcctcttctgattcagctggcagtccaaagctctgcctrtttataaatactatcatgtatcagaatcagggtaccatgcttctaagtcaagctgaagaactctgggagtatgtacttatcactggatgcttgcacactactgaaaaaaattaagttcttgtcagtcttggttttgtctcttgctgattgtccattctgtcc

SEQ ID NO: 608707 - DNA, 476 bp, Homo sapiens
ttctcatgcttatctgtggcacatttgcccccaatcctcacaccaactctagccttttctctttttggttgagcattacttgcttgtctcctagtgaatcttagaagtagataatttatgggtataaaaatatggataagacaattatggtttctggcttgtgggtatgtgtgatataattatttgctgaatgtcttttctttcctgtggataaataagcactaaataaaagacattgtgttatagataccaagactgaaatataatccctaacttctagaagctgcagcctctggggagttcagacaagtaaacasatgagtataaggcatgatgtgaatatatggtgacatggaagcatgggcaaagtgcacccaaccagacagggtgatcaggacagcttctataagaaggtgaggtatgaattaatgcctaaaggaggggtgaacatgagctaggccaattgcaggaagaaa

SEQ ID NO: 608708 - DNA, 548 bp, Homo sapiens
aagtaaacagatgagtataaggcatgatgtgaatatatggtgacatggaagcatgggcaaagtgcacccaaccagacagggtgatcaggacagcttctataagaaggtgaggtatgaattaatgcytaaaggaggggtgaacatgagctaggccaattgcaggaagaaagggtcaccaatgaaaaagcacaagctaggatacatcccaggaaagagccagatgttcagtgagactagagcaaataatgagtgagaggagaggctgaagatgttggggcccagtcatcaggaaggggcagccaggtaatatggggctttggttgcattcaagcacacatttctatcttcttctctctgccttcccctttatcatagggattgaaagcctaggaactacacttcccaaattcccttgccccccagagttttgcatcaattagacgcactcatgtgagagttggaaggcagaaacaaggcaaaggtcatattctccagcagttataacagatacaaagggtttcaagcaaatgaaaaaagggttttgtgac

SEQ ID NO: 608709 - DNA, 550 bp, Homo sapiens
caagtaaacagatgagtataaggcatgatgtgaatatatggtgacatggaagcatgggcaaagtgcacccaaccagacagggtgatcaggacagcttctataagaaggtgaggtatgaattaatgcctaaaggaggggtgaacatgagctaggccaattgcaggaagaaagggtcaccaatgaaaaagcacaagctaggatacatcccaggaaagagccasatgttcagtgagactagagcaaataatgagtgagaggagaggctgaagatgttggggcccagtcatcaggaaggggcagccaggtaatatggggctttggttgcattcaagcacacatttctatcttcttctctctgccttcccctttatcatagggattgaaagcctaggaactacacttcccaaattcccttgccccccagagttttgcatcaattagacgcactcatgtgagagttggaaggcagaaacaaggcaaaggtcatattctccagcagttataacagatacaaagggtttcaagcaaatgaaaaaagggttttgtgaca

SEQ ID NO: 608710 - DNA, 268 bp, Homo sapiens
ctgctgcctgactgaggccttgccagctgaaaacagcatccatcagcggtgaacttagactatcctctcagcatcccccatccatgcaaggcatctcattcaggtttggaaagttacagcctgacacagccctggaggtttgtttgactcttttttttcttttcaaatgtttcatttctttccctttaggatctgtgccctagttgttctgggaaacttgtgacctctctgtgtttttaattaraagatgtcatttttccatggcaac

SEQ ID NO: 608711 - DNA, 569 bp, Homo sapiens
acttaactgataaatgcgtgtgttctgactgttctaccaaccagtcattctcccattctctgtgggcccccctgttctctgagacagaataatattaaaatyaggccaattaataaccttacaattgcttctaagtgttcaagtgaaagagtcatatgtctctcattttaaataaaaagctaaaagtgattaagcttaatgaggaaatatgttgaaagccaaaataggaggctagacctcttccaccaaacaatcaagttgtgaatgcaaagggaaagttcttgaaggaaattaaaagtgccgcttcagtgaacacacgtataagaaagcaaaacagctgcatttctgatacggagaaagtgttagtggtgtggatggaagatttaaaccagcaacaacattcccttaagccaaagccaaatccagagcaagctgtaactttcttcaattctgtaaagactgagagaggtgaggaagctgtacaagagaagtcagcagtaggaggggttgattcatgaggtttaaggaaagaagctgttgctataacatgaaagtgtaaaatgaagggg

SEQ ID NO: 608712 - DNA, 569 bp, Homo sapiens
acttaactgataaatgcgtgtgttctgactgttctaccaaccagtcattctcccattctctgtgggcccccctgttctctgagacagaataatattaaaattaggccaattaataaccttacaattgcttctaagtgttcaagtgaaagagtcatatgtctctcattttaaataaaaagctaaaagtgattaagcttaatgaggaaatatgttgaaagccaaaatargaggctagacctcttccaccaaacaatcaagttgtgaatgcaaagggaaagttcttgaaggaaattaaaagtgccgcttcagtgaacacacgtataagaaagcaaaacagctgcatttctgatacggagaaagtgttagtggtgtggatggaagatttaaaccagcaacaacattcccttaagccaaagccaaatccagagcaagctgtaactttcttcaattctgtaaagactgagagaggtgaggaagctgtacaagagaagtcagcagtaggaggggttgattcatgaggtttaaggaaagaagctgttgctataacatgaaagtgtaaaatgaagggg

SEQ ID NO: 608713 - DNA, 569 bp, Homo sapiens
acttaactgataaatgcgtgtgttctgactgttctaccaaccagtcattctcccattctctgtgggcccccctgttctctgagacagaataatattaaaattaggccaattaataaccttacaattgcttctaagtgttcaagtgaaagagtcatatgtctctcattttaaataaaaagctaaaagtgattaagcttaatgaggaaatatgttgaaagccaaaataggaggctagacctcttccaccaaacaatcaagttgtgaatgcaaagggaaagttcttgaaggaaattaaaagtgccgcttcagtgaacacaygtataagaaagcaaaacagctgcatttctgatacggagaaagtgttagtggtgtggatggaagatttaaaccagcaacaacattcccttaagccaaagccaaatccagagcaagctgtaactttcttcaattctgtaaagactgagagaggtgaggaagctgtacaagagaagtcagcagtaggaggggttgattcatgaggtttaaggaaagaagctgttgctataacatgaaagtgtaaaatgaagggg

SEQ ID NO: 608714 - DNA, 557 bp, Homo sapiens
tttctggtgggccctgccagctttgggcttccaatctgaaccctgacttttccccaagctgatccacttgatccataaccacaagctcttaataccaagtacttartacttctaagcacagcaacagaatcagacctattgtaagactcagtaagctcatcctgccaacttgcaggcagcaagaggtattcaagctgaaggcagggacgacgtttgcttttatattcccagcacttagcacagtgcctgacacagagtaggtacccagcaaatacttgttgaatgaaggaggaaagcagctccagttccataatgcagtgcaggtcaggcctctgccagttttcccctgccctaaaccctagtttagataactggactttgacactgctatgatctgagaacctactatcaggagtggagttcctacttttgtttcaatacccaagactgaaatttcccgtaggacccaaatctattatctttttcttggacagcaagttgtttgcatttctcagatgttgcttttcccagattacctttggcctctttgttcgcag

SEQ ID NO: 608715 - DNA, 463 bp, Homo sapiens
gtaaagcactcaagaggtgacttgggtgctgttagagcattccattttataagggaagcagagcataaaagtttcaaaaatttgcagcctgacaatgtaataraaaagaaaaccccattttctgagaagaaatttaaccctgcggcagaaatttgcataagtaaaaaggagctgaatgttaatccccaagacaatgaggaaaatgtttccagggcatgtccaacgtctttgtggcagcctttctcatcacaagcatggagaaataggaggaaaaaatggctttgtgggtggagcccagggtccccatgctgtgtgcagcctaaggacttggtgtcctgcatcccagctgctccagctgtgactaataggggtcaaggtacagctcaagcagtggctttgcagggtgcaagccccaagccttggcagcacatggaaatgtggtgttgcgcctgcgggtgcacag

SEQ ID NO: 608716 - DNA, 518 bp, Homo sapiens
gatgggagacagtgacagatcagcaggcattagattctcataaggagcatgcaacctagatccctcgcatgtgcagttcacaataacgttcgcacttctatgagaatctaataccactgctgatctgatagtaggaggagctcaggcagtaatgtgagcaatgggaagtggctataaatacacatgaagcttcaccactcacaccctgctgtgcagcctggttcctaacaggccatggactagtactggtctgtggcccaggargttggggacccctggattagtggataaatgaaatgtgggacatacatgcaatggaatactatttgccttaaaaaaagaaaaaaaattataacatatgctagaacatagatgaaccttgaagatattatgcaaagttaataagccagtcacaaaagggcaactattacatgattccaggtaaataaggcacctagagtagtaaaattcgtaaataccaaaagtagaaaagttgttgtcagggctgggggaaggga

SEQ ID NO: 608717 - DNA, 585 bp, Homo sapiens
aaatgaaatgtgggacatacatgcaatggaatactatttgccttaaaaaaagaaaaaaaattataacatatgctagaacatagatgaaccttgaagatattatgcaaagttaataagccagtcacaaaagggcaactattacatgattccaggtaaataaggcacctagagtagtaaaattcgtaaataccaaaagtagaaaagttgttgtcagggctgggggaagggacgaatgtagagttattgtttaatgggaacattgtttcagttggggagatgaaaaagttctggaggtagatggtagaactatttgtacagcagtggcaatgcacttaatgycactgaaccatacacttaaaagtgattaaaattgtaaatgttatgctatgcatattttagcacaataaaaaattgtaaataacttgtctcagaatgtaaagtacctgtcttagaaggtcacagtgaaggcataaatgtatatttggcatgattccggaatatagcaggtgttcacaaaatatgaactcttctttctggaaagcccttgttctactatcagactagctctcattcacaactcaaaca

SEQ ID NO: 608718 - DNA, 583 bp, Homo sapiens
tgtttttatgccagtatcatgctgttttggttactatagctctgtagtcaaatttgaagttaggtaatgtgattcctccggttttgttctttttatccagaatagttttggctatttgaggtcttctgcggtttcatataaatttggggattttttttaatttctgtgaagattgtccttcgtattttgatagggattgccttgagtagtatggacattttaacaatattgattattgaatctgtagactgctttgggtartatggacattttaacaatattgaatcttcacatctataaacatggaatatcttcattttttgtgtcatcttcaatttcttgtatcaatatttcgtagttttcatagtgcagattttacacatctttggttaatttctaggtatttaatttcatttgtagctgttgttaatgtgattactttcatgatttttttttctgtttgtttgctgttggcacatagaaatgctactgatttttgtatgttgattttgtaaccacaattttactgaatgtataagttctaatagttttttagtggagtctttggttttttcactgtaag

SEQ ID NO: 608719 - DNA, 583 bp, Homo sapiens
tgtttttatgccagtatcatgctgttttggttactatagctctgtagtcaaatttgaagttaggtaatgtgattcctccggttttgttctttttatccagaatagttttggctatttgaggtcttctgcggtttcatataaatttggggattttttttaatttctgtgaagattgtccttcgtattttgatagggattgccttgagtagtatggacattttaacaatattgattattgaatctgtagactgctttgggtaatatggacattttaacaatattgaatcttcacatctataaacatggaatatcttcattttttgtgtcatcttcaatttcttgtatcaatatttcgtagttttcatagtrcagattttacacatctttggttaatttctaggtatttaatttcatttgtagctgttgttaatgtgattactttcatgatttttttttctgtttgtttgctgttggcacatagaaatgctactgatttttgtatgttgattttgtaaccacaattttactgaatgtataagttctaatagttttttagtggagtctttggttttttcactgtaag

SEQ ID NO: 608720 - DNA, 583 bp, Homo sapiens
tgtttttatgccagtatcatgctgttttggttactatagctctgtagtcaaatttgaagttaggtaatgtgattcctccggttttgttctttttatccagaatagttttggctatttgaggtcttctgcggtttcatataaatttggggattttttttaatttctgtgaagattgtccttcgtattttgatagggattgccttgagtagtatggacattttaacaatattgattattgaatctgtagactgctttgggtaatatggacattttaacaatattgaatcttcacatctataaacatggaatatcttcattttttgtgtcatcttcaatttcttgtatcaatatttcgtagttttcatagtgcagattttacacatctttggttaatttctaggtatttaatttcatttgtagctgttgttaatgtgattactttcatgatttttttttcwgtttgtttgctgttggcacatagaaatgctactgatttttgtatgttgattttgtaaccacaattttactgaatgtataagttctaatagttttttagtggagtctttggttttttcactgtaag

SEQ ID NO: 608721 - DNA, 591 bp, Homo sapiens
attttcacttctcttaaggcataaattcctttaattgtacaatactcttgccaaaataattttattcaaaccaacttttaaaagctcttagacttttagcttcatggtagctaagcttgcaaaggagcaatttggtatatggaatgtttacatcttttttctaaacttcycaagtaatatgcagatgccaagaagaacttttgaaatatttttgtctcagataagatggctgagtgtattcaatttagaaaggttaccaactgccacgaaacaataacaacaaaagaaatgccactatttgaggtcctaggggaacaaaatggtgatgggagaggctccattctcccatccactattcttctctgacactgagaagaaagaaccatttacaatttagtcaggtttgaaaggatgaatgattcacgtattactaaggaaggaactacaatcctttggggaaagaaaaggagattaatagtttcagaaagctgtatcttaactgtgcctggattttataattgtataagacatttcacttcgctcagcttttttttaatttacatataaccacagatgagtttaaaatatgtc

SEQ ID NO: 608722 - DNA, 611 bp, Homo sapiens
gagcagaaactgagattaagttgatcatacacacaaacctctcactcagcacagttcaatttcttctaaactttggagaacaatttaccaagtaaatatcctagtgtgaagctggcaattgaagagagaaggatgagaagatgagtattcccaaagttaaacaatgagttcaaagcaggttcagaggcacaacattggctgtatttgccctgctatatgactttagtattctgaggggaaataaaaaaaggatggggaagaagaaatggaaggaaaagagggagaaagggatggaatggagaaagggagggagggacggagagaaggaaggaagggaggatcgatcaaaggaaagaaggaaggatcgaaggaaggaaggaaggattaattgaaggaaggaaggaaggatwgatcgaaggaaggaaggaaggatcgaaggaaggaaggaaggaagggagccttatgctttccatcaccatcaaagaatggagcaatggcaagatagccatgtcacccacccctctcaaagtggagaacatttggagctcattttagacctcctgtccacatgaagacactacacactttctgcctatgtcacatcagaagga

SEQ ID NO: 608723 - DNA, 616 bp, Homo sapiens
taactcaataatatttgctttatatatctgggtgctctggtattgggtgcatacatattaaaattgttatatcctcttgctgaattcatctctttatcattatataattatcttgtctctttttatgtttgacttagaatctattttgtcttatataaataaagctattcctgcatgcttttggtttctatttgcatggaatatctttttttatttctttcactttgtctttctgcatttttacaggtcaagtgagttacttgtaggcagcatatagttgggtcttattttttattctttcagtcagtctgtatcttttaattgtgggatttaaatggttgttattgatagatgaggacttactctcgtaattttggatatcctttgttcctttcttcttctctgattgctatttattattattactgttttggagacagggccttgctctattgcccaggctggagtgcggtgacacagtcatggctcattgcagcctcaacctcctrggctcaaacaatcctcctaccacagcctcctgagtagctaggaccatagacacatgccaccacacccagctaatttgtgtgtgtgtgtgtgtgtgtgcgtgtgtatg

SEQ ID NO: 608724 - DNA, 425 bp, Homo sapiens
aggcaaatgctgcagacaatgaagaaaggaaatctgatattttcctaatattctttaagcatagtccaacatatgatttgtcggttttttyttttttttttttttggtcagtcttgctttgccacccaggctggagtgcagtggcgcaatctcagctcgctatacctctgccttccaggttcaagtgattctcctgccttagcctcccaggtagctgggattacaagtatgcaccaccatgcccagctactttttgtatttttagtagagtcagggttttgccatattggccaggctggtctcaaatttcctggcctcaagtgatctgcctgcctcagcctcccaaagtgttgggattacaggcgtgagccaccacgtccggcctgtgtttttttttttcttttagtttactgtcattaagactt

SEQ ID NO: 608725 - DNA, 425 bp, Homo sapiens
aggcaaatgctgcagacaatgaagaaaggaaatctgatattttcctaatattctttaagcatagtccaacatatgatttgtcggttttttcttttttttttttttggtcagtcttgctttgccacccaggctggagtgcagkggcgcaatctcagctcgctatacctctgccttccaggttcaagtgattctcctgccttagcctcccaggtagctgggattacaagtatgcaccaccatgcccagctactttttgtatttttagtagagtcagggttttgccatattggccaggctggtctcaaatttcctggcctcaagtgatctgcctgcctcagcctcccaaagtgttgggattacaggcgtgagccaccacgtccggcctgtgtttttttttttcttttagtttactgtcattaagactt

SEQ ID NO: 608726 - DNA, 395 bp, Homo sapiens
ttgactcactgcaacctccggctcccggggtcaagtgattgtcctgcctcagcctcccaagtagctgggattacaggcacacgcgaccacgcactgctaattttttttttttgtatttttagtagagatggggttttgccatgttggccaggctggtcttgaactcataagctcaggcaatccacctgcctcagcctcccaaagtgctggaattacaggtgtgagccactgcaccctgtaccacttgtataatcctaacacaggtttgagatctcttctttggacctgcagctactgtttgaaattcamaagcacttgtcaagcactgtgcctatccctgcactgctccctgtatcagctctctagggctgccatcaccaggtgccacaaactgg

SEQ ID NO: 608727 - DNA, 432 bp, Homo sapiens
aactttgaaatagacaacacattattatcaactgtagtcaccatgttgtgcagatctcaaaaacttctaacaaaaactttttaccctttgaagatattgaactgttttatgaacacaatcttagaaggatttaaaaaataatttgctattcaccaagtacttcttacgtacactgtgcatgaaatgattattactttttctaatattagttttcttgattgaggcttggcaattattagtttgtwtgcctttagaaggatcataagcagaggtttatcccagtaggatttgcattttagaatgatgactttgggagtaaaatacagagaagtgaaaccagagatagtgggatcattctggagtctgttgcctacactgaacagtagttgagcgaaaaaggatgggcagaatgtgttggttctgggtattgca

SEQ ID NO: 608728 - DNA, 613 bp, Homo sapiens
cacttaaaagagaatgtgctatacaaatactggttcttaagacagctgttgttaatgtactgagtattatgcttacctcacagggttattgtgagcatcaaatgggataatggatttgtaagcattttgtttaaagtgtgattcaaatgttaagaattagtaaaaatagtaaaagaacaattcattctccatccagatgttctgtycccactgtgacttatgtgctcattcagagttgtacagaaaaacctccacttaattttcacaagctggagttccacatgtaacagaatcatatgggaccaaaaaattctctgtattggcttcttccctgccgtattttggctctgggaccaacaagacacccattttgcatgagctgcctgccaccaactttgcgctcacatctagttctgttgcccatgtgcaagctgaatttgggcccgggcccccagatctaacatgaaactcaagtttccttctgttcaaactgtccaggcataatagtcttaaagtccgatgcccagcagagccgtagatttttcactggccaaaaatcaacatgaaaccagatgtatctgtaaatctagtttcataacactttgtagtcaat

SEQ ID NO: 608729 - DNA, 613 bp, Homo sapiens
cacttaaaagagaatgtgctatacaaatactggttcttaagacagctgttgttaatgtactgagtattatgcttacctcacagggttattgtgagcatcaaatgggataatggatttgtaagcattttgtttaaagtgtgattcaaatgttaagaattagtaaaaatagtaaaagaacaattcattctccatccagatgttctgtccccactgtgacttatgtgctcattcagagttgtacagaaaaacctccacttaattttcacargctggagttccacatgtaacagaatcatatgggaccaaaaaattctctgtattggcttcttccctgccgtattttggctctgggaccaacaagacacccattttgcatgagctgcctgccaccaactttgcgctcacatctagttctgttgcccatgtgcaagctgaatttgggcccgggcccccagatctaacatgaaactcaagtttccttctgttcaaactgtccaggcataatagtcttaaagtccgatgcccagcagagccgtagatttttcactggccaaaaatcaacatgaaaccagatgtatctgtaaatctagtttcataacactttgtagtcaat

SEQ ID NO: 608730 - DNA, 460 bp, Homo sapiens
gggcgagagaggaattctccaccccagtggggggaaactgagtcctagctggttccaccaccagctgactaacgtggcctgaagcttggaataaatatgactggcagtcaggccacaaggactgcagtctttgggcaagccctggtgcygcactggtctcagaggcagtagatttgtggtgcaaccaagtgtgacaccgcctatggtggccaagggagggcctatgtcacccctcccccaactctgggcagacattcagagacagactccttctgattcaaggaaagagaggaaagagagtgagagacattgcctgataaccccaggaattctcccttcttttccccaagagtccatttttgaaagcagcagaacaacatcaaatgctggcaaagatgtagagcaacagaaactctcatttgtgagtggtgggaatgcgagatggcacaatactttggag

SEQ ID NO: 608731 - DNA, 359 bp, Homo sapiens
agccttcacatcagaattcacacaagctaaaagataatggagtgacatctcttaagtgataagtataaaaacaaagacagatggaacgaatagaaaatggctaacaagatagattttaatayagatatatcagtgatcgcattaaatgtgaacagttcaaccacaccagttaaaagacaaaattgacaaattggataaaaaagcaagacctgtccacattatatctacaacaaacttcctttaagcaaaaatacaaaaatagtttcttagaaaatgaaaaaaaaaaagatagacaaacactaatgaaaagagagttggagtagctatatcaatatcaaagtagacttcagaacaaggaa

SEQ ID NO: 608732 - DNA, 359 bp, Homo sapiens
agccttcacatcagaattcacacaagctaaaagataatggagtgacatctcttaagtgataagtataaaaacaaagacagatggaacgaatagaaaatggctaacaagatagattttaatacagatatatcagtgatcgcattaaatgtgaacagttcaaccacaccagttaaaagacaaaaytgacaaattggataaaaaagcaagacctgtccacattatatctacaacaaacttcctttaagcaaaaatacaaaaatagtttcttagaaaatgaaaaaaaaaaagatagacaaacactaatgaaaagagagttggagtagctatatcaatatcaaagtagacttcagaacaaggaa

SEQ ID NO: 608733 - DNA, 385 bp, Homo sapiens
actcgttcgtatctggcctcagcatgactgtgcatctgtaattcagcatgatttaaagatttctccattgttgctgtatgtttcagtagtttgttcctttttgctgctgagtaatattctacatattggatatacaatatattgtttatttatcaggtgatagatatttggagttattccaggtattaactattattactaaagcttctatgaatttttttatgtaagtattactgtagacatacattttcctttcttttgggtgaatacttaagagtggaatgatcctatggtagctgcatgtttaactttttaagaaacttccaaacagatttccaacactgctgtacaaytgtatattcctaacaacaggttatgagaattc

SEQ ID NO: 608734 - DNA, 606 bp, Homo sapiens
tagatgtaaaggtactaatcgccctgtgacgatagccaagggacattggtagcctgtgacatgcaagggcaaaatattcactaaattgtaatttgtaatcaagtgtctgaaagacaaggctttaggggaccaagtagttgctgctataatgcttttggtgaaaataaggactctaatggagttggttgcttttaagagcagtgcagaacttagcaaaagaaaatgaagagattggggcttctaatcctcagctcaaagtctggggaaagaacaacacraagtttccaggccttccctaaaggatctcttgtcttctgtagccaaaatctctgaaaaacaatcctaaattcaatcctaaggactgctgaatgacaaagcgcattgaattcacaacctttcaaaaatcttatatgttaaaaccagggcatggattgggcccctgaaaatgtgagatcatttctgccaagccttttttgtcagtggaaatagtgcttcttcctcatccaagcttcctttttctgaggtcttcctgtgcctgagaaacttgtcatggtctccactgaggtcgctaccttgcaggggaccaattctcctctgaccttaccc

SEQ ID NO: 608735 - DNA, 557 bp, Homo sapiens
ctccagttgtgttttaggcgtgtgtgtgtgagtgtgtgtgtgtgtgtgtgtgtgtgtgtgtgtgtgtactgttgagaggcagtacactgttgtggttaagaataggggagtggatccagagtatctgggttggaatattggttctgtcattagaatgaattaatatcgtaaagccccttagagcagtgctaggcatataataatgtttaatatgttttaactgttgttttttgtgtagtcattttaagtcattccccttgactcyctacagaacaggagcattgggaatatgtgattcattgcgactgctggttgtatattaagaaaatgagtgaggggctcaaatgatctaggacagaaattctttctttttaaatcgacagatataattgtatgtatttatcatgtgcaacatgaagttttatggtatgtatacattgtggaatgactaaatctagctaattaacaatgcattacctcacatagttatcatttttgtggtgagaacacttaatatccaccctcctagcatttttcaagactacagaatattgtta

SEQ ID NO: 608736 - DNA, 557 bp, Homo sapiens
ctccagttgtgttttaggcgtgtgtgtgtgagtgtgtgtgtgtgtgtgtgtgtgtgtgtgtgtgtgtactgttgagaggcagtacactgttgtggttaagaataggggagtggatccagagtatctgggttggaatattggttctgtcattagaatgaattaatatcgtaaagccccttagagcagtgctaggcatataataatgtttaatatgttttaactgttgttttttgtgtagtcattttaagtcattccccttgactctctacagaacaggagcattgggaatatgtgattcattgmgactgctggttgtatattaagaaaatgagtgaggggctcaaatgatctaggacagaaattctttctttttaaatcgacagatataattgtatgtatttatcatgtgcaacatgaagttttatggtatgtatacattgtggaatgactaaatctagctaattaacaatgcattacctcacatagttatcatttttgtggtgagaacacttaatatccaccctcctagcatttttcaagactacagaatattgtta

SEQ ID NO: 608737 - DNA, 557 bp, Homo sapiens
ctccagttgtgttttaggcgtgtgtgtgtgagtgtgtgtgtgtgtgtgtgtgtgtgtgtgtgtgtgtactgttgagaggcagtacactgttgtggttaagaataggggagtggatccagagtatctgggttggaatattggttctgtcattagaatgaattaatatcgtaaagccccttagagcagtgctaggcatataataatgtttaatatgttttaactgttgttttttgtgtagtcattttaagtcattccccttgactctctacagaacaggagcattgggaatatgtgattcattgcgactgctgsttgtatattaagaaaatgagtgaggggctcaaatgatctaggacagaaattctttctttttaaatcgacagatataattgtatgtatttatcatgtgcaacatgaagttttatggtatgtatacattgtggaatgactaaatctagctaattaacaatgcattacctcacatagttatcatttttgtggtgagaacacttaatatccaccctcctagcatttttcaagactacagaatattgtta

SEQ ID NO: 608738 - DNA, 557 bp, Homo sapiens
ctccagttgtgttttaggcgtgtgtgtgtgagtgtgtgtgtgtgtgtgtgtgtgtgtgtgtgtgtgtactgttgagaggcagtacactgttgtggttaagaataggggagtggatccagagtatctgggttggaatattggttctgtcattagaatgaattaatatcgtaaagccccttagagcagtgctaggcatataataatgtttaatatgttttaactgttgttttttgtgtagtcattttaagtcattccccttgactctctacagaacaggagcattgggaatatgtgattcattgcgactgctggttgtatattaagaaaatgagtgaggggctcaaatgatctaggacagaaattctttcttttkaaatcgacagatataattgtatgtatttatcatgtgcaacatgaagttttatggtatgtatacattgtggaatgactaaatctagctaattaacaatgcattacctcacatagttatcatttttgtggtgagaacacttaatatccaccctcctagcatttttcaagactacagaatattgtta

SEQ ID NO: 608739 - DNA, 658 bp, Homo sapiens
atgccttagcaacccatatcatctcacctcttcctgggttctgagacatgctgtcctgtcctacggagaaaccgccaggcaatagatgccttttcttttggctaacccactagggatctagacactgctaagctgtaaaaaatgagaattatttgtccagaaattttaacttgcttccctataatcagaagagaataaatcaatactatgagaactcttcacaaaagggaacatgtayagagtggaactttgccttctattcttgaacacttctgcagaggctcagaaaagttgttgctctgattcacaggtcacaataaggagatttctatttacaaggtggaagactttttcatcagccttagaaagagcacttggagaatcattaccatttccaaagtagggaagaaactttaatacccttctttcaagcatactgtgtaattccaacaacataggatgcccaattcacaagattctgaaagaatgagccttcacgctacagcactttagcaaccagtaccaataggaaaacggaaaacccatttgaagctgctgactcactactgcataaggagtgttatccatccatacatatatacggcatcatccaatttctttttcaggcttacgaaacagatggagttaactaacaaaa

SEQ ID NO: 608740 - DNA, 502 bp, Homo sapiens
ttgacttttcaagcactctgacccttgccctcctcctctgcggccmtcagtggaaagttgtagggtagctcaggaagaaaaacagcatactcttagaaactttgggtttttggactggacccagggaaatccctgggaaataagaaagcagtattgtttatgtacaaaaaagagacttatttataaaagatttaaagcacttaatccattttgcaaagcataattaagtaaaataaacaccaaattgtagaacagaacaataaataaacaaaaaacagatttagtactagccgagtagcatgcttgtaacctaatgaggtaaacttgctattacccagtatttatcaaaaaaacacagtaagtggaatcgcacagacttgggttgaatcctatttggctgctctctagttgtatcggcctgagcaatttgcttaacttctctgaatctcagagagtactctacccagttgttattattgtcaataaaaaaagatactgccag

SEQ ID NO: 608741 - DNA, 220 bp, Homo sapiens
atataaaagaataggagcatttcataatgccaaaaagtcttagtagctttgagatgtttcatggagggcatcagagtggatttgagcktttaagaagctcatttaaatgttgagaatgaaaatcaggagaaagaggagggactcaaaaagctagggtactattttaagaaaagagaatggtattaatgtgtttgacatatggacggggaagtttgaattc

SEQ ID NO: 608742 - DNA, 522 bp, Homo sapiens
cttctgccattttgagattaaaaatataaattagtcttaactatactttagcagagtaaatctatttcttacacttttagaagacagtttttaagttaaaacacaataataaatgattatttccaattacctttttatatacagctcagatctgcagaatgaaggggggactcagattaagttactggattgaggcggggggttcctagagtgtgttgcacatctcacttcacagccaaaggtagaaaagtgagccattgcaggagagcatctcctttacttacaggcttgcagtattctaaagcatccatgatttaaatctgctgaggactgtatactggatcctgcagggaaatgatggcacacacaaactgagtttaaggaagggactatttatagtgtttgggaagggttcagaaaaccaacagaaaatggcaagagagggagcctcttttttaaccctgagccaggaaggggaagagttrgggacagttactggaatgctgaatggtagctataggg

SEQ ID NO: 608743 - DNA, 528 bp, Homo sapiens
ccacacctggataatttttgtatttttagtagagatggggtttcgccatgttggccaagccggtcccaaactcctgacctcaggtcattcacctgcctcagcctcctaaaatgctgggattgtctacttgagccaccgcacctggctaaaaatttatgtttaactttttaagattttccgaagtggccacgctattttacattcccgccaaccatggataaggattccaatttttctacagcccagataattctggttattttctgtatctttgattatagctatcctmgtaggtataaacatgtatcatattgtggttttgatttgcattccctaatgactaatgatgttgagaatcttttcatgtgcttattttatatcttcactggagaaatatctattcaagtcttttgcccatttaaaatagggttgtaccttattgttgatttgaaataataactaaacctttctttatgccagatatttttattctggacaccggacttttatcagatataaaatttggaa

SEQ ID NO: 608744 - DNA, 641 bp, Homo sapiens
tccagcctgggcaacagggcgagaccttgtctcaaaaataataatgataataaataagtaaataaataatgccttgggacttagccagataaaatactcagcttctcgaagccagtgagttctgtttcccagttactttgcggctccgccccacccccaggttggaccccagcagtggtggggtgcagggtcagggagctgacttgygctccccctccaatgcagccatgctccataacacctctacttcttgaatacagaagcctggctcctacagctgccgccaagagaagaattacaagatcgatcctgcagatgtctctagaccaccacattgtgactccgctgacctcgctggtgatcgagaacgaggctggggatgagcgcatgctggcggatgccccaccgcaggatccctcctgctgctcaggtcagggctgcacctgtggggacaagtggccaggcagctctcttgccccgggggtgggcgaagtcctagtgcctccgctctctcccaccccagcccacctcttgctcccagccctgggccctcctgtgcccaagctcttcctgccagctgggaggaggatggattattgctgtggtcgttgaccattttgctcacaagtttcccaaaggaa

SEQ ID NO: 608745 - DNA, 455 bp, Homo sapiens
gggatattttggctagtacataggtctacacagctcattttaagttgtgataattaagcaggtatcttctctggtcttatagattcagctcagagcagagggagataaaagtaaatgcatgtttcacgattctgtcctttgtacttcaaatcttctatgtaatgagatagtaaagaaagaacagaatgaaggacggaatagtatgcagccataaaaaggaataagatcatgtcctttgcagggacatggttgaagctgtaagccatcttcctcagcaaactaacacaggaacagaaaatcaaacactgtatgttctcactcataagtgggagttgaacaatgagaacacatggacacagggaggggaatattacacaccgtgkcctgtcgggcggtagggggcaaggggagggagagcattaggacaaacagctaacgcatgtggggcttaaaac

SEQ ID NO: 608746 - DNA, 483 bp, Homo sapiens
aatatactgtggctaaagtttattggaatttccctctgattaagtatgtttataattccatctgcaaaaaccagcagtaagctgaactggaaagcattacctgagattatatttccattttgccccattaaaaaagactagaatttaatttccaaggatgtcttagcacagatgcttaaatcgaatgcgtacttccttaggaatgaagaaatagcaatgcatgtaaggataagtaagtcagaatgagagaaaaaaatagttttttaaaaaagtacaggtgactaaagcagcatagggctaagtaggtttaaaggatgaagacattaataaagagcttcctgcagggttatcaacagaaatactttttcatagaaattagtgggatttaaacaytgcatgttctcagttataggtgggagctccaagctatgcattgagcacacatggacgtgcacatgggaacaacaggcgctgtggactgcg

SEQ ID NO: 608747 - DNA, 599 bp, Homo sapiens
cccaggggtacaatactcactagctgggtgtaatacacccatgtaacacacctgcatgtgaacccccatatctaaaataagagctgaractttcaaagaggagcagttactttgactgacttttattagtagttgtaactcttttcttttcctggaaacctgagtcctaaattggaaggtagtagccacagggtaccttagttcagatagtttttgaagataagcaattaaaatagatcagggaatggctccttttcaaacttgtgagctaagaatccagaaagcaggttgttccaagatgatgctgtgaaagaaaaaattggcctttcactggggacagggttctttccaaccttatgtctggctcttgtactttctctttcatctcctttgtgaccccatggactctcaaattgaaatgaagtaaatttattcacattaaggcattaaactactaatggcttcatgtgttctctcttccactggtgtttgtatttgatagaaaataatgccctaaaaaatgaatggtttagggaagctaatggaagagatgaaggctggaaggggcaggttctcaatcacatgacgttcaacgtgct

SEQ ID NO: 608748 - DNA, 546 bp, Homo sapiens
caggatggggatgagatttcagttgctccgggagcgacgcatctcctcacgtgggccaggctttcacacacccaaagcggatctgccgcggcgaaaacgattgacagccggcctcatgacccaggcagagatggagaaagaggctcaccaaagacaggccgccatgcgacaaaccgctttgtggcgcacagggcacatttggccaaagacacacatgaacacgggcatacacacacaaacccacagagagagggaaagaaacacacagagactgagagacagagagaggagagaatgggagagacacacacacacacacacactcacacagagacacacacacagagtcatacagcagaggcattgaaacacacaccaccggcaacccctgaggctgcggggttctgctcacgacgagaacgaccctcaggtgagagagcagcccaggggcacgcaggccracctgtcctcgagatcacggatggcggcacgacttttggggagactcaccccaaccaacaccatccgggcaggcctgaggctggg

SEQ ID NO: 608749 - DNA, 325 bp, Homo sapiens
tgtgtataatgttgtaaggyaaacattcacaaccaaaaacaaggttttattaactttcacctttaagaacctgcagtgtttagccctctttgattcctagtattattacctttggtatgaactcttttattaaactgatcactctagaagtttatgcattttttatcatttttcaagccaacagaaatgtgtaatgcctataattctgacacttcagttatttttaaggctatgagcatgtaagatactgttggtatatggaagaatatgtataaataccactaggtagcttattttgaagagttagtatttaagtttttgtcca

SEQ ID NO: 608750 - DNA, 325 bp, Homo sapiens
tgtgtataatgttgtaaggcaaacattcacaaccaaaaacaaggttttattaactttcrcctttaagaacctgcagtgtttagccctctttgattcctagtattattacctttggtatgaactcttttattaaactgatcactctagaagtttatgcattttttatcatttttcaagccaacagaaatgtgtaatgcctataattctgacacttcagttatttttaaggctatgagcatgtaagatactgttggtatatggaagaatatgtataaataccactaggtagcttattttgaagagttagtatttaagtttttgtcca

SEQ ID NO: 608751 - DNA, 325 bp, Homo sapiens
tgtgtataatgttgtaaggcaaacattcacaaccaaaaacaaggttttattaactttcacctttaagaacctgcagtgtttagccctctttgattcctagtattattacctttggtatgaactcttttattaaactgatcactctagaagtttatgcattttktatcatttttcaagccaacagaaatgtgtaatgcctataattctgacacttcagttatttttaaggctatgagcatgtaagatactgttggtatatggaagaatatgtataaataccactaggtagcttattttgaagagttagtatttaagtttttgtcca

SEQ ID NO: 608752 - DNA, 656 bp, Homo sapiens
gtgtaatgcctataattctgacacttcagttatttttaaggctatgagcatgtaagatactgttggtatatggaagaatatgtataaataccactaggtagcttattttgaagagttagtatytaagtttttgtccagagtagattggttgcagtttcttaggtgtgtttcttaatatgttgcctcaaagttttaaagcatgtagaaatttgaatacagtttaacttcatatagtcctttgttgatagatttaatatttctaaaaactaaagacatcacagctccctttaagattcagtaatattaataaaattttagaaatatagggttagaatccaacaaattcagaggaaaattgttaaattatatagctgtagagcaagaatgaaacccaggttctaagctctaagggggccatgaggtaccgtacaagtacttcagtgactgggcatagattcagcaaaattacaggatggttaagagagtgagctgtggagcccaactctatgtaacatgaatttttaaactgcatggtgcctcagtttatccatctttacagtggggactgcagtaagtttttctttttctgctcagttgtctgtcatgttgcgactgttccctagtctgtcttgttgccactcagtgcccacatgaca

SEQ ID NO: 608753 - DNA, 623 bp, Homo sapiens
tatttatggtaagaaaagttgtgaaggaaagaaatgttatatgagaggatcttgtatggcaaatttttgtcctaaagtagaatgactaattatgaaagagggaagtacaggaaaagtcagaaagttcatgtcatagatagtctgtggaagttgtgttagggttcataaaatgagaaagaaaaacttaacaactgctagatcttttcctgtctagaagtgttgtgtatatgatggatatataaaggagccctaactacttggcttagaagaaaaggaagtctcttaaatattttgtcagaaaaatagaatctctaatgccttttatttaacatgacttcagtgatctttgggaaataaagacagtgttaaaatcattttttagtagagacagcrtttctccgtattggtcaggctaatctcgaactcctgtcctcaggtgatcctcccgccttggcctcccagagtgctgggattacaagcatgagccactgcacctggcctacaaataggttaaattattttataaattagctgttgtttgttttgcctactttcagacttctggattttttttaagtatgaaggatttcaattgttatattaatataaatgcttagataaat

SEQ ID NO: 608754 - DNA, 624 bp, Homo sapiens
ataagccctttgtaggcatgtctgtatctgagtttttaaatttttttttcctcttttctcactcccagaataacaccctgtgccaaggagtagtagatacttgttgaatgcataaaagagcttagcagctagagttagtgtggatgctgtagaagatgtctgatamacatatggcagtttgatgctgaatagtttttggaaattaaaaaacaggtagaaatttcaccaacgtcagtgactaacatagctgtaattagtaaattatcaaaatgtttctttttttttcttttttacagagagggtctctctctgttgcccgggctggagtgtggcggtgtgatcatggttcagtgcagcctccgagtcctgggctcacacggtcctcctgagtagctgggactacaggtgtgtgccaccacacatggtcaatttcttttattttgtagaaacagagtctcattatgttacccaggctgacctcagattgctgggctcaagagatcctcccaccttggcctcctgaagtgctgggattataggtgtgggccactgagcccagttaaaagcatttctttaaaaaagaaaaaaaagttctgtttattgggatttgggggaggaagagaa

SEQ ID NO: 608755 - DNA, 624 bp, Homo sapiens
ataagccctttgtaggcatgtctgtatctgagtttttaaatttttttttcctcttttctcactcccagaataacaccctgtgccaaggagtagtagatacttgttgaatgcataaaagagcttagcagctagagttagtgtggatgctgtagaagatgtctgatacacatatggcagtttgatgctgaatagtttttggaaattaaaaaacaggtagaaatttcaccaaygtcagtgactaacatagctgtaattagtaaattatcaaaatgtttctttttttttcttttttacagagagggtctctctctgttgcccgggctggagtgtggcggtgtgatcatggttcagtgcagcctccgagtcctgggctcacacggtcctcctgagtagctgggactacaggtgtgtgccaccacacatggtcaatttcttttattttgtagaaacagagtctcattatgttacccaggctgacctcagattgctgggctcaagagatcctcccaccttggcctcctgaagtgctgggattataggtgtgggccactgagcccagttaaaagcatttctttaaaaaagaaaaaaaagttctgtttattgggatttgggggaggaagagaa

SEQ ID NO: 608756 - DNA, 608 bp, Homo sapiens
tggcttttctcaccacctccaatgctacaacctggttggagtcaccatcatctttcactgggaggttgcwcaagcctctcacagactccactgtttctacccctgacccctgcagtctactctgagcagagcagtcagaagcattctttgagacttccttttagacacacttctgcccagcaccctgcaatcacttcccacttctgagctggtgggctctgaggccatccatggtctggacccaataccagtccagcctcccctctgaaagctccaccctccctcactgctgcagccatgccagactccatgctcatccatggatgcaagtggcaagcacctgtctcgtgatccttgctctatctgctctccatttggaagtctcttctctcagatagccatgatctatttctttatctttttcaaattttgtctcaagcttcatcttttcagggggtctacccactgctctgatcaccctgcttaaccctgaaacctcccccacccagatacacacagcacagcgctctgcactctcatcactctgtcctactgttctccataattctgttcacttttaccactctgtactgcccactttattgtgt

SEQ ID NO: 608757 - DNA, 608 bp, Homo sapiens
tggcttttctcaccacctccaatgctacaacctggttggagtcaccatcatctttcactgggaggttgctcaagcctctcacagactccactgtttctacccctgacccctgcagtctactctgagcasagcagtcagaagcattctttgagacttccttttagacacacttctgcccagcaccctgcaatcacttcccacttctgagctggtgggctctgaggccatccatggtctggacccaataccagtccagcctcccctctgaaagctccaccctccctcactgctgcagccatgccagactccatgctcatccatggatgcaagtggcaagcacctgtctcgtgatccttgctctatctgctctccatttggaagtctcttctctcagatagccatgatctatttctttatctttttcaaattttgtctcaagcttcatcttttcagggggtctacccactgctctgatcaccctgcttaaccctgaaacctcccccacccagatacacacagcacagcgctctgcactctcatcactctgtcctactgttctccataattctgttcacttttaccactctgtactgcccactttattgtgt

SEQ ID NO: 608758 - DNA, 585 bp, Homo sapiens
ggtgaaatattataattgtgaattgcattgactaaaactaaaataaacatgagaaccagggtaataaaatgaatataaatgccacatgccctggaaataaaccaatatcgaaactaacaaaaagtagaagaagaaggaggaaagaatggaagacatagggtagatcarggctgctgcatatgatgtttgtacagttttcaactttgaggggtctcgtttgctgagaccctgacatcatctgcagctccagagctgagagacacgatgtgcacacacacaggtgggggtctgaggaggaggacttggtcaactcagctataacagccaggactcaaagtggatcattcaaagcagtaaatcaaatgttagaaatagaagtgtatgtaatagcaaaataacaaacattaaataacatgccacggatactctcattgacagaattctagtagtgagaggcctggaagggagtagaaagagaaaccacctagttttaacacagcggaaaatagagaagtaatcactcctgggtaaaagaagagatcataaaaatactgcataaagctgtcatttaaaaaattaccactg

SEQ ID NO: 608759 - DNA, 572 bp, Homo sapiens
gctgctgcatatgatgtttgtacagttttcaactttgaggggtctcgtttgctgagaccctgacatcatctgcagctccagagctgagagacacgatgtgcacacacacaggtgggggtctgaggaggaggacttggtcaactcagctataacagccaggactcaaagtggatcattcaaagcagtaaatcaaatgttagaaatagaagtgtatgtaatagcaaaataacaaacaytaaataacatgccacggatactctcattgacagaattctagtagtgagaggcctggaagggagtagaaagagaaaccacctagttttaacacagcggaaaatagagaagtaatcactcctgggtaaaagaagagatcataaaaatactgcataaagctgtcatttaaaaaattaccactgagcaagtcccccaatgaagctaccagaaaacagtttttctcaagcaaataaatcagatcacatagaaaacaacttttaaaatttatgaacacataagatgctatcatatatgcatgaaacaccaagcataactgttatatcaataaatataaatgt

SEQ ID NO: 608760 - DNA, 550 bp, Homo sapiens
taacaaacattaaataacatgccacggatactctcattgacagaattctartagtgagaggcctggaagggagtagaaagagaaaccacctagttttaacacagcggaaaatagagaagtaatcactcctgggtaaaagaagagatcataaaaatactgcataaagctgtcatttaaaaaattaccactgagcaagtcccccaatgaagctaccagaaaacagtttttctcaagcaaataaatcagatcacatagaaaacaacttttaaaatttatgaacacataagatgctatcatatatgcatgaaacaccaagcataactgttatatcaataaatataaatgtaaatatgatatacacatatacaattaaccattactgaaggacttaaaaaagaatttgatcagatttccagaggagaggagcttgggatactcttttccctgcagtgaaacaaccgtttaactggtaaaaattataaaacacatttaaagtctctggaaattgacctaagggcagatgcaaattaataagcatttattcaagaaa

SEQ ID NO: 608761 - DNA, 568 bp, Homo sapiens
taactgttatatcaataaatataaatgtaaatatgatatacacatatacaattaaccattactgaaggacttaaaaaagaatttgatcagatttccagaggagaggagcttgggatactcttttcccygcagtgaaacaaccgtttaactggtaaaaattataaaacacatttaaagtctctggaaattgacctaagggcagatgcaaattaataagcatttattcaagaaaatctcctaaatgttgataaaacagtggaagtctgtgtcctctgagccagagctagttcctattccctcctccagctccatgtcacaggagatcttctccacatcacatgaccacatatcacatgaccaggaacatgggaactccttttcagccccactcccagtcaaagacgtatgattacaccccaggtgatctcatccccagacaccacccctctaagtaaaggaaattaggatgccatctcacatcaaggggacagatgagatgtttcaacaatgttgatgtttgtacaactaggaagatatatgaaaaaataaagttagattcatttcccac

SEQ ID NO: 608762 - DNA, 550 bp, Homo sapiens
taacaaacattaaataacatgccacggatactctcattgacagaattctagtagtgagaggcctggaagggagtagaaagagaaaccacctagttttaacacagcggaaaatagagaagtaatcactcctgggtaaaagaagagatcataaaaatactgcataaagctgtcatttaaaaaattaccactgagcaagtcccccaatgaagctaccagaaaacagtttttctcaagcaaataaatcagatcacatagaaaacaacttttaaaatttatgaacacataagatgctatcatatatgcatgaaacaccaagcataactgttatatcaataaatataaatgtaaatatgatatacacatatacaattaaccattactgaaggacttaaaaaagaatttgatcagatttccagaggagaggagcttgggatactcttttccctrcagtgaaacaaccgtttaactggtaaaaattataaaacacatttaaagtctctggaaattgacctaagggcagatgcaaattaataagcatttattcaagaaa

SEQ ID NO: 608763 - DNA, 229 bp, Homo sapiens
gatgtttcaacaatgttgatgtttgtacaactaggaagatatatgaaaaaataaagttagattcatttcccacatcacataccaaaataaattccaaatacracaaaaattttaatgtgaataaaaataaaactatacaaaaacataaaataacattaaagaatttctttaaaacctggaagtgaggatgacctttttatttctgaaaatccagaatccataaagtatt

SEQ ID NO: 608764 - DNA, 229 bp, Homo sapiens
gatgtttcaacaatgttgatgtttgtacaactaggaagatatatgaaaaaataaagttagattcatttcccacatcacataccaaaataaattccaaatacgacaaaaaytttaatgtgaataaaaataaaactatacaaaaacataaaataacattaaagaatttctttaaaacctggaagtgaggatgacctttttatttctgaaaatccagaatccataaagtatt

SEQ ID NO: 608765 - DNA, 608 bp, Homo sapiens
tggcttttctcaccacctccaatgctacaacctggttggagtcaccatcatctttcactgggaggttgctcaagcctctcacagactccactgtttctacccctgacccctgcagtctactctgagcagagcagtcagaagcattctttgagacttccttttagacacacttctgcccagcaccctgcaatcacttcccacttctgagctggtgggctctgaggccatccatggtctggacccaataccagtccagcctcccctctgaaagctccaccctccctcactgctgcagccatgccagactmcatgctcatccatggatgcaagtggcaagcacctgtctcgtgatccttgctctatctgctctccatttggaagtctcttctctcagatagccatgatctatttctttatctttttcaaattttgtctcaagcttcatcttttcagggggtctacccactgctctgatcaccctgcttaaccctgaaacctcccccacccagatacacacagcacagcgctctgcactctcatcactctgtcctactgttctccataattctgttcacttttaccactctgtactgcccactttattgtgt

SEQ ID NO: 608766 - DNA, 545 bp, Homo sapiens
ctgacccctgcagtctactctgagcagagcagtcagaagcattctttgagacttccttttagacacacttctgcccagcaccctgcaatcacttcccacttctgagctggtgggctctgaggccatccatggtctggacccaataccagtccagcctcccctctgaaagctccaccctccctcactgctgcagccatgccagactccatgctcatccatggatgcaagtggcaagcacytgtctcgtgatccttgctctatctgctctccatttggaagtctcttctctcagatagccatgatctatttctttatctttttcaaattttgtctcaagcttcatcttttcagggggtctacccactgctctgatcaccctgcttaaccctgaaacctcccccacccagatacacacagcacagcgctctgcactctcatcactctgtcctactgttctccataattctgttcacttttaccactctgtactgcccactttattgtgtttattgttgactacctgcccctccctgtgaaaaacaagc

SEQ ID NO: 608767 - DNA, 505 bp, Homo sapiens
aaattcaaataattttttgatagatgtcaacctcagttataaaacgagaaaagcatttaaattaccatgaaataacatttttcacctttagattggcaagaactaaaatttttataatatatatcatcagtaaggctgtggagtgtaagcttttactacctctaccgagggcaattagtatctatcaaagttgcaaatacctgtaatatttgacagagcattcccactttggggtttatacaacatacttgaacatgtgtaaaataatgtatgcataagtgtactcatcaaagctattaactattaacaaaagattcaaaataattttattcttcaatcttggactagttaagtaaatttttgtctaagttcaatggaatgctatgtcttcattttaaaaatacataaagtctacatattgacttatatgaaatattatttagagaaaaaataaggtttaaaacagtgtgtttaataaactgyccttgctgtaaaaagagaaaac

SEQ ID NO: 608768 - DNA, 552 bp, Homo sapiens
ggcaagcacctgtctcgtgatccttgctctatctgctctccatttggaagtctcttctctcagatagccatgatctatttctttatctttttcaaattttgtctcaagcttcatcttttcagggggtctacccactgctctgatcaccctgcttaaccctgaaacctcccccacccagatacacacagcacagcgctctgcactctcatcactctgtcctactgttctccataaytctgttcacttttaccactctgtactgcccactttattgtgtttattgttgactacctgcccctccctgtgaaaaacaagcaccttgaggatggagatctttgtctcttttgctcactgatttgctgaagcacagaaaacttatgagcagtgcttggctcatagcaggtactcaggaaatactgaatcagtgaatataaactaagaagtcaatgatggcttaccatgagtggaaagatgcccatcatgtgggaagcaagtaaatctttacgtgtgcaaaatcagggctttgtcacctgtttagagcaaccatttctt

SEQ ID NO: 608769 - DNA, 552 bp, Homo sapiens
ggcaagcacctgtctcgtgatccttgctctatctgctctccatttggaagtctcttctctcagatagccatgatctatttctttatctttttcaaattttgtctcaagcttcatcttttcagggggtctacccactgctctgatcaccctgcttaaccctgaaacctcccccacccagatacacacagcacagcgctctgcactctcatcactctgtcctactgttctccataattctgttcacttttaccactctgtactgcccactttattgtgtttattgttgactacctgcccctccctgtgaaaaacaagcascttgaggatggagatctttgtctcttttgctcactgatttgctgaagcacagaaaacttatgagcagtgcttggctcatagcaggtactcaggaaatactgaatcagtgaatataaactaagaagtcaatgatggcttaccatgagtggaaagatgcccatcatgtgggaagcaagtaaatctttacgtgtgcaaaatcagggctttgtcacctgtttagagcaaccatttctt

SEQ ID NO: 608770 - DNA, 620 bp, Homo sapiens
ttatttttctgcctgcaaagtaaacatggtaaaagaaatttttcactttaagttatgaaagttgacactattatctataatttttacatgtgcctctattatatgtcctctagtctttcactaaactagtcccactgtaatctgctattatttgtacttattttacctataatttggaaataacrtgattagcatatttttccttaaattttattcctggtctcaaagactttttcgacatagtcattaactctaagactaaacaaaagagaatagctaaagaaaaggttatactaggctggaaagctacaggttgaaggccaggttggcccacattttttttttttttataaataaagatgattgaaacagccatgcccgttcacctgcctcttgtccatggctgctttctaactggcagagttgagtatttgtgacagagaccatatggccacagagccaaaaatatttacttctgtccctttacagaaaggtttgctgaccttgtatgaggcagtcgatcttccttcctactggcttttcacatgttgctgtgtgtctatgtgaggtcatttattgagcaccaaatatgccaaatatgcatcatggctatgagtcta

SEQ ID NO: 608771 - DNA, 429 bp, Homo sapiens
tcaagctgggttcaacaggaatcccttccttgagaatacgtaccaraccacaggattattttagaaagcattaatcctaggaacatgtacttggggtgattcctaacatactaggagttataaatagagcacagacatatttggtctataaataaaattcttttaactgatgttttattgtggtaagatatacataactaaaatgtgccatttcaatgattttcaaatgtacaactcagtggcattaaattcattcccattgttgtgcagacatcaccaatatccactccagcactttccatcatcccacactgaaactccgtacctttcaggtaggagagaaaaaacaccagagaggagacaggactaacatgcagctcccatttagacaaacagatcagcgtctggagattcacattgtgaacttct

SEQ ID NO: 608772 - DNA, 444 bp, Homo sapiens
atcccttccttgagaatacgtaccagaccacaggattattttagaaagcattaatcctaggaacatgtacttggggtgattcctaacatactaggagttataaatagarcacagacatatttggtctataaataaaattcttttaactgatgttttattgtggtaagatatacataactaaaatgtgccatttcaatgattttcaaatgtacaactcagtggcattaaattcattcccattgttgtgcagacatcaccaatatccactccagcactttccatcatcccacactgaaactccgtacctttcaggtaggagagaaaaaacaccagagaggagacaggactaacatgcagctcccatttagacaaacagatcagcgtctggagattcacattgtgaacttctgttccaaggacatactagggagactgaaagaattc

SEQ ID NO: 608773 - DNA, 429 bp, Homo sapiens
tcaagctgggttcaacaggaatcccttccttgagaatacgtaccagaccacaggattattttagaaagcattaatcctaggaacatgtacttggggtgattcctaacatactaggagttataaatagagcacagacatatttggyctataaataaaattcttttaactgatgttttattgtggtaagatatacataactaaaatgtgccatttcaatgattttcaaatgtacaactcagtggcattaaattcattcccattgttgtgcagacatcaccaatatccactccagcactttccatcatcccacactgaaactccgtacctttcaggtaggagagaaaaaacaccagagaggagacaggactaacatgcagctcccatttagacaaacagatcagcgtctggagattcacattgtgaacttct

SEQ ID NO: 608774 - DNA, 436 bp, Homo sapiens
gaattcctcaagctgggttcaacaggaatcccttccttgagaatacgtaccagaccacaggattattttagaaagcattaatcctaggaacatgtacttggggtgattcctaacatactaggagttataaatagagcacagacatatttggtctataaataaaattcttttaactgatgttttattgkggtaagatatacataactaaaatgtgccatttcaatgattttcaaatgtacaactcagtggcattaaattcattcccattgttgtgcagacatcaccaatatccactccagcactttccatcatcccacactgaaactccgtacctttcaggtaggagagaaaaaacaccagagaggagacaggactaacatgcagctcccatttagacaaacagatcagcgtctggagattcacattgtgaacttct

SEQ ID NO: 608775 - DNA, 436 bp, Homo sapiens
gaattcctcaagctgggttcaacaggaatcccttccttgagaatacgtaccagaccacaggattattttagaaagcattaatcctaggaacatgtacttggggtgattcctaacatactaggagttataaatagagcacagacatatttggtctataaataaaattcttttaactgatgttttattgtggkaagatatacataactaaaatgtgccatttcaatgattttcaaatgtacaactcagtggcattaaattcattcccattgttgtgcagacatcaccaatatccactccagcactttccatcatcccacactgaaactccgtacctttcaggtaggagagaaaaaacaccagagaggagacaggactaacatgcagctcccatttagacaaacagatcagcgtctggagattcacattgtgaacttct

SEQ ID NO: 608776 - DNA, 575 bp, Homo sapiens
gtctacccaaatgaaaagaaaccaaaaaagtaattctggtaatatgacaaaacaagttgtatagtaccsccaaaagatcacactagctctccagctgtggtaccaaaccaagaagaaatctctgaattgccaaaaaaaaaaaaaaaaaaaaaaaaattggaaggttggttattaagctattcaaggaggcaccagaataaggtgaaaaccaacttcaagaaattttgaaaacaatacagtatatggatgaaaaagtctccagagaaacatgtatcataaagcaaagacaatcacaatttctggaaatgaaagacacacttagaaaaatacaaaataaactgaaaagtttcaacaatagaataaaacaagtagaataaagaacttcagagctcaatgacaaggctttcaaattaactgaaaaaaaaagacaaagaaaaaagaattttaaaaaattaacagactccaagaaatttggggttttgttaaataaccaagcataagaataattggcattcctgaggaagaaaagaaatctaaatgtttggaaaacttatttgagggaatactcagggaaa

SEQ ID NO: 608777 - DNA, 349 bp, Homo sapiens
agtctacccaaatgaaaagaaaccaaaaaagtaattctggtaatatgacaaaacaagttgtatagtacccccaaaagatcacactagctctcyagctgtggtaccaaaccaagaagaaatctctgaattgccaaaaaaaaaaaaaaaaaaaaaaaaattggaaggttggttattaagctattcaaggaggcaccagaataaggtgaaaaccaacttcaagaaattttgaaaacaatacagtatatggatgaaaaagtctccagagaaacatgtatcataaagcaaagacaatcacaatttctggaaatgaaagacacacttagaaaaatacaaaataaactgaaaagtt

SEQ ID NO: 608778 - DNA, 349 bp, Homo sapiens
agtctacccaaatgaaaagaaaccaaaaaagtaattctggtaatatgacaaaacaagttgtatagtacccccaaaagatcacactagctctccagctgtggwaccaaaccaagaagaaatctctgaattgccaaaaaaaaaaaaaaaaaaaaaaaaattggaaggttggttattaagctattcaaggaggcaccagaataaggtgaaaaccaacttcaagaaattttgaaaacaatacagtatatggatgaaaaagtctccagagaaacatgtatcataaagcaaagacaatcacaatttctggaaatgaaagacacacttagaaaaatacaaaataaactgaaaagtt

SEQ ID NO: 608779 - DNA, 575 bp, Homo sapiens
gtctacccaaatgaaaagaaaccaaaaaagtaattctggtaatatgacaaaacaagttgtatagtacccccaaaagatcacactagctctccagctgtggtwccaaaccaagaagaaatctctgaattgccaaaaaaaaaaaaaaaaaaaaaaaaattggaaggttggttattaagctattcaaggaggcaccagaataaggtgaaaaccaacttcaagaaattttgaaaacaatacagtatatggatgaaaaagtctccagagaaacatgtatcataaagcaaagacaatcacaatttctggaaatgaaagacacacttagaaaaatacaaaataaactgaaaagtttcaacaatagaataaaacaagtagaataaagaacttcagagctcaatgacaaggctttcaaattaactgaaaaaaaaagacaaagaaaaaagaattttaaaaaattaacagactccaagaaatttggggttttgttaaataaccaagcataagaataattggcattcctgaggaagaaaagaaatctaaatgtttggaaaacttatttgagggaatactcagggaaa

SEQ ID NO: 608780 - DNA, 464 bp, Homo sapiens
ctgaaacagtctacccaaatgaaaagaaaccaaaaaagtaattctggtaatatgacaaaacaagttgtatagtacccccaaaagatcacactagctctccagctgtggtaccaaaccaagaagaaatctctgaattgccaaaaaaaaaaaaaaaaaaaaaaaaattggraggttggttattaagctattcaaggaggcaccagaataaggtgaaaaccaacttcaagaaattttgaaaacaatacagtatatggatgaaaaagtctccagagaaacatgtatcataaagcaaagacaatcacaatttctggaaatgaaagacacacttagaaaaatacaaaataaactgaaaagtttcaacaatagaataaaacaagtagaataaagaacttcagagctcaatgacaaggctttcaaattaactgaaaaaaaaagacaaagaaaaaagaattttaaaaaattaa

SEQ ID NO: 608781 - DNA, 555 bp, Homo sapiens
caaaaaagtaattctggtaatatgacaaaacaagttgtatagtacccccaaaagatcacactagctctccagctgtggtaccaaaccaagaagaaatctctgaattgccaaaaaaaaaaaaaaaaaaaaaaaaattggaaggttggttattaagctattcaaggaggcaccagaataaggtgaaaaccaacttcaagaaattttgaaaacaatacagtatatggatgaaaargtctccagagaaacatgtatcataaagcaaagacaatcacaatttctggaaatgaaagacacacttagaaaaatacaaaataaactgaaaagtttcaacaatagaataaaacaagtagaataaagaacttcagagctcaatgacaaggctttcaaattaactgaaaaaaaaagacaaagaaaaaagaattttaaaaaattaacagactccaagaaatttggggttttgttaaataaccaagcataagaataattggcattcctgaggaagaaaagaaatctaaatgtttggaaaacttatttgagggaatactcagggaaaac

SEQ ID NO: 608782 - DNA, 409 bp, Homo sapiens
attcaaggaggcaccagaataaggtgaaaaccaacttcaagaaattttgaaaacaatacagtatatggatgaaaaagtctccagagaaacatgtatcataaagcaaagacaatcacaatttctggaaatgaaagacacacttagaaaaatacaaaatawactgaaaagtttcaacaatagaataaaacaagtagaataaagaacttcagagctcaatgacaaggctttcaaattaactgaaaaaaaaagacaaagaaaaaagaattttaaaaaattaacagactccaagaaatttggggttttgttaaataaccaagcataagaataattggcattcctgaggaagaaaagaaatctaaatgtttggaaaacttatttgagggaatactcagggaaaacttccctggcc

SEQ ID NO: 608783 - DNA, 522 bp, Homo sapiens
aagttgtatagtacccccaaaagatcacactagctctccagctgtggtaccaaaccaagaagaaatctctgaattgccaaaaaaaaaaaaaaaaaaaaaaaaattggaaggttggttattaagctattcaaggaggcaccagaataaggtgaaaaccaacttcaagaaattttgaaaacaatacagtatatggatgaaaaagtctccagagaaacatgtatcataaagcaaagacaatcacaatttctggaaatgaaagacacacttagaaaaatacaaaataaactgaaaagtttcaacaatagaataaaacaagtagaataaagaacttcagagctcaatgacaaggctttcaaattaactgaaaaaaaaagacaaagaaaaaagaattttaaaaaattaacagactccaaraaatttggggttttgttaaataaccaagcataagaataattggcattcctgaggaagaaaagaaatctaaatgtttggaaaacttatttgagggaatactcagggaaa

SEQ ID NO: 608784 - DNA, 591 bp, Homo sapiens
ttagcgctcctgtgtttagaggaagtaaaatgagtcagattagtgctttccatcgtgattgcctcatctgtgcttggagccacttsggaggattctgttggctttatcctggcaccgactagcactgcacagcgtagaaggcacaaggactgaaaaggtcatgtctttctgctcagaaaatttgaatggttatagagtgcagagggcccatgcaaaatgctcattatctgctgtgtctcttgttttcaaaattctttatcaggttactggcaataaaatgctgttcccttttgttaccagacaatgaggcatttataccagcaagtcacctgagaacatagcagccaacattaatgagttgaaagtaccactgggacagtgaagaattgacaagactgctggcctgctgatcttgtttatcttgcctttttttttctttttcaaggtttatttgtggaaagtctgttttcgttgcttatgtgctcatctgtgctgctttaaaatgccttcgtggtggcagagagtaattagcatatagagtctggaaaccaacttttaaattttattaatgagctgagtttagttcccctt

SEQ ID NO: 608785 - DNA, 591 bp, Homo sapiens
ttagcgctcctgtgtttagaggaagtaaaatgagtcagattagtgctttccatcgtgattgcctcatctgtgcttggagccacttcggaggattctgttggctttatcctggcaccgactagcactgcacagcgtagaaggcacaaggactgaaaaggtcatgtctttctgctcagaaaatttgaatggttatagagtgcagagggcccatgcaaaatgctcattatctgctgtgtctcttgttttcaaaattctttatcaggttactggcaataaaatgctgttcccttttgttaccagacaatgaggcatttataccagcaagtcacctgagaacatagcagccaacattaatgagttgaaagtaccactgggacagtgaagaattgacaagactgctggcctgctgatcttgtttatcttgcctttttttttctttttcaaggtttatttgtggaaagtctgttttcgttgcttatgtgctcatctgtgctgytttaaaatgccttcgtggtggcagagagtaattagcatatagagtctggaaaccaacttttaaattttattaatgagctgagtttagttcccctt

SEQ ID NO: 608786 - DNA, 521 bp, Homo sapiens
tactaccttttatcaggttacttacataaaggaattgtgcctattaataaaacatcatgcatcttatttctccaagagcaatgataaccaaactctcctttcccgttccctcttccttccttctctggggtcactttttgctgccctgtgttctgttcagcatgcattggccatgaggatcagattgttagtccagatgactttgaagtagtttttcttatggtaaggttttctcctaagtctgtagcatagaatccttgtttttgggttgatccatgcttaacctgaagatgatagaatgcaaattctgctttatatttgtgtatataaatattgcatcartcacatgtccattttggtggcaacatcgtctgtggttttcttagctgccctgggattgaatttgcttaatcatgttcccttttctttcaggttgtgcttggcttcttgctgcccacacctactccatgatttcatgctaatttctgcccttcttctcagttagtgaaagcttccccgca

SEQ ID NO: 608787 - DNA, 593 bp, Homo sapiens
cccctctcaatactcccatawcggggattgttgcaacacaaattaagatggcctattagatatccttaatcttacatcttaaggtgttctgtgatgttgcagttcaaccccctctcattcctctctactcttttagcagttacaaacaaacaaactcaccaaagaaaacaccagacaaacatacatccaatagtattgtgtccggaattggtgggttcttggtctcactgacttcaagaatgaagccacggacccttgcggtgagtgttacagttcctaaagatggtgtgtccagagtttgttccttcagatgttcagatgggtccagagtttcttccttctggtgggtttgtggtctcactggcttcaggagtgaagctgcagaccttcacagtgttacagctcataaaggtagcatggacccaaagagtgggcagcagccgccaaagacggtgcagacccaaagactgagcagcagcaagatttattgcaaaaggcaaaagaacggagcttccacagtctggaaggccctagccggttgccactgctagctcaggcagcctgcttttattcccttatctggcccaacccac

SEQ ID NO: 608788 - DNA, 494 bp, Homo sapiens
ttcacagtgttacagctcataaaggtagcrtggacccaaagagtgggcagcagccgccaaagacggtgcagacccaaagactgagcagcagcaagatttattgcaaaaggcaaaagaacggagcttccacagtctggaaggccctagccggttgccactgctagctcaggcagcctgcttttattcccttatctggcccaacccacatcctactcattggctcattttagagagagctgattggtccattttacagaaacctgattgggctgttttacagagagctgattggtccattttgacagagcactgattggtgcatttacaaacctttcgctagacacagagcgctgattggtgcatttacaatcctttagctagacaggaaagttctccaagtccccaccagattagctagacacagagcgctgatcgatgcagttacaaacctctagctaaacagaaaagttctccaagtccccacccgacacaga

SEQ ID NO: 608789 - DNA, 593 bp, Homo sapiens
cccctctcaatactcccatatcggggattgttgcaacacaaattaagatggcctattagatatccttaatcttacatcttaaggtgttctgtgatgttgcagttcaaccccctctcattcctctctactcttttagcagttacaaacaaacaaactcaccaaagaaaacaccagacaaacatacatccaatagtattgtgtccggaattggtgggttcttggtctcactgacttcaagaatgaagccacggacccttgcggtgagtgttacagttcctaaagatggtgtgtccagagtttgttccttcagatgttcagatgggtccagagtttcttccttctggtgggtttgtggtctcactggcttcaggagtgaagctgcagaccttcacagtgttacagctcataaaggtagcatggacccaaagagtgggcagcagccgccaaagacggtgcagacccaaagactgakcagcagcaagatttattgcaaaaggcaaaagaacggagcttccacagtctggaaggccctagccggttgccactgctagctcaggcagcctgcttttattcccttatctggcccaacccac

SEQ ID NO: 608790 - DNA, 467 bp, Homo sapiens
agaaggggaagggctaggaagaccagggccgcaggagttccccctccctgagtccttgagcacagccacccaggtgtaaaggacaatatgggggttctggggattcccaagcctgggccctagaggtgagttctagcagggcccccmgatatcctccccatccatcccctcatcctgtatcacatattgtaaaaacaaggaaactgaggcctagagagggaaggggcttgagcagtatcccaggcagttagagacagagcccaagttagaatccatgtttgtctcatttcttccccctaggtctgtctctgactagctatgtgaccttggaagtgtcactccacctctctgggcattgaaggtttacaacttctgacatgttcattccagagggttgtcaggacctgaaagcacatcatctaaataaaacactctacggtctgcaaatattcatatatctcttctgt

SEQ ID NO: 608791 - DNA, 564 bp, Homo sapiens
aagcacatcatctaaataaaacactctacggtctgcaaatattcatatatctcttctgttgtctgaactctgtaatacccctaggaggctgtgaaaattggtgcttgtgtcctattatgcagatgcaaatactggactcagaaagacaaagatcacacagaaagtttgggacagggctggaactagcacccaggtctcccaaagcagagtccttgcyatcactaaggctaggaatacattaagactccaaaatatggagagttgctcaatgcatgccaccaaggttagagctgaccaaccccagaatgctcagcagctctgagaccctggagtggaggactcaaggcagagggtgatgcctaagtcacacacatctgagctccaatccaaactctacgcagctgtgtgtccccactttatgaggctcagcattctctactacaaagtgaaactatagaaggtaccaaaaagctcaggatgaggggagaactgcaccctgaatgcaggactgccaggcaggtggtaagcactcattagcttttgtttcaagcacacaaatcatat

SEQ ID NO: 608792 - DNA, 546 bp, Homo sapiens
aaataacaagatgattgaaggatggggctgatacatggaagagaggaacaagatccagcccttctggctccactcacacccacaaccacataccttggggtagcactggcacatgccccagattaaacccctggacaccatgatgctgccacagagtttcactgaactggagcccatcatgactcaggaggaatgtactgagagccaggagaagacccatacattgaagctgaagtagaaggtcttctcatctgccaaagtctcctcatctgccatggctgccggtcaggcccttgcctgtgcacccctgaaagaaggggcccaagccatccagcataaacatccagacaggctcacaggaagagatgaagctcttggatcactgcaartcaaggtttaaagttaaagggagggcaagagcccttcagctccaggcccattccctggacccaccagtgcagcagggctggaggcagcatgcttcggtggaccagtgaacccacttcccaccttctctccttcccttggggcccagaaggcctggag

SEQ ID NO: 608793 - DNA, 574 bp, Homo sapiens
  misc_feature 332: n = A,T,C or G
tccaggcccattccctggacccaccagtgcagcagggctggaggcagcatgcttcggtggaccagtgaacccactycccaccttctctccttcccttggggcccagaaggcctggagttcatgtgtgaatatgggtgaggaagcatgcaagggagggacaaggggaggttacaggggctggccccagggaagcctgtgacaaaaccttctttgcctactttggggttgaactgagtaagcagctgatcccacaccttctagccccaggaagcagggtacaattctgcagccaaaatatgtaaaaatgctgccagagaatttcaggatcccantgccaggcatttcaggatcctagattttagacccttcaaggatatgtgtccatctggaattcaggcatgatggcccatatacagtggatggtgatgatgtgcatggcaccattctaagcatgttacagctattaactcacttaagggactccatgaggcacgtattgctacacccactatgcagaggacactgagcacagacaagtaacttgcccaagatcacacagctggaaatggtagag

SEQ ID NO: 608794 - DNA, 574 bp, Homo sapiens
  misc_feature 332: n = A,T,C or G
tccaggcccattccctggacccaccagtgcagcagggctggaggcagcatgcttcggtggaccagtgaacccacttcccaccttctctccttcccttggggcccagaaggcctggagttcatgtgtgaatatgggtgaggaagcatgcaagggagggacaaggggaggttacaggggctggccccagggaagcctgtgacaaaaccttctttgcctactttggggttgaactgagtaagcagctgatcccacaccttctagccccaggaagcagggtacaattctgcagccaaaatatgtaaaaatgctgccagagaatttcaggatcccantgccaggcatttcaggatcctagattttagacccttcaaggatatgtgtccatctggaattcaggcatgatggcccatatacagtggatggtgatgatgygcatggcaccattctaagcatgttacagctattaactcacttaagggactccatgaggcacgtattgctacacccactatgcagaggacactgagcacagacaagtaacttgcccaagatcacacagctggaaatggtagag

SEQ ID NO: 608795 - DNA, 491 bp, Homo sapiens
tttgagaaggagccaaatagaaattccagaaataaaaacataattgttgaaattgaagacagattcgacagcagattacatataattgaaaaggaaaatgtaaactggaagacaggctgaagaaattgctcagaatgaagcccaaagaagtaaaaaataagaaaaaaacaagagacrtggaagacaagagtgtcaagatattacaactaacaggatttcataagtaaaataataaactgttagaaaggttttgtaaaaaagataatggcttggaattttctcaaaatgatgaaaaactccacccttcatattcatgaagctcaagttggacagatttaaaaggaaaataaaactcctaaatatatcatcataaaaataacagaaccctgaagaaaaggatagattgaaaacacccgagagaaaattcacattatccatgaaagaatatggatttagaccaagagctaatgtcttaaaaatggaagcaggaa

SEQ ID NO: 608796 - DNA, 550 bp, Homo sapiens
gacagcagattacatataattgaaaaggaaaatgtaaactggaagacaggctgaagaaattgctcagaatgaagcccaaagaagtaaaaaataagaaaaaaacaagagacgtggaagacaagagtgtcaagatattacaactaacaggatttcataagtaaaataataaactgttagaaaggttttgtaaaaaagataatggcttggaattttctcaaaatgatgaaaaactccacccttcatattcatgaagctcaagttggacagatttaaaaggaaaawaaaactcctaaatatatcatcataaaaataacagaaccctgaagaaaaggatagattgaaaacacccgagagaaaattcacattatccatgaaagaatatggatttagaccaagagctaatgtcttaaaaatggaagcaggaagacaatgtactaagaaaaaataatcacatacgaaattagtatatcttttaataaacaggccaaatataagacaatatttaagtcataaaaaccaaacaaatactgaatttgctaactaagagacc

SEQ ID NO: 608797 - DNA, 491 bp, Homo sapiens
tttgagaaggagccaaatagaaattccagaaataaaaacataattgttgaaattgaagacagattcgacagcagattacatataattgaaaaggaaaatgtaaactggaagacaggctgaagaaattgctcagaatgaagcccaaagaagtaaaaaataagaaaaaaacaagagacgtggaagacaagagtgtcaagatattacaactaacaggatttcataagtaaaataataaactgttagaaaggttttgtaaaaaagataatggcttggaattttctcaaaatgatgaaaaactccacccttcatattcatgaagctcaagttggacagatttaaaaggaaaataaaactcctaaatatatcatcataaaaataacagaaccctgaagaaaaggatagattgaaaacacccgagagaaaattyacattatccatgaaagaatatggatttagaccaagagctaatgtcttaaaaatggaagcaggaa

SEQ ID NO: 608798 - DNA, 396 bp, Homo sapiens
tcaggacaacatggtaaataaatgaagccaaacacaaaaggtcacatatgattctgttttttctggtatttggcayatgctagtccatagagacagagaatagactagtggttgccaggggctgggaaaagggggaaatggggagtaactgctagtaagtatggagtttctttttgaaatgataaacatgttctagaattagagagttgtgatagctgtacaactttatgaatacattaaaagcacttaaagcgcctacagtcccagctgctcgggaagctgttgcaggagaatcgcttgaacctgggaggcagaggttgcagtgagccaacatcacaccactgcactccagcctgggtgacagagtgagactccaaatctggaaaaaaaaaggca

SEQ ID NO: 608799 - DNA, 574 bp, Homo sapiens
atatgctagtccatagagacagagaatagactagtggttgccaggggctgggaaaagggggaaatggggagtaactgctagtargtatggagtttctttttgaaatgataaacatgttctagaattagagagttgtgatagctgtacaactttatgaatacattaaaagcacttaaagcgcctacagtcccagctgctcgggaagctgttgcaggagaatcgcttgaacctgggaggcagaggttgcagtgagccaacatcacaccactgcactccagcctgggtgacagagtgagactccaaatctggaaaaaaaaaggcacttagtgtacacttagaatggatactgggctaaaagtgaagtgacaggcctcaaactaggcaaatcttctatacacatatctgacaagggacttcaggaaatcctaaaagtttcaatgatgaaataggagactatagacaaaagacttgaacaatgcacataaggaacccaaataactcataaacaaatgaaaataagctcagcctccttccaaaccacacaagactatttcatatccaactgaaaaaatga

SEQ ID NO: 608800 - DNA, 396 bp, Homo sapiens
tcaggacaacatggtaaataaatgaagccaaacacaaaaggtcacatatgattctgttttttctggtatttggcatatgctagtccatagagacagagaatagactagtggttgccaggggctgggaaaagggggaaatggggagtaactgctagtaagtatggagtttctttttgaaatgataaacatgttctagaattagagagttgtgatagctgtacaactttatgaatacattaaaagcacttaaagcgcctacagtcccagctgctygggaagctgttgcaggagaatcgcttgaacctgggaggcagaggttgcagtgagccaacatcacaccactgcactccagcctgggtgacagagtgagactccaaatctggaaaaaaaaaggca

SEQ ID NO: 608801 - DNA, 574 bp, Homo sapiens
atatgctagtccatagagacagagaatagactagtggttgccaggggctgggaaaagggggaaatggggagtaactgctagtaagtatggagtttctttttgaaatgataaacatgttctagaattagagagttgtgatagctgtacaactttatgaatacattaaaagcacttaaagcgcctacagtcccagctgctcgggaagctgttgcaggagaatcgcttgaacctgggaggcagaggttgcagtgagccaacatcacaccactgcactccagcctgggtgacagagtgagactccaaatctggaaaaaaaaaggcacttagtgtacacttagartggatactgggctaaaagtgaagtgacaggcctcaaactaggcaaatcttctatacacatatctgacaagggacttcaggaaatcctaaaagtttcaatgatgaaataggagactatagacaaaagacttgaacaatgcacataaggaacccaaataactcataaacaaatgaaaataagctcagcctccttccaaaccacacaagactatttcatatccaactgaaaaaatga

SEQ ID NO: 608802 - DNA, 516 bp, Homo sapiens
atacgtaaggcatgattccttttatgtaaagtttcaraatatggaaaactcaaaattatcttctgtagggagaaaaacatacattcttagaatatattaggcaaagacttttacttgtttctttttcagtttaaggatctgctgttctacttttgcaatttttcaatctacacgatccatactttgtattaactcttcgtttgaaagttttgaaggtaaagcattttgatcatctccacatggttgccccgaaattggagaggatggagcttcatgtttgcctccaaatgctggatcctttagagaataaaaccaagaaaaacaattcatttctcactaatagagtccagattgccttaaatgaaacagtcagttttaaaccacagcagagccatgtgtaatatgtgtctaatgaaacctttagcagtaactttcatatttacatatatgcaaattctcacctcacttttatagtttagatataccatgtactattctgaagagcctaaaagctat

SEQ ID NO: 608803 - DNA, 516 bp, Homo sapiens
atacgtaaggcatgattccttttatgtaaagtttcaaaatatggaaaactcaaaattatcttctgtagggagaaaaacatacattcttagaatatattaggcaaagacttttacttgtttctttttcagtttaaggatctgctgttctacttttgcaatttttcaatctacacgatccatactttgtattaactcttcgtttgaaagttttgaaggtaaagcattttgatcatctccacatggttgccccgaaattggagaggatggagcttcatgtttgcctcyaaatgctggatcctttagagaataaaaccaagaaaaacaattcatttctcactaatagagtccagattgccttaaatgaaacagtcagttttaaaccacagcagagccatgtgtaatatgtgtctaatgaaacctttagcagtaactttcatatttacatatatgcaaattctcacctcacttttatagtttagatataccatgtactattctgaagagcctaaaagctat

SEQ ID NO: 608804 - DNA, 541 bp, Homo sapiens
tgatgaaaagcctcatattctgtaatagtatgcactgaatctgagaggccttctgggaaaataagattatggctataccctaaaacctgtacagttctgtaaggaaagcaccaataaaagcaataacaattctaatagacttaatagagttaaagctccagtatcctttgcatctggcatacaatcaatctttggcagctttaagccctagartttatgattcctctcttaagatgtaaatccgtgaggtcattggcttccaaaataaaccagtatgtttcatctaaataaaatatcagtggccgggcatggtggctcatgcttgtaatcccagcactttgggatgccaaggcaggtagatcacaaggtcaggagttcgagaccagcctcaccaacatggttaaaccccgtctctactaaaaaatacaaaaattagctgggtgtggtagcgggcacttgtagtcccagctactcgggaggctgaggcaggagaatggcttgaacccaggagggaaaggttgcagtgagctgagattgcact

SEQ ID NO: 608805 - DNA, 610 bp, Homo sapiens
aataaaaaacagtcttctgcttgggcatgatggctcacacctgtaatcccagcagtttgggaggccgaggcaggcagatcacttgaggtgaggagttygagaccagcctgggcaatatggtaaaaccccatctctactaaaagtacaaaaatcagccaggtgtgctggtgcaagcctgtaatcccagctacttgggaggctgaggcaggagaatggcttgaacccgggaagcggaggttgtggtgagcagagatggcaccactgcactccaacctgggtgacagaggaagactccatctcaaaaacaacaacaacaacaacaacaacaacaaccaccaccacacatgcaaaaacaccatcttctgcttatcaaaacagtaacaacaaattaaaaaggcaaatgattaaataggaaaaccatttgcaaaacatgcactctaacaactcaatataaaataaaccaacagcaaaatgggcaacatatatgaaaaatcaatttacaaaacaggaaaaataaccaataaacaaataaaaaaatgttaaattttactaacaaataatacgtttaatttaaaaacaatcattcatcaaattaacaatctttttgtta

SEQ ID NO: 608806 - DNA, 610 bp, Homo sapiens
aataaaaaacagtcttctgcttgggcatgatggctcacacctgtaatcccagcagtttgggaggccgaggcaggcagatcacttgaggtgaggagtttgagaccagcctgggcaatatggtaaaaccccatctctactaaaagtacaaaaatcagccaggtgtgctggtgcaagcctgtaatcccagctacttgggaggctgaggcaggagaatggcttgaacccgggaagcggaggttgtggtgagcagagatggcaccactgcactccaacctgggtgacagaggaagactccatctcaraaacaacaacaacaacaacaacaacaacaaccaccaccacacatgcaaaaacaccatcttctgcttatcaaaacagtaacaacaaattaaaaaggcaaatgattaaataggaaaaccatttgcaaaacatgcactctaacaactcaatataaaataaaccaacagcaaaatgggcaacatatatgaaaaatcaatttacaaaacaggaaaaataaccaataaacaaataaaaaaatgttaaattttactaacaaataatacgtttaatttaaaaacaatcattcatcaaattaacaatctttttgtta

SEQ ID NO: 608807 - DNA, 610 bp, Homo sapiens
aataaaaaacagtcttctgcttgggcatgatggctcacacctgtaatcccagcagtttgggaggccgaggcaggcagatcacttgaggtgaggagtttgagaccagcctgggcaatatggtaaaaccccatctctactaaaagtacaaaaatcagccaggtgtgctggtgcaagcctgtaatcccagctacttgggaggctgaggcaggagaatggcttgaacccgggaagcggaggttgtggtgagcagagatggcaccactgcactccaacctgggtgacagaggaagactccatctcaaaaacaacaacaacaacaacaacaacaacaaccaccaccacacatgcaaaaacacmatcttctgcttatcaaaacagtaacaacaaattaaaaaggcaaatgattaaataggaaaaccatttgcaaaacatgcactctaacaactcaatataaaataaaccaacagcaaaatgggcaacatatatgaaaaatcaatttacaaaacaggaaaaataaccaataaacaaataaaaaaatgttaaattttactaacaaataatacgtttaatttaaaaacaatcattcatcaaattaacaatctttttgtta

SEQ ID NO: 608808 - DNA, 610 bp, Homo sapiens
aataaaaaacagtcttctgcttgggcatgatggctcacacctgtaatcccagcagtttgggaggccgaggcaggcagatcacttgaggtgaggagtttgagaccagcctgggcaatatggtaaaaccccatctctactaaaagtacaaaaatcagccaggtgtgctggtgcaagcctgtaatcccagctacttgggaggctgaggcaggagaatggcttgaacccgggaagcggaggttgtggtgagcagagatggcaccactgcactccaacctgggtgacagaggaagactccatctcaaaaacaacaacaacaacaacaacaacaacaaccaccaccacacatgcaaaaacaccatcttctgcttatcaaaacagtaacaacaaattaaaaaggcaaatgattaaataggaaaaccatttgcaaaacatgcactctaacaactcaatataaaataaaccaacagmaaaatgggcaacatatatgaaaaatcaatttacaaaacaggaaaaataaccaataaacaaataaaaaaatgttaaattttactaacaaataatacgtttaatttaaaaacaatcattcatcaaattaacaatctttttgtta

SEQ ID NO: 608809 - DNA, 474 bp, Homo sapiens
cctgcctcgacctcccaaagtcctgggattacaggcgtgagccaccatgcccggccaagaagtgggtacctttatacactgttgtcaggagttaagaactggccctactcttttgcaagacaatctggaaatacccactgaaccttaaaaatcaacctggtctgtaattaattatactaaaagaaatctaccttaaggaaacaagtaagaatgcatacagaaaaaacaagctaaataatgtaygggccagctgcagtggctcatgcctgtaatcccagcactttgggaggccaaggtgtgcagatcacctgaggtcaggagttcgagaccagcctggctaacatggtgaaacctcgtctccactaaaaatacaaaaattagctgaacttggtggcatgcacctgtagtcccagctatttgggagcctgaggcaggagaatcgctgggaggtataggttgcagtgagccaagatc

SEQ ID NO: 608810 - DNA, 601 bp, Homo sapiens
gatatacctaggcttaacatttaaaaaaaatctaacaaatgttagttctttttaaatacttacttctggaggtgggcagttgggagagaatggggagagggagatggaaagagaagtattagttagtagtagtagtcatggtttacactttagaggaaaaaaagcaggactagagtcaggggtcctgggttaattccagctcaggaggtactacctaggtcacttaatttttctgaacacccagtttctcaactataacatggaaatgggtcacaytaccacacaacacatctcattttaatgaatgagtttttaaaaacacttgtctgctaaaaaacgaaagttctataaattacatttttggtaatgtattcagccatggaagatgacctttattcactatatttttaatttcttttttttaatgcagcagaacacttcttataaaccccacagactactgtaggataaggatatttcaaatgataaggtgggtcacaaaacacctagaagcttagctaatttctagcttatggcaaagaatatttccccatccaacttactattttgaaaaatttcaaattcacttaaaagttgaagg

SEQ ID NO: 608811 - DNA, 601 bp, Homo sapiens
gatatacctaggcttaacatttaaaaaaaatctaacaaatgttagttctttttaaatacttacttctggaggtgggcagttgggagagaatggggagagggagatggaaagagaagtattagttagtagtagtagtcatggtttacactttagaggaaaaaaagcaggactagagtcaggggtcctgggttaattccagctcaggaggtactacctaggtcacttaatttttctgaacacccagtttctcaactataacatggaaatgggtcacattaccacacaacacatctcattttaatgaatgagtttttaaaaacacttgtctgctaaaaaacgaaagttctataaattacatttttggtaatgtattcagccatggaagatgacctttattcactatatttttaatttcttttttttaatgcagcagaacacttcttataaaccccacagactactgtaggataaggatatttcaaatgataaggtgggtcacaaracacctagaagcttagctaatttctagcttatggcaaagaatatttccccatccaacttactattttgaaaaatttcaaattcacttaaaagttgaagg

SEQ ID NO: 608812 - DNA, 315 bp, Homo sapiens
acgaaagttctataaattacatttttggtaatgtattcagccatggaagatgacctttattcactatatttttaatttcttttttttaatgcagcagaacacttcttataaaccccacagactactgtaggataaggatatttcaaatgataaggtgggtcacaaaacacctagaagcttagctaatttctagcttatggcaaagaayatttccccatccaacttactattttgaaaaatttcaaattcacttaaaagttgaaggaacagtataatggacactcatttatccttcatctagattcaccagtagtt

SEQ ID NO: 608813 - DNA, 626 bp, Homo sapiens
cagtggccatagccagcctcatccccaagaagcctaaacattttatacttgtgtgagtcttcatatgagcacattcacttcactarggctgcagcgtcctggagagatgaatggtttccattcacagatgacaaccctgatggcccatactcagtgacagggatggtccacagctgacaaacctggtggcccatacttagtgacagggatggtccacagctgacaacactagtggcctatactcagtgatgaggatggtccacaactgacaaccctggtggtccatactcagtgacagggatggaagtccttctccatttgccgtttattagagagatatatcaggctcattgtgtggaaggaaacattttccaatgtactccacatgcactctgtgatgctcattgtcctctgacatgtaattaaacactgacacttttctcctagctttcctaaatggctaatgacagaggggtggtaccagctgccccagggtaaactactgagcaaatctaaaggtgtgtcttctagttccatcttctgttagaaaaaccaaatgctcacaaaatgcaataacagtttaaaccacaactgctctctcacaatgtttttcatcaatcattata

SEQ ID NO: 608814 - DNA, 626 bp, Homo sapiens
cagtggccatagccagcctcatccccaagaagcctaaacattttatacttgtgtgagtcttcatatgagcacattcacttcactagggctgcagcgtcctggagagatgaatggtttccattcacagatgacaaccctgatggcccatactcagtgacagggatggtccacagctgacaaacctggtggcccatacttrgtgacagggatggtccacagctgacaacactagtggcctatactcagtgatgaggatggtccacaactgacaaccctggtggtccatactcagtgacagggatggaagtccttctccatttgccgtttattagagagatatatcaggctcattgtgtggaaggaaacattttccaatgtactccacatgcactctgtgatgctcattgtcctctgacatgtaattaaacactgacacttttctcctagctttcctaaatggctaatgacagaggggtggtaccagctgccccagggtaaactactgagcaaatctaaaggtgtgtcttctagttccatcttctgttagaaaaaccaaatgctcacaaaatgcaataacagtttaaaccacaactgctctctcacaatgtttttcatcaatcattata

SEQ ID NO: 608815 - DNA, 461 bp, Homo sapiens
ggtccacagctgacaaacctggtggcccatacttagtgacagggatgktccacagctgacaacactagtggcctatactcagtgatgaggatggtccacaactgacaaccctggtggtccatactcagtgacagggatggaagtccttctccatttgccgtttattagagagatatatcaggctcattgtgtggaaggaaacattttccaatgtactccacatgcactctgtgatgctcattgtcctctgacatgtaattaaacactgacacttttctcctagctttcctaaatggctaatgacagaggggtggtaccagctgccccagggtaaactactgagcaaatctaaaggtgtgtcttctagttccatcttctgttagaaaaaccaaatgctcacaaaatgcaataacagtttaaaccacaactgctctctcacaatgtttttcatcaatcattat

SEQ ID NO: 608816 - DNA, 461 bp, Homo sapiens
ggtccacagctgacaaacctggtggcccatacttagtgacagggatggtccacagctgacaacactagtggcctatactcagtgatgaggatggtccacaactgacaaccctggtggtccatactcagtgacagggatggaagtccttctccatttgccstttattagagagatatatcaggctcattgtgtggaaggaaacattttccaatgtactccacatgcactctgtgatgctcattgtcctctgacatgtaattaaacactgacacttttctcctagctttcctaaatggctaatgacagaggggtggtaccagctgccccagggtaaactactgagcaaatctaaaggtgtgtcttctagttccatcttctgttagaaaaaccaaatgctcacaaaatgcaataacagtttaaaccacaactgctctctcacaatgtttttcatcaatcattat

SEQ ID NO: 608817 - DNA, 631 bp, Homo sapiens
agggatggtccacagctgacaacactagtggcctatactcagtgatgaggatggtccacaactgacaaccctggtggtccatactcagtgacagggatggaagtccttctccatttgccgtttattagagagatatatcaggctcattgtgtggaaggaaacattttccaatgtactccacatgcactctgtgatgctcattgtcctctgacatgtaattaaacactgacacttttctcctagctttcctaaatggctaatgacagaggggtggtaccagctgccccagggtaaactactgagcaaatctaaaggtgtgtcttctagttccatcttctgttagaaaaaccaaatgctcacaaaatgcaataacagtttaaaccacaactgctctctcacaatgtttttcatcaatcattataataatattgtttttaaaataaactttgttttaggagatttgcatatctacagaaacattgtgaacttagagtagacagagttcacatccacycccggctgtgtttatcattaacgtcttacaatattatatatattatattagtgcatttattattattcatgtaccaatattgatatatttttattacttaaagcctatattttactt

SEQ ID NO: 608818 - DNA, 517 bp, Homo sapiens
ataataatattgtttttaaaataaactttgttttaggagatttgcatatctacagaaacattgtgaacttagagtagacagagttcacatccactcccggctgtgtttatcattaacgtcttacaatattatatatattatattagtgcatttattattattcatgtaccaatattgatatatttttattacttaaagcctatattttacttatatttatgtggtttacactgagtgtccttttctgttctgggatctcattcaggatcccaagaaacatttagctgtcaagtctcctgaggctcctctggctgaggcagttgctgggacattttctgctttgtatgaccttgcaggtttggaagagcaccaatcaggggtacartaggatgccccatactgaaatctttatgttgttattctcatgattagactggggtcatggcttttagggaggagaaccacagaggtaaggtgccatcgtcatcacatcatctgaagggtacatactgtcaac

SEQ ID NO: 608819 - DNA, 618 bp, Homo sapiens
cactctttagaaggaggctactttgtgcagcccacacttaatgagtgagaagttttgctccacctcctgagggtggagtatccagacaaattatttagaattcttatgcataatttgtctcatatcycccatttaaatatttactcaattatctattagtaccagtatggactcatggatatttatttggtactttgagttaaaattatatattattctatttattttattgctcaaatttttccagttcaaaaattacccactacaatagttatgtagtggtactttgttgtcattttaagttgcaattctctgttgacaaacaatattgagcattttttcatatccttatttggcatctgtttaccttctttggtgaggggtctgttcaggtttttttacattatttaactgggttgcttgttttcttattgttgaattttaagagttctttgtacattttagatacacattttttatcagatatgcattttgaaaatattttctacaagtctgtggcttgtctatgatacttttaaaaatctattttcacactctaatgagacatatgaagaggaaagaagttagttaattataggagaccaatcatgtctctac

SEQ ID NO: 608820 - DNA, 618 bp, Homo sapiens
cactctttagaaggaggctactttgtgcagcccacacttaatgagtgagaagttttgctccacctcctgagggtggagtatccagacaaattatttagaattcttatgcataatttgtctcatatctcccatttaaatatttaytcaattatctattagtaccagtatggactcatggatatttatttggtactttgagttaaaattatatattattctatttattttattgctcaaatttttccagttcaaaaattacccactacaatagttatgtagtggtactttgttgtcattttaagttgcaattctctgttgacaaacaatattgagcattttttcatatccttatttggcatctgtttaccttctttggtgaggggtctgttcaggtttttttacattatttaactgggttgcttgttttcttattgttgaattttaagagttctttgtacattttagatacacattttttatcagatatgcattttgaaaatattttctacaagtctgtggcttgtctatgatacttttaaaaatctattttcacactctaatgagacatatgaagaggaaagaagttagttaattataggagaccaatcatgtctctac

SEQ ID NO: 608821 - DNA, 618 bp, Homo sapiens
cactctttagaaggaggctactttgtgcagcccacacttaatgagtgagaagttttgctccacctcctgagggtggagtatccagacaaattatttagaattcttatgcataatttgtctcatatctcccatttaaatatttactcaattatctattagtamcagtatggactcatggatatttatttggtactttgagttaaaattatatattattctatttattttattgctcaaatttttccagttcaaaaattacccactacaatagttatgtagtggtactttgttgtcattttaagttgcaattctctgttgacaaacaatattgagcattttttcatatccttatttggcatctgtttaccttctttggtgaggggtctgttcaggtttttttacattatttaactgggttgcttgttttcttattgttgaattttaagagttctttgtacattttagatacacattttttatcagatatgcattttgaaaatattttctacaagtctgtggcttgtctatgatacttttaaaaatctattttcacactctaatgagacatatgaagaggaaagaagttagttaattataggagaccaatcatgtctctac

SEQ ID NO: 608822 - DNA, 618 bp, Homo sapiens
cactctttagaaggaggctactttgtgcagcccacacttaatgagtgagaagttttgctccacctcctgagggtggagtatccagacaaattatttagaattcttatgcataatttgtctcatatctcccatttaaatatttactcaattatctattagtaccagtatggactcatggatatttatttggtactttgagttaaaattatatattattctatttattttattgctcaaattkttccagttcaaaaattacccactacaatagttatgtagtggtactttgttgtcattttaagttgcaattctctgttgacaaacaatattgagcattttttcatatccttatttggcatctgtttaccttctttggtgaggggtctgttcaggtttttttacattatttaactgggttgcttgttttcttattgttgaattttaagagttctttgtacattttagatacacattttttatcagatatgcattttgaaaatattttctacaagtctgtggcttgtctatgatacttttaaaaatctattttcacactctaatgagacatatgaagaggaaagaagttagttaattataggagaccaatcatgtctctac

SEQ ID NO: 608823 - DNA, 610 bp, Homo sapiens
tagtaccagtatggactcatggatatttatttggtactttgagttaaaattatatattattctatttattttattgctcaaatttttccagttcaaaaattacccactacaatagttatgtagtggtactttgttgtcattttaagttgcaattctctgttgacaaacaatattgagcattttttcatatccttatttggcatctgtttaccttctttggtgaggggtctgttcaggtttttttacattatttaactgggttgcttgttttcttattgttgaattttaagagttctttgtacattttagatacacattttttatcagatatgcattttgaaaatattttctacaagtctgtggcttgtctatgatacttttaaaaatctattttyacactctaatgagacatatgaagaggaaagaagttagttaattataggagaccaatcatgtctctacatgggggtgtgtgaagcctcctccctggaggaatctacttttccttggtcttccaaatacattgttatttccaaaaccatatatgaggagtataaaaaagatatgagaatatatcaatactcaaataaagagaaagtgtacttaaaaa

SEQ ID NO: 608824 - DNA, 610 bp, Homo sapiens
tagtaccagtatggactcatggatatttatttggtactttgagttaaaattatatattattctatttattttattgctcaaatttttccagttcaaaaattacccactacaatagttatgtagtggtactttgttgtcattttaagttgcaattctctgttgacaaacaatattgagcattttttcatatccttatttggcatctgtttaccttctttggtgaggggtctgttcaggtttttttacattatttaactgggttgcttgttttcttattgttgaattttaagagttctttgtacattttagatacacattttttatcagatatgcattttgaaaatattttctacaagtctgtggcttgtctatgatacttttaaaaatctattttcacactctaatgagacatatgaagaggaaagaagttagttaattataggagmccaatcatgtctctacatgggggtgtgtgaagcctcctccctggaggaatctacttttccttggtcttccaaatacattgttatttccaaaaccatatatgaggagtataaaaaagatatgagaatatatcaatactcaaataaagagaaagtgtacttaaaaa

SEQ ID NO: 608825 - DNA, 583 bp, Homo sapiens
agttagttaattataggagaccaatcatgtctctacatgggggtgtgtgaagcctcctccctggaggaatctacttttccttggtcttccaaatacattgttatttccaaaaccatatatgaggagtataaaaaagatatgagaatatatcaatactcaaataaagagaaagtgtacttaaaaaaagaattctcacaatgaccagtgaggtagataaaacagacatacataagcgttcacgtttatcagatgcagaaactgaagcccaggtaagccatatgacccagctagagtcactcagtcggcaagagatggagccatgactacactcytagattctatctcctggccccaaattcacttaccttcatcacactagaaccatatcatgttagccaacagaccatcagtgtgtttgtttaaagtgctaacttactgataattcatgcatttaacagtgtatttttcagatgcatttgacccttgctgtgtcagataagtcacttattcaaaatggaataagttaagatgtagcatgagcctaaccatgtctttgctttcttggcactgtaaagctacagtg

SEQ ID NO: 608826 - DNA, 567 bp, Homo sapiens
agacatacataagcgttcacgtttatcagatgcagaaactgaagcccaggtaagccatatgacccagctagagtcactcagtcggcaagagatggagccatgactacactcctagattctatctcctggccccaaattcacttaccttcatcacactagaaccatatcatgttagccaacagaccatcagtgtgtttgtttaaagtgctaacttactgataattcatgcatttaacagtgtatttttcagatgcatttgacccttgctgtgtcagataagtcacttattcaaaatggaataagttaagatgtagcatgagcctaacyatgtctttgctttcttggcactgtaaagctacagtggatcctaagtattctatcatctgattcttccagacaattctttattgtactcaacattttagtggcagtagtccttggaatttgctaatcattttccttaagagttttggaggaaaatatctgttacttagccagctagccaattagaaaattaaaagtccctttagatcataatttaccagtcttgagactactggcttttgg

SEQ ID NO: 608827 - DNA, 567 bp, Homo sapiens
agacatacataagcgttcacgtttatcagatgcagaaactgaagcccaggtaagccatatgacccagctagagtcactcagtcggcaagagatggagccatgactacactcctagattctatctcctggccccaaattcacttaccttcatcacactagaaccatatcatgttagccaacagaccatcagtgtgtttgtttaaagtgctaacttactgataattcatgcatttaacagtgtatttttcagatgcatttgacccttgctgtgtcagataagtcacttattcaaaatggaataagttaagatgtagcatgagcctaaccrtgtctttgctttcttggcactgtaaagctacagtggatcctaagtattctatcatctgattcttccagacaattctttattgtactcaacattttagtggcagtagtccttggaatttgctaatcattttccttaagagttttggaggaaaatatctgttacttagccagctagccaattagaaaattaaaagtccctttagatcataatttaccagtcttgagactactggcttttgg

SEQ ID NO: 608828 - DNA, 536 bp, Homo sapiens
gttagccaacagaccatcagtgtgtttgtttaaagtgctaacttactgataattcatgcatttaacagtgtatttttcagatgcatttgacccttgctgtgtcagataagtcacttattcaaaatggaataagttaagatgtagcatgagcctaaccatgtctttgctttcttggcactgtaaagctacagtggatcctaagtattctatcatctgattcttccrgacaattctttattgtactcaacattttagtggcagtagtccttggaatttgctaatcattttccttaagagttttggaggaaaatatctgttacttagccagctagccaattagaaaattaaaagtccctttagatcataatttaccagtcttgagactactggcttttgggctggataattctttggtgtggtgggctctgatatattataagatgcttagcagcattccaggactgtccctgctagatgccagtagtatccctccaggatgccacaaccataaatgtctctagagattgacaagtgtc

SEQ ID NO: 608829 - DNA, 543 bp, Homo sapiens
tgtactcaacattttagtggcagtagtccttggaatttgctaatcattttccttaagagttttggaggaaaatatctgttacttagccagctagccaattagaaaattaaaagtccctttagatcataatttaccagtcttgagactactggcttttgggctggataattctttggtgtggtgggctctgatatattataagatgcttagcagcattccaggactgtccctgctagatgccagtagtatccctccaggatgccacaaccataaatgtctctagagattgacaagtgtcccttgggggctctattggtccattttcacactgctgataaagatatacctgagactgggaagaaaaatargtttaatggactcccaattccatgtggcttgggaggtctcacaatcatggcagaaggaaacagacacttcttacatggcagcagcaagagacaatgagaactgactgaaagcggtttccccttataaaaccatcatatctcgtaagacttactgtcacaagagcagcacaggaaa

SEQ ID NO: 608830 - DNA, 564 bp, Homo sapiens
ggtccattttcacactgctgataaagatatacctgagactgggaagaaaaataagtttaatggactcccaattccatgtggcttgggaggtctcacaatcatggcagaaggaaacagacacttcttacatggcagcagcaagagasaatgagaactgactgaaagcggtttccccttataaaaccatcatatctcgtaagacttactgtcacaagagcagcacaggaaatacgtgcccccatgattcagttaccccccacttggtccctcccacaacacggaattgtggcagctacaattcaagatgagatttctgtggggacacagccaaaacatatcattctgtccctggcccctcccaaatctcatgtcctcaaatttcaaaaccaatcatgccttcccagtagaaccccaaattgttaacccatttcagcattaattcaaaagtttacagtccaatgtctcatctgagacgaggcaagtcccctctgtctgtgagcccataaaatcaaaagcaagttaattactttctagatacaatgtaggtacatgtattgggtaaat

SEQ ID NO: 608831 - DNA, 533 bp, Homo sapiens
ccttgggggctctattggtccattttcacactgctgataaagatatacctgagactgggaagaaaaataagtttaatggactcccaattccatgtggcttgggaggtctcacaatcatggcagaaggaaacagacacttcttacatggcagcagcaagagacaatgagaactgactgaaagsggtttccccttataaaaccatcatatctcgtaagacttactgtcacaagagcagcacaggaaatacgtgcccccatgattcagttaccccccacttggtccctcccacaacacggaattgtggcagctacaattcaagatgagatttctgtggggacacagccaaaacatatcattctgtccctggcccctcccaaatctcatgtcctcaaatttcaaaaccaatcatgccttcccagtagaaccccaaattgttaacccatttcagcattaattcaaaagtttacagtccaatgtctcatctgagacgaggcaagtcccctctgtctgtgagcccataaaatcaaaagca

SEQ ID NO: 608832 - DNA, 518 bp, Homo sapiens
gggggctctattggtccattttcacactgctgataaagatatacctgagactgggaagaaaaataagtttaatggactcccaattccatgtggcttgggaggtctcacaatcatggcagaaggaaacagacacttcttacatggcagcagcaagagacaatgagaactgactgaaagcggtttccccttataaaaccatcatatctcrtaagacttactgtcacaagagcagcacaggaaatacgtgcccccatgattcagttaccccccacttggtccctcccacaacacggaattgtggcagctacaattcaagatgagatttctgtggggacacagccaaaacatatcattctgtccctggcccctcccaaatctcatgtcctcaaatttcaaaaccaatcatgccttcccagtagaaccccaaattgttaacccatttcagcattaattcaaaagtttacagtccaatgtctcatctgagacgaggcaagtcccctctgtctgtgagcccataa

SEQ ID NO: 608833 - DNA, 533 bp, Homo sapiens
ccttgggggctctattggtccattttcacactgctgataaagatatacctgagactgggaagaaaaataagtttaatggactcccaattccatgtggcttgggaggtctcacaatcatggcagaaggaaacagacacttcttacatggcagcagcaagagacaatgagaactgactgaaagcggtttccccttataaaaccatcatatctcgtaagacttactgtcacaagagcagcacaggaaatacgtgcccccatgattcagttaccccccacttggtccctcccacaacacggaattgtggcagctacaattcaagatgagatttctgtggggacacagccaaaacatatcattctgtcccyggcccctcccaaatctcatgtcctcaaatttcaaaaccaatcatgccttcccagtagaaccccaaattgttaacccatttcagcattaattcaaaagtttacagtccaatgtctcatctgagacgaggcaagtcccctctgtctgtgagcccataaaatcaaaagca

SEQ ID NO: 608834 - DNA, 377 bp, Homo sapiens
gagccctccaaacagtttcaacctatgcctgttagccagttccaaagttgctttcacattttttggtatcttttcagcaatgccccagtccactggtaccaatttactgtattagttcattttcacactrctgataaagacatacctgagactggagagaaaataggtttaataaactcacagttccatgtggctagggaggcctcacaatcatggtggaaggcgaaaagtacttcttacatggcagcagtaagagagaatgggaactaagtgaaaagagttctcccttacaaaacctttatgtctcatgagacttattaattatcatgagaagatcatgggaaaagcctttccccatgattcaattacctcctact

SEQ ID NO: 608835 - DNA, 377 bp, Homo sapiens
gagccctccaaacagtttcaacctatgcctgttagccagttccaaagttgctttcacattttttggtatcttttcagcaatgccccagtccactggtaccaatttactgtattagttcattttcacactgctgataaagacatacctgagactggagagaaaataggtttaataaactcacagttccatgtggctagggaggcctcacaatcatggtggaaggcgaaaagtacttcttacatggcagcagyaagagagaatgggaactaagtgaaaagagttctcccttacaaaacctttatgtctcatgagacttattaattatcatgagaagatcatgggaaaagcctttccccatgattcaattacctcctact

SEQ ID NO: 608836 - DNA, 492 bp, Homo sapiens
tgtctgtagtcccagctactcaggaggctgaggcaggagaaaggcatgaacctagggggcagagcttgcagtgagcggagatcrtgccactgcactctggcctgggtgaaagagcgagactccatctcaaaaaaaaaaaaagaaaagaaagaatctgaaattatacatagcaacacatggaagttgatttgaaaagttgtccgttttgaactaggactccctggagaactggctgactcaagggctagggaagggaaaatgcatgatgaacctggaggaccttgtgttgccagaaagtaaggggtcagggaacaggcctgacaaagcaacatgcagccaacctgaaagagctcccagtggccaaagctggaaaactttgaacaacaaaattaataaaaatactactgagttataacccaaagaaaaaagtaaatatctgtgagtttatactgataaaaataaatggttaaatacataataactgaagaagtg

SEQ ID NO: 608837 - DNA, 469 bp, Homo sapiens
aattatacatagcaacacatggaagttgatttgaaaagttgtccgttttgaactaggactccctggagaactggctgactcaagggctagggaagggaaaatgcatgatraacctggaggaccttgtgttgccagaaagtaaggggtcagggaacaggcctgacaaagcaacatgcagccaacctgaaagagctcccagtggccaaagctggaaaactttgaacaacaaaattaataaaaatactactgagttataacccaaagaaaaaagtaaatatctgtgagtttatactgataaaaataaatggttaaatacataataactgaagaagtgaaaaaaatcttccttgtggaagatttccaaatagtaaacataaaagaaaggagggaaatggaagacaccacttgatgtggtttggctgtgtccccactcaaatcttgtcttgaattgtagctcccataatcccca

SEQ ID NO: 608838 - DNA, 620 bp, Homo sapiens
atacatagcaacacatggaagttgatttgaaaagttgtccgttttgaactaggactccctggagaactggctgactcaagggctagggaagggaaaatgcatgatgaacctggaggaccttgtgttgccagaaagtaaggggtcagggaacaggcctgacaaagcaacatgcagccaacctgaaagagctcccagtggccaaagctggaaaactttgaacaacaaaattaataaaaatactactgagttataacccaaagaaaaaagtaaatatctgtgagtttatactgataaaaataaatggttaaatacataataactgaagaagtgaaaaaaatcttccttgtggaagatttccaaatagtaaacataaaagaaaggagggaaatggaagacaccacttgatgtggtttggctgtgtccycactcaaatcttgtcttgaattgtagctcccataatccccacctggcctgggaggtacccagtgggaggtaattgaatcatggctctgattttttcccatgctgttctggtgatagtgaataaatctcatgagatctgatggtttataaagggcagttcccctccacatgctctcttgcttaccaccatacaagat

SEQ ID NO: 608839 - DNA, 561 bp, Homo sapiens
gaacaacaaaattaataaaaatactactgagttataacccaaagaaaaaagtaaatatctgtgagtttatactgataaaaataaatggttaaatacataataactgaagaagtgaaaaaaatcttccttgtggaagatttccaaatagtaaacataaaagaaaggagggaaatggaagacaccacttgatgtggtttggctgtgtccccactcaaatcttgtcttgaattgtagctcccataatccccacctggcctgggaggtacccagtgggaggtaattgaatcatggctctgattttttcccatgctgttcyggtgatagtgaataaatctcatgagatctgatggtttataaagggcagttcccctccacatgctctcttgcttaccaccatacaagatgtgcctttgctctatctttgccttccaccatgattgtgaggcctccccagtcctgtggaactgtgagtccattaaacatctttttctttataaattacccagtctcccatatgtctttgttagcagtgtaagaatggactaatacaccactagaata

SEQ ID NO: 608840 - DNA, 620 bp, Homo sapiens
atggaggtgagcatcaccagtgataagtagtgttgatgtcaagcatccctggaaatgatgcaatgagaaggacatcaccactgtgttaccttacccccaaatccagaatgccagtgcaatctakagaaaaaatccgcaattgaggagcattctacaaaatacctgactaatactcttcaaaagtgtcaagttcatgagtaacaagggaagacagtgacgctgtcacggattggcagagactaagaagacataacagatgaatgcaacgtggtattctggattggatccttgaataggaaaagggcattattggaaaaactgtcaaaaagccaaataaagtccatagtttagtcaatagtgtagcaatgttgatttcttagttttgataaatgtgtcatggttatataacacgctaaaattaggggagactgggtggaaggctcactggaaccctttatactatccttacaacttttctataaatcttagtatttcaaagttaagtaaaagtgaaaaattgtgaagtcccttctttcttaaaacaaatctaggatgcttgttatgtgttaacaattcttgtaaatgcaaatcactttggagaacaataaatattacccaga

SEQ ID NO: 608841 - DNA, 578 bp, Homo sapiens
acgtggtattctggattggatccttgaataggaaaagggcattattggaaaaactgtcaaaaagccaaataaagtccatagtttagtcaatagtgtagcaatgttgatttcttagttttgataaatgtgtcatggttatataacacgctaaaattaggggagactgggtggaaggctcactggaaccctttatactatccttacaacttttctataaatcttagtatttcaaagttaagtaaaagtgaaaaattgtgaagtcccttctttcttaaaacaaatctaggatgcttgttatgtgttaacaattcttgtaaatgcaaatcactttggagaacaataaatattacccagaaaaactgaccactttcaatccccatgacctagcaattttattgattgtatgtttttaaaaatgtgcctgtgcccawtatcactaattaatagggatgcatatcgaaaccgcaacaatgtaccacttcccagccgttagtttggctactactagaaaacaaaaacaaaaacagatatttgaacgcttgacactgctggtgggaatgtaaaatggtacagtaaca

SEQ ID NO: 608842 - DNA, 581 bp, Homo sapiens
tcatcctggctaacacagtgaaacaccgtctctattaaaaatacaaaaaagttagccaggcatggtggtgggcgcctgtagtcccagctactcaagacgctgaggtggggagaaaggcatgaacccaggtggcagagctttcagtragccaagatcacatcaccaacctccagcctgggtgacagagcgagactccgcccccccccccccaaaaaaaatacatcttggcaattattctcatgcatctatggttctttctattgctaaagagaatttcactacatgggccagatgtggtggctcacgcctgtaatcccagcattttgggaggctgaggcgggtggatcacctgaggtcaagagttcgagaccagcctcaccaacatgctgaaaccccgtctctactgaaaatacaaaaattagccaggcatggtggcacatgcctgtaatcccagctactcgagaggctgaggaaggagaatcgcttgaaaccaggggcagaggttgcggtgagctgaggtcgtgccattgcactccagcctgggcaacaagaatgaaactctgtccaaaaacagagtattt

SEQ ID NO: 608843 - DNA, 498 bp, Homo sapiens
aattaacaacacccaccctaaaggtaaagaaatgcacttctaactaagtacttttgaaactatgaactgcctcaggctagtagttcttaaggtctccagcaaatgttgctttgtttccctcaaaaatatacagcctgggcaacatggcaaaaccccatctctactaaaattacaaaacttagccaggaatggtggtgcaygcctgttgtcccagctactcagggaggcagaggctgcagtgagcctagacctcacactccacttcagcctgggggacagagtgagacccccatctcagatacaaacgcacacatacacatactcacacactatccactggtgcccgtcagttaaacacagcatctcagggcaccttagcacacagtgtgagagtagtggtcctaaacacttcaattaaaagtgaaacatctctggctggatttttagaatatttactttttaatgttttatattatatttattttttatgttttaatt

SEQ ID NO: 608844 - DNA, 498 bp, Homo sapiens
aattaacaacacccaccctaaaggtaaagaaatgcacttctaactaagtacttttgaaactatgaactgcctcaggctagtagttcttaaggtctccagcaaatgttgctttgtttccctcaaaaatatacagcctgggcaacatggcaaaaccccatctctactaaaattacaaaacttagccaggaatggtggtgcatrcctgttgtcccagctactcagggaggcagaggctgcagtgagcctagacctcacactccacttcagcctgggggacagagtgagacccccatctcagatacaaacgcacacatacacatactcacacactatccactggtgcccgtcagttaaacacagcatctcagggcaccttagcacacagtgtgagagtagtggtcctaaacacttcaattaaaagtgaaacatctctggctggatttttagaatatttactttttaatgttttatattatatttattttttatgttttaatt

SEQ ID NO: 608845 - DNA, 604 bp, Homo sapiens
tctaatttaagtaaaatcagcaagaaggatctcagaagagatggcgctggagtcatgttctcaagtagagatgagcgtgttttgaaatgatatggtcagagcctcacgtgatttgaatactatttcttacatatctactggtgagtttcagaggcaaacaagaacttgaatgagagtacattagaaaactaattatatttcaagaatattttacaaatggtttgaggtaggcttagtgatatkgtttggctgtgttcccacccaattctcaccttgaattgtaataatccccgcacattagccacctggcggggccaggtggagataattgaatcatgggggccatttcctcccatagtgttcccgtggtagtgaataagtctcatgagatctgatggttttatagaggggaatttccctgcacaagctatctgttgcctgctgccatgtaagatgtgtccttcttcctcttcactttctgccatgattgtgaggcctcctcagccatgtggaactgtgagccaattaaacctccttcctttgtaaattacccagtcccaggtatgtctttattagcagtatgagaacaaactaatacacttag

SEQ ID NO: 608846 - DNA, 604 bp, Homo sapiens
tctaatttaagtaaaatcagcaagaaggatctcagaagagatggcgctggagtcatgttctcaagtagagatgagcgtgttttgaaatgatatggtcagagcctcacgtgatttgaatactatttcttacatatctactggtgagtttcagaggcaaacaagaacttgaatgagagtacattagaaaactaattatatttcaagaatattttacaaatggtttgaggtaggcttagtgatatggtttggctgtgttcccacccaattctcaccttgaattgtaataatccccgcacattagccacctggcggggccaggtggagataattgaatcatgggggccatttcctcccatagtgttcccgtggtagtgaataagtctcatgagatctgatggttttatagaggggaatttccctgcacaagctmtctgttgcctgctgccatgtaagatgtgtccttcttcctcttcactttctgccatgattgtgaggcctcctcagccatgtggaactgtgagccaattaaacctccttcctttgtaaattacccagtcccaggtatgtctttattagcagtatgagaacaaactaatacacttag

SEQ ID NO: 608847 - DNA, 486 bp, Homo sapiens
gcataggaagcccacacacagggtgggatgacaagtttgcatctggctctgctgggagccctgggggcctctgcccttttggccgcgttgtctcctgcatcttatkttggtgggattctggactctgattgcagcaggtggattcacttagctctcctccccttttagcattactgtcttctgtaataaacctctcactttgatctgccaggctgtcaaatgctttgattggcctctctgatttgttccaatggttcatcaatccaaatatccacaatagaaggacagattttagtctcttcatacagtgggatatttcacagctattaaaacaaataaaataaatgcttgtatattgatatgcaaagttgtcccacatcaataacttttaaacacattttatgatcccacatctatatctatacataacatttgccactgcttaaacaaaacaaaatctgagctttaaactccaaatggaattac

SEQ ID NO: 608848 - DNA, 606 bp, Homo sapiens
tattaaaacaaataaaataaatgcttgtatattgatatgcaaagttgtcccacatcaataacttttaaacacattttatgatcccacatctatatckatacataacatttgccactgcttaaacaaaacaaaatctgagctttaaactccaaatggaattacagaggagtcttgatgtctgtgttccgcagttctgtcatgtttgaaattgtcaaataaacatgctgcctttccagtagccactcagaattcctcctctctgtccacaaagcattgtcaccctccctgtcccatttgccccagcccagtggagcttgctgagctggcaccatcatctcttgtaatagacaaagacattgaggaccagagaggggaagcaccttgttgacatcccacagctctgagtcaaagtggactttgactcccttactagctgtttcctaaagtccagggagccctggaggcccaggaatgtaagggctggagcctggggctttctgtcctgaagcaggggaagtggggctacagctaacggcttgagtgcatttcctctcaagtacaataagggctgctttgttagatgcaaaatataaatggctgcctgca

SEQ ID NO: 608849 - DNA, 606 bp, Homo sapiens
tattaaaacaaataaaataaatgcttgtatattgatatgcaaagttgtcccacatcaataacttttaaacacattttatgatcccacatctatatctatacataacatttgccactgcttaaacaaaacaaaatctgagctttaaactccaaatggaattacagaggagtcttgatgtctgtgttccgcagttctgtcatgtttgaaattgtcaaataaacatgctgcctttccagtagccactcagaattcctcctctctgtccacaaagcattgtcaccctccctgtcccatttgccccagcccrgtggagcttgctgagctggcaccatcatctcttgtaatagacaaagacattgaggaccagagaggggaagcaccttgttgacatcccacagctctgagtcaaagtggactttgactcccttactagctgtttcctaaagtccagggagccctggaggcccaggaatgtaagggctggagcctggggctttctgtcctgaagcaggggaagtggggctacagctaacggcttgagtgcatttcctctcaagtacaataagggctgctttgttagatgcaaaatataaatggctgcctgca

SEQ ID NO: 608850 - DNA, 606 bp, Homo sapiens
tattaaaacaaataaaataaatgcttgtatattgatatgcaaagttgtcccacatcaataacttttaaacacattttatgatcccacatctatatctatacataacatttgccactgcttaaacaaaacaaaatctgagctttaaactccaaatggaattacagaggagtcttgatgtctgtgttccgcagttctgtcatgtttgaaattgtcaaataaacatgctgcctttccagtagccactcagaattcctcctctctgtccacaaagcattgtcaccctccctgtcccatttgccccagcccagtggagcttgctgagctgrcaccatcatctcttgtaatagacaaagacattgaggaccagagaggggaagcaccttgttgacatcccacagctctgagtcaaagtggactttgactcccttactagctgtttcctaaagtccagggagccctggaggcccaggaatgtaagggctggagcctggggctttctgtcctgaagcaggggaagtggggctacagctaacggcttgagtgcatttcctctcaagtacaataagggctgctttgttagatgcaaaatataaatggctgcctgca

SEQ ID NO: 608851 - DNA, 437 bp, Homo sapiens
tgcaaagttgtcccacatcaataacttttaaacacattttatgatcccacatctatatctatacataacatttgccactgcttaaacaaaacaaaatctgagctttaaactccaaatggaattacagaggagtcttgatgtctgtgttccgcagttctgtcatgtttgaaattgtcaaataaacatgctgcctttccagtagccactcagaattcctcctctctgtccacaaagcattgtcaccctccctgtcccatttgccccagcccagtggagcttgctgagctggcaccatcatctcttgtaatagacaaagacattgaggaccagagaggggaagcaccttgttgacatcccacagctctgagtcaaagtggactttgastcccttactagctgtttcctaaagtccagggagccctggaggcccaggaatg

SEQ ID NO: 608852 - DNA, 606 bp, Homo sapiens
tattaaaacaaataaaataaatgcttgtatattgatatgcaaagttgtcccacatcaataacttttaaacacattttatgatcccacatctatatctatacataacatttgccactgcttaaacaaaacaaaatctgagctttaaactccaaatggaattacagaggagtcttgatgtctgtgttccgcagttctgtcatgtttgaaattgtcaaataaacatgctgcctttccagtagccactcagaattcctcctctctgtccacaaagcattgtcaccctccctgtcccatttgccccagcccagtggagcttgctgagctggcaccatcatctcttgtaatagacaaagacattgaggaccagagaggggaagcaccttgttgacatcccacagctctgagtcaaagtggactttgactcccttactagctgtttcctaaagtccagggagccctggaggcccaggaatgtaagggctggagcctggggytttctgtcctgaagcaggggaagtggggctacagctaacggcttgagtgcatttcctctcaagtacaataagggctgctttgttagatgcaaaatataaatggctgcctgca

SEQ ID NO: 608853 - DNA, 531 bp, Homo sapiens
actgacttcattaaataccaacaccttctaggtgccaggtactgctctagatgttggaatctgcagtgcataagatacccagaatccctgcccctgtgtagctctcactgtagtagagcagaacagatgatgaataaataagcatgcagggtgtgagatgggtgggagagctgcattgcggaacygggcagtgtgcaaagtggacactcaggaaagaacctgagggttgaactatggatatgatggagaaaattcacccctaacatgagtgcagacactccagctacaataacaagcgaaggtggagaaggaagcacagaggcaagcagctggggagatgtgggggtgggatccagggaaggttctctctttattgcatctattttcaaattgaagtgggaagcaaggcagcaggtgtaaggaaggctggggaaggttttagaggtttaaggaggaaggagaaggcacgatactgttgcttggggacagggcagcacttccagagctgggtgcctgggctccagggcaagt

SEQ ID NO: 608854 - DNA, 531 bp, Homo sapiens
actgacttcattaaataccaacaccttctaggtgccaggtactgctctagatgttggaatctgcagtgcataagatacccagaatccctgcccctgtgtagctctcactgtagtagagcagaacagatgatgaataaataagcatgcagggtgtgagatgggtgggagagctgcattgcggaaccgggcagtgtgcaaagtggacactcaggaaagaacctgagggttgaactatggatatgatggagaaaattcacccctaacatgagtgcagacactccagctacaataacaagcgaaggtggagaaggaagcacagaggcaagcagctggggagatgtgggggtgggatcyagggaaggttctctctttattgcatctattttcaaattgaagtgggaagcaaggcagcaggtgtaaggaaggctggggaaggttttagaggtttaaggaggaaggagaaggcacgatactgttgcttggggacagggcagcacttccagagctgggtgcctgggctccagggcaagt

SEQ ID NO: 608855 - DNA, 533 bp, Homo sapiens
tgactgacttcattaaataccaacaccttctaggtgccaggtactgctctagatgttggaatctgcagtgcataagatacccagaatccctgcccctgtgtagctctcactgtagtagagcagaacagatgatgaataaataagcatgcagggtgtgagatgggtgggagagctgcattgcggaaccgggcagtgtgcaaagtggacactcaggaaagaacctgagggttgaactatggatatgatggagaaaattcacccctaacatgagtgcagacactccagctacaataacaagcgaaggtggagaaggaagcacagaggcaagcagctggggagatgtgggggtgggatccagggaaggktctctctttattgcatctattttcaaattgaagtgggaagcaaggcagcaggtgtaaggaaggctggggaaggttttagaggtttaaggaggaaggagaaggcacgatactgttgcttggggacagggcagcacttccagagctgggtgcctgggctccagggcaagt

SEQ ID NO: 608856 - DNA, 531 bp, Homo sapiens
actgacttcattaaataccaacaccttctaggtgccaggtactgctctagatgttggaatctgcagtgcataagatacccagaatccctgcccctgtgtagctctcactgtagtagagcagaacagatgatgaataaataagcatgcagggtgtgagatgggtgggagagctgcattgcggaaccgggcagtgtgcaaagtggacactcaggaaagaacctgagggttgaactatggatatgatggagaaaattcacccctaacatgagtgcagacactccagctacaataacaagcgaaggtggagaaggaagcacagaggcaagcagctggggagatgtgggggtgggatccagggaaggttctctctttattgcatctattttcaaattgaagtrggaagcaaggcagcaggtgtaaggaaggctggggaaggttttagaggtttaaggaggaaggagaaggcacgatactgttgcttggggacagggcagcacttccagagctgggtgcctgggctccagggcaagt

SEQ ID NO: 608857 - DNA, 568 bp, Homo sapiens
atgagtgagtttgtaggacatcatccagggcccactggaggtttgggcttgatgattaagtgagagcaaaaggcacgtgtgtttctctctggctgtgctcagccacctgactgcaggagcagagggagcgggtggctggctttcagcagagtgcagttttgccctgggagcacaattaattgtggggcaagagagtggagagtgttagagagggtggatgacaggctggaccatatagtctcagctgggaggaggggaaatttgcaagaaacagagtgagacacaaaagtgaaaatttggagtcattgaagtgtcttggagttgggaggcagctggaaaaaggaaagttgtggtcaaaaaaagcgtgtttgaaattgagrgtctggagtagctacagtttctgcagtgacaagaatatacaggtaggagtgggtgactcagggagggtggagacaaggtctctaggggtggagggaccaagagccagaacatgaggaggactctctatgtgcatgttggaatcacctcagcaggaaaaagtgcccatgaactgggagctaagtcttca

SEQ ID NO: 608858 - DNA, 508 bp, Homo sapiens
tgaaattgagagtctggagtagctacagtttctgcagtgacaagaatatacaggtaggagtgggtgactcagggagggtggagacaaggtctctaggggtggagggaccaagagccagaacatgaggaggactctctatgtgcatgttggaatcacctcagcaggaaaaagtgcccatgaactgggagctaagtcttcaatgcatagggatgtggccctgggtgcaatctgagggcaagagcttcaatattgattcccttcgtgtgtcaccgtgtccttgggtartttttctttgtgtgaacgtcacagagtgtgcttacacacacctcaatattgtacctactgtacacctaggctctatggcacagcctaccgctctcaggctgcacacctgggcacaggttactgcagtgaatattgttggcagttgtagcacaatggtcagtacttgcacatctaaacatatcatgaaaaatacagtaaaaacatagtattgcactatataaaa

SEQ ID NO: 608859 - DNA, 428 bp, Homo sapiens
gggccacctcctcctgacatcactccctgaactttctcctgtgtttccattctcttcttcaccaactgatgttgacatttctatgggactatctctctctctctagaccagaaacgcctacagttgcagccccctgtagtgcaatttgtgtcagtctggggagagtggatttggagcccaaccaccattgaggaaaatccgtctgatggacatggtgggttccagcccagacgcagggctcagcraggggtggtgtgacagtgagcacagaccctgagtggtggtgagagtggctgtcatggggaggaaaggaatggaaaacggacctcatgggagcagaaagaaaggccttagctgcagatgggccaggaccccgccaggaatccagaacatgcatcataatcccagctccgctataagtccacggc

SEQ ID NO: 608860 - DNA, 574 bp, Homo sapiens
ctaaccaattgataagtattgctcactactcgcagaaaatatagatttttttcttaaaaatcatagacaaaacacagttaattaatttaatggttatacctttcctgacatactatgtaaccttggcttatatgcctggcttagagatgttttccaaagttgtggtgtaacaaaaacatttaaataatgagtattccggtggtatttttgaaatggcagttaccagcaaataaacatctgtttggacgtggtaacagggaaactactctgcatccattcacccctctcaacagttgattctcctgcagcacagaagkctttctttatttatgaagcaaacgtcttcttcactcccaggacttcaccattggtaggccaccctagcctgcctctaatcatcacttcatcgtctttcacaacctgcattttccctgcccctgatttctcattctgttattgacctcttgcacattccccctctggtgtgaattacttttgctgactaaactcaggcatggtcccaaaactataatttgagctcacccccatggtggcacctccaggctgattgcat

SEQ ID NO: 608861 - DNA, 582 bp, Homo sapiens
ttctcctgcctcagcctcccgagtagctggaattacaggtgcctgctaccacgcccagctaatttttgtatttttagtagagatggggtttcactgtgttgtccaggctggtctcgaactccagacctcatgatccacccgccttggcctcccaaagtgctgggattacaagcatgagccaccgctcccagccatggatatacttttaaaaccaccataagtggtgttccccagagtagcagtacttgaatggattacttttattcagcagatatttaaagaatacatttatgtaccatatataaagagagcacatatatgtggaaatctagamgcttcagataaaaaggatgaataagacaaagttcctaccattaagatactggaagagtgaaccatttattatcacattattgcagtggaaaaccactttgtagcagaggttctcaaccctggctacacagtagaatagctagggtgctttctaaatatatggatatctgatcccaccgaacaacacttagtaaaaatctttgtggatggggtccggacatcaatacttttgaaagtttttcaggtgat

SEQ ID NO: 608862 - DNA, 528 bp, Homo sapiens
tgcagtgagctgagatcatgccactgcataccagcccctgagtgacaaagtgagactctgccaaaaaaaaaaaaaaaaaaaaaagagagagagagagattcaaaaaaattatgtaaaataataccaaactaacacagrcagctatttatattttacacctttttctcctttctttacttttgaaattataattatggtgtggcttggctatacctgactgagtcatgcttttggcatgggatcatgggtcagcttgctttctaagttaaaaatctgagcacattcctgcaaggctaccccaaaatggaaggatagtgcttaaaaataactgttgagacatcaaactgagatatcaattaagggttaagcttaattcactaaaaactctgcttcattagttctgggatggggccaggaatatgtgattttgatatcagagtctttagtttcaaaaaacagaaattttaactcttgagttaatcatacttcaaaattatgattcatcattgcctacatacaaaatgcaaa

SEQ ID NO: 608863 - DNA, 519 bp, Homo sapiens
cttcaccacactcaacgttattcagttagcagattagctttatatgaagttttacctttttcagcttctcatatcaccatctctaggcataaaaatctaagtcctacagttcttctscctttactttcagatgaaacactgcacaattgaataaccttaacttttcaacttctctgtcctacgagaagagagtctccttaatcatgctgatgtagtttggtttaaagatggaccttaaaggatgtatctgggacttaccgtgcaagctactcaatattatctttaactgaaaaaacagaacgtgcttaacttccagaagccacctcagctccaaaagcagaattaattttattgattagggcttgttgattgtcaaaaagagcaactgctaatatctatacaaacagtagatatgctttcaaagtagctcataattatggaatacaatgggaacagagagaatttttaacctcttctagtcaattcatagaaaatgagcagacaattttacaattgttg

SEQ ID NO: 608864 - DNA, 482 bp, Homo sapiens
aattaaaatatatatatatatcaaaatcataccagccacactcttggactacagggcaataaaaatagaaatcaatatcaaaaagatctcttaataccaaaaaattatatgcaaatagacaacttcctcctgaatgacttttggtaaacaatgaaataaggcatgaatcaaaaaattctttgaaattgttaaaagtaaacacaacataccaaattgttagagatacagctaaagcagtgttaagaagtttatagcaataaaagactataacttgggttcagtgtatactgcttgggtgatgggtgcaccaaaatctcacaaatcaccgctaaagaacgtactcatgtaaccaaataccacctgttccccaaaagcctatggaaatatatattttttaaagcytacatcaagaagttagttaaattaacaatctaaaattgaacctacaggaactagaacaacaagaacaaactaaccccaaa

SEQ ID NO: 608865 - DNA, 587 bp, Homo sapiens
gataactacataaataaataaaaaagatagtatacatttgttttttacttataacttgtatttttaccccatgttttaaaaaaacaattgcacaaaacaataattataaatcaatacttaatattaaacaatatattacgatgtaatttgtgacaataacgacagaaagaaggaagaaaaaagtaatgtatgatcacatattttatatacaggggtactctgcctcgcatggctaatttttgtgttatttagtaaagatgggattttcccatcttgcccaggctggtctcgaactccagagctcaagtgatccaccttcctcagcctcccaaagttctggggttgcagacytgagccatgcacctggctaaaatttgagttcctgagttgagaactttatttatttattttactcaacttttattatatgttcagggggttcatgtacaggtttgttacatgagtaaattgcatgttgctgaggtttggtatacaaatggccctgttacccaggtagtgagcttgcaccctatagttaattttacagccctctcctccctaaaactctcccttctctggtagtcccc

SEQ ID NO: 608866 - DNA, 587 bp, Homo sapiens
gataactacataaataaataaaaaagatagtatacatttgttttttacttataacttgtatttttaccccatgttttaaaaaaacaattgcacaaaacaataattataaatcaatacttaatattaaacaatatattacgatgtaatttgtgacaataacgacagaaagaaggaagaaaaaagtaatgtatgatcacatattttatatacaggggtactctgcctcgcatggctaatttttgtgttatttagtaaagatgggattttcccatcttgcccaggctggtctcgaactccagagctcaagtgatccaccttcctcagcctcccaaagttctggggttgcagacctgagccatgcacctggctaaaatttgagttcctgagttgagaactttatttatttattttactcaacttttattatatgttcagggggttcatgtacaggtttgttacatgagtaaattgcatgttgctgaggtttggtayacaaatggccctgttacccaggtagtgagcttgcaccctatagttaattttacagccctctcctccctaaaactctcccttctctggtagtcccc

SEQ ID NO: 608867 - DNA, 587 bp, Homo sapiens
gataactacataaataaataaaaaagatagtatacatttgttttttacttataacttgtatttttaccccatgttttaaaaaaacaattgcacaaaacaataattataaatcaatacttaatattaaacaatatattacgatgtaatttgtgacaataacgacagaaagaaggaagaaaaaagtaatgtatgatcacatattttatatacaggggtactctgcctcgcatggctaatttttgtgttatttagtaaagatgggattttcccatcttgcccaggctggtctcgaactccagagctcaagtgatccaccttcctcagcctcccaaagttctggggttgcagacctgagccatgcacctggctaaaatttgagttcctgagttgagaactttatttatttattttactcaacttttattatatgttcagggggttcatgtacaggtttgttacatgagtaaattgcatgttgctgaggtttggtatacaaatggccctgttacccaggtagtgagcktgcaccctatagttaattttacagccctctcctccctaaaactctcccttctctggtagtcccc

SEQ ID NO: 608868 - DNA, 610 bp, Homo sapiens
gaacattaaagatttgtgatttaacagtgaattattactgtgtgctgagaaagtttgtctaaagaacactttagaatgttttgtgtaagtgcgaccattctcctaaataaagtaacacctaaagtcatgcygtaatgcagttctggaaagagctattgaattagaatcattttcacttcctggcagcccagtaagcacgtctgtgaacttgggtaagtcacttaatcttcctaagcttggtatccgcttctataaaaatggaaatgatattctaatgccacttcctcccatgatggtttttaaaaaatagttgagataacctatgtcaaaaggccaattgcaatgtctggcatttttgaattaaacaaattaggtgtgtaaaatgactgagaaatataatgcctgcctcaaaatagttgagcattaaaacattttttatactctcctgtacagtttctgaatctcttacccttctaaaactgttcttcagtctttctgtccttacttaatctctgacacaccgtatgtattttgggataataaaagtccaagtaattacacttttgttcttttcctttttaaattatctttatgcatgttaagattttct

SEQ ID NO: 608869 - DNA, 523 bp, Homo sapiens
ggaattggctcctgtgatgatggaggctgtgaagtctcatagtaggctgtctgcaagctggagaaccaggtaagttartggtataactgtcagtccaagtcccaaagcccaagaaccagggaatttgggggtttggggtacaagttccaaaggccagagaacctggagtgctgatatctgggagcaggagaagaagggtgccccagtttcagaagacagagcaaatttacctttcctctctcttttggttctgtctgggccctcagctgattggatggtgcctgcctacattggataagtgcggatcttccttctcagtccactgattcaaatgtcagtctttcatggaaacacccctatagctatacccagaaaaatgtttttaccagctgtctgcatattccttaagccagtaaccatcacaaagcctcatatccaactttaagcttttccacatagctcaggggagggaatatatattctgttttttcagattcagctttctgtttctcatcttggggtg

SEQ ID NO: 608870 - DNA, 622 bp, Homo sapiens
gtaagtaatctctcctagaggaagtgaaatctatgtagatgcctgaaggagaagcaggagttaggcaggtgagtgtagtgagggagaagagcgtaccctggcaggaactatctttacaaggacccctgcatgaacagagaatgtagaatcttgaagaacttaaagttcagaatatctgaaactaatagggcaagtaggggctcataggagtgggcttattgattttagaggaataaacagaaaccacattatgaracaagtttgaaagtgatgctaaaataattggagaacaaccaaaacattttttaatagaggcattgcatcattagatttgtattttagaaagattgctgataagtagatagttattgggagataatagattgaagaagcagaaggaatcctggaagatcagttaagaagctattgcattaatccaggtgtgatatatgatggtggcttagaatagggatgtgtaacaggtgtgaagagaaatagataaattagagagcaatttggggtatgaaatagccaacatttaaagactgacagaatttgggggttgaaaaaggaggagacatgaatgaggcaggagtttctgttctggaatgccacgtcgttt

SEQ ID NO: 608871 - DNA, 562 bp, Homo sapiens
aagccatgtaattcttaagtgtctcaaagtacctaggggctcttaatatttggcttcacaagtttctaatgaaagctaatatgcattagctaaaatatatagctatatattatatatgctatatgtattatatataatatgctatatatatgttatatatattatatataatatatagctaatattatttatgaggtataaccctgttgttcatagcaacaagatgttgttatgaracttcttaagaggtaaatattttcctcagtaagagattaagaagatacccacaagaggtagacttgtgtgataaacaaagataatttagagaagactaagcagtctgcaaagctcagtaaaacttggtgcctcacaagcaatctccttacagataaggtccgcatttatcagctccccctcctgtattgtctgtctacccagtcaactttcatttacattatagaacatttctgcagtgatgtactctttactccttgatttgtaaatgtatgtaggaatcttgtgtctaagtagacaggaggagaaaaatttgtggtggaagtaa

SEQ ID NO: 608872 - DNA, 562 bp, Homo sapiens
aagccatgtaattcttaagtgtctcaaagtacctaggggctcttaatatttggcttcacaagtttctaatgaaagctaatatgcattagctaaaatatatagctatatattatatatgctatatgtattatatataatatgctatatatatgttatatatattatatataatatatagctaatattatttatgaggtataaccctgttgttcatagcaacaagatgttgttatgaaacttcttaagaggtaaatattttcctcagtaagagattaagaagatacccacaagaggtagacttgtgtgataaacaaagataatttagagaagwctaagcagtctgcaaagctcagtaaaacttggtgcctcacaagcaatctccttacagataaggtccgcatttatcagctccccctcctgtattgtctgtctacccagtcaactttcatttacattatagaacatttctgcagtgatgtactctttactccttgatttgtaaatgtatgtaggaatcttgtgtctaagtagacaggaggagaaaaatttgtggtggaagtaa

SEQ ID NO: 608873 - DNA, 545 bp, Homo sapiens
catattcctagctcttagaggagcctgattttttcaaagttttgtttamcatttaaataaagataaaaaagtctgaattaatagtttctataatataatcaatacatttcaatgaaatatgaatccaggacacatcagtaagtgaaaagtagagaaacagaattataaactatcactaccataatatttacaaagataacactttccaaactagaccttaaattttctttagaatattatgatgcctttaaaattctgtttcctttactggattacttaattttaaataccttttttggaaagtggtctttctttttcattgacaagtaaaaattgtgtgtgcatctatatggtatacaacatgctgttttgatataagtgtacattgagtaatggctaaatcaagctatttagcctatgcattaactcacatacttatctttttatggtgaaagcatttaaaatctcctctcttagcaatttgcaagtatacaacatattgttattaactatatttaccatgatgtacaacagatctcttgaac

SEQ ID NO: 608874 - DNA, 628 bp, Homo sapiens
cctgtttttttgttccactgttcctcctatacagctttcttttgtattaagtgaatatttttaaatgaacatttaaatttatttaatgatttttttcaagttcatttttaktttttttttagtggttgctctaaggcttaccatatacatcttaacttataagaatcagcttcagatttttcctagcttaatttcagtgagatacagaaatgttatccctttatagctctattcccctctccttccttctgtagtagtattctatctgttgtatctattactgtaatacaccaattaattaactgttataataattactttactatctgcagtcatttttttagcccaatacagttttgctcctttgtgctataagcaaatacatattacagaatattacatttaaatattacataggcctaatatatacacaatatttacagaactgctttttaaattagttaacaggaaaaaaatgagaactttatgctgtcttttataattccataataattaactttaccagtgtttctttccccactctcaccaatgtggattcaaattactgccagagatcacctgctttcaggctgaataacttcttttagtacttcttataaggtgggtt

SEQ ID NO: 608875 - DNA, 615 bp, Homo sapiens
agccaacttaagtagggcttgacagaatatggtttaaaaaagaaaagaaaaaatactatatattgtattccaagtgcactaagaagcataccagaagagttttacaaaagacagtgacatgattaaagatttctgctttttgtttaatgactctggttcctgtatggattaaaattttggtttgtattctatttggaaaatagattatagagggtaaaggtggaggcaagaagacaacaagttaggaaacaaacctagtgaaaccctacactgccttagactaaaaatgggtcgcagaaatgggagaaaatgaatagatttgagatcttctttaaaggtagaaccaatgtgttgctgacaatgttgaaaaatatgtggatgaataaggtcagttagggatrgtgaatggaaaaagcagctctgtgagtgagaaaaggaaagcaaaaagcacctgggatcacggaagccttgaggaaaaaccaccaagaagaaagagaaaatgatcaactgcccatttagctgagaggcagtgtacgacgaagaaggaaggaactgaaaacccggcagcacagagcctactgacccccccggacaagaacagtgtcaggggacagt

SEQ ID NO: 608876 - DNA, 615 bp, Homo sapiens
agccaacttaagtagggcttgacagaatatggtttaaaaaagaaaagaaaaaatactatatattgtattccaagtgcactaagaagcataccagaagagttttacaaaagacagtgacatgattaaagatttctgctttttgtttaatgactctggttcctgtatggattaaaattttggtttgtattctatttggaaaatagattatagagggtaaaggtggaggcaagaagacaacaagttaggaaacaaacctagtgaaaccctacactgccttagactaaaaatgggtcgcagaaatgggagaaaatgaatagatttgagatcttctttaaaggtagaaccaatgtgttgctgacaatgttgaaaaatatgtggatgaataaggtcagttagggatagtgaatggaaaaagcagctctgtgagtgagaaaaggaaagcaaaaagcacctgggatcacggaagccttgaggaaaaaccaccaagaagaaagagaaaatgatcaactgcccatttagctgagaggcagtgtacgacgaagaaggaaggaactgaaaaccyggcagcacagagcctactgacccccccggacaagaacagtgtcaggggacagt

SEQ ID NO: 608877 - DNA, 559 bp, Homo sapiens
ctcttggggaaaaaaatttaatccttttttcccaggttactagtgaaagtcagttaatatttagttgtcttttaaaatgtatsctacttttgaaatatttaggcttctttttcacaagcctacagtactcaggccctgaacctgtcttacctcctacggctaatacacttgaacttcctgtgaaacatgtaaatacaaatcaaacttggcttaaatacatgtgatatttaagattagaacatgttatagaaatttaaccaataagattggttgtccatataagattatggacataggaataaatcagattatcttggggtgcttttaaaaagtagtcagaacaattaccctaaaacatgtttcttcacacttctacagacctatctcattggaatttcacatggttaagtaggaaaatatgagatgtttcttttggtattgccttttaatttcaaaatgatgctttttttagaaatatgtttctgggtgttgtactttagacatatatggtacagttttataagtacctacctgtttttgttttttccttcatatgttt

SEQ ID NO: 608878 - DNA, 559 bp, Homo sapiens
ctcttggggaaaaaaatttaatccttttttcccaggttactagtgaaagtcagttaatatttagttgtcttttaaaatgtatgctacttttgaaatatttaggcttctttttcacaagcctacagtactcaggccctgaacctgtcttacctcctacggctaatacacttgaacttcctgtgaaacatgtaaatacaaatcaaacttggcttaaatacatgtgatatttaagattagaacatgttatagaaatttaaccaataagattggttgtccatataagattatggacataggaataaatcagattatcttggggtgcttttaaaaagtagtcagaacaattaccctaaaacatgtttcttcacacttctacagacctatctcattggaatttcacatggttaagtaggaaaatatgagatrtttcttttggtattgccttttaatttcaaaatgatgctttttttagaaatatgtttctgggtgttgtactttagacatatatggtacagttttataagtacctacctgtttttgttttttccttcatatgttt

SEQ ID NO: 608879 - DNA, 427 bp, Homo sapiens
tgttggtcccagcgggtgggaaagaattaacagtgcggagagtaggggggaggaaggtcagttttgtttgcacgaaacctgcctttgtggcctgggatatgactgtaaaatgtttaaccgggggtcaaatatgggctttggacaaaggtagaagggggcagccggtgaacattggaagtgttttaatctgaaatagcctctcaaggtggaaggcaggaggaggtgaatacgaggcaaagggaagtgggtcttggragaaacctggtcagcagggcatccctcaggtcgggggcagggcctccgggtgtttcaggtctcactcattccatacacactggaacagttccctgccactgctctgcaaatgctgataacagctccacagtaagtagagggatttggagtgagcctttagaaacagtcacaa

SEQ ID NO: 608880 - DNA, 486 bp, Homo sapiens
tattccccttgcagaacaggacagagaaaaatttgtgtttaaaataccagttatcaataaaggccagctcgccaatttcattggaaagtactycctcaaggaatactgtgtcagtatcatgtaaatcaggctttgctccccattagaaaagactttcctaattgcaagattattcattttatggatgatattttactagcagctccaacggagccaggacttgtaagtctatatgcctctgtcgtaaagaatacacagttaagaggtttaatcatagcacctgaaaaagtacaattgtcttctccttagaaatatcgtggatacattctaacttaccggtcagtaagaccttaaaaagttaaatactagcaacttacacacattaaatgattatcagaaattactaggagatattaactggcttcaccccaccttgggcataactgatacattacaaaacctgtttctatcctaaagggcaataca

SEQ ID NO: 608881 - DNA, 486 bp, Homo sapiens
tattccccttgcagaacaggacagagaaaaatttgtgtttaaaataccagttatcaataaaggccagctcgccaatttcattggaaagtacttcctcaaggaatactgtgtcagtatcatgtaaatcaggctttgctccccattagaaaagactttcctaattgcaagattattcattttatggatgatattttactagcagctccaacggagccaggacttgtaagtctatatgcctctgtcgtaaagaatacacagttaagaggtttaatcatagcacctgaaaaagtacaattgtcttctccttagaaatatcktggatacattctaacttaccggtcagtaagaccttaaaaagttaaatactagcaacttacacacattaaatgattatcagaaattactaggagatattaactggcttcaccccaccttgggcataactgatacattacaaaacctgtttctatcctaaagggcaataca

SEQ ID NO: 608882 - DNA, 409 bp, Homo sapiens
acctggtacaaagaaggtactcaataaacatctgccacatgattaaggaattaacgaaatcatcatccttaacaacattctcacagcaaatacagtgacacattccacaggtcagtttcttataaccaccatcattggaatgactcaacaatacaaccaacacatcaaaacataaattattactgacttctctaaataacacgacagargacaagtatgaatgtggtgcaaggttataactttctgaaggtctagttgactgaattcaagtagcagctagaatacagagaaaggatatcaaaatgaggctcatacacagagcagggtacatgtaagtggggaggatgagagaaaaggcttttgttttatgtatttctcgacattttcacacatctctcaattttctgtg

SEQ ID NO: 608883 - DNA, 553 bp, Homo sapiens
ggacataagaaatgatgagaactgaggctacataaggaggccagagttggatggcaaatggcctcatatataccattcaatttttttttttaatttttacacaaaagcagttgagattccaaaatggctttgttttaaatgagggtataatacaaggtttttttttttttttaaggaatctaactctagaaatgtgaaggatggatcaaagagaaacaagactggtggaagggagacctcctggctattgcatacatatattctggtctagtccaagttccatctggtctgtgaaacctgaccagtccagctcttactggccaatgctgccccaatccctgccccatccccccaataatccttgtcaatctctgcaagagtgacagtttgcaagactatatcatttaacacaaacttargcacctggtaggtgcctgaatatctgctgaggaaatatgaaatcacttacgtaactactactcttctcatgccacccatcctccacttgatcatgcccacagacctgtcacaaaagaattgggcccaaggaagt

SEQ ID NO: 608884 - DNA, 569 bp, Homo sapiens
cttctgattcacaaaagatgtgctgtactccagagtggtgctgaagaacacacaccaggaatcaagattcccaggggtttctaagcagattcggccagactccccctcgttacttccaaaatgctacctcaataatcagaaagcacgataaaggatccagaagggaagggacattgtggggaggaggatgagtgtttagtgtagaaaggaggataagatagccaggggctgatcaacgagagatcagcatacagtaggattagtcagggatgctgggagatggatcttgaataacggtgaaattttattactggatttcagtaaagggttaaaagtacaaaagttaaactttagagactttaaacagaatgcttttaacgagagacaacatactttcaaaaaaactaccttctggtatgataccttgaatctacagattttaaagttgcctaaggcaaaaaactaagtaatttttaaaamccgtcgtatgttttcaggtttaaaaaaaaaaaagtcgcatattttcataaggtctgagaagctcgccaaaaccaaacctaactgaattc

SEQ ID NO: 608885 - DNA, 571 bp, Homo sapiens
gtaaatggaaaatatccagtgcatcttggtccctcggtttaaaagtagtctttttttcacctacgcccttattttccctagcccccagcatgactgtgatgtcccactctggttgacctgacaatgagctggcttaagcaagtagcataaacatcctcttctccccgtggaagagcctttcccaatctcatcttcccatagttctggtggcctcattcccccaggtccccaaagtcaccaggttctgagcagcttgtttcctcagaaaactcctatcttcagttggcacccaaatcgagactgtctggttttcaaactgatgctgtgttccctactgatgcgttaactcttgcaccataagaaaggggactccactgaaattcaacccctgttttgtgtccagcagacttgagaacatttctctccagataaagcaggtggggagggggatccatgacttctcttcatgactctgccttgtttttcctttctctttaaagcctacttcacagkacttggcattaatccctgacatgtgaccctggtgccctgtgtgggccaccatccagcc

SEQ ID NO: 608886 - DNA, 267 bp, Homo sapiens
gtattgttagtagagacagggtttcaccatgttggccaggctggtcttgaactcctgamctcaggtgatctgcccgcctcagcctcccaaagtgctgggattacaggcgtgagccactgcgcctggccagaaactactttttgaaaattcagaaacagatccatacatggaataatagatgtcacttggtgtatggcaagcatggcatgaatagtcattgaaagcttttaaataaatgatactgggacaatatttctgtatgtaaaa

SEQ ID NO: 608887 - DNA, 551 bp, Homo sapiens
aaagggttaacagttgaactcatagacatgagtagaaggatggtcatcagaggctgggaatggtagtaggaggttgggggtggggaggtgaggatggttaataggtacaaaaaaatagaaaaaaatgaataacacctactrtttgctagcacaacagggtgactatagtcaataacaattgtacattttaaaatgactgaaagtgtaattggattgtttgtaacacaatgataaatgcttgaggggatagatacctcatcatctatgataagggtggttaatatgcatttaattatatgtcttgctatacttaaattgccatattggtgttttagttatatatatgtgtcaaatgatgaatataaatttattgtttgaaaacttcccatgaatgttatatttttcccttagtctactctagaaaatgcattttaaataatgtatgaaagtagaattcttaatggggatcagtcaatagttgtggtctttaaatattcctatctcttcttgcaggggagatgaactcatatttttctgttttatattacagg

SEQ ID NO: 608888 - DNA, 551 bp, Homo sapiens
aaagggttaacagttgaactcatagacatgagtagaaggatggtcatcagaggctgggaatggtagtaggaggttgggggtggggaggtgaggatggttaataggtacaaaaaaatagaaaaaaatgaataacacctactgtttgctagcacaacagggtgactatagtcaataacaattgtacattttaaaatgactgaaagtgtaattggattgtttgtaacacaatgataaatgcttgaggggatagatacctcatcatctatgataagggtggttaatatgcatttaattatatgtcttgctatacttaaattgccatattggtgttttagtyatatatatgtgtcaaatgatgaatataaatttattgtttgaaaacttcccatgaatgttatatttttcccttagtctactctagaaaatgcattttaaataatgtatgaaagtagaattcttaatggggatcagtcaatagttgtggtctttaaatattcctatctcttcttgcaggggagatgaactcatatttttctgttttatattacagg

SEQ ID NO: 608889 - DNA, 551 bp, Homo sapiens
aaagggttaacagttgaactcatagacatgagtagaaggatggtcatcagaggctgggaatggtagtaggaggttgggggtggggaggtgaggatggttaataggtacaaaaaaatagaaaaaaatgaataacacctactgtttgctagcacaacagggtgactatagtcaataacaattgtacattttaaaatgactgaaagtgtaattggattgtttgtaacacaatgataaatgcttgaggggatagatacctcatcatctatgataagggtggttaatatgcatttaattatatgtcttgctatacttaaattgccatattggtgttttagttatatatatgtgtcaaatgatgaatataaatttattgtttgaaaacttcccatgaatgtyatatttttcccttagtctactctagaaaatgcattttaaataatgtatgaaagtagaattcttaatggggatcagtcaatagttgtggtctttaaatattcctatctcttcttgcaggggagatgaactcatatttttctgttttatattacagg

SEQ ID NO: 608890 - DNA, 551 bp, Homo sapiens
aaagggttaacagttgaactcatagacatgagtagaaggatggtcatcagaggctgggaatggtagtaggaggttgggggtggggaggtgaggatggttaataggtacaaaaaaatagaaaaaaatgaataacacctactgtttgctagcacaacagggtgactatagtcaataacaattgtacattttaaaatgactgaaagtgtaattggattgtttgtaacacaatgataaatgcttgaggggatagatacctcatcatctatgataagggtggttaatatgcatttaattatatgtcttgctatacttaaattgccatattggtgttttagttatatatatgtgtcaaatgatgaatataaatttattgtttgaaaacttcccatgaatgttatatttttcccttagtctactctagaaaatgcattttaaataatgtatgaaagtagaattcttaatggggatcagtcaatagttgtggtctttaaatattyctatctcttcttgcaggggagatgaactcatatttttctgttttatattacagg

SEQ ID NO: 608891 - DNA, 412 bp, Homo sapiens
ttatagtgatagaattaaaaagtttaacttttcctacttatgggcatacaggtatttgggtgccatctttataatttacaattagtttgaaagatagaaattgcaaccataaggttgggagcctggtatgtaaggcatttgccggtgggcatgttttgaacatgtattgttgggcccttatacgtactgtcacttatctgttcccatcaccgttggacaggtatttctccctgtgctggcaaaacaggcacacctctcactaaggcagagctgccacaagtagtctaactcctgaggacaacaaacccctttgctggggggaagggatgggaggaggaacaagacttgagaggcggctgggcagaggacacagaaacctccgttctaytgtgaggcccgaggaatgcaaatg

SEQ ID NO: 608892 - DNA, 428 bp, Homo sapiens
ggttacacagctagatggtgtgaagacagggcagsactgtggtccctgggtcccttgtctgatgttgttgcagtctctgcattagtgctccataatgggtctgtggtgtgcccggatgtaagggttggtttggagcatttccaccctggctctctggacatggaacttgctggactttgggatttttctgtcagccattgataggagcagagtgttgttgtgttttgtggcagagaccacccatggaagtgatcgactgtaagcacagagccagctgcagcccgaggtgatgtggatggagcctaaatgtgttgttctgtgtgtctctccttttccttttaaacaaagtttccctcaccacacaggttttcagccagctcatctactctcaagtgctgggaagttcgtatttccctatctgcagtggc

SEQ ID NO: 608893 - DNA, 428 bp, Homo sapiens
ggttacacagctagatggtgtgaagacagggcaggactgtggtccctgggtcccttgtctgatgttgttgcagtctctgcattagtgctccataatgggtctgtggtgtgcccggatgtaagggttggtttggagcatttccascctggctctctggacatggaacttgctggactttgggatttttctgtcagccattgataggagcagagtgttgttgtgttttgtggcagagaccacccatggaagtgatcgactgtaagcacagagccagctgcagcccgaggtgatgtggatggagcctaaatgtgttgttctgtgtgtctctccttttccttttaaacaaagtttccctcaccacacaggttttcagccagctcatctactctcaagtgctgggaagttcgtatttccctatctgcagtggc

SEQ ID NO: 608894 - DNA, 428 bp, Homo sapiens
ggttacacagctagatggtgtgaagacagggcaggactgtggtccctgggtcccttgtctgatgttgttgcagtctctgcattagtgctccataatgggtctgtggtgtgcccggatgtaagggttggtttggagcatttccaccctggctctctggacrtggaacttgctggactttgggatttttctgtcagccattgataggagcagagtgttgttgtgttttgtggcagagaccacccatggaagtgatcgactgtaagcacagagccagctgcagcccgaggtgatgtggatggagcctaaatgtgttgttctgtgtgtctctccttttccttttaaacaaagtttccctcaccacacaggttttcagccagctcatctactctcaagtgctgggaagttcgtatttccctatctgcagtggc

SEQ ID NO: 608895 - DNA, 428 bp, Homo sapiens
ggttacacagctagatggtgtgaagacagggcaggactgtggtccctgggtcccttgtctgatgttgttgcagtctctgcattagtgctccataatgggtctgtggtgtgcccggatgtaagggttggtttggagcatttccaccctggctctctggacatggaacttgctggactttgggatttttctgtcagccattgataggagcagagtgttgttgtgttttgtggcagagaccacccatggaagtgatcgactgtaagcacagagccagctgcagcccgaggtgatgtggatggagcctaaatgtgttgttctgtgtgtctctccttttccttttaaacaaagtttccctcaccacamaggttttcagccagctcatctactctcaagtgctgggaagttcgtatttccctatctgcagtggc

SEQ ID NO: 608896 - DNA, 470 bp, Homo sapiens
aataaaaaaagagaaaatgaaatctaactcattttatgaagccaagatttgaaaaaactatgagaaaggaaaattacaaccaatcacactgatgacatgaatttgaaaatcctcaacaaatattaacaaatagaayccaggaatttaatttaaaaagtttaataattatttaataaaatagtataccacaactcaatcacatttattccagaaatatgttggtttaccacttaatcaatcatgtaattagccacatttatttataagataaaggggaaaaattatcatctcaaagattcagaaaaatctggaaaaattcaacatccattcatgattaaaaaaaaaactctctcagcaaactaaagacattgttttttcttttttctttctttttttttttttttgttgagccaatgtctcgctctgtcacctaggctggagagcagtggtgtgatattggctcactgcaa

SEQ ID NO: 608897 - DNA, 430 bp, Homo sapiens
tagtaaaaactggaaacaacccaaatgtaacagraaaaaaaaaaagagattccacttgcagtcacaatttgtgtaggaatgaatttgtgaaaagatgtgcaaagacatgatgaagaaaatataaaatatttaattaaagaatgaacaagatcaatcacatgtataacttattatcacaaagttgtcagttctctcgagtgaatctataaattcaatgtagttccaatgaaaatcctaagcgtgttttataatggaacttgacaaaatgattttaaaatttaatgaaagaataacgttccaagaagagcaagacaattctgcctttatcaaactacaatataaagctacaataattacaaaagtgtgatatagagaacttagaaacaattttgaatatttctagaaacttggtatatgattgagaggaatc

SEQ ID NO: 608898 - DNA, 430 bp, Homo sapiens
tagtaaaaactggaaacaacccaaatgtaacaggaaaaaaaaaaagagattccacttgcagtcacaatttgtgtaggaatgaatttgtgaaaagatgtgcaaagacatgatgaagaaaatataaaatatttaattaaagaatgaacaagatcaatcacatgtataacttattatcacaaagytgtcagttctctcgagtgaatctataaattcaatgtagttccaatgaaaatcctaagcgtgttttataatggaacttgacaaaatgattttaaaatttaatgaaagaataacgttccaagaagagcaagacaattctgcctttatcaaactacaatataaagctacaataattacaaaagtgtgatatagagaacttagaaacaattttgaatatttctagaaacttggtatatgattgagaggaatc

SEQ ID NO: 608899 - DNA, 641 bp, Homo sapiens
gtcacaatttgtgtaggaatgaatttgtgaaaagatgtgcaaagacatgatgaagaaaatataaaatatttaattaaagaatgaacaagatcaatcacatgtataacttattatcacaaagttgtcagttctctcgagtgaatctataaattcaatgtagttccaatgaaaatcctaagcgtgttttataatggaacttgacaaaatgattttaaaatttaatgaaagaataacgttccaagaagagcaagacaattctgcctttatcaaactacaatataargctacaataattacaaaagtgtgatatagagaacttagaaacaattttgaatatttctagaaacttggtatatgattgagaggaatcacaaataaatggagaacaaaatagcatgcaattgatgctgttaggaccgttggctatccatatgaaaaaaaaacctcccccaaatttcaattagatttaagacccaaatattaaaaatgcaacttgaagatttttgaagaaatgtggaatatctttactacctcagtataggggtgaatttcttaaacatgacagaaaagcatgaaatacaaacacatcgattaacacattttaccacattcaaaattacaaacttcttgctggcacaatg

SEQ ID NO: 608900 - DNA, 641 bp, Homo sapiens
gtcacaatttgtgtaggaatgaatttgtgaaaagatgtgcaaagacatgatgaagaaaatataaaatatttaattaaagaatgaacaagatcaatcacatgtataacttattatcacaaagttgtcagttctctcgagtgaatctataaattcaatgtagttccaatgaaaatcctaagcgtgttttataatggaacttgacaaaatgattttaaaatttaatgaaagaataacgttccaagaagagcaagacaattctgcctttatcaaactacaatataaagctacaataattacaaaagtgtgatatagagaacttagaaacaattttgaatatttctagaaacttggtatatgattgagaggaatcacaaataaatggagaacaaaatagcatgcaattgatgctgttaggaccgttggctatccatatgaaaaaaaaacctcccccaaatttcaattagatttaagacccaaatattaaaaatgcaacttgaagatttttgaagaaatgtrgaatatctttactacctcagtataggggtgaatttcttaaacatgacagaaaagcatgaaatacaaacacatcgattaacacattttaccacattcaaaattacaaacttcttgctggcacaatg

SEQ ID NO: 608901 - DNA, 641 bp, Homo sapiens
gtcacaatttgtgtaggaatgaatttgtgaaaagatgtgcaaagacatgatgaagaaaatataaaatatttaattaaagaatgaacaagatcaatcacatgtataacttattatcacaaagttgtcagttctctcgagtgaatctataaattcaatgtagttccaatgaaaatcctaagcgtgttttataatggaacttgacaaaatgattttaaaatttaatgaaagaataacgttccaagaagagcaagacaattctgcctttatcaaactacaatataaagctacaataattacaaaagtgtgatatagagaacttagaaacaattttgaatatttctagaaacttggtatatgattgagaggaatcacaaataaatggagaacaaaatagcatgcaattgatgctgttaggaccgttggctatccatatgaaaaaaaaacctcccccaaatttcaattagatttaagacccaaatattaaaaatgcaacttgaagatttttgaagaaatgtggaatatctttactacctcagtataggggtgaatttcttaaacrtgacagaaaagcatgaaatacaaacacatcgattaacacattttaccacattcaaaattacaaacttcttgctggcacaatg

SEQ ID NO: 608902 - DNA, 557 bp, Homo sapiens
aaccaggtatttcaaactcgtacaaatgaaacctcaatagcattcattccattgaagataaaaatcaataaaatatgtttaatctgggagaatggtgcactttgattgtgtcacttcaaaaggtgttgaaattatacagaagcaacagtttcatacatttttgaaactattttcagaagtattcgtgctttgggattatcggagtttcttcagatttttttgaatcattatccaaaatgcttagtcgccttcatctttcatcttcatgacatgacactttatcacatagtgcgacacctgctgcaggcatggcttttcttgtgagtaagctgccacctaagaatcatttgaaaggtaacaggcactttttcatggggttgtttcatttttcttgtaaatttgtttaagttccttgtagattctggatattaaacctttgtcagatgggtagattgcaaaacttttctcccattctgtaggttgtctattcactccaaygatagtttctttcgctgtgcacaagatctttagtttaattagattccatttgtcaattt

SEQ ID NO: 608903 - DNA, 512 bp, Homo sapiens
tcaatgatctttttgcaatgaatttcccaggtgttctttgagcttcttgtatttggatgtctaggtctctagcaaggccagggaagttttccttgattattcccccaaatatgttttccaaattttttagatttctcttcttcctcaggaatgccaattattyttaggtttggttgtttaacataatccgagacttcttggaggctttgttcatgttttctttttcttttttctttgtctttgttggattgggttaatttgaaaaccttgtctttgagctctgaagttctttcttctgcttgtttgattctaatggtgagattttctagagcattttgcatttctataagtgcatctattgtttcctgaagttttgatttttttttatatatgccatctatatctatttcattgaaaatttctccccctcgttttttttttttttttttttttttttggagtggtagggggacagagtctcactctgtcactcaggctggagtgcagtggca

SEQ ID NO: 608904 - DNA, 516 bp, Homo sapiens
gtgttagtggttgtctctcattctggtttgctgtccttataaccttgagaaccttcctgcaagaactgatgcagggctctcttctgcctttgcctttgaccgcaggtyctgatgggcaccacgtcagccagggggcattcacagtgtgggaagggccaggctggccagtgcggtcccctcgcccactcccacctcaaaggccagctctgtcaatgcgcccatttgcctgtatgacacagggatcctgacagatcctgtgcagaggttggcatgcagcaggtgctgagtaaatggcagttgcagtcattattgtcctcatcagggagcgaagcattttagtctttagtaaaaagaatacattaatgcaaatatgatctggtttgggtttcgaatcacagtgatggaaagccatgccattcaggtgaacaaagaggagatggagaagacgtcagcacttcttggggtaagttattattccagatggtttgtactggccatctctttcctgcatgagat

SEQ ID NO: 608905 - DNA, 516 bp, Homo sapiens
gtgttagtggttgtctctcattctggtttgctgtccttataaccttgagaaccttcctgcaagaactgatgcagggctctcttctgcctttgcctttgaccgcaggtcctgatgggcamcacgtcagccagggggcattcacagtgtgggaagggccaggctggccagtgcggtcccctcgcccactcccacctcaaaggccagctctgtcaatgcgcccatttgcctgtatgacacagggatcctgacagatcctgtgcagaggttggcatgcagcaggtgctgagtaaatggcagttgcagtcattattgtcctcatcagggagcgaagcattttagtctttagtaaaaagaatacattaatgcaaatatgatctggtttgggtttcgaatcacagtgatggaaagccatgccattcaggtgaacaaagaggagatggagaagacgtcagcacttcttggggtaagttattattccagatggtttgtactggccatctctttcctgcatgagat

SEQ ID NO: 608906 - DNA, 516 bp, Homo sapiens
gtgttagtggttgtctctcattctggtttgctgtccttataaccttgagaaccttcctgcaagaactgatgcagggctctcttctgcctttgcctttgaccgcaggtcctgatgggcaccacgtcagccagggggcattcacagtgtgggaagggccaggctggccagtgcggtcccctcgcccactcccacctcaaaggccagctctgtcaatgcgcccatttgcctgtatgacacagggatcctgacagatcctgtgcagaggttggcatgcagcaggtgctgagtaaatggcagttgcagtcattattgtcctcatcagggagcgaagcattttagtctttagtaaaaasaatacattaatgcaaatatgatctggtttgggtttcgaatcacagtgatggaaagccatgccattcaggtgaacaaagaggagatggagaagacgtcagcacttcttggggtaagttattattccagatggtttgtactggccatctctttcctgcatgagat

SEQ ID NO: 608907 - DNA, 516 bp, Homo sapiens
gtgttagtggttgtctctcattctggtttgctgtccttataaccttgagaaccttcctgcaagaactgatgcagggctctcttctgcctttgcctttgaccgcaggtcctgatgggcaccacgtcagccagggggcattcacagtgtgggaagggccaggctggccagtgcggtcccctcgcccactcccacctcaaaggccagctctgtcaatgcgcccatttgcctgtatgacacagggatcctgacagatcctgtgcagaggttggcatgcagcaggtgctgagtaaatggcagttgcagtcattattgtcctcatcagggagcgaagcattttagtctttagtaaaaagratacattaatgcaaatatgatctggtttgggtttcgaatcacagtgatggaaagccatgccattcaggtgaacaaagaggagatggagaagacgtcagcacttcttggggtaagttattattccagatggtttgtactggccatctctttcctgcatgagat

SEQ ID NO: 608908 - DNA, 502 bp, Homo sapiens
atgtggtagtattaagaggtgggacatttaagaggtgattaggttatgagagttccccacttttgtgaatgggattaaatgccctctaaaaaggggttgacaggattttgttccttttgcccttctgccatgtgatagcgcagtcttcctcccctccagagagtgaagcaaataaaacaccatcagggaagcagagagcggccctcagacaacgaacatgccagaccttgatcttggacttccttgtctccagaactacgagaaaataaatttctgttcttataaatgacccagtggctgggcgcggtggctcatgcctgtaatcccagcactttggraggccgaggcaggtggatcatctgaggtcagcagttcgagaccagcctggccaacatggtgaaaccccgtctctactaaaaatacaaaaaattagccaggtgtggtggcaggcgcctgtaatcccagctactcgggaggccaaggcagaagaattgcttgaacc

SEQ ID NO: 608909 - DNA, 661 bp, Homo sapiens
tatgtctttgccccagtcacactctttctctccacaaaaaaaaataaaagagaaagggaagaagggaggaaaggaggaagaaagaaatgaaggaaggaaggaattcagctgaaataaaataagcagatacagtactggagttttcagcaagggcaataaatggtaaaattctcttgaaagttctgtagtcatttattagctatggaaagctacagaaaaacttagagactctgaccagtgccagagaaggctgagaggcctgacacttctcttgaattctaggacagcaaagcatttattagtatctagatatgcatatttaattatgctgcaataataattttactgtcattcctcaaagctgagaagaaacaaacgataccctattcctttttcaatgatcctgtgaaacagcttggggcagcatataatgatagtaccacaagtgtctccttggcatttacatgctaatgatactgtccaattaaattatataatattgtgtgataagccccttttgcaactaggcaaaaatgtatacatattatagtacaattgttytcacttctcaagagagatctgtaaatcttgagactttgccttttacattagaataaatcctccactcacttattcatgcatttaatgcatatgttttcag

SEQ ID NO: 608910 - DNA, 539 bp, Homo sapiens
ggatcatgaagtcaggagatcgagaccatcctggccaacatggtgaaaccccgtctctactaaaaatacaaaarttagctgggcgtggtggcgtgcacctgtaatcctaactgggaggctgaggcaggagaattgctggaacttgggaggtggaggttgtagtgagccgagatcgtgccactgcactccagcctggcgacagagcgagactctgtctcaaaaaaaaaaaaaaagaattgcaaatatatgagcctactgttgatgaggatactcagagctaactgaaaaagtatagtataatgtggattgttctacatacatgatatccagagagttataaaaagaaagaaaacaattcaggagaaaataaaagtcttactttagaaggacaatataaattatacagaaatggcacatactctatggcagcagagaaccagaggaaagtagttttgtattaataagtagtaagatacactggatagaacacattacattatgaagagtcttgagaagcaatgtaaacattttagatataa

SEQ ID NO: 608911 - DNA, 679 bp, Homo sapiens
tttcaatcttttctatatatatatgatacatttatattataacaaaagttatgcatagcatatttgtaaattttaaaatataatagattttatgaatgtttatatgaatatttatacgaatgtttataatagtttagtgcataacttttctagtttaccttctagaatataaattcaaaagttgtatgtatctctttcaatggcatatttccaacaatttgaacaatgctttgcwtatggtaggtatttaatcaagacaaaataatttattattcttttatagttggatttctataatttaaaatctagacagttccaacagtcacaaatgtcatctaaaagaaaagttagggatagatttttgaaagcatgaatggatagaagaaaaatctttaatctgtaagatgagcagttgtctataatcatttaaaagaaatagcttaattagaactctactttattttattgccaataaaggtatccaaccagcttgcatttttcactttctgctttggcttaatctataaaaataagaatataagtgatattttcaaaaatacttgtcagaatggtgataatttcagtggtaagtctaattttgtctctaatatggaagaaactattggcaattaggaaattatgttgggtagcatggaacgttacccaccagccaacttaa

SEQ ID NO: 608912 - DNA, 679 bp, Homo sapiens
tttcaatcttttctatatatatatgatacatttatattataacaaaagttatgcatagcatatttgtaaattttaaaatataatagattttatgaatgtttatatgaatatttatacgaatgtttataatagtttagtgcataacttttctagtttaccttctagaatataaattcaaaagttgtatgtatctctttcaatggcatatttccaacaatttgaacaatgctttgcatatggtaggtatttaatcaagacaaaataatttattattcttttatagttggatttctataatttaaaatctagacagttccaacagtcacaaatgtcatctaaaagaaaagttagggatagatttttgaaagcatgaatggatagaagaaaaatctttaatctgtaagatgagcagttgtctataatcatttaaaagaaatagcttaattagaactctactttattttattgccaataaaggtatccaaccagcttgcatttttcactttctgctttggcttaatctataaaaataagaatataagtgatattttcaaaaatacttgtcagaatggtgataatttcagtggtaagtctaattttgtctctmatatggaagaaactattggcaattaggaaattatgttgggtagcatggaacgttacccaccagccaacttaa

SEQ ID NO: 608913 - DNA, 499 bp, Homo sapiens
agatcaagaccatcctggccaacatggtaaaaccccatctctactaaaaatacaaaacttagctggtgtggtggcatgcacctgtagtcccagctactcaggagctcaacttcaatgttcatcagcacagtcttgtgcttaaccttttgccctggcttattgagtttatttttaatgttacttctcatctccatagtagtttgcactgagcaacattagaaagaactgtgttcacctacagagtagaacacaccaactaagaattcaaattattcgttcrgctttatttgaacgggaggctgaggcaggagaattgcttgaacccaggaagtggaggttgcagtgagccaagatggcgccactgcactccagcctgggagacagagcaagactctgtctcaaaaaaaaaaaaaaaaaaccttcattctaatatagcatttaataggatatagcttggtgaggggataggaatttgatttgaagcaccagttgggaaaag

SEQ ID NO: 608914 - DNA, 485 bp, Homo sapiens
gcaccctagaagaaatatggcacagaaaaatgtttcytgtggcttcaaaggtctcactctccgagatagaattggagatacaaggaaacagtgcaaaggctgtatccagtctctttcttctctttcttgccttttttcactgacttaaaaaaaaagatatgtaatatatgatacctactaaagaatgtatgtagcaaatatatgaattataaaataacaaaatgaacattatgaacccatcaagaaacataaaactagagctttactcttagcatttcatccatctgtgggcttcctcttcccctaccctaaagctttccttccagaggtgaacactgcactgaatgtagtagtcaccactgatttgctttctaattttagcatatgtatttataaataaacaatatattatgtactcttgcttggttttgagctttattaaaggagttttagtttgcatttccctgcttacaaatgaagttaaa

SEQ ID NO: 608915 - DNA, 512 bp, Homo sapiens
tcaaaataggctctaagtgatgagtatgaagcagccgttcaaagcagagtagcattctaggtggaaggagcagctagtgcagaggccctgggtcagaacaagctgggcrtgcttgaagaaaggacagtatggctagataatcatgagggcgggaggggtttttaggagaagaaactggggaggcatgcagagaccagggtttctaggtcttcaaaggaatatcatacgtctggattttatttgcataagaagccactagtgggttttatggaaaaacatgatttatatttcaaaacaattacccttgctaccgtatgggacatggactatagatgggggaagcatggaaacgagatcagtttggaggttgttatattagaccaggtgcaagaagatggtggtttggagtagttgtgtatcagtggagatgtagatcctatttgaatgtatcagtctgaataaaataaagctgtacaaagtttaaccatgctttgcgtggttcttaggtgatg

SEQ ID NO: 608916 - DNA, 512 bp, Homo sapiens
tcaaaataggctctaagtgatgagtatgaagcagccgttcaaagcagagtagcattctaggtggaaggagcagctagtgcagaggccctgggtcagaacaagctgggcatgcttgaagaaaggacagtatggctagataatcatgagggcgggaggggtttttaggagaagaaactggggaggcatgcagagaccagggtttctaggtcttcaaaggaatatcatamgtctggattttatttgcataagaagccactagtgggttttatggaaaaacatgatttatatttcaaaacaattacccttgctaccgtatgggacatggactatagatgggggaagcatggaaacgagatcagtttggaggttgttatattagaccaggtgcaagaagatggtggtttggagtagttgtgtatcagtggagatgtagatcctatttgaatgtatcagtctgaataaaataaagctgtacaaagtttaaccatgctttgcgtggttcttaggtgatg

SEQ ID NO: 608917 - DNA, 589 bp, Homo sapiens
agctggcttctgagtgagtgtccctcagccagcactcagcagacatttatctggcatgacctctgcgctcacactgccagggctggagtgcagagccacaggagagtggggtcacgtggggacagttcttcccctctccctaccctgtgctgtatgaactatatccatcacctcttttagctctcatgccaccatggtggttggtatgttcccattccacatatgagtaaatgtagacccatgarggttaagggaatggcccaaagtcacatggctaagatgcagaaccagaacttgaatgcacgcccggcttccctaaggctagtgcctgccaccagattatagccatgaatcttgcataacctgggtgaaacgcttttccaaactctatttcaaaattatgagttggcctaaaatatgactcccacagcatgctaatcttgtaattactattcatttatgaccactctccattgcatttgcaactgaaagctttattatgcattagtgtgtttcggttccacaaatatttatgtttccattccacaggtaagaataggtacccaagaaattcttttccccattttaa

SEQ ID NO: 608918 - DNA, 595 bp, Homo sapiens
tataaattaatgtcaagaacaaaatactttggtcagcagggccatccagagaccctggtggaccccacttttagagccactgttccaggcatttgctcctttgaacttgttgaacctgtacattctggattggctttgggggccctgataataggaagaccttgactttgcttctcattgcagaatacttgaagggtttattttagctgaattatttccgtgccttctcccacccctaaaatgaagagcttctacttgcatttgtaggatctgtccctagaccagagccytcatttgttctaagaaggagttggactcccagtgcccatgtgacaggtgcagaagcaaaatctggatccattcctagacctcagccagacccctatgtgggaggaataatgggagtggagggtaaaatcagcattggttttggaaccagacagatctcatttaaaatctgggcttcagcatttactgctttagtagtttgagggtgtattaggcagtctcagtttccttatctgtaaaatgtgaatcagagattgttgtgaagattaaattacataacatttaaagtacttggcactttgaacac

SEQ ID NO: 608919 - DNA, 502 bp, Homo sapiens
gaaggtattttggccacacagagaaatagtctcctgcatatataaagaactcctacaataaataagagagatgtaaactacccaatttcaaataaatgggcaaaaggcttaaagagtacttcacaaaaaagaaaatccaaaaggtcacggcgtatgaaaagatactgacctctttagtatcaaatgtatataattgaaagcagattagatactgttacacatccacaagatgggcaaaagtttttgacaatatcctacaaartataaagtttttgcaagattagagagcagtaggagaaattgcagctggatatagaaattggttaaacacattggaaattaatttttgattaaagtgaaactcatatgacaccatagaattctgaactatcctagcagcactgaaaatgcccatagtctgtggccagtaattttattactatgtgtattccctaagtaaacttacacacatacttagcagggaacttgaaaaaaaatgttt

SEQ ID NO: 608920 - DNA, 516 bp, Homo sapiens
ctggcagccaaaataaagcaaaaagaagaacatcttccaggagggaggtggaatcagattgaggcaaagccaggactaggttcttggcaacgtgattaaaatcccgaactacgagggaggagaggccttgctgccagcccctcagcacactcgagccagggcactggaggtgggtggtggttaaaagctgtgtgccattcacagcctatagcactgcctgtgtccgtcagtatgggcagaatggctaatgactccaaataaaactcctacrccatgctccatctggggaccatgttatagctgaatacacaaagtcactttgtagcttgcccgataagtccactttaattcctccaaaataattcatggaggcctgtgagcacactgcaccaggccaagcactagggttataaaaaagaaatgaaaaaagaaaaacctagttgctctactctaagggcttatgatttaaccaaggagatgagattcacaatggtagctggcaatacggtaaatcaa

SEQ ID NO: 608921 - DNA, 539 bp, Homo sapiens
cagctatttttaattatcgaagaattaagagttgatgagggttgttgaaagaatgtatccattgtacatggaagatgtaattcaggatgaaattagtattgcatatctttatattgtgttatacattctatgattcttttgttcccaagctctaaactgagaaaagagaagattggattattgatgacccttttatgctaccacactacattgtgacctttttttttttccttttactttactagcatgcagtcttaatagagaaaaactgtgctgaagtttagaaaggcatastttacatatgttgagatatatattgctgttcgtagggataaacaaatctgatggccacactgaattatagaaggcaatgtgatatagtggaaatggaccttgtctataagttgagccacttcattaacttttttactttgcactcctcactttaagacatcgcattgcttatttggaaagtgaaaaagtcttcagggattctatagtcattgttttttctttcttttttttttttttaacatttc

SEQ ID NO: 608922 - DNA, 531 bp, Homo sapiens
aaaaaaaaaaaaaaagtaaaccaggaggaagctcatcattatgtagtgtattaatcaatttttgcattactaaaagaaatgcctgaggcttgkttatttggctcacggttctgtagggtatatgtgaaatgttatgccagtatctgcttttggtcagggctttaggaagctgacaatcatggcagaaggcaaaggagagccaacacattacatggtgagatcaggagcagcaaaaaaggaggaggtgccacactcgtttcaataaccagatctcatgagaacgcaaccaccatcttgaggacaccaccaagacatttatgagggatctgtctctatgccacaaacatctcacattggggattgcattttaacataagatttagaggggacaaacattcacaccatattattctgcctctgtgccctcaaatctcacgtcattctcacattgtaaaatacaatcacaccctgccaatagttccccaaaggcttaactttttccagcctcaagtctaacatccaaagttttaa

SEQ ID NO: 608923 - DNA, 628 bp, Homo sapiens
aaaaacaaaacctttcatcaacgatgtatagaggacgtactatgtttgccattccttgtgcttgatttatctctccagtgtgttagttatataccagccagacaaatatagctcatactttttgggtctgagcatatgaaatgtgaagtgtgctctgagaggtatttattccaacctgaatagcatacttattaatggaaaaattgctttcatttgtttgtgtaggtaaaattcttcagcatttgtgaaaaatttacatgatattacactgtctgatatygttgttaatattttacatactttgctttcttttggaaaagaattagcagtgttaaatagaatatgacaggtattaaatgaattgtaattttcctgtgaatttttattccaacggacattgccatgataactcataattacttgtgctgttgtatattgagctcctactgtgtggcaaggcctatggtaagcattttattttggtaacttgtttaatcctcattacaattctgtggtaaatgctattatctgtttttatattgaagggatgaaatggaggctcagagggatatgtagtagctaaatgttagagctaggattgaaacccaaattgacttctgagtataga

SEQ ID NO: 608924 - DNA, 550 bp, Homo sapiens
caaaaccccgtgtcattttgaatcactgacaggcttcggcttttggcctcgggatgtccagcccagtgctccttcctgtcctatctggaaagcaagatccccttgaccacaagaaatagaatcaggcttgttggggatgagagactagaatctgggccaaagaatggaagacggtggtaagacaaattggtagtgagggaaccccttttacccaaccctgtgaccaccagcaaagctgccaagaggtacccaactcgtgaagctctgaaagcttttcgcacattttcccctctccttaccctccatccttctgttctctcccccatccaagagggtttcttcatgccctccttacaatgggggtaatgggtatatcctgagagctcatgacctctgacttagagtacagctctgtagtcagacctctgggcctactcatcaataagtaaagggaagcctagggaacttagaaatatttttcttccccccaccccccaatcaaagccaggcattcaagactcaacttttytttttctttctcctttcgaga

SEQ ID NO: 608925 - DNA, 581 bp, Homo sapiens
tctgccagcttggatcattccacacatttatcaaaagaaatggaagaagcaactatagggagttatgcctgagactcctgcttgaattttatcctgcccatttcatactgtatcatgagttaattgcccaaaagaggcaaaagatagtataacatcagaacagaaaaagaaccaatcaaaagtgggtggaatttgggttaactgatcattgagcaaaccaacctgttcccattggatgactttatatatctatatgcaatatataaattatatattaaattttatgtatattcacttaacattttatgtatattcattttttatatattcatgtatattaattttataatggccatatgaagtattagagatatggaattaggcatatatagaacacatcaggaaactttttgcctcttctacattatagctaagatttgattataaaatatagagtttgattacgtggcaagtgaaattctgcttgcaccaaatccctaaatgttarccttataatgtatctttttatttatttattttttaagagacaaattcttgctctgttgctcaggctggagtgc

SEQ ID NO: 608926 - DNA, 369 bp, Homo sapiens
gacaaagcactaataccagaatctatgacgaactcaaacaatcagtaagatcaaaatcagtaagaaaaaaacaatcccatcaaaaagtgggctaaggacatgaatagacaattctcaaaagaagatatacaaatggccaataaacatatgaaaaaattctcaacatcactaatgatcggggaactgcaaatcaaaaccacaatgtgayaccaccttactcctgcaagaatggccataataaaaaaaccaacagtagatgttgacatggatgcagtgaatagggaacatatctacactgctggtgggaatgtaaactagtgcagccactatggaaaacagtgtggagattcctcaaagaactaaaagtag

SEQ ID NO: 608927 - DNA, 624 bp, Homo sapiens
ccaggctagtttttgtactttttagtagagatggggtttcacgatgtyggctaagctggtcctgaactcctgacctcaggtaatccacctgcctcggccttctaaagtgctgggattacaggtgtgagctactgcgcctggcccagcatatatatgtattttaaatttgaagttccaaagtacatgtgcaggatgtgcaggtttattacataggtaaatgtgtgccatggtgatttgttgcacctgtcaacccatcacctaggtattactagttatttgtcctgatgctctcccatcccccacacactgctgacaggccccagtgtgtgttgcttccctccctgtgtccctgtgttctcattgttcagctcccgcttataagtgagaacctgtggtgcttggttttctgttcctgcattagtttgctgaggataatggcttccacctccatccatgtccctgcaaaggacatgatctcattcctttttatggctgcatagtattccatggtgtgtatgtaccacatttttaaaaaatccagttaatcattggtgggctttgaggttgactccatgtctttgctattgtgaatagtgttgcaatgaacatacaagtgcatgtatc

SEQ ID NO: 608928 - DNA, 530 bp, Homo sapiens
atctactttggagaaatgtctattcagatcctttgcctatttttaaattgggttattttttctttttattgttgagttgcaagagttatttatgtattctggatacaagtcctttatcagcttagatgatttccaaatattttttcccatcctctgggttgtcttttgactttcttgataatgttytttgatgtacaaaacttttaattttagtttctttttttttctgttgtttgtgcttttgctgtcatatctaagaaactaatccaaggtcagaaagacacctgtgttttttccaaagagttttatagttttggcttttgaatgatagttttgctgaatataaaatttttggttgggagttcttttctccattctttgaacatgtaattccactgccttctgacctccattatttctgacaataagttatccgttattcatattgttgttgactgaacataattcattttttcttgctgctttcaagattttttcgtctttcaataatttgactataaattgtttag

SEQ ID NO: 608929 - DNA, 586 bp, Homo sapiens
ttacggggcacagtgtgatgttgtgatctatgcataaattgtagaaagattcaatcaagctaaggaacatatgcaatgtcttaatgaggctttggcaatgtcagtcatacattagtatataatcctaacgtcgcaatctgagagctacctctcccccgtgtctgtgctggttctccctctgcagccactttgccaatcacatttcaaatgcagaacccaggcctgcctgtctcagggcagaccatgaaacagagacactggctgccagggtcacttttgattgcagggccagctgccctcccatctgcttgtcaggctggagaaaaggctgagaattgaaaatgtgaaaataatgcagccccagtgtaaaaaaaaatccagatttttcaattgccattctgcgagtaaaacctaggaattaacctgtggcctttttgttttattgtttcataaatgagtaatagctagagggaggtatcccttagaccatttcaggcccaattgctacagagaagaaaatgatactatgaagtcacataaggatgamacattttagaagtcttaagatgtgactcttttttttttt

SEQ ID NO: 608930 - DNA, 632 bp, Homo sapiens
tgcacctgtaatcttagctactcagcaggctgaggcaggaggatcccttgagaccaggagtttaaaattatagtaagctatgatcatgccactgtacttcagcctgggtgaaagagtaagaccctgtcttaaaagaaataatcttataccaygcaagagttaacccatcatgatgatgtaataattctcaatttataatgtctaataacatagcttcaaaaaagacaaagcaaaaattaactgaactaaatgggaaacagacaaatctgcaaatatagtgggaaattttaatacacttctgccaggaattgatagagcaagcaaaagaaatcagtattgaacaaataatatttgaagaacatgatggacaaggacatctgctaccttttcctctttgcagcactgcactaagaactttgccagacacatctaggcccatttgcggggacaggggcatgaagacagatagaggtccacattctacatatctgaatgtgttaatttaataaatttaagaagctaagaaaactgtcaaaatatattttcttctccttccttgacaaatatatcttcatggtaacaaaataaaattatgattattgtttatatatgactgaaaattagcaaaatgt

SEQ ID NO: 608931 - DNA, 352 bp, Homo sapiens
gatgcaaagcagaaatagtccaatgmtaattaaaaattagcttgaggtaagggccaggcccataactgaaataaagaaacatctaaaataccccaataagccagtggaatttcccagtcttttaaagtcacataaaacccagtagagatcttgaaaaagataaagacatactactatcatttatttgtcttcaccaaaattcacgttgaaatttgatcttcagtgtgtgctgaggatgttgggaggtggggtctagtgggaggtgtttgggtcatgggggatggatcccttatgaatggcttagtactatactcttggtagtgagttctccctctggcaagactgtattatt

SEQ ID NO: 608932 - DNA, 657 bp, Homo sapiens
tatatggagttacaatctttctggacattgcctattgattgttggatagaggctttaggtgttttttagggttgtcttgttctttttttttttttttttttttgcaacccacaatgcattgcaatcctagttagctcaaggcttctttaagtatttgacttatgacctaagcaactgcrcaggctgataagaacaggaaaagtgaattatttttcaggctagtaaacttctatctttgactaaacttctttggttcaggtgaaggcaactaagagggggcgggaaaggggaggccaacaagcaagtattggctgtccaagctggggcctcgtatatcctgtttcctctgtagttggctgacctaaaacgattcaaggcactagaactggaaatggaccactgtatgcattatttccttcaatgcccaactagaagcaggaggaatacactctacactctttgcagacagcattcccacagcagtcagatcaggctaggtgatttctgcagtctgcaatatttgcaagtctgtgtgattctgaaatgggagatctacttagacataatattgcattgactctgacatatgcattctctaattaaaaattaaattctatctattatattaaaatacaaattgagttgaaaaataaaaca

SEQ ID NO: 608933 - DNA, 525 bp, Homo sapiens
tttcttttgtgataaaacttattttcagtcacagggcttttttcttggttttgtcttactttttggcacctgctttccataaatttgagatgcacattggatcatgtttggcctgaatactaaggtaacttaattcctttttctcaatgattttttttccattttttgttaacccactggggacttttttaagccttatgagatattcttagtgctgtaagaatggtttctctagttttctattaattctgaataaagtaaaacatgtagaaatgcagtctggggcctctccagttcatatacctcgtacctgctcagtttgaggacccaggccacaaattgaccttcattggctacagaaatacagattcacaagtaacctttgctgatcaygttttgttaagagtccataacttaagtgatcttgcatgaaaaaacagcttattttattggaaaagttagaatgaggagcttgcataagaatattctgaacaaatcctaagaatcagaaacaaattcatgtat

SEQ ID NO: 608934 - DNA, 564 bp, Homo sapiens
taactatgacttaaaatattctgtgcatcaagctktaaaaaatgtgctgccatccaggatttgttgtccaatttataaatcactggcagagtagatttagcataattcttaaggtccctagcattttgggtatggtaaatgagcattggcttcaacttaaagtcatcagttacactagtccccaacaagagagtcagcctgtcctttgagtctttgaaaccaggtattgacttctctagccgtgaaagtcctagatggcaccttcttccaataaaaggcagttttatctgcattgaaaatctgatgttaatgtagacatcttcatcaattattttagctaaatcttctggataacttgctgcagcttctatatcagcctttgctgcctcatcttgcacttttatgttatagagacagcttcttttcttaaacctaatgaaccaagctgttccagcttcaaacttttcttctgtagcttcctcacctttctcagccttcatagaactgaagatagttagagccatactctggattaagctttggtttaatagcctgttgtggctg

SEQ ID NO: 608935 - DNA, 564 bp, Homo sapiens
taactatgacttaaaatattctgtgcatcaagctttaaaaaatgtgctgccatccaggatttgttgtccaatttataaatcactggcagagtagatttagcataattcttaaggtccctagcattttgggtatggtaaatgagcattggcttcaacttaaagtcatcagttacactagtccccaacaagagagtcagcctgtcctttgagtctttgaaaccaggtattgacttctctagccgtgaaagtcctagrtggcaccttcttccaataaaaggcagttttatctgcattgaaaatctgatgttaatgtagacatcttcatcaattattttagctaaatcttctggataacttgctgcagcttctatatcagcctttgctgcctcatcttgcacttttatgttatagagacagcttcttttcttaaacctaatgaaccaagctgttccagcttcaaacttttcttctgtagcttcctcacctttctcagccttcatagaactgaagatagttagagccatactctggattaagctttggtttaatagcctgttgtggctg

SEQ ID NO: 608936 - DNA, 543 bp, Homo sapiens
ttgatcatgagctgcagaatggatgttatgggtgttgtgttactaggcatcaaagcaacattaatcttcttgtacattctccataagagctcttgagcaactaggtgcattttctgttagtaagcagtagtattttgaaaagaacctttttttttttttttcctgagcagtaggtcttaactatgacttaaaatattctgtgcatcaagctttaaaaaatgtgctgccatccaggatttgttgtccaatttataaatcactggcagagtagatttagcataattcttaaggtccctagcattttgggtatggtaaatgagcattggcttcaacttaaagtcatcagttacactagtccccaacaagagagtcagcctgtcctttgagtctttgaaaccaggtattgacttctctagccgtgaaagtcctagatggcaccttcttccaataaaaggcagttttatctgcaytgaaaatctgatgttaatgtagacatcttcatcaattattttagctaaatcttctggataacttgctgcagct

SEQ ID NO: 608937 - DNA, 602 bp, Homo sapiens
atttttagagaacttgcctaacttgatgaagaacacctacaaaaacctacagctaacatcatacctaatggtgaaaagctgcatgttttcccctaagatcatcatcaaggaaaggatgccactatctctggtcttactcaacattgtacragaattccaagtgaatgcaataaggcaaaaaaagaaaaaagaaaaaaaaaggaaacaaaaggaacatagattgggaaggaagaaataaaactggtcttgtttggagatgtcatgtgtttatgcaaaaaaaaaacaaaaacaaagaatcaacaacaacaaaaaattctcatggaagtaataagtcatcatagagaagctacccaaggttaatacaaaaaaaaatgtcagttgctttcttgaataccagaaatgactaactggaatttcaaatgaaaaataaagtgccacttacattaatatcaaaattaaatacctaggtataaatcaaacaaaatctatccatgatctatatgaggagtattttaaaattcagatgaaataaatcacagacctaaataaatagagagatatttcatgtacattgataggaaggctcaatattgtaaacatat

SEQ ID NO: 608938 - DNA, 580 bp, Homo sapiens
tactcaccagaagtttaaaagggaaaagagaggtggcagccactgcctgtcttgagtatcagacctacaaggcatgaatgtgcaaaggggctggaatccacattccacctgcggtcacaagctccatattgtgggaagtgcttttgtggtgaacaatggcagtccccatatcctgatatcaagattatagtcggagatacaaaaaaaaaaaaaaaggcagcttatatcctcttcacaacttttaaagattctgttggccaatgaaacatatatcctaaattatgttaccataggatattggagttctgtgatacatgggattagaagagtagraagaaggaaagtcactcagttaagttaacacaaacttggagaactcattttgattctctgggccacattttacttatcttgtcaataaaccaacaacgaaaacatctactaatcaagatgtaatgaatctggaatgcacacgagggttgtgtcccaaaacttgtgccacataataggttggtctacacgaattcaaggtaccttatggaaggaaattctattatttcaatggttataatacatcatt

SEQ ID NO: 608939 - DNA, 541 bp, Homo sapiens
tggctcatgcctgtattcctagcactttgggaagccaagggaggtagagtgcttgagctcaggagtttgagaccaacctgagcaatatagtcaaatcctatctctacaaaaaatacaaaaaaaaaaaaaaaaaaaaattagctgggcttggtggcacacacctatagtcccagctacttgaggatctgaagtgggaagatcatttgagcccaggaagtcaggttgcagtgagccaagatcacgccactgcactccagcctaggtgacaaagtgagatcctgtctcaaaaaaaaaaaaaaaaaaaaaaaaaaaaattgaaccacaatcttccttgcattcgtaagagaatgtatgtgaaaatgcttcatcagtaataaagctctacaraaatatatggtgcttttattatcttttgactgtgatatattaattctatttagcttggcttcaacaaaatatacattttctttttgtctcaaatattgtataaattctatacaaccctacaatttctagagaatctaactgatgggatttgttt

SEQ ID NO: 608940 - DNA, 541 bp, Homo sapiens
tggctcatgcctgtattcctagcactttgggaagccaagggaggtagagtgcttgagctcaggagtttgagaccaacctgagcaatatagtcaaatcctatctctacaaaaaatacaaaaaaaaaaaaaaaaaaaaattagctgggcttggtggcacacacctatagtcccagctacttgaggatctgaagtgggaagatcatttgagcccaggaagtcaggttgcagtgagccaagatcacgccactgcactccagcctaggtgacaaagtgagatcctgtctcaaaaaaaaaaaaaaaaaaaaaaaaaaaaattgaaccacaatcttccttgcattcgtaagagaatgtatgtgaaaatgcttcatcagtaataaagctctacagaaatatatggkgcttttattatcttttgactgtgatatattaattctatttagcttggcttcaacaaaatatacattttctttttgtctcaaatattgtataaattctatacaaccctacaatttctagagaatctaactgatgggatttgttt

SEQ ID NO: 608941 - DNA, 517 bp, Homo sapiens
cattccattcaacagtagcagaatatgcacatttttctcactcaaacatgtaacattctccaggacagattatttgttaggccacaagataagttttaacaaatttaaaattaaaattatatcargtatgttttctgtcaacagtggcatgaaaccataaatccgtaacaggaggaaaattggaaaattcacaaatatgtggaaattaagcaacacactcctgaacaaccaaaggtcaaagaagaaatgaaaggggaagtaaaaaatatcttgaaacaaacaaaaatggaaacataacataccaaaacatggaatgcagcaaaagcagttctaaaagagaattttatagcaataaatgcctacattaagaataaggaatgatcttaaataaacaacttaatattggacctcatggaactagaaaaataagaacaaagtaaaaccaaagttagaagaaggaatgaaataataaagattagagcacaaataaatgaaataaagagtagaaaaacaatac

SEQ ID NO: 608942 - DNA, 616 bp, Homo sapiens
tcctgaccccttaactcttagctgggagaacccccagtcaattggctccgcagatctctctgcttatctgtgagagtacttagctccttgcaaatatctacatttcctgttccttattcactgttatatccataaagccttacacagtgcctggcccatgtttcctgagttgaaccttgccttytcagtgctgttaaacaagcacatcacctctaaagtcaaaatcccaagagtccttcaggcctatttctgagtgggagagaggattatcagaatattagcctttggctggaggtggtggttcatgcctataatgccagcagaggcaggaggatcatttgagcccagccaaggcaacattagtgagaccccgtctcttaaaaaaaaaaaaaaaaaaaaaaaaaaaaagctcactcacatttcattccaaaagaaaaggagaaagccatccagattttaatctcataaagatatcagtggaacagaattagaagttatcaaatttgttatgagaaaataaaaatgtctgaatctccaaacactgatacatttagagttagtgaagcaaggctggtaaaagtgggtaagcaagtagaagaggcaggggaatgtggga

SEQ ID NO: 608943 - DNA, 616 bp, Homo sapiens
tcctgaccccttaactcttagctgggagaacccccagtcaattggctccgcagatctctctgcttatctgtgagagtacttagctccttgcaaatatctacatttcctgttccttattcactgttatatccataaagccttacacagtgcctggcccatgtttcctgagttgaaccttgccttctcagtgctgttaaacaagcacatcacctytaaagtcaaaatcccaagagtccttcaggcctatttctgagtgggagagaggattatcagaatattagcctttggctggaggtggtggttcatgcctataatgccagcagaggcaggaggatcatttgagcccagccaaggcaacattagtgagaccccgtctcttaaaaaaaaaaaaaaaaaaaaaaaaaaaaagctcactcacatttcattccaaaagaaaaggagaaagccatccagattttaatctcataaagatatcagtggaacagaattagaagttatcaaatttgttatgagaaaataaaaatgtctgaatctccaaacactgatacatttagagttagtgaagcaaggctggtaaaagtgggtaagcaagtagaagaggcaggggaatgtggga

SEQ ID NO: 608944 - DNA, 616 bp, Homo sapiens
tcctgaccccttaactcttagctgggagaacccccagtcaattggctccgcagatctctctgcttatctgtgagagtacttagctccttgcaaatatctacatttcctgttccttattcactgttatatccataaagccttacacagtgcctggcccatgtttcctgagttgaaccttgccttctcagtgctgttaaacaagcacatcacctctaaagtcaaaatcccaagagtccttcaggcctatttytgagtgggagagaggattatcagaatattagcctttggctggaggtggtggttcatgcctataatgccagcagaggcaggaggatcatttgagcccagccaaggcaacattagtgagaccccgtctcttaaaaaaaaaaaaaaaaaaaaaaaaaaaaagctcactcacatttcattccaaaagaaaaggagaaagccatccagattttaatctcataaagatatcagtggaacagaattagaagttatcaaatttgttatgagaaaataaaaatgtctgaatctccaaacactgatacatttagagttagtgaagcaaggctggtaaaagtgggtaagcaagtagaagaggcaggggaatgtggga

SEQ ID NO: 608945 - DNA, 515 bp, Homo sapiens
atccacagaaaaaaaaaaaaagcagctcccagagggtcaaatgtaatgtgaatggctttgcataaaaccataaacctgctattaaattaaaaacagaaaaaattatgtccactccttatctccaggcattttttttttaaaggaatgctacactaatttatttcttcgctgttcctggttacacggtaaaagactaaaaggttaaaatgcaatggttctttgatgtttggttgagcaactttcactaacatgttctgattgaggtgaagaaattaataaaattatttccawaattcattactaatgggaagctgtcgatgctttcagctgacagttcacacaaattctcctcagacactgagacacctcatggtgactggctgctggactcactccttccaactgtgttcagcaaagcagagcctggctccctgggcccgctgtttcctgatctctcacctctgcgtgtttgttcttgacaaacaagtctgttctctctgtgaacaaaagcagaa

SEQ ID NO: 608946 - DNA, 573 bp, Homo sapiens
atttcctgggataaagtgatgaaggtcctgccaaagaagtaaaaaaccattggagaaggcctaggatgcctggtttggccattgtgatagaggttccccatcatagggtaagcgggggaagaagaaagcttaaggaaatgtggctggaaagatagatctctgcctttattcttcaacaagcacttattgagcaccttactatgtgccaagtattgcaccaggtcccagggaaactggtttgcaacaggatctcttagaagttgtagtatagtgggagagacaggtcttaaaagatcatacatggccgggcgcgatggctcacgccatcgagtgattgctgtaatcccagcactttgggaggccgagacgggaggatcacgaggtcaggagatcgagaccatcctggctaacacggtgaaaccccgtctctactaaaaaaacaaaaacattagccgggcgtggtggtgggcgcctgtmgtcccagctacttgggaggctgaggcaggagaatggcgtgaacccgagaggcggagcttgcagtgtgcctagatcgcgccactgcactccagcctg

SEQ ID NO: 608947 - DNA, 534 bp, Homo sapiens
aatcaaaattgaaatttagaccacctccaaaaacttacacacttgaaactagtattctggaattgctgtctgataggaatttgctcataccctaccataccctgggctacatgtccctaaccttgattctaattaccgtgttttctttgttgttgttgttttttgagatgcagtctcactctgttgcccaggctggaatgcagtggtgtgatctcggctcactgcaacctctgcctcccgggttcaagcaattctcctgcctcagcctcccgaatagctgggattccaagtacacactgccacaccyggctaatttcttgtgttttagtagagacagggtttccaccttgttgcccaggctggtcgcaaactcctgagctcaggcaatctgcccacctcagcctcccaaagtgctgggattacaggcatgagccaccgtgcccagcccataattactgaatgatggaatctgaaagaaaagtggcctttaattcaaccagttcaactcctcactttccagatcaaaaaacaaaa

SEQ ID NO: 608948 - DNA, 210 bp, Homo sapiens
acaccccacacctcaggctgctctggtgctgtcagcccaccttttgcacgcctgtcggtmctattcaacaccagggcatgctgtcagagtcacatattcaatgctgattatctgtctgcacatgctccccacgactgggttccctgagggcatgtgtctccacatccccagcacggggactggcacatggaaaatgtgtgatcaatgact

SEQ ID NO: 608949 - DNA, 515 bp, Homo sapiens
aaacaaacaaaaagtgtgcaaagggaaaggtgagcttaaaaaggaaacaggaaaactggtcagaaaaatgggagcatatcacgagaacttgatttaggctccacctatcacatgcacataccaattggaagctagtgatacacagtagagggcccttggaaatcatctggcagcaccaggaaatacagcaaaatccagtttatggaacacagtaacagtaactagcgactgtatccatgtccaggacagtggagtctgtgaagcaacctgcagtatcttgtgcttagtggcagcaggaaagacagtggtggatgaattctaccgcakgatttgggttttctttatgtgtcctgcaagttggattcttcagactcggcacttttgtgagccactcagtataatctattatctaatactgtcgattaccttactgggtaagggcaaaaacccctattgtgaaagacttgtggctgcgtagccaacggccattctttttgaaacagtcatttctgttt

SEQ ID NO: 608950 - DNA, 591 bp, Homo sapiens
ctgctccgtcactgactggctgtgtgacctggagccagtgacatcacccttctgagcctcagtttcttattctgcagagtgggctgggaagtagcttcctcagcggggaacgttgtctgaattaaatgaaacacacacagcacttggcctacggtaggtgtcagagaaagtgtcacccagtcactactgtcattctgaattcaccccaacttcatcttcaaatatgttttactgtttgtgtattttggggtaaataagaaaaacctaaccacctattcttacatttttcaagattgttatacaygcctgcttttccttctccccatcctgggtaccccctgccctcagtatcaccttctctgttcccatggtgtgggagcccttccttctagccagatcagtctgttgtgtttttggttatttgagccagtgtgtctcaaatccaccctcgacagaaggtgcctgtatcattctctgcatggacagatggcgtcagagcgctgatgcctctgcacacagtggttcacagagcccccacagtgtgccccttcttacatctgaggtatctggtctctgacaagtgaaatgagc

SEQ ID NO: 608951 - DNA, 591 bp, Homo sapiens
ctgctccgtcactgactggctgtgtgacctggagccagtgacatcacccttctgagcctcagtttcttattctgcagagtgggctgggaagtagcttcctcagcggggaacgttgtctgaattaaatgaaacacacacagcacttggcctacggtaggtgtcagagaaagtgtcacccagtcactactgtcattctgaattcaccccaacttcatcttcaaatatgttttactgtttgtgtattttggggtaaataagaaaaacctaaccacctattcttacatttttcaagattgttatacatgcctgcttttccttctccccatcctgggtaccccctgccctcagtatcaccttctctgttcccatggtgtgggagcccttccttctagccagatcagtctgttgtgtttttggttatttgagccagtgtgtctcaaatccaccctcgacagaaggtgccygtatcattctctgcatggacagatggcgtcagagcgctgatgcctctgcacacagtggttcacagagcccccacagtgtgccccttcttacatctgaggtatctggtctctgacaagtgaaatgagc

SEQ ID NO: 608952 - DNA, 378 bp, Homo sapiens
ttggctgctggctggggacggccacagggtttcccacaggctcacggggaatggggcctgaggaatgttctacacatgtcaggccctggaaaaacaaacacagagatgggccttgccgcccgtttccaggcgaatgtgccggcagacacagagccagcttgtttgcttttagacgaaagcgagtggatttgtatcagcatccccaagggacagtcctggggccggctcagggacagggcagggccgtgtgtgtgcctgggcacatgtgaacgcacgtgtgtgtgccgtgcrtgggtgtgtatggtgtggtgtgtgtgtgtggtggtggtggttttgtgtgtgtgtgtgtgtgtgtgtgtgtatggtgtgtgagagagg

SEQ ID NO: 608953 - DNA, 633 bp, Homo sapiens
ggatgcacttcataaccgctgggatggccatcatcaaacggtcagatactaagcactgttggtgagaatgtggagaaatcagaacccttatacgcagcrggggagaatgtaaattctctgcgctgtggtagaaaataacttggcagctcctaaagaaagttaaatacagttaccatatgacccagccattctattcttaggtggaataaaaaacccaagaggaattaaaacatatgttcacaccaactcttgtatacaaatgtttaaagtagcacaattcataatagccaaaaggtggaaacaatccaaatcttcatcaacagatgaataaacaaaatgtggtctatccgctcaacggaatattatgcggtaaggaaaagacacgaagcactgacacgtgctacgacacggatgagcctgggagacgttatgctcactggaaaaagccagtctcaaaaggccacatactgtacgactccttttatatgaagaatctgaacaggcaaatctatagtgacagaaagcagattccttgtggcccaggaatggtggcttgagggaaatggtgagtaattgctaataggcatggggtttttttggggggatgatgaaaatgatctaaaattggttgtg

SEQ ID NO: 608954 - DNA, 633 bp, Homo sapiens
ggatgcacttcataaccgctgggatggccatcatcaaacggtcagatactaagcactgttggtgagaatgtggagaaatcagaacccttatacgcagcgggggagaatgtaaattctctgcgctgtggtagaaaataacttggcagctcctaaagaaagttaaatacagttaccatatgacccagccattctattcttaggtggaataaaaaacccaagaggaattaaaacatatgttcacaccaactcttgtatacaaatgtttaaagtagcacaattcataatagccaaaaggtggaaacaatccaaatcttcatcaacagatgaataaacaaaatgtggtctatccgctcaacggaatattatgcggtaaggaaaagacacgaagcactgacacgtgctacgrcacggatgagcctgggagacgttatgctcactggaaaaagccagtctcaaaaggccacatactgtacgactccttttatatgaagaatctgaacaggcaaatctatagtgacagaaagcagattccttgtggcccaggaatggtggcttgagggaaatggtgagtaattgctaataggcatggggtttttttggggggatgatgaaaatgatctaaaattggttgtg

SEQ ID NO: 608955 - DNA, 589 bp, Homo sapiens
ctacccttaccagcctctagtaaccatcttctattctgtatctccatgagctcaattgtttttgatttttggctttcacaaacagtgaggacgtgatgtttgtctttctgtgcctggcttatttcacttaaaataatgacctccagttccactcatkttgttgcaaatgataggatcacattcttttttatggatgaatagtccttccctgtgtatatgtaacacaatctctttattcattcatctgttgatggacacttaggttgcttctaaatcttggctattatgaatagtgctgcaataaatatagaagtgcaaatatcacttcgatataatgatttcctttctttttggtatatccctagcagtgggcttgctggatcatataactctatttttagtttttttgaggaatgtccaagctgttctccacagtggttgtactaatttacactcccaccaagtacgagtgttccattttctccacattctcaccagcatttgttattgcctgactttgatataagcagtttaaactggggtgaaatgatatctcattgtagtttttgtatttctttgatgatcagtg

SEQ ID NO: 608956 - DNA, 605 bp, Homo sapiens
gtgttcttgttgggggaaatgattagtagaggcttctattcagccatcttgtttgacccctctcccggtatttcttcatgatttaggtaaaaagtctttgccagggtggagtgaaaaaataaaatggagatgaaaatatgttatgtctcctgaagaaagataatctatactacactcaacttcttctggtgtttttaaagttgtaaataagacattctgtgggaagtatggttagatagatacatagatagaaatatgtagatattaggatttgcttttattagcttaaagaaacaaatcagtttgtcagcattgagaactgactccaaaataaaaaattccaaagtttttgtgttccaactgaaacttaggaactttgtctaaaaaactatttaaagttatttataaagctacaaattgctcacgtgcttattctttagatgastgttttccctaaaaaacaattatctgtgctacttgtttaaattgttttgttcttttagtcaaaaattaggtaatatatgctcaactgagccagaaaagtgtgacaatagctttaacttagttttattattttctatacttctcttaattgttgaatttgt

SEQ ID NO: 608957 - DNA, 542 bp, Homo sapiens
gagagagaagaaaactttggtggttaaatcaatttaagctacctcactattctgcataggtgttttctactggtgtgagaggtatgaagaggaasgaagttgagggtctgagattgtaattgccttctggcaggttggggcaggaggaagctgcccatgggagcagagctttagcagtgtgggaaagcagatgtctatactgtgcaggagaacaccgtgatgtggtcatcagcttggacgtcaggatttggagtttaggatttctattgaagaagtggctacttaaagctaaacaaggtaagtttttgtttttgttttaaaaaggtactagagaattaggaaaaatctgttggtggatttgccaaagtaagtcagagaaacatgatggtctggatgcaaaatctccttttagatgagccccttttaatgctgcaaacatgtttccaacaatactctttctaacagcaccatgaaatgacttattctgaacagaggctgaaaataacaagatggagtctttggtctgaaggagatggcaattt

SEQ ID NO: 608958 - DNA, 633 bp, Homo sapiens
tcaccagggtgggtcctcccagcctgcacttccagccacctctaattgtattctagagccagcagtgccctaatttctcactgggatggagtgcctgtggagtggagcagactgctgccacgttgaccattcaggcttctaagctggtccaacctgtggtccttggagagcccaaagcaatcaggggctgaagggatcaycaacagagcacagcagctcctccaaaaagcagccagactacttctttaacaggttttggattccattccttttgactgggtgagagctgccaactggggtctccagccatctcctacaggtgcattcaggctggcaataagtcagcacccctgggacagagcttccagaagaaggggtagactaccatctttgctgtttcacagccttcactggtgatacttccaagtatgggaaaaaaccaaggcaactaggatctggagtagacccccaaaaaaccacaacagtcctacagaagagtggccagagtgttaaaagataaagaaacaaacagaaaataagaacaacaacaacaacaaaccgcaaaactcccattcaaaggtcagcaaccccaaagattgaaagtagataagtccacaaagatgagaaagactc

SEQ ID NO: 608959 - DNA, 591 bp, Homo sapiens
cttccccaacttagcaacacaggccaacattcaaattcagaaaatgcagaaaaccccagtaagatactctataagaagatcaacctcaagacacataatcatcaaactctccaaggtcaatatgaaagaaaaaaatatgttaatggcagccagagagaaaggctaggtcacctgcaaagggaagcccatcagactaacagcagacttctcagcagaaaccctacaagccagaagatattggaagctaatacccaacattcttaaagaaaagaatttcatacccagaattttttatccagcaaaacttagcttcataagcaaaggagaataaaagaaccttttcagacatgtaaatgctgaggaaatttcttaccacccaaactgtgtctcaagagctcctgaaagaagtgttaaatakgaaaaggaaaactattaccagtcactacaaaaacacattcaaggacacagacaagtaacactatgaagcaaccacatagacaagtctgcaaaataaccagatagcatcatgatgacagaatcaaatccacacataacaataatcttaaatataaatgggctaaatgcctcaat

SEQ ID NO: 608960 - DNA, 480 bp, Homo sapiens
atatgttaacagtgaacaatccaaaaaggagattaagagaacaatttcatttattatagcatcaaaaaggataaaataattaaaaatacaattaaccatgaaggcaaaagatttgtacactgaaaactatgagattgctgaaaaaaaaataaagaaaacctcttgtagaaacttatcatgaagactggaagaattaatattgttaacatggcaacaacacccaaagtgacttacagattcaatgcaattgtaataaaatactaatgctgtaggggtttttttgtttttgcagaaatagaaaaatccattttagtatttatatggaatctgaaggyaccctgaatagccaaaaccatctagataaagaggaacaaagttgaaagtcccacaccccatggtttcataacttatgacaaatctatagtaatcaaaacagtggggttttgccataaagacagacctataggacaatgtaattga

SEQ ID NO: 608961 - DNA, 622 bp, Homo sapiens
ggagtgtggactgacgggctttactctagggctacagcaagacaaactggccttttctttgggtagttataaatcttttctttggcaactgtcagttctctcaaatagaattctccatgattttccctgaggcagggattgagggagtgtggtttaaatctctgtatgaccattcttgctacaagttgagaaaggcgtaggagacagactttttaataagcagacttttcatttactcttccctctatgagcaggataagcctgcttttctgtgaatgaagtggctgaatgtagaactctttgttttaacctctcctgatatcaaataatccctgctgtcttcttatggtggaagagtggcggttgtccacagggtcgcattatgactgttgtggacactaagcatttttaccttcatggactccttcctccataacataaaataaaatataaaataaaattgatattttatgactgtgtttrtataaagacaaatataacccaggttgtatgatgctcactttttagttctgactgtaaagtaaattaaaacattttttgtgggcccctaaaattatcatagaccctaggcacagtgcctgatgtaaaaattggcccaggt

SEQ ID NO: 608962 - DNA, 613 bp, Homo sapiens
ctattgaatttttgcatgttcaatgactttgtcctctgttgcctaaggttgctttactctcatattataaatcattggcaacaagggtggaacagtcagatgatcagtgctccaaaatgggaaatacattcaacttaaagattttacataagagaaactgcctgggaggaggggagcatgacttcttagtttagtgattccagaagtcattgttgaatcttttgaatcttcaaacaaatttgttcccactatgatggaaatgaagacaattgacagtatgttgatgtatgttgtgtaggcttcttgctcattgtaatatatggataagkcatttattgtattcaactggttgttctggaatttaagttgacattattttatttcactatttgaatgatcaaaaaataggttagcaattaggaaaattgcagctcaagattacactaaatctccttcctctactgttaaagactactttcccattaacttcaattcttcataagaagccaatgctttgaataaagctgtatgatttctttttttcttatttatttatttatttatttatttatttatttatttatttactcatttttgagatagaatcttgctc

SEQ ID NO: 608963 - DNA, 537 bp, Homo sapiens
aagtaatactgaaggagaagaataaaaagagtgaaatcagaggactgatactgtcttacttcaagacttactgtaaggctgtagtaataaagatagtgtggtttggtataaatctaggcatggttccatagatayagatttactgaataattactgaagtctactccaggcttttatgtttcctttcataaacagagctatcaagtgtggacatggatattattttctgagtcttgagagtgcctttgaaatattaccttcgactttttctcagttcacttagtagtttcccacaggaaaacattttccaacctatatggtacagagagcccagaaatagacacatttatagtcaaattatccttgataaagaagtaaaggcaattacatgaagagaaagaatagtctgttcaacaaatggtactgggacaactggatgtcaacatgcaaaaagaatctagataacagacctcacacctttcagaaaatgtgacttaaaatggattatacacccaaaaataaaatacaaaaccataa

SEQ ID NO: 608964 - DNA, 623 bp, Homo sapiens
cttctgggaacaagatgcataattgacttttcatgatattatgaatattttcgcatcaacttctttgacaaagtatagcagtgagtcattttagagattctcaatcaggcatttctaggatagcagggtagcygctaccagagccccccaactggctgccttgagccccagcagccttgcctgtggagcatggaggctgcctgtctgtgacagggtctgacaatgtctcccaagaagctaacaccaattaggaactgccgcaggtcccctaactcttgctgttccattgtaatgggctgtgcccagctaggttaggaggggcttcacagtgtggccagctgcctccttaggcagatgaagggaatgccactgcagaggggacaggtggcctgtggatctgtatgaagagcagtcagttgtggccattcaggggaggaggacaggatggaaaggatgggacaggagaggaccctgacatgcactgaactccccatctctctgtttgtcacttatgtgcccttttagaggtgttcttatctttacagtgacagctctaaactcacatgtactttgtgtaatttagggcttcatctttgttttgaaataatatgaaaagttcaact

SEQ ID NO: 608965 - DNA, 613 bp, Homo sapiens
ttattgtatatttcaaagtaactagaagagaagatttgtaatgttcccatcacaaagaagagatcaatatttggggtgatggatatcctaagtaccttaatttgattattacatattgtatacaggtatcaaaatatggcatgtattccaaaaatatgaacaattaatatatataattaaaattaaataattaacttaaaatataaaaaggaagagacaaaatctctataatggtagaactcagtcatagaaataagaaattrttaagtgtcattaagtgtacttatgaatatagattttttttaacattttggtatgggacacttaatgtgacactgagctacttaacacatttttaagtaaaaaatatgatgttgtacagagatctctagaatgtatttatagtgcataacttaaactttatcaccattgaacatcaactttccatttccccctcgctccagcccgtggcagctgctattttacattttgtttctatgagtttgactgttttaaatagttcatgtatgtggaatcatgcatcactcatccttctgtaactgatttatttcacttatgataatgtcctacaggttcatttttattgtcacat

SEQ ID NO: 608966 - DNA, 508 bp, Homo sapiens
tgtcagttggaggcagcaaggggtggagagctgtgaccagttggtggggagagagggtggggagcagggtactgacaggacttgggcttcctggggaagccaggggcagggggagtgggaaagtgctggttctagcccatttcaaaagccaccgagtttcagccttgggttagggcttacaactcatctggtttaactgcctcctgcctgtgccagcccatcatcattgccagcscggtttctcctgtcctccccccaggctctgacctttccatctccttcggtccagcagtccctttccgcaacatggagtcaggcccacttgactttaaagccccatctgctaccggctgcataacctcaggcaagtgccttaacctctctgagcctcttggcaatgctgatttcaacctgacagggctgccagaaggatgacaggagaaggcgcttagaagaaataaggtcccccctgccccgtgcagtgccacatcccactccccagctgcac

SEQ ID NO: 608967 - DNA, 310 bp, Homo sapiens
aattgctgctagtgtttgaacagatcatctagccttactcaccttaactgatgggatgctcattacctgtcagcacsgcacactgcatcattgtcagcttggaccctgagaatgcttttctttagatagagaggctctgtctctcccagactggagaccaatgtgttcaggcctgggctgaccacatctgtctgcttcttctcatgagcatgtttttgtttgtttgtttgttttctgaaaattttgccagaggcaggaggaggaaaagaggaggaggagggaggagataagggaaggctgttgaagtggg

SEQ ID NO: 608968 - DNA, 607 bp, Homo sapiens
tctagattttgttgtgttccctgttcttttaaagttaatttaaaacacaaaatctccaaagtaggaagaaaccaacaatgctctggctcttgcttagcttcccagccttattcttactgttgctgggcttgactctatagttgaagttcatcttagatgagaggacctggtaagaacagggaagcagacaagtgaatatggtgatatagtcagtctccaggaaatccaggtgtttaggaatgtattgtgttacattcatgggctttcattaatacttcttaagtgaaaataaaatctgtgtgtgccacttaatcagyagtatttcactcttcatgcacttttacacataaaagtagtatatatttttaagtgaatcagggtgtgccactggctttcttcatccagatgagtgtcccactctgagtaatagctgaagagctaggctggacttcacaccaactggaaggctcttcactgaccttgtacagtttatcagctatgcttcctactaattatctgactttaggataaagctctgagtactgtttaaatttttcactatttctttggattctatagttatttcagagattcaaaatacacagga

SEQ ID NO: 608969 - DNA, 452 bp, Homo sapiens
cttggcgccatcttttccactgcctgaaacccttcctcctctccattttcagctcctctgaaggccttcttaccaacaacttaatgcaatgccccaagctcatttcaatctctattcctaagatgattttcatggytttttatcatttgttgaaattattagtatcttcctttatttcagtcttcttcattcaagtatcaacttaaaagcagaacacttgtctgcttgttaaccacttttcagcagtacctagaaatagtaccaggtacagagcagatacaggaatatttatcaaaaataaataaatgagtgagaagtctaagaattaaggatttctaaaagataaagcctacaaacctaagctatatatggtaaatgctattccataccatagcaaattagaaacattacaggattgtatgttatacatatgaacactgtgatctggaaat

SEQ ID NO: 608970 - DNA, 452 bp, Homo sapiens
cttggcgccatcttttccactgcctgaaacccttcctcctctccattttcagctcctctgaaggccttcttaccaacaacttaatgcaatgccccaagctcatttcaatctctattcctaagatgattttcatggctttttatcatttgttgaaattattagtatcttcctttatttcagtcttcttcattcaagtatcaacttaaaagcagaacacttgtctgcttgttaaccacttttcagcagtacctagaaatagtaccaggtacagagcagatacaggaatatttatcaaaaataaataaatgagtgagaagtctaagaattaaggatttctaaaagataaagcctacaaacctaagctatatatggtaaatgctattccataccatagcaaattagaaacattacrggattgtatgttatacatatgaacactgtgatctggaaat

SEQ ID NO: 608971 - DNA, 534 bp, Homo sapiens
tcactgactgccaccctgttgatcaccaaatgtcagctgccatttcttcaaccatctctcatgctgccgtcttctctcttcatcccactttgggtaccatgctgatgcagggcaaatgagccccaaattggggcttagcccatgagacttattggctttgcccaggaaagaatttaagagtgagccactggtagggtagaagaaaacagccttattgaagtggcagtattacagctctggcaatattacagcttcatgacttctcctgcagagcagggctaccccataggcagtgtactcagagtccttctccsttttcttatttgcatttttctccaacactgagaaacctgattcttattatctacaaattatttaaattttcaaccttagtatactaataaaatcatttcagaattattaagccataccctgtaagaaacacatttatgaactatagtacagtctctttgtatagtaaaatttttaaacatgtttaaatagtttagatttacagaaaattacaaatttaat

SEQ ID NO: 608972 - DNA, 559 bp, Homo sapiens
ttgtcacaatatatggtcttgctttacaagtatttagtgatttctaaagtaactttggtcagcacctttccctcaactcccttcagtgaggttactctgtatacatgtaatgcagttagaatattttctcacaatctgcagttcatcctgtcatttccccaacctcctagttgacttcgtttttatttttttattgatacatagtgttttttcatgtttatggcatacatgtggaattttgctacgtgcatacaatgtgtaataatcacatcaaggtatttaggatatccatcacattaaacatttatcatttctttgtgttggaaaaattccaaattttctcctctagctattttgaaatatataaaatattgttaattgtagtcaccctactgtgctgtagagcactagaatgtattatttgtgtttaaatgtatrtttgtacccattacctaacctctcttcattctacatcttatgaacatctcaccctttggtaattatcattttactcttctgcctccattagatggacgatttttatctcctacatgtgagt

SEQ ID NO: 608973 - DNA, 604 bp, Homo sapiens
tcacaatatatggtcttgctttacaagtatttagtgatttctaaagtaactttggtcagcacctttccctcaactcccttcagtgaggttactctgtatacatgtaatgcagttagaatattttctcacaatctgcagttcatcctgtcatttccccaacctcctagttgacttcgtttttatttttttattgatacatagtgttttttcatgtttatggcatacatgtggaattttgctacgtgcatacaatgtgtaataatcacatcaaggtatttaggatatccatcacattaaacatttatcatttctttgtgttggaaaaattccaaattttctcctctagctattttgaaatatataaaatattgttaattgtagtcaccctactgtgctgtagagcactagaatgtattatttgtgtttaaatgtatgtttgtacccattacctaacctctcttcattctayatcttatgaacatctcaccctttggtaattatcattttactcttctgcctccattagatggacgatttttatctcctacatgtgagtgagaacacacaatatttgtctttctatgcctggcttatttcacttaaa

SEQ ID NO: 608974 - DNA, 559 bp, Homo sapiens
ttgtcacaatatatggtcttgctttacaagtatttagtgatttctaaagtaactttggtcagcacctttccctcaactcccttcagtgaggttactctgtatacatgtaatgcagttagaatattttctcacaatctgcagttcatcctgtcatttccccaacctcctagttgacttcgtttttatttttttattgatacatagtgttttttcatgtttatggcatacatgtggaattttgctacgtgcatacaatgtgtaataatcacatcaaggtatttaggatatccatcacattaaacatttatcatttctttgtgttggaaaaattccaaattttctcctctagctattttgaaatatataaaatattgttaattgtagtcaccctactgtgctgtagagcactagaatgtattatttgtgtttaaatgtatgtttgtacccattacctaacctctcttcattctacrtcttatgaacatctcaccctttggtaattatcattttactcttctgcctccattagatggacgatttttatctcctacatgtgagt

SEQ ID NO: 608975 - DNA, 545 bp, Homo sapiens
ctttatttgtttttaattttcaaaaaaatttatttgaaatctcttaacctcagttgtcattttctatcctttttgtccttatggaatcacatatttttatttctatatgctcattttagtaacgtagtaggagacagattagagtaaactaatatatttgattcacaagtttaaattaatcttatctgttttccattggaatttttattgatattgattagtaaaatgatttcacaattttaattttgttatatcatacacttgtacacattagttttaatatattttctgtctactgttacatccatttcttcctgtactcaaagtacctaatattttagrccacttgttattgactaaagttcatgagactctgtttatttttttcatatatatttttctatataattttaaaattgagtaatttctattagactgtcttcaagtttgctgatgttgctttgttgtcaccattctactattaaatccatcagatgatgttttattaaaatttcaaatactgtattttcagttattaaatttct

SEQ ID NO: 608976 - DNA, 559 bp, Homo sapiens
agtatacattgtaccatatttgcagtcttttatcccttgccccctcccaatacagcaaaattggcatacaagggacatacctcaatacaataaaagccatctttgacaaacccacagccaacataatactgcatgggaaaaagttgaaagcattccctctgaaaacaggaacaagacaaggttgacaattttcaccactcctcttcaacatagtactggaagtcctagccagagcaatcagccaagagaaagaaataaaggrcatccaaattggtaaagaggaagtcaaactcactgtttgctgacaatgtgattgtttaccttgaaaaccctaaggactcctccagaaagttcctagaactgataaaataatttggcaaagtttccagatacaagattaatgtatgcaaatcagtagctcttctatactacaacagcaacacagcagagaatcaaatcaagaactcaaccccttttacaatagctgcaaaaaaaaaaaaagatacttaggaatatacctaacaaaggaatcgaaagacctccacaaggaaaactacaa

SEQ ID NO: 608977 - DNA, 598 bp, Homo sapiens
ttgtaggcatcttatttaggaaccaaaatgggaggcaggtttgcatgacctagttcccagctttacttttcccgttggctcagtgagtttagggtcacaagatttatttttgtttagcaattccttttttacttgtttttttcttgctttattatctaggtttatttgcctcctctcccatattttgaaaaatgtacatttttattaggaaaaaaatcttccagagattttcaattaaagttatcaaaaagattattttatgttctctatttaggaaagtcaagaagaaactagtaccttctgagtcttcycctctaaatataattcactttatattcaaattcagtcttttaattcaatttgaatttttgaaaatacagatctatgattatatggtttcaatgatcattctcaaatttctttataagtgacttccctatttatgtgttcttaatttcaattaatttgcttggaatacatgtgcaagcaattttcaagtaagaacaaataaattatctgttttctaagttccagaatattagagaaagtctttctatttcctattacctgtgtatattcaagtaagatgggtgggaat

SEQ ID NO: 608978 - DNA, 512 bp, Homo sapiens
tcttgtaattcctcctttgtaatctagttctctgtcttggaatatagttcattcatctctgtttttgttcaatgttattgtggtttttatctgttcatttattctgtataacttcttggtcttacttcatatgaaaaaaaatacattggtatctttttttttttaatcttcaagttcatcttaccttaactttctcctggagcgtttttaaaatttgtttatttgttttgttttttcttgtccctgtgtttatcgacagaaagagtgattagaatgtaccttatttaaatttgtctacttggtgttgatyaaatccccttctaagatgcatagctcaacaacagaatgaaatgcatatatctggatatagttctaagatcaatatcaggaattcctctattacaattctcctaaacttaaaggatatatcctactcaacattcctgattttctcacattcaaaacagagggagaacgtaaaatatttcagttcccagtatgcactgctaccg

SEQ ID NO: 608979 - DNA, 461 bp, Homo sapiens
acagcattaggcagcacagcttaattaaaactcatgcctgactcacaacttgagtttcagtgcagccttttttcagttaacagcatgaacagtaggacaatatgaaatggtaaacaaagggcctaacttttctaaagcagaacttagttaataggaatttgggtactggagasatttgtaggaaggagttctattccagtttagatcttcttttggcaagctattcagttcatttaatatacattttaggtaggtttatatcctggcattttgccaagcaatttaaggtagcttataggttaaaacataaaacaaagtaaaacatttaaaggagaaacagcagaactgtctatagtaatgcttctcaaacgtgagcatccaacctgaataatctaaagaacatgttaaaactcaaattgtaagcccacccccaaagtatctatttcagtatgtttgggatg

SEQ ID NO: 608980 - DNA, 461 bp, Homo sapiens
acagcattaggcagcacagcttaattaaaactcatgcctgactcacaacttgagtttcagtgcagccttttttcagttaacagcatgaacagtaggacaatatgaaatggtaaacaaagggcctaacttttctaaagcagaacttagttaataggaatttgggtactggagagatttgtaggaaggagttctattccagtttagatcttcttttggcaagctattcagttcatttaatatacattttaggtasgtttatatcctggcattttgccaagcaatttaaggtagcttataggttaaaacataaaacaaagtaaaacatttaaaggagaaacagcagaactgtctatagtaatgcttctcaaacgtgagcatccaacctgaataatctaaagaacatgttaaaactcaaattgtaagcccacccccaaagtatctatttcagtatgtttgggatg

SEQ ID NO: 608981 - DNA, 514 bp, Homo sapiens
gtgaacatttttaaaatattgacaataatatacccaaagcaacacttaataaatgaatgaccaaataatttatatccaaatttaaataaaggggcccagagtatagtctcagaaagatatgtgtatcaatagctgtgccccaatcaattgcattatacttcatgaaaagagattatgtgtaaayggaaaagatctctgtttgcaaggaatttaggaagggttaaatccaaagagggacaatttttcagtgtctctcaagacctttccaaagaggagagtgacctcaccagctgacctaagtattcaattccccatcacagatttatctccatgatggaaggagtatatgttgtttttccagtggagcatatgaattattcagagtcaactaatgtcatccagcacaccactcttgctttgattttgggcttaatggtcaatctccaggttataatttggtttattcattaattaattcattcaatgaatatgtactgatactgtacaaatatgc

SEQ ID NO: 608982 - DNA, 483 bp, Homo sapiens
agactcttttcggactgcccctgactgaattctgtgtcatcccacctcgataacctgccagtgtctgctggtgtctgttgcggtgctcttctggtcctattgacgtccagctgcttgtgtctgcgyctactagggtctcaggtgttcatgggaacaggatagttgggtgtggtggtccagagtcatcttggaaaatgcaacatttaggcataaaaacaggagtgactgttctcacttaggtctgtgaacacaggctcgagggtggaggtcttaccagggatcccctccttctctacctagcactttcctgccaccttccatgtgaatgatggaaaatatattttacagtatagttgaatgtctatatatgaatatatacatctagatttaaacagaagttttctgatacaacactttacccattttacatgagatgcactttaatattatttagttttattctctcccataaaaattccatta

SEQ ID NO: 608983 - DNA, 464 bp, Homo sapiens
gaattctgtgtcatcccacctcgataacctgccagtgtctgctggtgtctgttgcggtgctcttctggtcctattgacgtccagctgcttgtgtctgcgtctactagggtctcaggtgttcatgggaacaggatagktgggtgtggtggtccagagtcatcttggaaaatgcaacatttaggcataaaaacaggagtgactgttctcacttaggtctgtgaacacaggctcgagggtggaggtcttaccagggatcccctccttctctacctagcactttcctgccaccttccatgtgaatgatggaaaatatattttacagtatagttgaatgtctatatatgaatatatacatctagatttaaacagaagttttctgatacaacactttacccattttacatgagatgcactttaatattatttagttttattctctcccataaaaattccattaatcatga

SEQ ID NO: 608984 - DNA, 632 bp, Homo sapiens
ctgcttgtgtctgcgtctactagggtctcaggtgttcatgggaacaggatagttgggtgtggtggtccagagtcatcttggaaaatgcaacatttaggcataaaaacaggagtgactgttctcacttaggtctgtgaacacaggctcgagggtggaggtcttaccagggatcccctccttctctacctagcacttycctgccaccttccatgtgaatgatggaaaatatattttacagtatagttgaatgtctatatatgaatatatacatctagatttaaacagaagttttctgatacaacactttacccattttacatgagatgcactttaatattatttagttttattctctcccataaaaattccattaatcatgactattaagttgaattcatgaattgcagttgaaaacactggaccttaaaagaacactgtctagaattccatgattctaagtaaagaacatgattttaagtaaagaagcaatcttattaaggggactagacctggctatactaaaaatagcctattaagaagtagaggtaagagtgaaggtaaattgccatatctggggcaaaataatatagtgatgacagatgaaagtcaaatagacattcaaacagtcatta

SEQ ID NO: 608985 - DNA, 485 bp, Homo sapiens
aatcttccaaaccatacaaatatgtcgaaattaagtaatctgctctttaatgatgtttgggttaacaatgaaatcaagatagaaatttaaaatttatttgaaatgaatgataatagtgaaaaaacttatcaaaacctctgggatacagcaaaagcactgccaagaagaatgttcatagtgttaaatacctcaaggagctagagaaaaaaatagcaaactaaacccacagctagcagaagaaaagaaattaacaaagatcagagcaaaactaaataaaattaaaacmaaaaatatacaatagataaataaaagaaaaagctgggtctttgaaagataaacaaaattgatagacaattaataagattaactaaggaaagaagagagaagatccaaataagctcaattagaaatgaaatggaagatgttacaactgataccacagaaatacaaaagatcattcaaggctactgtgaacacctttacat

SEQ ID NO: 608986 - DNA, 587 bp, Homo sapiens
cttactatcttacctcctttaggtctttaagtcatttttatagtgaggtttttcctgaccatcctacttaaaattgcatcaacagtatacctaccatgcctcctgttgtctaccttccctgctttatttttctctactgtatatatcgctttctaatataccatatacttcttaaaaaatttatttgccctcccttctcgtgtacacactagaatttaagcttaatgagggcatcattggtgcctccctakcacgtaaaatatctggcataaagtagatgttcaaaatttttgaagattgttgaataaatcacagtatatgaaatgtatgtaacctagtactttcacttccaaatttatacacaaagcagcccctacatgtgtagacaatggtatatatatagatcaatctctttctctctctttacacacacacacacacacacacacacacgtgcgaaaatgttcattgcaccattttctataatagggagaagttaagaaaaatctaaattccaaaaatagaatggataaataaaactgagtctatttctgtgttgcaacatcatacagtaatttaaagagaat

SEQ ID NO: 608987 - DNA, 458 bp, Homo sapiens
accattttgctaactgcaaaaacagactgctttggcagtctgacaagagatctggattattaataattctaataaatgtyctcctcagaagctgttgtctgttgtttctgcctctagaattacagctttgtggtgatgtaatgatcaccatcatcaacttcctctgtttcttctccagtcagcacccattattgacataaccaatttttcttttatactgtatgagagaggatccaaagggattatcccatcagtgtcccagcagcccacctactgggtaaagttctcatgctagactgtctcatagccagtcaaaaagcccattatgtgtctgcagatgtgggatggtcagctaagaacacctcagaagagtacagtgagcatggaagaaaccttgaatgtcctggcttgtacattgtctgaccccctgagcccatttttattatggtgtactgaca

SEQ ID NO: 608988 - DNA, 540 bp, Homo sapiens
ctatagaaaaaaaactaataatccgatcacaatatgaccaaaagatttgaatagacctttctcaaaagaagacgtacacatgacaaacaaaggtgctataaacatcattggttatcagagaaatgtaagtcaaaactacaaagagaaatcatctcagttcagttaaaatggcttatgtccaaaagacaggcaagaacaaatgcgaggatgtggagaaaagggaactcttgtatactttaggtgggaatataaattagtacatctgctatgaagaacagtttggaagttcctcaaaaaactgaaaatagaaataccatattacctagcagtcccactgctgagtatataccaaaaagaaaggaaatcagtatatcraaaagagatgtgcactcctatgtttgttgcagcactgtttacaacagctaagatttggaagcaccttaagtgttcatcatcggatgaatggataaagaaaatttacgtatacacaatggagaactactattcagccataaaaagaatgagatccagtcatttgca

SEQ ID NO: 608989 - DNA, 494 bp, Homo sapiens
agggaataggggaattgagggataatagctaaagggtttytttttgaggtgatgaaattgttctagaataaattgtggtgatgattgcacaagtctgagaacattctaaaaaccactgaattgtataaatgggtgaagtgtatgatatgtgaattatatctcgagaaagctgctttttttctttctttcttttttttttttttttttgagacagattctggctctgtcacccaggatggagtgcagtgatgcaacttcagctcactgcaacctccgcctcccgggttcaagcaattcttgtgcctcagccacccaaatagctgggattacagacgtgtaccaccacacccagctaatttttttttttttttttttttttttttttttttttagagatggagtttcactacattggccaggctggtctcgaactcctgaactcaggcaatccttccaccttggtctcccaaagtgctggaattacaggcgtgcct

SEQ ID NO: 608990 - DNA, 494 bp, Homo sapiens
agggaataggggaattgagggataatagctaaagggtttctttttgaggtgatgaaattgttctagaataaattgtggtgatgattgcacaagtctgagaacattytaaaaaccactgaattgtataaatgggtgaagtgtatgatatgtgaattatatctcgagaaagctgctttttttctttctttcttttttttttttttttttgagacagattctggctctgtcacccaggatggagtgcagtgatgcaacttcagctcactgcaacctccgcctcccgggttcaagcaattcttgtgcctcagccacccaaatagctgggattacagacgtgtaccaccacacccagctaatttttttttttttttttttttttttttttttttttagagatggagtttcactacattggccaggctggtctcgaactcctgaactcaggcaatccttccaccttggtctcccaaagtgctggaattacaggcgtgcct

SEQ ID NO: 608991 - DNA, 494 bp, Homo sapiens
agggaataggggaattgagggataatagctaaagggtttctttttgaggtgatgaaattgttctagaataaattgtggtgatgattgcacaagtctgagaacattctaaaaaccactgaattgtataaatgggtgaagtgtatgatatgtgaattatatctcgagaaagctgctttttttctttctttcttttttttttttttttttgagacagattctggctctgtcacccaggatggagtgcagtgatgcaacttcagctcactgcaacctccgcctcccgggttcaagcaattyttgtgcctcagccacccaaatagctgggattacagacgtgtaccaccacacccagctaatttttttttttttttttttttttttttttttttttagagatggagtttcactacattggccaggctggtctcgaactcctgaactcaggcaatccttccaccttggtctcccaaagtgctggaattacaggcgtgcct

SEQ ID NO: 608992 - DNA, 584 bp, Homo sapiens
agaacaatatgaatgaatcttttgtgaaattcacacatgatcagattatgcaacggtatgggacaaggccaacaagccatgtgtcctgaagctttgttatgtatctgggtaccaggtttaacctcaagagatgcctgctgtacactttttgcaactggtttgacaacacatttcagcttcaattttgcatcctgagaacacttaaacgtttctgtaggtccattttatacaacttgaaagaccttaaaactttttggttgccacaagcatatctycctttttctgctcatccagtaaacagctgtgccctactgtgatagattttccaaaacaaaatacttggagaagcagtttagcaaaatatgccttcagtggcactcaacaaatggagcttccccaagcacagttctgtaagaagtgtgtatgagagcgtgtgtatgtatatttcaagttattatttgtatagtgcaatttttttttgatcttggggattctggctgagcttgattcatgacaattatggttaaaaacatttgcttggccgggcgctgtggctcacgcttgtaatcccagcactttgagag

SEQ ID NO: 608993 - DNA, 584 bp, Homo sapiens
aatgatgttttgttctctcacatagcaaatagctggtagattaattatcgaaatccagatatgtatgacttcaaacccatgtcctttccacaaatttaaaaattcaaagactgatttattgtgtaactgatgtaggttttataatgcatctttatatcactattataggtgaattccattctcctgggtggtattttaatttgtacaaagtaatgagagtttccaccaatttagtctaaattttgatcctgaaatttctacgttgcaggagtgatgggacaaatcactaatcagtatattagtgctttttgcaaatcttggtctggaatgaccaacctaagcggccacgagaaacttcgtctcctggaaatagatgttctggtaccttagttgaaattgctagatttcacatcttattaggaatctgcttgtaattctgtactgtctcaattttatcttcagaattgaattaattagctaagaaaacttttgcatcatgtgtaatttgtttttttcttcagatgtacygtgataacaagctattcttttacatcaagatggaaacatattatattttcatgcaa

SEQ ID NO: 608994 - DNA, 542 bp, Homo sapiens
ggtgcagtagggaaagtctgcacctttaccccaacaggcaggcagcctgtatgatgatgaagcrtcttggagaaggcatccttattccccactggtgtatcccctggtagaccactgcagacacagctggggcttctcccacaggaacacagcatggctgcatgtatagacagcattcctggaacaattcagggtgattgcagccccacaggaggagcactctccagactcaggccttcatgagaggcaaagtcacaatttctccctacttggaacatcaatattgctctagatgaaaagaggtgcctgtctgatgtaaatagccagaacactgggacagtggtcaaactgtgaggtggacatatttcctgcccatgtggcatgtgagctgagatagctcccacccttcaccctgagaaaatctcagcacatctaattgagagctaatctagccaccttcatcaaggctgggacctttgcacactattggatattaaatctatacacttgctttagctacagctggtgcctacccagggata

SEQ ID NO: 608995 - DNA, 542 bp, Homo sapiens
ggtgcagtagggaaagtctgcacctttaccccaacaggcaggcagcctgtatgatgatgaagcatcttggagaaggcatccttattccccactggtgtatcccctggtagaccactgcagacacagctggggcttctcccacaggaacacagcatggctgcatgtatagacagcattcctggaacaattcagggtgattgcagccccacaggaggagcactctccagactcaggccttcatgagaggcaaagtcacaatttctccctacttggaacatcaatattgctctagatgaaaagaggtgcctgtctgatgtaaatagccagaacactgggacagtggtcaractgtgaggtggacatatttcctgcccatgtggcatgtgagctgagatagctcccacccttcaccctgagaaaatctcagcacatctaattgagagctaatctagccaccttcatcaaggctgggacctttgcacactattggatattaaatctatacacttgctttagctacagctggtgcctacccagggata

SEQ ID NO: 608996 - DNA, 500 bp, Homo sapiens
gcagtgcaaatcaaagctataaggtaatattaccttacaccatgctattaggatagctagtatcacacacacacacacaaaacccagaaaattgtaagtgttgatgaagatgtggagaaaatggaacccttgtgcactgttggtgtgaatataaaatggtgcaaccactgtggaaaacagtatggtgattcctcaaaaaattaaaatataattaccccaggagccgcaaattccactactaggtatgtactacaaataattgaaagctgtgtcttgaagatatatttgtacamccatgttcatagcagcataattcacaaaagccaagaggtgaaacaactcaagtgtccatcaactgagcattggataaggaaaatgtggtctctacatacaatggaatattaatcagtctttaaagggtatgatattctgaaatgggctacagtatggaagacccttgaggacattaggctaagtgaaataaataagtcagtcacaaa

SEQ ID NO: 608997 - DNA, 499 bp, Homo sapiens
cattctgtaggtggtctgtttactctgttgatcgtttattttgctttgcagaagctctttagcttagtaagctaaacatctcttagttagctaaagagcttgtgaacagccaatttgtcaatttttgtttttgttgtgattgcttttgaggatttagccgtaaacactttgccaaggttgatgctgagaagagtatttcccagggtttcttctaggatttgttatagtttgaggtcttacatttacatctttaatttatcttcagttaatttttatagtgaaaggtagggtcccagtttcattcttctgcatatggttacacagctatctcagcaccatttattgaatagggagtccttccccattgctaattttggtcaagtttttcaaagatgattgtaggtgtgcagctttatttctgagtackctattctgttccactagtatatgcatctgtttttatagcagtaccatactttttttttttttttactgtaga

SEQ ID NO: 608998 - DNA, 557 bp, Homo sapiens
aaactgaaataataatttctacatgatagtgttattttagttttgtttgttttttgagacagggtgtcactctgtcacccaggctggagtgcagtgatgygatcacggctcacttcagcctcaacttcctgggctcaggtgattcttccatctcagcctcctgagtatctgggaccataggcaggtgccaccatccccagctaatttttttattttttgtagagacatggtttcatcatgttaccagggttggtctcaaactcctaggctcaaatgatcctcctgtttctgcctctcaaagcaccagaataacaggagtgagccaccacatctggccttattttagtttttaaacactaaagcatcaattacactgtctggcatatatttgatattcaaaaaatagtttacttttacttttattattttattttacattcagggagtacatggtgcaggtttgttacataggtatattgtgtgatgatgggggttgggcttctaatgtacctatcacccaaatagtgaacagtgcacctaataggtaatttttcaat

SEQ ID NO: 608999 - DNA, 471 bp, Homo sapiens
tttgcaaatattttctcccattctttgggttgtctgtttacatttactctgttgatagtttcctatgctgtgtggaagctctttagtttcattagctcccatttgtcaatttttgtttttgttgcaattgcttttggcatccttctcaaaaatctttgccagggcctatgtctagtgtggtattttctaggygatttggtttggctgtgttccccctcaaatctcaccttgaattgtaataatctccacctgtcaagggtggcaccaggtggagataattgaataatgggggcagtttcctccatactgttctcttggtagtgaataagtctcacaagatctgataattttacaaatgggagttcttgtgcacaagttcttgcctgctgccatgtaagacatgaatttgctcctcattcaccttccgccatgattgtgaggcctccccagccatatggaactatgagtaaa

SEQ ID NO: 609000 - DNA, 471 bp, Homo sapiens
tttgcaaatattttctcccattctttgggttgtctgtttacatttactctgttgatagtttcctatgctgtgtggaagctctttagtttcattagctcccatttgtcaatttttgtttttgttgcaattgcttttggcatccttctcaaaaatctttgccagggcctatgtctagtgtggtattttctaggcgatttggtttggctgtgttccccctcaaatctcaccttgaattgtaataatctccacctgtcaagggtggcaccaggtggagataattgaataatgggggcagtttcctccatactgttctcttggtagtgaataagtcwcacaagatctgataattttacaaatgggagttcttgtgcacaagttcttgcctgctgccatgtaagacatgaatttgctcctcattcaccttccgccatgattgtgaggcctccccagccatatggaactatgagtaaa

SEQ ID NO: 609001 - DNA, 575 bp, Homo sapiens
tcttttggaggaacatttcctgaattacattttgtgctgttgaagtcagcattacttaacttactactttagcatggtgttccttcctgatccccttccctcctcctcaaactccaccaaaataggtacatacagttacttagtgtatgtcaggctcctgtagtcccttcagtctatcagaaacttcttgctctaaacacagattggttttctcttctttgccttggtcactggtgctcttttacaaggcagagggcataatgtccctgacctcatttctttttctttctttgtttttaaagttacactttaagttctggggtacatgggcagaatgtgcaggtttgttacataggtatacacatgcctggtttgctgcacccatcaacctgtcatatacattaggtatttctcctaatactatccctcccctagtcccccaccccacaacagaccccaktgtgtgatgttcccctccctgtgtctatgtgttctcattgttcaactcccacttatgagtgagaacatgcagtgtttggttttctgttcttgtgttagtttgctgagaatgatgg

SEQ ID NO: 609002 - DNA, 476 bp, Homo sapiens
agatttggtcttttcacatagtcccatatttcttggaggctttgttcgttccttttcattcttttttctctactcttgtcttctcactttatttcattaagttgatcttcaatctctaatatcctttcttccactcgattgatttggttattgatacttgtgtatgcttcacaaagttctcatgctgtgtttttcagctccatcaggtcatttrtgttcttctctaaactggttattctagttagcaattcatctaaccttttttcaaggttcttaacttccttgcattgggttagaacatgctcctttagctcggaggagtttgtaattaatcaccttctgaagcttacttctgtcaatttgtcaaactcattctccgtccagttttcttccctttctggtgaggagttgtgatcctttggaggagaagatgcattctggtttttggaattttcagcctttttgcactggtttct

SEQ ID NO: 609003 - DNA, 568 bp, Homo sapiens
acacaaacctaaaatatcaagagacagaatactttaatgaagtattttaaaaaataaaaattatgctaaaatctatgatagacaaaatataaaaatttgaaatagagtttgacaaggcaagattagggtggggtgagtcatacaggtgcaacatcagatctccccaatttaaaattttagtatttcatccagcatgaattataattcattacatttcatttaattcttatttttaaaaattgcagtaaatattgtttctcctgattactgaatttttgggtgttcattaaaattttgcacctcaggacttcattcaccttactttaatcctgcttagagcacattttttatcctcaaaactcyctaggttttgctctgatgtagtggctgtcaaatttggcttcacactagaatttaaatgttattcgataaatttaatatccacactctttcctcagacaagttaagccagactcaccattagtgaagcaagattttaaaaatctttctaggagattctaatttgcagttggggttgtaaactacaaccttatttttttattcctat

SEQ ID NO: 609004 - DNA, 568 bp, Homo sapiens
acacaaacctaaaatatcaagagacagaatactttaatgaagtattttaaaaaataaaaattatgctaaaatctatgatagacaaaatataaaaatttgaaatagagtttgacaaggcaagattagggtggggtgagtcatacaggtgcaacatcagatctccccaatttaaaattttagtatttcatccagcatgaattataattcattacatttcatttaattcttatttttaaaaattgcagtaaatattgtttctcctgattactgaatttttgggtgttcattaaaattttgcacctcaggacttcattcaccttactttaatcctgcttagagcacattttttatcctcaaaactctctaggttttgctctgatgtagtggctgtcaaatttggcttcacactagaatttaaatgttattcgataaatttaatatccacactctttsctcagacaagttaagccagactcaccattagtgaagcaagattttaaaaatctttctaggagattctaatttgcagttggggttgtaaactacaaccttatttttttattcctat

SEQ ID NO: 609005 - DNA, 602 bp, Homo sapiens
gttttgttttctccttttggtaatatatatagctctctttctcactaactctataatcttttttcttcaatttcttggagaagtttttaattttgtgtttttgatgtaaaaacacatatgcacagttttacaagtcaaaagctaaaagcttttgaaaaaaatggcagwttctcatatattacttgtatttattctcttcagaagtcactttaaagtattatcttttcttctggcattacctttttaaatagcatgttttaaaatagaaattttcatggtttttatttattttttgaatatgtaacacattaactttgttcaaaagttaaataaatacaaatttctagattcttcatattgaccttagtaataatttcctgaatatgacaccaaaagcacaggcaacaaaagcaaaaataaataaatgggactacatcaacctaaaaagctgctgcacagcaaaggaaacaacagaatgaagaggcaacctgtggaatgggagaaaatatttgcaaatcatacatctgattaaaagttaatatttaaaatatatgagttagttctacaactcaatagcagaaaaacaatctgacttttaaaat

SEQ ID NO: 609006 - DNA, 602 bp, Homo sapiens
gttttgttttctccttttggtaatatatatagctctctttctcactaactctataatcttttttcttcaatttcttggagaagtttttaattttgtgtttttgatgtaaaaacacatatgcacagttttacaagtcaaaagctaaaagcttttgaaaaaaatggcagawtctcatatattacttgtatttattctcttcagaagtcactttaaagtattatcttttcttctggcattacctttttaaatagcatgttttaaaatagaaattttcatggtttttatttattttttgaatatgtaacacattaactttgttcaaaagttaaataaatacaaatttctagattcttcatattgaccttagtaataatttcctgaatatgacaccaaaagcacaggcaacaaaagcaaaaataaataaatgggactacatcaacctaaaaagctgctgcacagcaaaggaaacaacagaatgaagaggcaacctgtggaatgggagaaaatatttgcaaatcatacatctgattaaaagttaatatttaaaatatatgagttagttctacaactcaatagcagaaaaacaatctgacttttaaaat

SEQ ID NO: 609007 - DNA, 586 bp, Homo sapiens
tggtattatttacaatagcaaagacacagaaacaacttaaatgtccatgaacagataaatagacaaagaaaatgtgatacatacatacaatggaatattattcagccttaaaaagggggttgrcttaatgcttaaaaaagaaggaaatcctgtcatttgccacatggatgaagctgagagacattatatcaaacaaaataagccagacacagaagaacaaatattctgtgataccactaatatcagtaatttaaaatagcaaacttgtagcagagatcaggcatataaggttcttttacacaagtttcttttttaggtggaagtttctctcccattccactcccatctgcccattaccactgttactaccaacaatatttaattacctttattgtattttgtgtaccttccacagtttttttcatgcaagtaaaagcaaatataacatgtatttttctttttctgaaagttaacttgggcatcactgtttctctttgctgcaatatgttctcagcctctccctgccattactagggtttcaaattacacaattatattcttatctcaagttgcatttccctctcgc

SEQ ID NO: 609008 - DNA, 586 bp, Homo sapiens
tggtattatttacaatagcaaagacacagaaacaacttaaatgtccatgaacagataaatagacaaagaaaatgtgatacatacatacaatggaatattattcagccttaaaaagggggttggcttaatgcttaaaaaagaaggaaatcctgtcatttgccacatggatgaagctgagagacattatatcaaacaaaataagccagacacagaagaacaaatattctgtgataccactaatatcagtaatttaaaatagcaaacttgtagcagagatcaggcatataaggttcttttacacaagtttcttttttaggtggaagtttctctcccattccmctcccatctgcccattaccactgttactaccaacaatatttaattacctttattgtattttgtgtaccttccacagtttttttcatgcaagtaaaagcaaatataacatgtatttttctttttctgaaagttaacttgggcatcactgtttctctttgctgcaatatgttctcagcctctccctgccattactagggtttcaaattacacaattatattcttatctcaagttgcatttccctctcgc

SEQ ID NO: 609009 - DNA, 542 bp, Homo sapiens
ggataattgggagtgagtgtgttcatggggtccttactccaagtgaccttcagtgcctgctaggatcaaacttttcctacaaatgctgtgttatagactgaccttagctctggcacttagaagttggtgagattctgctgagaaaatggcaccttctcatgcagtgaactgtgattggcagactttttcctcaatctgccctgtttcccagacatctcacagaaattcctcaagatttttagtatacgtatgacattcttaaatagtcccttgcacaggtatttcttctttgtttttgtattggtgtgacagttcaaaggrgatctgaaagtgaaggatagatgcgtgcttaagatttttagtatacgtatgacattcttaaatagtcccttgcacaggtattcttctttgttttttgttttggtgtggcagttcaaaggggatctgaaagtgaaggatagatgtgtgctttccacacttgtcatttagaacccatagtgactttcttagttttcctctatctagatgtgtattatttagtc

SEQ ID NO: 609010 - DNA, 542 bp, Homo sapiens
ggataattgggagtgagtgtgttcatggggtccttactccaagtgaccttcagtgcctgctaggatcaaacttttcctacaaatgctgtgttatagactgaccttagctctggcacttagaagttggtgagattctgctgagaaaatggcaccttctcatgcagtgaactgtgattggcagactttttcctcaatctgccctgtttcccagacatctcacagaaattcctcaagatttttagtatacgtatgacattcttaaatagtcccttgcacaggtatttcttctttgtttttgtattggtgtgacagttcaaaggggatctgaaagtgaaggatagatgcgtgcttaagatttttagtataygtatgacattcttaaatagtcccttgcacaggtattcttctttgttttttgttttggtgtggcagttcaaaggggatctgaaagtgaaggatagatgtgtgctttccacacttgtcatttagaacccatagtgactttcttagttttcctctatctagatgtgtattatttagtc

SEQ ID NO: 609011 - DNA, 542 bp, Homo sapiens
ggataattgggagtgagtgtgttcatggggtccttactccaagtgaccttcagtgcctgctaggatcaaacttttcctacaaatgctgtgttatagactgaccttagctctggcacttagaagttggtgagattctgctgagaaaatggcaccttctcatgcagtgaactgtgattggcagactttttcctcaatctgccctgtttcccagacatctcacagaaattcctcaagatttttagtatacgtatgacattcttaaatagtcccttgcacaggtatttcttctttgtttttgtattggtgtgacagttcaaaggggatctgaaagtgaaggatagatgcgtgcttaagatttttagtatacgtatgacattcttaaatagtcccttgcacaggtattcttctttgttttttgttttggtgtggcagttcraaggggatctgaaagtgaaggatagatgtgtgctttccacacttgtcatttagaacccatagtgactttcttagttttcctctatctagatgtgtattatttagtc

SEQ ID NO: 609012 - DNA, 602 bp, Homo sapiens
aaaagtgacccacaattctgcatgaatctttccaggacactgaattggagccagctgatgtaaggagcttaccttggttgccaccttctggtctctgtttgaggaacaactgcatgtgattaagggtaacagatacagaatttgtgttaagcccaggatgtaatttgttgaatgagtagcaattgacttgaaaattggatggatggggattgtgtttctttactctctctctcttttctttctccctctcaatacggctagattaaatcatctttagtctagtcaaatcagtgcttgctgttgttaagaaggatattcttgaggtatagtacttcagggatgctaattgggatttgagcargatgaaatttctacccaggtgtgtgcatcgtatactggagatggcaaaaactggttccaaatgagggtgtgtttgtgttcctaggcatgttcctataggggccaaaaagatgcaaaatcttcttttctaaagcttttggtgttctcaagcttgtctacacaatggaatcacctggagaatttggaaaaccaaaaatactgataccactgatcctacccaacagattctattttaattggta

SEQ ID NO: 609013 - DNA, 602 bp, Homo sapiens
aaaagtgacccacaattctgcatgaatctttccaggacactgaattggagccagctgatgtaaggagcttaccttggttgccaccttctggtctctgtttgaggaacaactgcatgtgattaagggtaacagatacagaatttgtgttaagcccaggatgtaatttgttgaatgagtagcaattgacttgaaaattggatggatggggattgtgtttctttactctctctctcttttctttctccctctcaatacggctagattaaatcatctttagtctagtcaaatcagtgcttgctgttgttaagaaggatattcttgaggtatagtacttcagggatgctaattgggatttgagcaagatgaaatttctacccaggygtgtgcatcgtatactggagatggcaaaaactggttccaaatgagggtgtgtttgtgttcctaggcatgttcctataggggccaaaaagatgcaaaatcttcttttctaaagcttttggtgttctcaagcttgtctacacaatggaatcacctggagaatttggaaaaccaaaaatactgataccactgatcctacccaacagattctattttaattggta

SEQ ID NO: 609014 - DNA, 602 bp, Homo sapiens
aaaagtgacccacaattctgcatgaatctttccaggacactgaattggagccagctgatgtaaggagcttaccttggttgccaccttctggtctctgtttgaggaacaactgcatgtgattaagggtaacagatacagaatttgtgttaagcccaggatgtaatttgttgaatgagtagcaattgacttgaaaattggatggatggggattgtgtttctttactctctctctcttttctttctccctctcaatacggctagattaaatcatctttagtctagtcaaatcagtgcttgctgttgttaagaaggatattcttgaggtatagtacttcagggatgctaattgggatttgagcaagatgaaatttctacccaggtgtgtgcatcgtatactggagatggcaaaaactggttccaaatgagggtgtgtttgtgttcctaggcatkttcctataggggccaaaaagatgcaaaatcttcttttctaaagcttttggtgttctcaagcttgtctacacaatggaatcacctggagaatttggaaaaccaaaaatactgataccactgatcctacccaacagattctattttaattggta

SEQ ID NO: 609015 - DNA, 582 bp, Homo sapiens
tttactggggctggagagaaggtgagtattaactgcaaaggggcctgataaactttttgtggtgatggaaaagttctaaacctgtttattgtgttattcgcatacatttaccaaaacttactggactggatactctaatagggtaaattttattatatataaattatgcctcaataaacctgattttaaaatatcaaaataataaatctttatactaatttttaataatcatgtgatcatctcaatagaaatgcaatggagaaattttgataaaatttaacattgatctataataaaatctcttaataaactagaaatgaaacaaatctcttaacctcataaagactctctacagaaaacttacaacaaacatacccaattatgaaaggctgatgcaagagcaaagaccaaaggccagagtagtgccaatactggaaatcataragagtgcagcaaggcatagaaaaaaattaaacctgtaaagattgtggaaaagaaataaaattatctttatgatgagttataacacaattgcatagaaaatccagtagaataggccagggcgcagtggctcacgcctgt

SEQ ID NO: 609016 - DNA, 442 bp, Homo sapiens
atcctgaaggtttacctcattcttcacaaaagtcttccctttgtctgttgccttcttaagaagaattaattcttgggaacaagatagaaggatgggaacctcatgtagaaggaaatccctttcatgcacagtaaagcagggtcattctcccagctaatgatctggagcctcctcctgaaccccagctttgcttatatcttcggcaaggaccatcttcgcatctttgagccctattaattccatctaagaaaaatgttgttcacattcaccctccctgtcttctcrtgtcctggtttcttcaaggttttcttcattgctgaataccaggtctttcccaactctcctccaaaccagggattgtaaaccagagaagcatctctaaaggactcgggagctttttcaaaatacatatgcctgtgccaacttcattacacttgaattc

SEQ ID NO: 609017 - DNA, 570 bp, Homo sapiens
cttcctaggaccttctaggtcctggaggaaaagtctatgcsattctcaaatctttgagaaacatctgggggaagcataaacaaggtggaagaaaagcctccctttaaaagctgatcagccacttctctgccaagggcttgtcaaaattgctcaagagggaggaaaaaagagagagaaacaagtgcacatatacatttttaaagtagctagcaaccaagacaacaccaattatttaaccacagtaaagaaaccagcagccaaaccacactgattatttaaccgcttatccaagtgctgaacacagccatagccagccacattaatttaatgtaaatatccccagtaaccagtcacacggagtcaagaactgcagcaagggcagctcctcacctttccgtgtcttgtctccagatgtctggaactgagaaattggctatcatccaacccatattttgctattttttcccccttggcatttttgtttctccaaaaatgggttcatcccttcgctgctgatctacagtctcacgtgtatacacatactcagggggacattgcacttagtgaatt

SEQ ID NO: 609018 - DNA, 570 bp, Homo sapiens
cttcctaggaccttctaggtcctggaggaaaagtctatgccattctcaaatctttgagaaacatctgggggaagcataaacaaggtggaagaaaagcctccctttaaaagctgatcagccacttctstgccaagggcttgtcaaaattgctcaagagggaggaaaaaagagagagaaacaagtgcacatatacatttttaaagtagctagcaaccaagacaacaccaattatttaaccacagtaaagaaaccagcagccaaaccacactgattatttaaccgcttatccaagtgctgaacacagccatagccagccacattaatttaatgtaaatatccccagtaaccagtcacacggagtcaagaactgcagcaagggcagctcctcacctttccgtgtcttgtctccagatgtctggaactgagaaattggctatcatccaacccatattttgctattttttcccccttggcatttttgtttctccaaaaatgggttcatcccttcgctgctgatctacagtctcacgtgtatacacatactcagggggacattgcacttagtgaatt

SEQ ID NO: 609019 - DNA, 570 bp, Homo sapiens
cttcctaggaccttctaggtcctggaggaaaagtctatgccattctcaaatctttgagaaacatctgggggaagcataaacaaggtggaagaaaagcctccctttaaaagctgatcagccacttctctgccaagggcttgtcaaaattgctcaagagggaggaaaaaagagagagaaacaagtgcacatatacatttttaaagtagctagcaaccaagacaacaccaattatttaaccacagtaaagaaaccagcagccaaaccacactgattatttaaccgcttatccaagtgctgaacacagccatagccagccacattaatttaatgtaaatatccccagtaaccagtcacacggagtcaagaactgcagcaagggcagctcctcacctttccgtgtcttgtctccagatgtctggaactgagaaattggctatcatccaacccatattttgctattttttcccccttggcatttttgtttctccaaaaatgggttcatcccttcgctgctgatctacagtctcacgtgtatacacatactcagggrgacattgcacttagtgaatt

SEQ ID NO: 609020 - DNA, 585 bp, Homo sapiens
acgtgtgtgaatggggtcgcctgaagtcccagggggatccgggctataggcagactcctctgcagtccagcagccttactccaggggcaattctccacctcataaaccctaaccttccttctccttccctaatgagctagcttctgacttcctgatgcagttcctaaactgggtctgaagacttccaaagaggatatttgagagtggcatgagcaactcargagcacagagagaggtgcaggcatcctcggggtggcagcaatggtggtgctctcctttgaaaatattcttacggaattgtatggatgcctgcttatcacatggcaatatctctaatatgatgtgaactttagaaaaatcttgcagccaacatgttttaatatggtctcctccccaaaaaagaccctaagggaaggacatgggtccaggcagtttatgtgggggtatgatcccaggaagcagggataaaagtgtggggaaatgagacaagaaaagaacaaaggcccattaaagggtgaattatcaagcttaccactgagagcaaggggatcaattctacctagactttcagagaagtgtccccaa

SEQ ID NO: 609021 - DNA, 560 bp, Homo sapiens
caaccaactatgggtggaaacctgtggatatggtgggctgactgtacacattttccatctgagttgggttgaatccatggatgcggaacctgcagatgtgaagggcaaattgtactatgtcatttcatataagagacttgagtctctatggattttagaagtaatgaacaagttcactgatgttgcaagatgcaagattaatgcaaagaatcaatcatatttctcttcactaacaacaaacaactcaaaaataaaaataaaatttaaaaaacaattccatttagaatagcatccaaaaatacttagtaatagatttaatgaaataactcatacatcaaaacctacaagttttgttgaaggaaattaaattagatctaaacraatgaaaagacatctcatgctttggatcagaagacttaatgttgttaagatgggaatactgcccaaattgttctacctattcaatgcaatctcaatcaaaatgccaattgacattttgtagaaatcgacaagctgattttaaaattcttatgaaaatgcaagggatccagaagagtcaa

SEQ ID NO: 609022 - DNA, 548 bp, Homo sapiens
caacatatctgtgggttctgaatccaagaattaaactatctggggatggaaaatatttggaaaaaaataacagtacaagaggaaataatataaataaaataccaatatagtataacgattaattatattgcatttacattgtattaggtattataagtaacctagaaattatttaaaacatacaggaggatatgcataggttatacccaaatttattcaytttatatcagggactggagcttcagcagattttggtatcttgggggtgtgtggagggtgggggagtgaggaagtggtcctggaaccaatcccccatggatactgaaggataacagtatatactaaacatattgtacaatccttggtacagagaaagcattctaaaaatgttatctatcatcatatacagagtgtaataaatacttggacacacagtacacaacttagacaacataattatgatttccttagaattgttttattttacttttctaacctgaaagtacaattaaattactagaatatcatagagaaagcaattgaccaac

SEQ ID NO: 609023 - DNA, 553 bp, Homo sapiens
gggaggcacccagcgggcgatgattgaatcatggggacgggtgtttcccgtattgttctcatgatagtgaataagtctcacaagatctgatggttttaaaaatgggagtttccctgcacaagctctctcttctcttgtctgctgctatgtgagacatgccttttaccttctgccatgattgtgaggcttccccagccacrtggaactgtaagtcaattaaacctttcttttttaaattgcccagtcttgggtatgtctttatcagcagcatgaaaatggactaatataaagaggaagatatttaaaaagctaccactccctaaagtggtattagagggattgtgagtatgatgacacaacttataaagtagaatgtactttttaattttaatttaaatatatagaaaagctcaaaaggttacatgtaaatgtacttagattatctataggtgttatcattatgggtggcttttagtgtcttatttttcattaactgcatctttaaaatttttaatgtgtgcgtgttactctctacaaagaaaaagcaaaatga

SEQ ID NO: 609024 - DNA, 553 bp, Homo sapiens
gggaggcacccagcgggcgatgattgaatcatggggacgggtgtttcccgtattgttctcatgatagtgaataagtctcacaagatctgatggttttaaaaatgggagtttccctgcacaagctctctcttctcttgtctgctgctatgtgagacatgccttttaccttctgccatgattgtgaggcttccccagccacatggaactgtaagtcaattaaacctttcttttttaaattgcccagtcttgggtatgtctttatcagcagcatgaaaatggactaatataaagaggaagatatttaaaaagctaccactccctaaagtggtattagagkgattgtgagtatgatgacacaacttataaagtagaatgtactttttaattttaatttaaatatatagaaaagctcaaaaggttacatgtaaatgtacttagattatctataggtgttatcattatgggtggcttttagtgtcttatttttcattaactgcatctttaaaatttttaatgtgtgcgtgttactctctacaaagaaaaagcaaaatga

SEQ ID NO: 609025 - DNA, 431 bp, Homo sapiens
tccagcagcaaagaccaataattcattgacactgtaaacagtttattctagatcttaatttcctcctttttacaatgttgggctagcaacatcttttatggaaatttgtttgccttagtcattgttatggcattatacatataattgggaggtgaagccagctgggcttctgggtcgggtggggacttggagaaattccagacatataattacctctgaataagtgtgacacagactgctaggtttttataatagcgttagtgtagtgcttttttgaaagttgagcatggcaccagctgggagatatcaccttgagaagctggaatgttttcttttttttaaatacggagtctcactctgtcgcccaggctggagtgcagtggcatgatctcagctcactgcarcctccgcctcccgggttcaagtgattt

SEQ ID NO: 609026 - DNA, 603 bp, Homo sapiens
ggaatgtgtctgtgtgtctcaacacatcacagttgctgtgcaaagaacagaggggaccctgatctcccaatagatccattggaacccccatcttgaatgttaaacagtgacccacagagagaatgtaattyattttctccagttaataatcccttccacagactggaatccttcatgtgcaacaacatgtgagctggtctgaagcttcaatactggggcttcctggctcccatccagagcttttctttgctgagacagacagtgcttgaagctgtaatgtggtaaaacttgtcaaacagggcttttctctgctttccaaacacatgtgaggcagagtggctctgcgtgaagttctgatcttttctggggaaaccaagtgtcatttgcaagtcaagaagaaaaaaatacttgtcatcaaaacgaatgactggtttgtgcatcaaaggggcatactctgattcattggtaagtttgttaaaattatgtttaggtaagatgtttgtctacattactctacataggtactgctttatggaatagacataaagtagtcctcccttatccacaggttcactttccaactgagagtttcagttactctca

SEQ ID NO: 609027 - DNA, 603 bp, Homo sapiens
ggaatgtgtctgtgtgtctcaacacatcacagttgctgtgcaaagaacagaggggaccctgatctcccaatagatccattggaacccccatcttgaatgttaaacagtgacccacagagagaatgtaatttattttctccagttaataatcccttccacagactggaatccttcatgtgcaacaacatgtgagctggtctgaagcttcaatactggggcttyctggctcccatccagagcttttctttgctgagacagacagtgcttgaagctgtaatgtggtaaaacttgtcaaacagggcttttctctgctttccaaacacatgtgaggcagagtggctctgcgtgaagttctgatcttttctggggaaaccaagtgtcatttgcaagtcaagaagaaaaaaatacttgtcatcaaaacgaatgactggtttgtgcatcaaaggggcatactctgattcattggtaagtttgttaaaattatgtttaggtaagatgtttgtctacattactctacataggtactgctttatggaatagacataaagtagtcctcccttatccacaggttcactttccaactgagagtttcagttactctca

SEQ ID NO: 609028 - DNA, 603 bp, Homo sapiens
ggaatgtgtctgtgtgtctcaacacatcacagttgctgtgcaaagaacagaggggaccctgatctcccaatagatccattggaacccccatcttgaatgttaaacagtgacccacagagagaatgtaatttattttctccagttaataatcccttccacagactggaatccttcatgtgcaacaacatgtgagctggtctgaagcttcaatactggggcttcctggctcccatccagagcttttctttgctgagacagacagtgcttgaagctgtaatgtggtaaaacttgtcaaacagggcttttctctgctttccaaacacatgtgaggcagagtggctctgcgtgaagttctgatcttttctggggaaaccaagtgtcatttgcaagtcaagaagaaaaaaatacttgtcatcaaaacraatgactggtttgtgcatcaaaggggcatactctgattcattggtaagtttgttaaaattatgtttaggtaagatgtttgtctacattactctacataggtactgctttatggaatagacataaagtagtcctcccttatccacaggttcactttccaactgagagtttcagttactctca

SEQ ID NO: 609029 - DNA, 574 bp, Homo sapiens
ccatattccaggaataatacaaaggccagtgtggccaagcaacacagtaagtgaggagaaagccagtaggaatgagacaggtaagagaataggtgggagactgtatggggttctaaagccaattgtaaggactttagctttcactctgaaatgctaacccagtggaaggttttaaatgagtggtatgattttgcttttgctttagaaggagcactatgaatacaattttgagatgagattgcaggggaccagagtagaagcagacagagtagttgggaagctgttgcattaatccaagcgagaaatgatagcagcttggaccagggtgatagcagtggaggcggtaagaagagaagtgactggattctggatatattttaaaggtagagccagtgggaattcctgatagccttgatgtggagaatcagaaaaagagagtagtggtgtgcgactcacaggttttgggtgtcaacgactggatatttagtctacttcaggctgtcaggaagttgagttttgaatatgytcagtgtgagatgtctacctgacagtaagtggagatgtccattagaca

SEQ ID NO: 609030 - DNA, 402 bp, Homo sapiens
taatataaattctgatgtgttaatcactgtatcagtggcataatactggtrtattaattacctcttgtatattaaactgaattataaatcattaaatttaagaaatcattttgttggtctcatttttggaagttattcattctccttagataatatgcattcttcaaaattataaaaccctttatcagtacttttagtcagatcatcttgacttgacactctgaaagaacattatgaaaggagaaaatgtaatttgtgtcctttttaacaatacctgcttttgcattcacctcaaggctactacatgtacattgaggcctcccatatggtgtatggacaaaaagcacgcctcttgtccaggcctctgcgaggagtctctggaaaacactgcttgaccttttt

SEQ ID NO: 609031 - DNA, 630 bp, Homo sapiens
attataaaaccctttatcagtacttttagtcagatcatcttgacttgacactctgaaagaacattatgaaaggagaaaatgtaatttgtgtcctttttaacaatacctgcttttgcattcacctcaaggctactacatgtacattgaggcctcccatatggtgtatggacaaaaagcacgcctcttgtccaggcctctgcgaggagtctctggaaaacactgcttgacctttttctaccacatgtatggagggggcactggcctgctgagtgtttatctgaaaaaggaagaagacagtgaagagtccctcttatggaggagaagaggtgaacagagcatttcctggctacgagcactgattgaatacagctgtgagaggcaacaccaggtaagccaacagagataagaactaagcaatggaaaacgtgtaggagcttctgatgttctttcttattcttgctaccaaagagaatattttgttctttttcagggtcatagayaaaggcaggattaagagggagtaaacataattagtctatacattgattaaatctaagcagtgacagggagagaaagctttgagaatttatgcataaagtgattttcttgcagttctatgataaaagtata

SEQ ID NO: 609032 - DNA, 465 bp, Homo sapiens
ctccaggtgaatctgatgcatgctaaaggcaaagaatctctatgctagactaaatgaatctaaatctttgggggtgacacctgagcactgattttttgttcaactctcaagcgatactgatgcrcaagtgctctaagatttgagttctggggacaggtaacttatcagcatctaggccttggggatcagacacatggccttgcatataatagacttactggggaggtagttatttgaaatgttttttgagtacagagtagtgtggcatctgaaatggcatttagggctcttcaaatgatgcagaatcgccctggagacttccagctcacagtctgggaagaagactccagaatcctcccccttggcttagaatggaacagataagaatctcctctgtgttagtgattccctcaggaatccaaatgatgccagggagaccaggctgaactagttgctccaaaacat

SEQ ID NO: 609033 - DNA, 465 bp, Homo sapiens
ctccaggtgaatctgatgcatgctaaaggcaaagaatctctatgctagactaaatgaatctaaatctttgggggtgacacctgagcactgattttttgttcaactctcaagcgatactgatgcgcaagtgctctaagatttgagttctggggacaggtaacttatcagcatctaggccttggggatcagacacatggccttgcatataatagacttactggggaggtagttatttgaaatgttttttsagtacagagtagtgtggcatctgaaatggcatttagggctcttcaaatgatgcagaatcgccctggagacttccagctcacagtctgggaagaagactccagaatcctcccccttggcttagaatggaacagataagaatctcctctgtgttagtgattccctcaggaatccaaatgatgccagggagaccaggctgaactagttgctccaaaacat

SEQ ID NO: 609034 - DNA, 548 bp, Homo sapiens
agaatcgccctggagacttccagctcacagtctgggaagaagactccagaatcctcccccttggcttagaatggaacagataagaatctcctctgtgttagtgattccctcaggaatccaaatgatgccagggagaccaggctgaactagttgctccaaaacatcctagtgtctaataaaacagatatactcatgtgcacatagatcagccatctgctacatgccaggcacttacagtgctaagagctgtacgtaagttctttcaactgatcctatttccccattttacaggtggggaaaagtaaatgtctggctgrtaagtggctgaatgagaaccagatctgcatggttccaaagtttgtatccctaagccactgttctacactgcctcctaccatagaagttccaaaataatcctcattggcctgaaggtcacaagcactgcatgattttggagataccttttacactctgagagtttatacattctcaaaatggggtaataattcctagtcagctgtgctgacattgcagagttagagagtcaa

SEQ ID NO: 609035 - DNA, 610 bp, Homo sapiens
aattccttcaggtaattttattactcttttcattacagacttgaaggccaaaaaaacagattttattgttgttcagagaaccaaaatgcttattatgtgcactcaggtgtccttttatctaggtgtgttaggacattttttccctcttcttgccacttatttggattcttatttagcactgtgtattaatcagtgttctccagagaaaccgaaccagtaagaggagaaagagagagacagacacagaaggtgagagagatatgaaaggggatgtattatagaaattggctcatataattatgaaggctgagatgctatattcaagcatctcattgtatatagcaaaggttyccattgctatatacaagctggagaaccaggaaagctggtaccatagctcagtccaaatcccaaggcctgagaactagagaagccgatggtataactattagtctgcagccaaaggcctgagaacctagggtgccactggtacaattccagaagtctgaagactgaagaacctagagttctgatgtccaaggacagaagcagacgggtgtcccagttacagaagagagagcaaacttgcttctcctctgcctttttgttc

SEQ ID NO: 609036 - DNA, 553 bp, Homo sapiens
atcaataagaagtgatattgccattgatgatgttaaatttcaggcaggaccctgtggaggtaatattttttcccaatcatataagcttgactgaaaacggactttgcgatactgtctcaaactacaagaatacaaattaaatatttttctataataaaaatactgttatttgctgaattactgtatttgctgaattaaggagtgaagattgcatattcaggactcaacacagtatctggtacctagtaagggggttataatatgtggtgagtgaataaagtcattcaccagcctccttgctggtaacataaatccatagtaataatcacagctaacatttgttgaatactattttcagacattgttcaaagagtctgtttcgctgacacagctgtgtttttatccttacaaggtcacctcctgaacrtgccagctctcctaccagctccatcctcaatgtcaatttacactctaggcaaagattccaagtttccctctttcaacaggatttattggctaccaaaattgcctctaaggttgctaaactgggaat

SEQ ID NO: 609037 - DNA, 589 bp, Homo sapiens
gacacagctgtgtttttatccttacaaggtcacctcctgaacgtgccagctctcctaccagctccatcctcaatgtcaatttacactctaggcaaagattccaagtttccctctttcaacaggatttattggctaccaaaattgcctctaaggttgctaaactgggaatcctactagggatgccaactttggaaattgggggaaaagagggtggrggttggggtactggatattggcttagagcagaaaaggaggtaattcttaccagttgttgctaagaaacaacctgaagttaatctaagagaaaaaaaggaggtggaaagtgagctgcttaactccccttccctcatttatgcttcttcgacaaaattcgattgtttgatgcttcttttccctttccaagttgcctttggcattcatttcaactatatttcaccttcattttaactatatttcacatggatgaatacatggaaggacagtaagcacattataggtttctcaggtttagaaatgcccagggagaagaaatgctagctaacagatactgcttaacaatttaagcccagtgttggcttttattgcaatt

SEQ ID NO: 609038 - DNA, 610 bp, Homo sapiens
cagtcatgccgctcttctgattctgatgtccctcagcctgcagaaacatatgcctatggggaccagggagatgaatgcaatgtgctaaatgggcctggtgtaaaagaataaaaagcagagacactcagtgtgaggagtgaagagggactgatggcaattatrgcaaagtggagaccacatgccaccctctgaagaggcagcaccactcagctccagcctgttgtcatcatctggtaacatggtctcagtgctttgtaattttttcaaaagaggccagtgatccagtgttcaggcaactttcagtgggttgacaaaatatatctgcaggtttatctgcccagagatttacttaactgcagttacgtatttttccaggttgcaaacaaaaattgatccttttcctatgttcctttctctttccaggccattacatttatgtggatacctcctttggcaagcagggggagaaagctgtgctgctaagtcctgacttacaggctgaggaatggagctgcctccgtttggtctaccagataaccacatcttcggagtctctgtcagatcccagccagctgaacctctacatgagatttgaagatgaaagctttga

SEQ ID NO: 609039 - DNA, 579 bp, Homo sapiens
tcagtctacataatgatgcaagttaaatgcagattgaaacattaggtaatggggagagctatgtaaggagaaggttgagtccacccagttattctgacttcagtcatgccgctcttctgattctgatgtccctcagcctgcagaaacatatgcctatggggaccagggagatgaatgcaatgtgctaaatgggcctggtgtaaaagaataaaaagcagagacactcagtgtgaggagtgaagagggactgatggcaattatggcaaagtggagaccacatgccaccctctgaagaggcagcaccactcagctccagcctgttgtcatcatctggtaacatggtctcagtgctttgtaattttttcaaaagaggccagtgatccagtgttcaggcaactttcagtgggttgacaaaatatatctgcaggtttatctgcccagagatttacttaactgcarttacgtatttttccaggttgcaaacaaaaattgatccttttcctatgttcctttctctttccaggccattacatttatgtggatacctcctttggcaagcagggggagaaagctgtgctg

SEQ ID NO: 609040 - DNA, 626 bp, Homo sapiens
aatcctaatgaggaatgtggacaagtagtcagacaaataaaaattaaagttataatgctgatattaaaagaagacttaaaaaagacatctaaccatgtttggaggtagagattagcaaaggctgcctgaaaaaagcagtatctaaacaggtccaccatgtacagttgtataggttgcacactgcacaattttacatggtagatatgttaggctaagaccataatgaagtatagagtgagctaagaaggaagtgagcagtagtggcatggaatgtaggagggaagggatatgaaagagagtatcccagataaaggaaacagcatgtgggaaggcctgaagcaataaagagcctggcaccttagcttaaaggaactaaaagaaattctgtagctgccatgtaggctgcagaaaagggtgtggttaaatatgcgagccagaacaccaaggccatgtaaattgaggacaatggggacccccttcaggtgttttaggctgggaaatgatgtgagcagattggcataacagaaataacactctggctstagtgtggagattagattagactggggcaagactgaagcagatagacgtatcagaagggcattggaataatccagacaaaagat

SEQ ID NO: 609041 - DNA, 459 bp, Homo sapiens
gggcttgttatgaataataaaagacattcctgtcactcagaaaattccaagggttttaagaattctgtgccaagaacctaggacaaagactaaatatatatgtttataccrcaatagttcttttatattggataggaagaaaaaaagttataaacaacaaaatacatttatgttatattttacatttatctatttaattacctttgcgggttctcttgatttatttgtgtagattcagagtactatctagggtcctttcatttcagccttaaagatgccttttagtatatcttgtaggggaggtttcttttagttcattgaacatatttaaaatcgctgttttaatccttttcctatttagaaaaaaagtacgtgtgctcactgccagcactcatttaattttacataaacacactctgaggcttaaccaaatctgactgagtttcaatgtgaaagtaa

SEQ ID NO: 609042 - DNA, 568 bp, Homo sapiens
tgtgcaacaggcccccctagtggccaagaaggctgcttctctgcaaggaaaatgggaggtgaggttgtgttaccagcgagaagtcagctttgaggagaagtcctccacagaagagagacaagggcaagggcttacttacttgtgggttaccactgctctcacctggaccctggtaggctttggaaaagccwaggtctccccacagttgtaagacatttcatcctcgactccaaggtctccacggagtgagaagcttctggcagctggcctttcaacaagaacaagaacaggaatttttattctgttgcaaacagttaactttttctcttttgatcctttacgcatagatattgaggtaatatactcatcctaataatttgttgatggtgacagtgtgtccccatgcctgaagacataatgaccttttatggttcttaccatttttcttcattcagtattgcttctcttcatctgaatatatttaaccatgtctccaactctttttttcaaaagtgctcatccttcagcttatcttgactctggacagtcttcatcctaaccttactgt

SEQ ID NO: 609043 - DNA, 568 bp, Homo sapiens
tgtgcaacaggcccccctagtggccaagaaggctgcttctctgcaaggaaaatgggaggtgaggttgtgttaccagcgagaagtcagctttgaggagaagtcctccacagaagagagacaagggcaagggcttacttacttgtgggttaccactgctctcacctggaccctggtaggctttggaaaagccaaggtctccccacagttgtaagacatttcatcctygactccaaggtctccacggagtgagaagcttctggcagctggcctttcaacaagaacaagaacaggaatttttattctgttgcaaacagttaactttttctcttttgatcctttacgcatagatattgaggtaatatactcatcctaataatttgttgatggtgacagtgtgtccccatgcctgaagacataatgaccttttatggttcttaccatttttcttcattcagtattgcttctcttcatctgaatatatttaaccatgtctccaactctttttttcaaaagtgctcatccttcagcttatcttgactctggacagtcttcatcctaaccttactgt

SEQ ID NO: 609044 - DNA, 547 bp, Homo sapiens
tgtcattatcacagttgcacagagaggcaaatttaacaatggggaagtgttaaagaacttttcccaaatcatttaaaaattcgttccaaagtcaaaccctgtgggtaaccaatgttatgattcagtgattattcagtgtttcatttttcatcctcgatggcaagaggtagctggctggggagaacatatatttcttggaagaggcaacagagcagtggactagtgtcaaatcatccatttgcttgtgttacctgagtgcaattcatcctttgaagagtgtaattctcctagtccttcctcatgcccatctgaatcatagaatattctgactatatttgtgtccctagggatagagaaagagccccaggctaggagtccaaatacttgtgctccaggcccagttatcagagtactttattaccttgactaaacccttaayttcttagtgtctccattgatgcatctgcaaatgagcaatttgaattcaatgatctctaagatgcgtttgagttccaatattttacttttctctccttgcctaatgcta

SEQ ID NO: 609045 - DNA, 594 bp, Homo sapiens
gggatgtgatttttatcctgtattttcttaattctgattcatcacatatgggtttctttctttattcatattttatgaagtgaaacaaaatctttcaggaggtaacctactgacagctcagatcattactgttttctacataccttagcaaaaaaaaaaaaaaagatgattgctggaaaaataatgagggatgcatctctttgctaagatttaaaaaaccaagcctgcttgtggtgctattmtggaagaagctggacaaggtttcaaaatctaaaataaggttagagttatttaattccatcaaacatcatgagatggttggatcatctctccatgactcgtgacactcttttctcatttcagtttggaatgagcaagagtcattttaacaggacttatttatttactctctgcattgatccatttggtgcgtggtgtaagtactcggtagggaagcagctttcttaattttcttaccattttctttgtgcaaggtctgctggatttcctttctctgcccttggatgacttactgtggctttccagttactttcaggtattaataaacaccttcattttcaaggattagatgca

SEQ ID NO: 609046 - DNA, 553 bp, Homo sapiens
ctggctaattttctatgtactgtagagatggggttttgccatgttcctcaggctggtcttgaactcttgggcccaaacgattctcccacctcagcctcccaagtgctgggattacagstgtgagccactgcaccagtctgggactttaaattttaaaactaagaaaggcccaggctaactaagatgaattcttcaccctagtcacctcctgttcttaaagtggccattgcaactccagtccatcgcatgcacacttcagacagaaagagggaggaaaggagaggacaaaagaaacctactagctgagtcagccccccctttgaggagctttcctgaaagccccattcaacaactttctccatctagaacttagtcactggctatcccaaaggcaaaggtggcacagcaatgtcattctcttggctgggcatattgccagccccaatcaaattggggttctgtaatgaggaagcaggagagaatggatattagggaggcaattagttactgctatggtaaggaagagtcatcaaagtagagaagctagacccag

SEQ ID NO: 609047 - DNA, 553 bp, Homo sapiens
ctggctaattttctatgtactgtagagatggggttttgccatgttcctcaggctggtcttgaactcttgggcccaaacgattctcccacctcagcctcccaagtgctgggattacagctgtgagccactgcaccagtctgggactttaaattttaaaactaagaaaggcycaggctaactaagatgaattcttcaccctagtcacctcctgttcttaaagtggccattgcaactccagtccatcgcatgcacacttcagacagaaagagggaggaaaggagaggacaaaagaaacctactagctgagtcagccccccctttgaggagctttcctgaaagccccattcaacaactttctccatctagaacttagtcactggctatcccaaaggcaaaggtggcacagcaatgtcattctcttggctgggcatattgccagccccaatcaaattggggttctgtaatgaggaagcaggagagaatggatattagggaggcaattagttactgctatggtaaggaagagtcatcaaagtagagaagctagacccag

SEQ ID NO: 609048 - DNA, 474 bp, Homo sapiens
gcaacatttctccatccactcatggccaaacctctgtcagctgtaactcatccacttcctcctcaccattcccrctggattatttagaatgcagaatcacaccatttcgcctgaacctcttcccctcccccacccccaactcttaacactgtgctctgtctgtgtgattttcaggccactacatgtacgtggactcagtttatgtgaagcacttccaggaggtggcacagctcatctccccgttgaccacggcccccatggctggctgcctgtcattttattaccagatccagcaggggaatgacaatgtcttttccctttacactcgggatgtggctggcctttacgaggaaatctggaaagcagacaggccagggaatgctgcctggaaccttgcggaggtcgagttcagtgctccttaccccatggaggtaggtgtactggtgcgcaccagctgttcactggcactcttta

SEQ ID NO: 609049 - DNA, 504 bp, Homo sapiens
acccacaagtaatgttcagaaatgctcctccttttgaaaaaaagagaatttgtgtgagctctttcctactacacaggtggtctgtctggtgaaaggaaaagaaacgttccagcaaaayaaggaccatgtgttaagagggctgttgatccctcagtctgcaaagcacagactccttctgtgcaggaacttccgcagatatgagttcttatacagttcggttaaccaagtctccatactgatcttcagaacttcccactatgccagcttggctttaaatggtttaattgcatcatcgtagtgttatgctcaatccaccaggaatgtggattcacatccctattctgccacttccaagctatctggcatgggtcatgttatttaacttctttgagactctttccacatctatagcaaagacggaagaagctgtttcatagacttgttgggaaagttaatgagttaatgtctgtgaaggccttagcacagagtatggtacacagaaaa

SEQ ID NO: 609050 - DNA, 504 bp, Homo sapiens
acccacaagtaatgttcagaaatgctcctccttttgaaaaaaagagaatttgtgtgagctctttcctactacacaggtggtctgtctggtgaaaggaaaagaaacgttccagcaaaacaaggaccatgtgttaagagggctgttgatccctcagtctgcaaagcacagactccttctgtgcaggaacttccgcagatatgagttcttatacagttcggttaaccaagkctccatactgatcttcagaacttcccactatgccagcttggctttaaatggtttaattgcatcatcgtagtgttatgctcaatccaccaggaatgtggattcacatccctattctgccacttccaagctatctggcatgggtcatgttatttaacttctttgagactctttccacatctatagcaaagacggaagaagctgtttcatagacttgttgggaaagttaatgagttaatgtctgtgaaggccttagcacagagtatggtacacagaaaa

SEQ ID NO: 609051 - DNA, 588 bp, Homo sapiens
catgcccctttaccattaaatattttagtgtgtattttataatcaaacacattcttcagcataaytataggataattacggagttcaggaaatttaatactgatacaacattatcaacttactttcggtccatacaccaatgtttccaattgccccaataacaacctttatagatatgtgttcttctggaccaagattgaatcttgcatccctggtagcatttgattgtcatgcctctttcatccactttaatctgggtcagttcctcaacccacctgaatgttttcttgctttggaaattgacaaattgagaatatagtaagtttttatagtgagctgtttcatcggctcactgctcctagagcccaaatgtttccctagagataattttccagttattcaacacatgtcctctctccctagattgttagacgtgtatgtcagcattcagacaagaatcacacttggctgcaccgactgtatcccaactgctacagtcacatcccctctgttctaagagggcaatctgaacagtgtgatttacaagccaattgttgataggattaaaagttattctcaaaagagcag

SEQ ID NO: 609052 - DNA, 599 bp, Homo sapiens
aactttagtttgaaactttagtcataattctctctctctctttttctttccctccctctttctcaaacacacatacacacactagtgggaatgctagtattttaaaaaggtgaaatcagtgagcctggttctgcattgaggctttaaggttaacaacctaaggctctagctgaacacaggatgaggaagctcattaaaaaatatagaaccaacaccaccctagccagagagaatttacataagggaaccgtcagcatctgattttkatataaatgagaatataaaaagagatctttattgcaaggggaatggaaaagaaagctgaaatctctcaagcttagcaactcataaacttaaagaagttttacagatgcaataaattctgtcaactgcaactcagaatgaaaccagtgtgggaaaaatccattttgcttcagcctgtgtcagtcaatcagcaaatatctcttgagtatcctgtcgtgtaagaaagggtcccaaagaaaaataagaaagtgctatccttcaaacagataactcacacagtggtagttcaataaacattgttgaatgaaggaaggaaggaatgaatgaatgagtct

SEQ ID NO: 609053 - DNA, 439 bp, Homo sapiens
agggaccttgtcggtcttgttcatctctgtatccacagcatctagcactgtgccctggtgcaaagtaggtcatcagtaaaattctgttcaataaattttgtttggtacrtatgtggtcaatgaatgaataaaagaatgagtgggtggactttctagggttgggaagtggcagagctggggtctgaatcatggtctagtcaactttgaagcctgccttttagtgcagggtatctttgggtggtcaaggtctctctccaatcttagggaaggcctgttcttgcgcacctggagaaaatgaggctcttcaagcctgccttggggtgtaggcaccttttgttatttaattctcacagtactcctgtgagggaagtaaagtatttcttttcagtgtccttgacattttagaatgcagtctagcttaaggtcccccagatgatct

SEQ ID NO: 609054 - DNA, 529 bp, Homo sapiens
gtggtctgttaattagaagcactgggaggaactcgatattgtgttcattaaatatttcttttggagaaaaatcgttaaacagtccataaatgaaaatgactaaaggcattccatttcactgggatcaggcttaataatcagcccagcagtcattaaaatcttcatggtaaatccttttaagtctgcatctttactctgtcataggactgaaaaaaaaaacttcaaagtcatttatgtatttgggagaaagcccccatccaaccagtttttaaaaatataaatacatatttttttttcactaggtgagaatcttgtgtcagcccttctcatcttatgtctcgtggagcacaaatgccttgagatattccattgaaaaagagttctgttgtcagatgagtttgcagaacttggcagactggatctctactccacacacatgaagattcacaaagcacagtgacatattagaaactctcagtaaggttgacrttaaagaatccagtttaaccttgttaaagggtggcaattt

SEQ ID NO: 609055 - DNA, 478 bp, Homo sapiens
aactgtgattcttccctttgaaacagcttcccattcttaaactgtgccttttcctattcccaagaacctaaatcaagttttaccagcccccatgcaaatcccaatcctttccctgccccacaacacagcttatccagcctccattctgcgatcatggtcagtgatgtggttgcttccacgtcataccctccccacctgcaggtcttcctggcttctccaccttggtcctcctaatgcctggaaacccagggtagctttcatctttaccccagtcttctcagcacagctggagaaaataagactaatctccactgtcccctccattctgctgggaaagccttttatgcatctcatctcttgttgacttttcctcrtcccccatcccagatattcaggtctattttcactcgcaaatttccaacttgaccctccctgcctcattcttaggatgtgatctcatgggttcatctcccaaagg

SEQ ID NO: 609056 - DNA, 640 bp, Homo sapiens
agaagttcactcgaatagaagagcaagtctagaaagtttctgtagagatttataaatagttggctatttaacagccagacaycctgctataaagagattaaggaagcagaaaaccaatgtgtagacaagacacatgagaggaggtgaatttcctatcacatttcatgatgtctgggaacactggaagagaactgcttcaggatattaatgtcccagcattattaaagcagagcagctgagagcaaagtagaaatagaaaggtcattaattactgacaagataatcaacacattatagagcagattaaggtggctttgtacacagaacaaggaaaattatactgtcaagtggaataagttttcatgtcaaagaataaggagctaagtatggaaaaggaacctactcttgagtttttcaagctaaactcagcatcatttgtgagttcatgaattctacattgctttaaatatgagtaaggcaggctgagatactcttgttttccttctgtttcatttcctttcagttatttgttgagaccttctgtgtttcatgccaacttatgagaaaattactgggaagatagattagcacaactggtagttgctgacacatactttacacgaacatagtgtttatgtca

SEQ ID NO: 609057 - DNA, 590 bp, Homo sapiens
tcccaaagtgctttacaagtgttagccaacacacccagccaaagaaatcttaaaagtaatgaaataatacatttgtctatcaaaatattttaaaaacataataccctggagtatgatgtttgtattaattgctgtatttatactgtacactgtttgtattgttcaatttatgaattaaracataaatctttcactttagatgcaagtataaatatatatacccatttatatatatacatatatgcatatttgggtctaaagtgaaatatttatttttaaatatatataatatgtacatatatacatataaatgttttctggtctaagtgaaagatttatttttcaatatatgtactatacatatgtatacatattaatgttttctaaagtgaaaaaatttttaattgataattgaataaatacattcaaatgtacttatatatgtatatacagtcatgtatcacttaatgataaggatacattccaagaaatgtgtttgttaggcaattttgtccttgtgaggatatcatagaatatttatacaaacctagatggtatagcctactacacacctagactgtatggtatag

SEQ ID NO: 609058 - DNA, 628 bp, Homo sapiens
ggtctaaagtgaaatatttatttttaaatatatataatatgtacatatatacatataaatgttttctggtctaagtgaaagatttatttttcaatatatgtactatacatatgtatacatattaatgttttctaaagtgaaaaaatttttaattgataattgaataaatacattcaaatgtacttatatatgtatatacagtcatgtatcacttaatgataaggatacattccaagaaatgtgttygttaggcaattttgtccttgtgaggatatcatagaatatttatacaaacctagatggtatagcctactacacacctagactgtatggtatagcctacagatcctgggctttaaacctatacagcatgttattgtattaaataatggcaacagttacaacacaatggtaagtatttttgtatctaaacatatctaaagagacagaagtacagtaaaaatatggtagtataatcttatggaactaccattgtacatgcagtccatcattgactggaatgtcattatgcagtgtatgactgtatatgtatatatataaacatatatgtgtgcatgcataatacacacacacacacacacacacacacacacacgtataacattac

SEQ ID NO: 609059 - DNA, 628 bp, Homo sapiens
ggtctaaagtgaaatatttatttttaaatatatataatatgtacatatatacatataaatgttttctggtctaagtgaaagatttatttttcaatatatgtactatacatatgtatacatattaatgttttctaaagtgaaaaaatttttaattgataattgaataaatacattcaaatgtacttatatatgtatatacagtcatgtatcacttaatgataaggatacattccaagaaatgtgtttgttaggcaattttgtccttgtgaggatatcatagaatatttatacaaacctagatggtatagcctactacacacctagactgtatggtatagcctayagatcctgggctttaaacctatacagcatgttattgtattaaataatggcaacagttacaacacaatggtaagtatttttgtatctaaacatatctaaagagacagaagtacagtaaaaatatggtagtataatcttatggaactaccattgtacatgcagtccatcattgactggaatgtcattatgcagtgtatgactgtatatgtatatatataaacatatatgtgtgcatgcataatacacacacacacacacacacacacacacacacgtataacattac

SEQ ID NO: 609060 - DNA, 526 bp, Homo sapiens
ttttctagtcttagagatgttccacttgcttcgaaatactgcctacaatgaaataaacactgcttttaagaaagatctataaataagaggttaatcccctcaagaatttagactatgactaattcccttcttgttatgttcttaactggacccagagggtaagtccttaagaacaggacaagatgtttgacttattctttgtcctgcctcaaccaggcccactcatccgcttgcccagtcaccaactaccctaaaataacctctccacctcaaggagcatacaaaatgtaaaatggcagccccaaaataagcgctgacatgatcagcattactaatagccaggcagaaaatccagtgtgttagatcaaacargctgatctggttgtgcttcttttgtgtgttaaaatactgacagacaactgccaagcaaatttggggattaaggccgtcatttgaacctagtcagtagctgactaaccttagggatcttttatcagacagaacaacacatggtctggcgaatgtt

SEQ ID NO: 609061 - DNA, 580 bp, Homo sapiens
taatgactctgatcatcaaaaagcaaaagaaccctactgataaaacaataaatttaaaacataacattttaaactagagcctaaaaaaatcaagtgttctcattatttgtaagttgggtttcaacttctgttatatcatcctttgtctgtttgaattagatttgtaattgagggattcaatgaacatggactaaatgagcttgtgctacgtaaacattgtgatacattcaaagcagctttgtaatctgcaagtacagtgaaaatctaawacaaatgtttttaaaaggtctcttagctcatcctatatatgaaaagtagcctttaaaatttgcctgatggaaagaaatccaagacttttctgtctttctctggaacagtagatttaataatttatggtatggatttgtttttccttcacagacaacaataaaaatgtttggactgataaaataactgcatttagggcttttattagtgacaccaactgggaacacagatctttgtctttggaaatggaacataagcctccagatggcaaatcaccaggactttgttcacaatgtgaatgaagcatgttgcc

SEQ ID NO: 609062 - DNA, 613 bp, Homo sapiens
ggtagctagctatgtgtcatacattacgcctaatgagaaaatggtgcataactcaatcccaatcattgatctgtatctgctaattaccattgcatcctacatcataggacatccatttctttgacacacaggcaaatcgtggtatcagtctggtgctggagaataatctccatgtttatttaattaaaagacaatttgttcttagtctcttaatttgccaggcactgcaaggacaacccagataaaaatcgttccastcaaggcatagaagaaagaatgaggtttcattaaccagtactgtgtgtaaaataaaatgaagtaaaacagtgatcacaaaagagacatatgaaacaagctatttattagaaaaatttggctaagaatctggatatagggaggtacaaccaagtttagtcaaaggaaaagtccccaataaattgggaagaagcaccattctaataattatgaatgttattgaagatagcattcaaagacataaacattggatttgggaaaaggaaaataaacctctgggtggcaaaataagttctaaaatttaattattgagaacttcacattaaaaatgatcactttacatataccatctcattta

SEQ ID NO: 609063 - DNA, 540 bp, Homo sapiens
aaaataaacctctgggtggcaaaataagttctmaaatttaattattgagaacttcacattaaaaatgatcactttacatataccatctcatttaatcctcacagacccatgaagtgactaccatcaatattcccacattagagataagaactctaaggcacagagaagtgaagtcatttgttccacacagctatgcctccaggagtccatttagcactctcacattctcccctacctacaaagcaactgtggagttgttatgaggatacccttcactcatccaggatttctgaagaaagtgcctgcattatgaaattttattattttccatattttcataaaggcaatatacctataatttccagagctttataaaaagaaattcacaaaaattcacaagtcagagaaagtttttttctcaaagtagcccagtattttagatctgtatatctgattgttctctatgtctgtggcaggacccgcagtggaatgcagcctctagctggaagcagtggctccgtgtaggtgggccaccagtgg

SEQ ID NO: 609064 - DNA, 540 bp, Homo sapiens
aaaataaacctctgggtggcaaaataagttctaaaatttaattattgagaacttcacattaaaaatgatcactttacatataccatctcatttaatcctcacagacccatgaagtgactaccatcaatattcccacattagagataagaactctaaggcacagagaagtgaagtcatttgttccacacagctatgcctccaggagtccatttagcactctcacattctcccctacctacaaagcaactgtggagttgttatgaggatacccttcactcatccaggatttctgaagaaagtgcctgcattatgaaattttattattttccatattttcataaaggcaatatacctataatttccagagctttataaaaagaaattcayaaaaattcacaagtcagagaaagtttttttctcaaagtagcccagtattttagatctgtatatctgattgttctctatgtctgtggcaggacccgcagtggaatgcagcctctagctggaagcagtggctccgtgtaggtgggccaccagtgg

SEQ ID NO: 609065 - DNA, 611 bp, Homo sapiens
atcctttctgtttattacattgcttatgtacattgctgcagcaaggatctaacagggcttacaaagttctgcacacaaagaatagaagtaagttaaaaggtcaaagagagggacaaagtaggggaaaaaatggtaatctaaattggagccagggccgaggcctaatatacaaaatatattggcagacaaaggaagaggcatacaggtttgactccaagctttcagtagccaaaacgcacctgtaaaacatgattcacagaatgagcagtccacgtgggtgggctataagcaatgatggggtgcattttctgtagaaaatgtataaactgcaataaaacagagtaagagttcatctacttcatattaccaacatgtatcagcaattgtaaacattgtcagggacaaaatatgtcccgtaggccatgtgtggtggctcactcctataatcccagcaytttgggaggccaaggtgagaggattacttgagtctaggagttcaagaccagcctagacaacatagtgagactctatcttgacaattttttttttaatttagccagctgtggtggtgtgcacctgtggtcacagctacttggaaggctgaggcagga

SEQ ID NO: 609066 - DNA, 617 bp, Homo sapiens
taaagtgatctcttagctattgaatgtcctttgttatgacagatgtctaaatgctggctctttcaggagcctctgcatcttaccatttctggcaatgttctcactggctaaccctctgagaccacccgcttcccttagtacttgcactacagaatacaacccacatagatttttctgtttgggttcctcctggaaatttttccttgggttctttctrgaacagttgtttccagccaccttgctagtgagtgtccatttggcctcaatagtgatgcactcctgcctaagaagatatgcagcttggtcctactgctgacctcttttcttgctgcttcagcagattctgggacaatgttgcttcggtaaaggatgctgttgaagagatttagcattggcccaaaggcagaccagatgctcactttcagcattgagtgaaggatgctaaggtggttccttatgtgtgaagctatctctggaaagatatcaggatgttaaaaatataactagaaaggcctatatgtattaggactattctaaaagcttataacagaaaatacaactcaaactgacttaagtgaaaagaaaatccttttttggactttgttacagaaagagac

SEQ ID NO: 609067 - DNA, 595 bp, Homo sapiens
actgtggggttagcttcaggcacagcttgatgcagggattaaaactgtgtcctcaggagccagtttctctctctctttctctttctacctctttgagctggtttttctgggtgggctccaatctagacaggatctcctgtcatggcaacacagtggctgtagcaactgcagtctcatgggcctttcaacattgaatctagcggaaagtgaaaactcagacaaaaatacccaaactgaatctcattggctctgattggaaatgtyttgagggcatagtactataaaggtcatttttgattccccacagaatttagtattctgtcttatacacaatagttgctcaaaaatgcctatggaatgaatgaatgaatgaatgcacaaatgaataaatgaatctataaaccttcactgacacatttaataataactaaccaattaattattgagaccctagaaaatcggatggtggaaaggtatctatttattgcaagaggattgaagtcaagaatgaatcagttttagctagagtctattgtagtctagatgttatgtgtatgtgtatttttcttgagaaggttgatagtttttcttcctt

SEQ ID NO: 609068 - DNA, 595 bp, Homo sapiens
actgtggggttagcttcaggcacagcttgatgcagggattaaaactgtgtcctcaggagccagtttctctctctctttctctttctacctctttgagctggtttttctgggtgggctccaatctagacaggatctcctgtcatggcaacacagtggctgtagcaactgcagtctcatgggcctttcaacattgaatctagcggaaagtgaaaactcagacaaaaatacccaaactgaatctcattggctctgattggaaatgtcttgagggcatagtactataaaggtcatttttgattccccacagaatttagtattctgycttatacacaatagttgctcaaaaatgcctatggaatgaatgaatgaatgaatgcacaaatgaataaatgaatctataaaccttcactgacacatttaataataactaaccaattaattattgagaccctagaaaatcggatggtggaaaggtatctatttattgcaagaggattgaagtcaagaatgaatcagttttagctagagtctattgtagtctagatgttatgtgtatgtgtatttttcttgagaaggttgatagtttttcttcctt

SEQ ID NO: 609069 - DNA, 595 bp, Homo sapiens
actgtggggttagcttcaggcacagcttgatgcagggattaaaactgtgtcctcaggagccagtttctctctctctttctctttctacctctttgagctggtttttctgggtgggctccaatctagacaggatctcctgtcatggcaacacagtggctgtagcaactgcagtctcatgggcctttcaacattgaatctagcggaaagtgaaaactcagacaaaaatacccaaactgaatctcattggctctgattggaaatgtcttgagggcatagtactataaaggtcatttttgattccccacagaatttagtattctgtcttatacacaatagttgctcaaaaatgcctatggaatgaatgaatgaatgaatgcacaaatgaataaatgaatctataaaccttcactgacacatttaataataactaaccaattaattaktgagaccctagaaaatcggatggtggaaaggtatctatttattgcaagaggattgaagtcaagaatgaatcagttttagctagagtctattgtagtctagatgttatgtgtatgtgtatttttcttgagaaggttgatagtttttcttcctt

SEQ ID NO: 609070 - DNA, 595 bp, Homo sapiens
actgtggggttagcttcaggcacagcttgatgcagggattaaaactgtgtcctcaggagccagtttctctctctctttctctttctacctctttgagctggtttttctgggtgggctccaatctagacaggatctcctgtcatggcaacacagtggctgtagcaactgcagtctcatgggcctttcaacattgaatctagcggaaagtgaaaactcagacaaaaatacccaaactgaatctcattggctctgattggaaatgtcttgagggcatagtactataaaggtcatttttgattccccacagaatttagtattctgtcttatacacaatagttgctcaaaaatgcctatggaatgaatgaatgaatgaatgcacaaatgaataaatgaatctataaaccttcactgacacatttaataataactaaccaattaattattgagaccctagaaaatsggatggtggaaaggtatctatttattgcaagaggattgaagtcaagaatgaatcagttttagctagagtctattgtagtctagatgttatgtgtatgtgtatttttcttgagaaggttgatagtttttcttcctt

SEQ ID NO: 609071 - DNA, 663 bp, Homo sapiens
cccaggaacttagggcatcaggacaacctaaggtttcccattcactaagtaaggttcccattcaccttgagaaagttacttaaaatctctaagtctcagttctgtcatctagaaaatgagaataatcataaccacttacctattttcctaacttcacagggtggttgaatttaaaaactgaaaggctttgggattagactgcctaggttcaaatctyagttctacctttaacctctctaagcctattttctttatctttgtattaagaataattaatacctacctcacagactgtggtgaggtttaaatgaaacaagatataaaacatacttagaataagacctggcatatgacaattaattattgctctattattcatttactccttcattcagcaaatagctattgagtgtctactatgtgccaggtactgttttaggtactcatgaaacacagatgaacaaaacagacaagcatttaccctcacggaacttctagtagaggagacagacaagaaatattaagcttaattataattatgcagtattttaaaaggcgataattgctacagaaataaaaatggagcaggtgagggagttagggaatcgagaggagaatgtgggtggagttaactaatgtaaatagaagagtcacaacgaagcc

SEQ ID NO: 609072 - DNA, 663 bp, Homo sapiens
cccaggaacttagggcatcaggacaacctaaggtttcccattcactaagtaaggttcccattcaccttgagaaagttacttaaaatctctaagtctcagttctgtcatctagaaaatgagaataatcataaccacttacctattttcctaacttcacagggtggttgaatttaaaaactgaaaggctttgggattagactgcctaggttcaaatcttagttctacctttaacctctctaagcctattttctttatctttgtattaagaataattaatacctacctcacagactgtggtgaggtttaaatgaaacaagatataaaacatacttagaataagacctggcatatgacaattaattattgctctattattcatttactccttcattcagcaaatagctattgagtgtctactatgtgccaggtactgttttaggyactcatgaaacacagatgaacaaaacagacaagcatttaccctcacggaacttctagtagaggagacagacaagaaatattaagcttaattataattatgcagtattttaaaaggcgataattgctacagaaataaaaatggagcaggtgagggagttagggaatcgagaggagaatgtgggtggagttaactaatgtaaatagaagagtcacaacgaagcc

SEQ ID NO: 609073 - DNA, 588 bp, Homo sapiens
  misc_feature 148: n = A,T,C or G
tagtatcagcagtttcaggcatccaccagggatcttagaacatatccctcaaggataagggggaactactgtagtttgccagggcttccataacaaaatatcccagactgggtggcttaaacattagaaatttgttttctcacaggtntggcagcttaaagtccaagatcaagatgtyggtagggttggttccttctgaaatttctctccttggcttgcagatggctgccttcttgcttcacatggcctttcctctgtgccagtgcacccccgatatgtatcttcttgtaagttcaccagtcataatgaattacagcccaccctaacaatcccattgtgacttaattacctcctaaaaggttctatctccaaatacagtcacattctagtacgtgggttagggcttcaacatacctctttggagaagacacaattgaacccactcccaggatttagggcaatgggttgaacattgaaggaacagggtaaactcttaagttaaatggctgacaaccaagccctgtcctgctcctcatgtcattatgctaaaataatgttatagtctgagcttgcttgactagtagacca

SEQ ID NO: 609074 - DNA, 533 bp, Homo sapiens
aataagaaaaacaagttttgctacactgtgcccagggtacctacaaatatagcattaggttgaaggtgttttgttcttgttcttgaaattactttaataactaattttctagggaaatataatatcagtgattatttacagtagttcccccttatctgcagggcatatgttcctcgatgcctagtggatgcctgaaaccaaaggcagtattaaaccctatatacaatatatttttcycatacatacatacctataataaagcttaatctataaattaggcacaataagacactaacaatgaccaataatagaataattacaatatattgttctcaatttcacagacagaagatttgttcctactgtagatctcagcaacctcagatttttcctttccttgttaagtcacaacctttcaccttttcacttgaagcactttatggcttctctttgccatatctaaactgtcagcatcactactcttgcactttggggccataattaaataaaataaaggttacttggacacaaga

SEQ ID NO: 609075 - DNA, 589 bp, Homo sapiens
gtttaaaacttatgaattgtttatttctggaactttccatgtaatatttttgggccacagctgactgtgggtaaccgaaaccatggaaggcaaaaacagataaagggggcactactatattggacatttaccacgtgtaggcactgcgctaggaacctcaacatcctttccacaacctgtaaggtaagtgaaagttcccacgttttgcaggaggaagctgaagtttagggaagttaagtgcctttccagggccagcacttactggtggagcagtaactggtggagcaaagacttaatctcacatttgtctggttctaatggctatatattctgcctacactgcctcactagggtttccaaacctacatgctactaagagaccacacatggcctggaacagctgtgacaacttatatgtgaaaagcacagtttttcataaaccaaagacccttcacaccaaagcagagtgtcttctcctagaaaatacaatgattggtattttggaacattcctagaaattgatccagcagaaaacatctaamctttttctgatctatttctagtgtctgtataacaatgttgtcagtgt

SEQ ID NO: 609076 - DNA, 513 bp, Homo sapiens
aataaaataaaataaggcatagattcccttaaaattaggaacataaccaaggcattcctttctacaaataaaaaaaaaaaaaaacaaaagctttaaaatctagtgcataaactcaatattacatttcaaactcttagccagaagatatatgctcctataaaattccagccaggatgggtatagtgtgtagaaagatgaagaaaaataaatgaattatagacctctttttctagcaaaaaaaaaatacactagagatcactgtgcactcgctacaaaacacctgaaaatgcaagaaaaaaaggataaatggataaaatattccttttttttttttacattaatttctgggatacaagtgcagaacatgcaggtttgttacayaggtatacatgtgtgatggtgctttgccagacctatcatcccaacatctaggttttaagccctgcatgcattagatatttgtccccccaccccccaacaggccccggtgtgtgatgctcccctccctgtgtc

SEQ ID NO: 609077 - DNA, 575 bp, Homo sapiens
aaggttctcggcttccttgcattgggttagaacatgctcctttacctcagaggaatttattacctatcttctgaagccgacttttgtcaatttgtcaaactcattctccatccagttttgtgcccttgctggagaagagttctgatcatttagagaagaagcagcattgtgatttttggaattttcagcatttttgtgctggtttttactcatcttcatggatttctctacctttgatatttgaagttgatgacttttggatggggattttgtgtgggggtcctttgtgttgatgttgatattattgttttctgtctgttagtttttcttctaacagtcaggcccctcttctgcaggtctgctgcagtttgctggagatccattccagaccctgtttgcctgggcatcatcattggaggcagcagaacagcaaagattgctgcytgctcctttctctggaagctttgtcccagagggccacctgccagatgccagccagagctctcctgtaagaggtgtctgtcggtccctgctgggaggtctcttccagtcaggaggcacgggagtcagggacc

SEQ ID NO: 609078 - DNA, 566 bp, Homo sapiens
catgtcaacatggtgagacagagcaagagggaggcaggaaggaggtgctaggctctttaaacaaccagttcttacgtgaactaatagagcaaaaactcactaatcatgaaggggatggcaccaagccattcatgagggatccactcccatgacccaaacatctcccactaggtcacacctccaacattggggatcrcatttcaacatgagatttcagaggacaaatatccaaactatatcaacatgcatgtgtgtagtcttctttgtagttattctgcttgggtttcattaaatttctttaatctttgagctgagatctttcaatagttttcaaaatttcttgatctttatcttgtcaaatattgcccctgcctaactgtctctcctatctttctgagactccaattatatgtacattaaaagttcttactatgtattatatatccttcatgctctcttacaaatattttctttctttttgttctcagttctttagtttgggtattttctcttggccaattaaaaaattttttttgaatcttagcgatgttcagtatgttattaaa

SEQ ID NO: 609079 - DNA, 545 bp, Homo sapiens
ggttctgcaggctctaacagcatagcaccaacatgagctcagcttctggtgaagtctcaggaagattttacttgtagcggaaggcaaacgcagagcaggcatgtcaacatggtgagacagagcaagagggaggcaggaaggaggtgctaggctctttaaacaaccagttcttacgtgaactaatagagcaaaaactcactaatcatgaaggggatggcaccaagccattcatgagggatccactcccatgacccaaacatctcccactaggtcacacctccaacattggggatcacatttcaacatgagatttcagaggacaaatatccaaactatatcaacatgcatgtgtgtagtcttctttgtagttattctgcttgggtttcattaaatttctttaawctttgagctgagatctttcaatagttttcaaaatttcttgatctttatcttgtcaaatattgcccctgcctaactgtctctcctatctttctgagactccaattatatgtacattaaaagttcttactatgtattatatatcc

SEQ ID NO: 609080 - DNA, 566 bp, Homo sapiens
catgtcaacatggtgagacagagcaagagggaggcaggaaggaggtgctaggctctttaaacaaccagttcttacgtgaactaatagagcaaaaactcactaatcatgaaggggatggcaccaagccattcatgagggatccactcccatgacccaaacatctcccactaggtcacacctccaacattggggatcacatttcaacatgagatttcagaggacaaatatccaaactatatcaacatgcatgtgtgtagtcttctttgtagttattctgcttgggtttcattaaatttctttaatctttgagctgagatctttcaatagttttcaaaatttcttgatctttatcttgtcaaatattgcccctgcctaactgtctctcctatctttctgagactccaattatatgtacattaaaagttcttactatgtattatatatccttcatgctctcttacaaatattttctttctttttgttctcagttctttagtttgggtattttctsttggccaattaaaaaattttttttgaatcttagcgatgttcagtatgttattaaa

SEQ ID NO: 609081 - DNA, 636 bp, Homo sapiens
cctttctctctctcttccttttgggacttccactatgcatatgttggtacacttgatggtgtgtctcacaggtctctgagtctctgttcattttttcttttatcttttttttctttatgttcttcagattggataatctcattgacctgccttcaagtttagtgattctttcttctgctagttccaatctgctgctgggccctctcatgaatattttatttcattatatttttcaaatctgtaattcgtacatggttcttacttataatttgtagtattattaatgatactctctatgcattgagtcatcattctcatactttatttagaaatggctttcattaattctttaaacatatttgtaatagttgmcttaaagtctttgtatagtaagtccaatgtcttgacttcctcagggataacttctattgactgctttttatcctgtgtatgggcaatagtttcctatttctttgtgtgtctcataatttttgctgaaaactggacgttttgaataatacagttttacagattcttcttctccccatagtttttttgttattgctgtttgttgtttttgtttttgttgtcattgttgctgtatgtttgcttagtgactttcctagactaattctg

SEQ ID NO: 609082 - DNA, 636 bp, Homo sapiens
cctttctctctctcttccttttgggacttccactatgcatatgttggtacacttgatggtgtgtctcacaggtctctgagtctctgttcattttttcttttatcttttttttctttatgttcttcagattggataatctcattgacctgccttcaagtttagtgattctttcttctgctagttccaatctgctgctgggccctctcatgaatattttatttcattatatttttcaaatctgtaattcgtacatggttcttacttataatttgtagtattattaatgatactctctatgcattgagtcatcattctcatactttatttagaaatggctttcattaattctttaaacatatttgtaatagttgccttaaagtctttgtatagtaagtccaatgtcttgacttcctcagggataacttctattgactgctttttatcctgtgtatgggcaatagtttcctatttctttgtgtgtctcataatttttgctgaaaactggacrttttgaataatacagttttacagattcttcttctccccatagtttttttgttattgctgtttgttgtttttgtttttgttgtcattgttgctgtatgtttgcttagtgactttcctagactaattctg

SEQ ID NO: 609083 - DNA, 613 bp, Homo sapiens
atttctttgtgtgtctcataatttttgctgaaaactggacgttttgaataatacagttttacagattcttcttctccccatagtttttttgttattgctgtttgttgtttttgtttttgttgtcattgttgctgtatgtttgcttagtgactttcctagactaattctgtagtctatattctttgttgtgtatggctctgctctgttagcttaacagtcaactaattattgaacagagattttccttaaatgccttaaaccaacagatcccccagaacacagcaggttctgtgtttgtgttgggtcatgtcttcagtgctctagcgggaagtttacaactttgccttagcctccatttcttgctcatgaagagcctaaaggtcagccagaggtgacagattasgagtttctcagtttttttttttttttctggggatgtgtacagctctttatatttacatggcctttcagatttccagaaatatgttagagctttgtaaagctccctacagatatctcattccccatttttttcttttatttttggtcagccttttgttagcttcaactgtcaatgccacctcaggcagctgcaatgttaaacaattaaaca

SEQ ID NO: 609084 - DNA, 565 bp, Homo sapiens
cagagtacagctctgctacaagttacttaacagagacagaggggatgtctttggtattttatttttcagtattatttatttaagaacatgattattatactcaaaatatactctttcttctgcactgcaagccaaccagtcatagtgctctgaatgatatatttgtgtgtctggcctcttacaacatattcttctgttgatatgttctgactgttctgcccaaggccytgctgtatctaagattaccttattccacggtatgctgctctttgacaaggggtaggaggggaagagtataaaaatttatatttatattgcctttggctttaaactgcctaagagaccatggaattttctacttctttccctttataagtcctcatcttgagtaataaatattggtgacatccaactatgttaaagaaaaaattatgtaatgatacttgttaaagcacagtaaggcaggcttgattcagtaccattttgatagttacagggaccactgcaacgggattttgcagtagggaagagaggttgggctcaactttgaataaagtgcaggcaa

SEQ ID NO: 609085 - DNA, 598 bp, Homo sapiens
tggagtaaggacctcagagaatcctctccccataaaagcaatgagaacagcaaaagaaatggtcaaaatcaactttttaagagctctggaaattaaccaaaggcttataacattcaggagcatgtattcaagaaaaatgaaggaatactgttaaaacactgaactttatggtgttctgcattattcccattttgatatttaaatatatatggaaatacaagggacccagaatagtyaaaatgatcttgaaaatgagtataggtcggaggtctcatacttcccaatttcaaaacttactacacagctacagtaaggaggactctgtggtactggcataagaataaacatagatcaatagaatcgaattgagaagtccagaaataaaccccacatctatcctcaactgatttcaacaatggtggcaagaaaattcaacgggcaaaaattagatcaaagatctaaacgtaaaagctgaaacaataaaactctgagaaaaaaaacatagctgtaaatcttcgtgaccttaaatttgagaatggcttcttagctacgatgccaaaggcagaaaaaaaaaaactaaaaatagaaaattaaactt

SEQ ID NO: 609086 - DNA, 579 bp, Homo sapiens
acagggaccactgcaacgggattttgcagtagggaagagaggttgggctcaactttgaataaagtgcaggcaagtgggaatttatagtcaaatagttggttgaaggtcagtgaatgaaaaatgactaacaagtaacatcaagggcgagggaggttctggctaaaccagcctaacaggattcttgctgagracaggcatggtgattagacatcacctggaggatgatggaggatgaggacccttacattgagggtgatcagatattgagggtggggggttcttgctaaactaacttattagggttcctgctaacactggattttacaagtaagtacaaagataggcctaggagaaggtttaggagcctgactgaagttcagtcaagcaaagactctgtcaaccatcacaggaataaagtaatttacttgtcttttttgttcagttatcagagaaaccactttgataatcacctaaaggttttttggaaagtaatctatattataaacgtagtattgcttacactgatgtcactgaaatttcttttccatggaggatatattctaaaataataagaaaatt

SEQ ID NO: 609087 - DNA, 587 bp, Homo sapiens
cacagttctggagtctggaagtccaagttcaagatgctggcaggcttagttcttctgaggcctctctccttggcctgccgacagccaccttcttgctatgtcttcccacggcctttgccctgtgcacacgtgtccctggtgtctttcttcttttaaggacatcagtcatattgcrtgagggtcccacccttgtgacctcattttaccttaattacctccttaaagaccttgtttccatatacagtcacattggggtttagggcttcaacctatgaattttggggaaacacaatttagtctataacaaaagttagtttgaaaagaaaaagaaagtaggccgggcatggtggctcatgcctgtaatcccaggaatttgggaggccaaggcgggctgatcacttgaggtcaggagttcaagaccatcctggccaacatagtgaaaccccatctctactaaataaataaataaataaataaataaataaataaataaataaataaataaattagccaggcatggtggtgagtacctgtagtcccagctactcaagaggctgaggcatgagaattgcttgaaccaagggggt

SEQ ID NO: 609088 - DNA, 587 bp, Homo sapiens
cacagttctggagtctggaagtccaagttcaagatgctggcaggcttagttcttctgaggcctctctccttggcctgccgacagccaccttcttgctatgtcttcccacggcctttgccctgtgcacacgtgtccctggtgtctttcttcttttaaggacatcagtcatattgcgtgagggtcccacccttgtgacctcattttaccttaattacctccttaaagaccttgtttccatatacagtcacattggggtttagggcttcaacctatgaattttggggaarcacaatttagtctataacaaaagttagtttgaaaagaaaaagaaagtaggccgggcatggtggctcatgcctgtaatcccaggaatttgggaggccaaggcgggctgatcacttgaggtcaggagttcaagaccatcctggccaacatagtgaaaccccatctctactaaataaataaataaataaataaataaataaataaataaataaataaataaattagccaggcatggtggtgagtacctgtagtcccagctactcaagaggctgaggcatgagaattgcttgaaccaagggggt

SEQ ID NO: 609089 - DNA, 543 bp, Homo sapiens
ctaaaaggggccaaggtacagcttgggccattgcttcagagggtgcaagccctactcactggtggcttccacatagtgttgagcctgtgggtgcacagaagtcaagaactgaggyatagaaacctctacttagattttagagcatgtatggaaacagctggatgtccaggaagaagtttgctgcaggggtggagccctcatggagaacacctgcttgggcagtatagaagggaaatgtggggtcggggcccccacacagagtctccacgggggcactgcccagtggagctgtgagaagaaggtcaccatcctccagaccccacaatggcagatccactgagagcttgcatcatgtgcctggaaaagctgcagacactcaacaccagcctgtgaaagcagccaggaggtgggttgtatcctgcaaagccacaggggtggagctgcccaaggctgggagcccaccttttgcatcagcataacctggatatgagacatgcagtcaaaggagatcattttggaactttaaggtttaataactaacct

SEQ ID NO: 609090 - DNA, 576 bp, Homo sapiens
ccactgcagccctgacctccagggttcaagtgatcctcccacccagcctcccaagaagctgggactacaggcacgcaccaccacacctggctaattttttttgtatttttttktagagacaggatttccccattttgcccaggatggtctggaactcctgggctcaagtgatctacccgccttggcctcctaaagtactgggattacaggcatgagccaccatgcctggccaaaactagttcatttttaatcatcagtcctcaaggccattgggtgtatagtaggtgccggggagataggagtgcacaagatagacacaagccttgcccttggggaaaggagtcagcagataagtccctgaaacatcagacagcagacaagatttacagtgctaattgctggcagggtaaggccagggccttctggtctggagtagccttgatcaaaactgtccaagtcctatttgccagcactggagctggcccttgggtactgaccttcttttctgcttctctccatagaaaatgtcatccgtgagaatcagtggggaggtgtggacatccgccgtggagggat

SEQ ID NO: 609091 - DNA, 607 bp, Homo sapiens
ttgtgtatctttttaaagtcggttgtcttgcttcacaaaacttaagagsccagaaatgttgcacccaggagcatgtattttaagtggctttgcctgctgattcttacagctgggaacatgtagctgcagtgcaatgtgtctgctcttctttttttatttgtataaatttatagagtacaactataattttgtaatatggatagattatatgtagtggtggagctcagggcttttagggtatgcattacctgaataacatacactatacccattaagtgatttatcctcatccagccccctcccactgccctcccgaatctcccttgtctgtcagtccacattctatgtccatgggtgcacattatttagctcccacttgtaagtgagaaaatgtggtatttgacttcctgtgtctcaactgtttcaactaagataatgccccctagtttcatccatgttgctgcaaaagacataatttcattcttttatatggctgaatagtgttccattttacattttctttatccaatcgtttgctgatgaacacttaggttgattccatatctttgctaatgtgaatagtgctacaataaatatatgagtgcag

SEQ ID NO: 609092 - DNA, 504 bp, Homo sapiens
tgggaggccaaggtgggtggatcacttgaggtcaggagttcaagatcagcctggccaacatggtgaaactctgtctctactaaaaatagaaaaattagcagggtatggcagcaggtgactgtaatcccagctactccagaggctgaggcaggagaattgcttgaacctgggaggcagaggtttcagtgagtcaagattgcgccactgcagtccagcctgggtgacaagagtgaaactctgttmtcaaaaaacaaaacaaaacaaaacaaaaacatgctggggaggttgtggagaaaagggaacacttatacactgttggtaagagtgtaaattagttcaaccattgaggaaagcagtacggcgattcctcaaaaacctaaaaacagaactaccattcaacccaagcaatcccattactgggtatatacccaagataatagaaatcattctaccataaagacacatgctcgtgtatgttcatttcagcactatgcacaatagcaa

SEQ ID NO: 609093 - DNA, 504 bp, Homo sapiens
tgggaggccaaggtgggtggatcacttgaggtcaggagttcaagatcagcctggccaacatggtgaaactctgtctctactaaaaatagaaaaattagcagggtatggcagcaggtgactgtaatcccagctactccagaggctgaggcaggagaattgcttgaacctgggaggcagaggtttcagtgagtcaagattgcgccactgcagtccagcctgggtgacaagagtgaaactctgttctcaaaaaacaaaacaaaacaaaacaaaaacatgctggggaggttgtggagaaaagggaacacttatacactgttggtaagagtgtaaattagttcaaccattgaggaaagcagtacggcrattcctcaaaaacctaaaaacagaactaccattcaacccaagcaatcccattactgggtatatacccaagataatagaaatcattctaccataaagacacatgctcgtgtatgttcatttcagcactatgcacaatagcaa

SEQ ID NO: 609094 - DNA, 536 bp, Homo sapiens
aattatactaaaaatatttgttcttaggctggacatggtggctcacgcctgtaatcctagtactttgggaggcccaggtgggtggatttcttggcactttgggaggccaaggtgggtgaattgcttgagcttgggagtttgacaacagcctagccaacatggtgaaaccctgtctctatagctgggcgtggtggtgggtccctataatctcagctacttgggaggctgaggcaggagaatcgcttgaacctgggaggtggagattgcagtgagctggtatggtactactgcattccagcctgggggacagagcgagactccatctcaaaaaaaaaaaaaaaaagraaaagttgtttatctgaaattcagatttaactggacctcttgtattttcatgttaaatctggtaaccccgtactggatgtcccattgctactgccacggctgtccgtgtaaactagccaccacctgccactcaaatggattttccaggtggttcctggctctttgcatcatgggttctgaaaagaacctga

SEQ ID NO: 609095 - DNA, 407 bp, Homo sapiens
ctcttcccacaatccctgcagagcccctaggcaatctgtacacagggttaccataggaatcttatattgtcaattaaaattgagtggacacctgataactaaggatatgttgttgaaaaaaattcatatagtcacaatcttatgaataaattaatcaaactgtggttaatccaaattcaattttcacttgtccagttctgttcttaatccttgccttcatcatcacccaaataacaccaacaatcctagagagaatgctgtaattgaaacaataaaaatgcagctgcaagttccttaagactctagcagagaaaccaacatataggacaaagttaattttaccttctctctctctctcwcacacacacacacacacatacacgcacacgcgagcgcccacagacacc

SEQ ID NO: 609096 - DNA, 610 bp, Homo sapiens
gtgaatggcatgacacctcttcccaaacctcatgacctcagttgagttatgagaaaacatgagtcaaccccaaattgaggaacattctacraaacacctgagtgctactcttcaaaagctctccaggtcatgaaagacaaggaacgactgtgaaactgtcatagactgaaggagactaatgagacatgatggctaaggctaaatgctatgtggaattcgggatgggctcttggaatggaagaaggacagtagtgggaaaactggggaaatctaaataagtctgtagtttggctaatagtattgtgggaatgtttttgttgttgttgttttgcttttttgagacagggtctcactctatcatccaggctggagtgcagtggctcactgcaatctccacctcccaggctcagaggatcctcccacctcagactcccgagtagctgggactgcatgcgtgcaccaccacaccagggtgtcaatgataatgtcttcattttgacaaatggatcatggttatgtaagtagttaacgttaggggaagctgggtgaagggtatgagaacctttctgtactacctttataactcttttgtaaatctaaaattatttcc

SEQ ID NO: 609097 - DNA, 594 bp, Homo sapiens
cacttgaacccgggagacagaggttgcagtgagctgagatcgtgccattgcactctaggctaggcgacagagtgaaaccccgtctcaaaaacaaaccaaaaaaaaaacaaaccccaaaaacyttctgttcatcaaaatgcaccattatgagaatgagaaggcaagcaatagagaaggtatttataaaacctatgtctgataaaggactcatatgtagactatgtaaagaattcttataaatcaataggaaagagatggaccacctattttttaaaatggacgaaagacttgaacaggcatttcactaaagaggatatctaaatagccaatatgtgtgtgaaaagatgctcaacatcattagttaacaaggaaatgcagattaaaaccaatgatataccaccgtacactcaccataaaaggggaaaaactgaccatatcaagtacagcaattgcatctctctgtacattcttgtataactggttcaacaatttttgaagaattttggtactatctattaaagtgagcttattgtcacattccagatgtcacaatgcattcgtatatgaacatgtgcaagaatattcatagcaacc

SEQ ID NO: 609098 - DNA, 534 bp, Homo sapiens
tggcgtgatctttgctcactgcagcctccgcctcctgggttcatgcgattctcctgcttcagcctcctgagtagctgggactacaggcgtccaccaccacgcctggctaatttttttctatttttaatagagatgaggtttcactatgttggccaggctggtcttgaactcctgacctcaggtgatctgcctgcctctgcctcccaaattgctgggattacaggccttagccaccgtgcttggtccagtcatgaatattttagaggcatgattactaaatcatttgaggcctgtgatgatgttatctttctccagaagagtttttgtctgcctctgttgggtacctagtagagaggggatcacttcaatcaattcgtgttcaaggcttgagatgtgtgtggtcccccaagtgattaaaagttttgctgcaggctaactggatgactmttttatttccagttcacccttactggtagggtgcagctctagagggtcccagttgaggttgatgactagagtccccacccttggcag

SEQ ID NO: 609099 - DNA, 383 bp, Homo sapiens
ttcactgactcaaatgtcagtcttttctggaaacacctgaacagacatacccagaaataatactttaccagctatctgggtatcccttagcccagtcaagttgacacctaaaattaaccatcacagtgttcttttatgactaaaaaaaaaaaataaaacttttatgaaatagaataaaagaaacttccaagccagaatttctcaaagaggacaaattctgtgagatatttattgggggtggctgaattaagaacactgtgatcaaataagtttggcaaacatgaaagtaaatgaagttgaatgttttctttactttagaacttccaggaccttctctgtgtatgtgcatggtaagtccycctcagtatatgctatggtacaaa

SEQ ID NO: 609100 - DNA, 543 bp, Homo sapiens
cctcatttccattctcctgttttgagagcctgcatttctcccaatgaagaggtaaactgtttcttctctgggaaagcagggggctgcctgacattgactttcatgctgcacccttttgtgcttattatcccgtaaaagggagtccctgtctcctgccactgaagtgtacctaacacctggattgttgtgagacgtgcacactttgcctaggtgaactgtgaatttttgcaaaaatgtatcactattataaagggccctgccctacactgttgttcatcacatgcaggatgtatagtaaatgtcagctmatggagtaatcattcgtctaagactttccagctccttttcttaagctggcaacacctgtgctaggtgcttttatgtgtgtttattttaaaagagaagaaggaggcttaaaggggagagcaaagaagctggcaagcaccagcttaagaaaaacgttagcaattaagatagtgggagaggctgggtgtggtggctgacacctgtaatcccagcgctttgggagggcagggcaggtgg

SEQ ID NO: 609101 - DNA, 634 bp, Homo sapiens
gggcccgtggcagctgctcatcacagccacctcctctggggcagcctggacaccaggctgttgccactgatggcaatgctaaatcttgcccccaaacactggctttttatttactttggttgaagggcaacaaaacattattgtgtggctggaatcaggcaaattacgagcactctgtacctacagttggcaacattccacccagcagaaggtcttgggtgagaaagcgggattcttcctgggagcaggtgtctgaggcgataagaagcccgyttatcaattggcttttcctgagtctctggtctgtatattcctgaaatggaggcagaagccacagtgaatgctctcattcagatccatggggctaacaagctcttccatgcagaaaattcctccctctgtcatcacccttttggcgttagggtcccttaaaaattcatggctgtgtttttccattttattgagtctcctttgaaggtggctgttagatttcctttctgcagagattgggtctcaggtaggggcaaggcctgtgctatgcaagctcttagtgccaatggctcaaacaagtggcctttgaaaagctttatcaatcttcctcctgacttgggcagagatcatccctcctgaacct

SEQ ID NO: 609102 - DNA, 634 bp, Homo sapiens
gggcccgtggcagctgctcatcacagccacctcctctggggcagcctggacaccaggctgttgccactgatggcaatgctaaatcttgcccccaaacactggctttttatttactttggttgaagggcaacaaaacattattgtgtggctggaatcaggcaaattacgagcactctgtacctacagttggcaacattccacccagcagaaggtcttgggtgagaaagcgggattcttcctgggagcaggtgtctgaggcgataagaagcccgtttatcaattggcttttcctgagtctctggtctgtatattcctgaaatggaggcagaagccacagtgaatgctctcattcagatccatggggctaacaagctcttccatgcagaaaattcctccctctgtcatcacccttttggcrttagggtcccttaaaaattcatggctgtgtttttccattttattgagtctcctttgaaggtggctgttagatttcctttctgcagagattgggtctcaggtaggggcaaggcctgtgctatgcaagctcttagtgccaatggctcaaacaagtggcctttgaaaagctttatcaatcttcctcctgacttgggcagagatcatccctcctgaacct

SEQ ID NO: 609103 - DNA, 503 bp, Homo sapiens
atgaaaaacaaaaaaagaactcagcttcaacattttgaacattcagctcgaggtcacaaaagaatccaaattctggaatttctgtgcaaagggagagaggaggagacagctttgcctccccagcaccagagtttctgaagagcttgtgactcagggtccccatggccagcagcctgaggagcaaagccacggatgctccagaaccaacagcctccttcatgaagtgccggaggcacgtgccagcatctcacacagagttcacgttcaccatgattctccagaygtataattttgtaacagaaaagagccccagtctgaccgtctcctttacgtgtgatatgacaagaacacacacaaagctcatgtctgcatcatccccccgcccccctttttttttttctttttaggcagagtatcgctctgttgccagggtggagtgcagtggcccaatctcagctcattgcaacctctgcctcccaagttcaagcaattcttgtgcctca

SEQ ID NO: 609104 - DNA, 518 bp, Homo sapiens
agggaatgtttcacccctgtattctatttttcattcatagaattaaaatrgaaatcctaaaaatgccccctgtggttttcacctggatgtgtattaaggagggttaatttttttgcttgcttaaccctgagaacacagcattgacttgaaagttactgtatggaaaagcattaaggaaacagccttcagttgccttccttccctggaccgtagagtggccggttttccctgatggtggcactgaatgaccaaagtgacaggcagcatctaggcagggctgtgcacagtcaccaccgctggatttcaaagttcctgaaccaagatcgtctgacctgttctccggctctttggcaggttctgtctccggcaggctttgaggatgaaggctgcgggcattctgaccctcattggctgcctggtcacaggcgccgagtccaaaatctacactcgttgcaaactggcaaaaatattctcgagggctggcctggacaattactggggcttcagccttggaaact

SEQ ID NO: 609105 - DNA, 607 bp, Homo sapiens
atgcctccacccaccggctggctgaggtcaaaggaacatggagtgcgcgtgtgtatctatgcctgtctgtattttccaccatattcttctttctctttctccctcttccttcccctcttattattgtagcatccaggttttgtcaattatcaaacactcaaacactacatacacacatccttacataaaataattcaatgaagtgaaaagaaagtcccatatcttcctctctgttagcaccatgggttaatggaatgaacactgaacttcggaatcagagacttggwttcaagttctagattcattcacttgctaactgtgtgatggaaattagtttaatctctgcagttgactcctctgtaaagtaagatacttaactcatggcattattcttaggattaaagaaacaaatgtgaatatgaacaaatgaacatagtttctgatgttcaataaatactcaacatacatttcattcctgtctggtttttccagtggcagaaaagataacacaccaaaaccttagcctgttcatcaggaaagcctagacttcagataaagaacaaatggaagacttgtttagaacactggctccagttttttttttttt

SEQ ID NO: 609106 - DNA, 619 bp, Homo sapiens
ggtttttggggagcaggtggtatttggttataagagtaagttctttagtggtgatttgtgaacaaatacatactattagatggagatacatgtggcatagacatagccataggtatagatacaggtataggtatatgtacaggctcaagtataggtrcatagataacggataacactagtcagccttgacttgctcataagtgaatccatgctggcttctgatgatcatccctttcctttcttggtattagtggcaagaaacccacacaagtcaatgtcaacttatggatttctagtttgtgaatcttccatctttaaattccattttcctctattgaatctggcactgtattgtcctacatctattctcctagcacctctcttgtcaaagtgtgaattatatgtcccacaagccctctctcatcccagaaaaacaattataaagttaatgctgggcaacaaaatgctattttttattttagatgattctcaagaataaatgagattattagaaaaagattatcctagtacactagccacagaacccatctccactcagcagcaaataaaatcacagcatagttctaagatatttaattaccctatagataatgctatg

SEQ ID NO: 609107 - DNA, 593 bp, Homo sapiens
cagggaattatacaccatttgaaaaacaactactagcatactatggcagagatgaagtgtctaactatgaagtatcaaatgaacatatcactagagctgtccctcatgagttcggcgctacaagacatacaaaatcatagaatcaggtaggcacaggaggagaccatcaggcttgagaaggtccctaaacagatgcccaagaatcccatttgactcatctctgctgcactgacactgtccatggtctcatggagtakaatggaaaggagtgagttccatacaaccagctaatagaggagaaaaaaaatgcctagttcttgaataaattaactcaatattggtgtgagccaaaaatagactgctgccccactataaccccaggagtgaccttattcttcacaatgggcagagctttcagtaatgtgccttattatccactttatatggagagaaaagtggctcatagtaagggtatatatagacatctgttttgtggaaaatggcctggctcgttggtcagggacatataaggagtaaagataaaaattcagggacaagaaggtatgaagaaaaagcacacagaagggcctata

SEQ ID NO: 609108 - DNA, 481 bp, Homo sapiens
ggtgccatctctcaaggatgccaaccagccactttttttgcaggtagatcacactgagctcctttcaccttagaaaaggcagagatgcatcctcaagaggattgatatgtattccaggtataggttggtctttcctgcctatrgtacctcagttagtatcactatccaagtgcttatactgattagccaatataggattacatataataatgtcttagaccaagaaacccatttccagccagtgaggttcaacgctgggcacatgatcacaggattcctatgttataccacatccaggagttaccagctatatacaacatagactatccattgaaaatgtaggccgggcacagtggctcgtgcctgtaatcccagcactttgagaggctgaggcgggtggatcacctgatccaggagttcaagaccagcctgggcaacatggttaaaccccgtctctactaaaaatacaaaaaaattagct

SEQ ID NO: 609109 - DNA, 657 bp, Homo sapiens
tgttctcattgttcaattcccacctatgagtaagaacatgcagtgtttggttttctgtccttgcgatagtttgctcagaatgatagtttccagcttcatccatgtccctacaaaggacatgaactcatcttttttatggctgcatagtattccatggtgtatacgtgtcacacttcgcctctgtccacctgtctttttaaaaaacattacataatggaatcataccacacatattccagtgtgcatggctttattcacttatgattatgattatgtttggaaggttcatgtgtggggttgtgtatagcaatacttcattcatttttattactgtatagtattctgtggtatgagtatagcacaatttattcagtgtagtgccaaggattggtgccatttttagctattatagacartgttgctatgacttttctgatacatgctttcaggttcaaatatataccttccgttgcatatatacctaagagtgaaattgctaggctataaggcatgttcaactttagtaaaatactgccaaatagttttgaaaattagttttaccagtttatgcttccacagtgtatgcaggttctactttccattttcttcaaatcttcatcaacacttgattttgtcagtctctttacttttttctgt

SEQ ID NO: 609110 - DNA, 463 bp, Homo sapiens
actctctctctctctctctcctgctgccacatgaagatgtgtgtgctttccctttaccattttgccatgattgyaaatttcctgagtctttctcagccatgccttctgtacagcctgtggaactgtgagtcaattaaacctcttttgtttataaattactacagtctcaggtagtcctttatagcagtgtgagaatgaactagtacactcaacatcactaatcattagggaaattcaaatcaaaactacaatgagacaccacatcacaccaattaggatagctactatcaaaagaatatagaaaattacatgtgaggatgtggagtaattggaacccctgtgcactggtggtggaaatgtaaaatggtacatccatgtattagtctgctcccacactgctataaagatactacctgagactgggtactttataaaggaaaaaggtttaattgattcacagttc

SEQ ID NO: 609111 - DNA, 576 bp, Homo sapiens
agtgtcaccactgaaccctgcacaggtcttatgtccatgttagtggagtgggctaggcgcagtggctcacacctgtaatcccagcactttgggaggccaaggtaggaggatcacttgagcccaggagttcaagacaagcctgggaaacatagcaakaccccatctctacaaaaaacaatttttttaattagctgggcatgatggcgtatgcttctggtcccggctacttgggaagctgaagtgggagaatctcttgagcccaggaagtcaaggctgcagtgagccatgatcatgcactgtactccggcctgggcaatacagcaagactttgtctcaaaaaaaataaaataaaatgacaccagaagttagtggagctggatgaagactccaggtgaaaacctacagtattaggtccggggttaccctctggatttggtgcagatcattggtcctcaactggaagaggaggagattttgctcccctgcccctacccccgggaacatctggcaatgtctagagatgtttcaggttgtcacaattgttggggagacgctactggtatctggtgagttgag

SEQ ID NO: 609112 - DNA, 576 bp, Homo sapiens
agtgtcaccactgaaccctgcacaggtcttatgtccatgttagtggagtgggctaggcgcagtggctcacacctgtaatcccagcactttgggaggccaaggtaggaggatcacttgagcccaggagttcaagacaagcctgggaaacatagcaataccccatctctacaaaaaacaatttttttaattagctgggcatgatggcgtatgcttctggtcccggctacttgggaagctgaagtgggagaatctcttgagcccaggaagtcaaggctgcagtgagccatgatcaygcactgtactccggcctgggcaatacagcaagactttgtctcaaaaaaaataaaataaaatgacaccagaagttagtggagctggatgaagactccaggtgaaaacctacagtattaggtccggggttaccctctggatttggtgcagatcattggtcctcaactggaagaggaggagattttgctcccctgcccctacccccgggaacatctggcaatgtctagagatgtttcaggttgtcacaattgttggggagacgctactggtatctggtgagttgag

SEQ ID NO: 609113 - DNA, 576 bp, Homo sapiens
agtgtcaccactgaaccctgcacaggtcttatgtccatgttagtggagtgggctaggcgcagtggctcacacctgtaatcccagcactttgggaggccaaggtaggaggatcacttgagcccaggagttcaagacaagcctgggaaacatagcaataccccatctctacaaaaaacaatttttttaattagctgggcatgatggcgtatgcttctggtcccggctacttgggaagctgaagtgggagaatctcttgagcccaggaagtcaaggctgcagtgagccatgatcatgcactgtactccggcctgggcaatacagcaagactttgtctcaaaaaaaataaaataaaatgacaccagaagttagtggagctggatgaagactccaggtgaaaacctacagtattaggtccggggttaccctctggatttggtgcagatcattggtcctcaactggaagaggaggagattttgctcccctgcccctaccccygggaacatctggcaatgtctagagatgtttcaggttgtcacaattgttggggagacgctactggtatctggtgagttgag

SEQ ID NO: 609114 - DNA, 524 bp, Homo sapiens
ggtacatttttttaaaaaggcttaatttttttagaatagtttcaggttgatagcaaaattgagaaggtacagagattactcagctatcccctcaccctgcacatgcattgcctcccccattaataacacccttcatcagagtgctacattacaagtgataaactcacattaactcatcattattacccaaagttcatggcttacatgaggggtcactcttggcattatacattctatgggtttgcacaaatgtataataagatgtatccagcattatagtatcatagagtagtttcactgacctctgcattttgcctgttgatcctttcccccttcctgctgctaattcatggcaaccattgatctttttactgtttccagagtcttgccttttccagaatagcgtatagtcatacagtatgtactctttccagatggacttctttaacttagtcatatgcacttaagtttcccccatatcttttatggcttgayagctcatttccttttagcactgaattgta

SEQ ID NO: 609115 - DNA, 584 bp, Homo sapiens
acaggagtgagccaccacacccggccttaaatggctattgtaaatgaaaatgcattcttgatttggctcacagcttgaacattattggtgtactaataatgctactaatttttgcacactggttttgtatctgaaactctactgaagtcgtttataagttccaggagccttttggcagagtctttagtgttttctaaatatagagtcatatcatcagtgaagagagaaagtctgacttcttttcctatttggattccttttgtttctttctcttgcttgattgctatggctaacacttccaagtactatgttgaattggagttgtgagagtgggcattcatgtcttattccagttcttgatggaaatgcttccagtttctgcccattcagtataatattggctgtgggtttgttatagatggctcttattattttgaggtatgtttctttctttctttctttyttttttttttactttaatttctgggatacaagtgcagaatgtgtaggtttgttacataggtgtatgtgtgccatgatggtttgctgcacctatcaacccgtcatctaggttttaagcccca

SEQ ID NO: 609116 - DNA, 585 bp, Homo sapiens
ggaaatgtggggttggataccccacagagtccccactagggcattgcatagtggagctgtgagaaggccaccaccttccagacctcagaataatatatccaccaayggattgtaccctgtgcctggaaaaactgcaggcactcaacaacagtccatgagagcagctgggagggtggctgaatgctgcaaagccacaaggacagagcttcccaaggtcttgggagatcacccctcataccagtgtgccttggatgtgagacatggagttaaagaagattattttggagctttaagatttaatgactgtcctgctgggttttggacttgcatggggcctgaagccactttcttttggctgatttctccctttgggaatgggaacatttaccaaatgcttatactcctgttgtatcatggaagtaactaacttgtttttttattttacaggctcataggcagaagggaatggcttttctcagatgagactttggacttttgagttaatgctgaaatgagttaagactttggggtactgttgggaaggcatgattatattttgaaatgtgagaagaaaagatattcggg

SEQ ID NO: 609117 - DNA, 318 bp, Homo sapiens
ctgaacagcttgtgaatgtaaagggaaaaagtatcttgggcatcggttttactctgaactgaacctggcacggagttgctcagtgggagtaacctaaaagattsggtaataacaatagtgctattaaagctcacttttagagtctaatgtctaggcaataatgacaagctttagggataacaacaacaacaaaaaaaacaacaaaccccagaaaagccaaactttccaaacccataagatagtttaatgttagctaggcttttgacaaagttcttttcatttctaagttgcagagagaagataatgaagttgaataaa

SEQ ID NO: 609118 - DNA, 494 bp, Homo sapiens
cagcatgccattatgaggcaacatactgagtagagtcatatgtcacatgcccctaattgtaaatcctaattccaccttytttatttttgtttttaaaatagcacaaccttgtgatcttggacaagttaccctttaaacttcagtttttttcatctgtaaaggaggaacaaaaatagcatctattttatggggttgttgtgaggattaaatgaggtaggttcacaataaggcacttatagctcagggcaaatgctcagtgaatttgagctactgagtgcactaaaaagaacagggtcaagtgcatcatagacatcaagccaatgacatggggacaaggaatttataaaggagatttggttaagtgaatctcaagcagagcaaggtgatgtggctgaatgaccaagtaaagagatgggattttcttgttatgaaaatggcgtctctcaggtttttccagtaactatgactagattttttaaaagtggataattcac

SEQ ID NO: 609119 - DNA, 526 bp, Homo sapiens
gaccatgggggtaaaccccactgtgatgattttgggaggcaagtggaggaaagagattgaggatatggatcttactgtttatatcatcgacctttatttaattctcctatttgtattgaaatcccaaacctcagtaaagagtcacattcatttaacttcttcagagagctaatcactggtcttatgcaggagtgtaggagtgtcctagtgatgtttctttaaagatgttatcatgactttttcttgctcattcctcttcaatggctccttaatgctaattgggtaaaattcaacttactaagcataaccttgagctggtttctgatcatccttccaccttctctctcaacacacttttcccctcctcatctcgctattgtcattttctctgtctctgctgtacgttccaggtacactgggcttgttttaattgcctgcctgacccttgctctttcagacttaygaaccttctcaaatgttatatcctctgccaatgaccgatattttgacctctgttttacatggc

SEQ ID NO: 609120 - DNA, 551 bp, Homo sapiens
aggaacccagctgcaaactaaatgacctaataaggtctttttcatctgtagtatctctgattataggcctgtcatttttattcccattccagaatagatttattactttctgaagacttaaaaacaaacaaacctcattcggttgtttatgaggccagaagtgttgaatttagataagttcaggtttaatgacacatttgacctaccacattcagtctccctagaaacttagtcacaatgtctgaacgtgtaacattaacaactaaccctctgtgaagaaaaacccctatatggacacttgcagtgcaactttgaaatgactacatgttctgggagtctagtaagtactctacctttggaatagccactttcaccctaacaggccaaagaatttgcaaatatatcccagaagagaatatttcacgtaattttaaaatataagagttcatgtttgtgtgccttgcccagtcatgcccaaagcaaagatrggaagggaagagtgaagtggggaggtgatagtatatctgccattcctatgacagtcagatact

SEQ ID NO: 609121 - DNA, 463 bp, Homo sapiens
ctccccgcaccaatccagggccttagttgagaagtcactattgcagccactgaagctgaggctgaatcttgacatctctgagtcaccctttcttaaaagcaatatcttaagaagttttttcctacaatacttctcagctagcctttaatactgggcaatatccaagtcaaataagaaccctcacttctctctttgttcaatcactcccaaggtgagttctccactcttagagaatcttgcaggtaaaatgttggcttgagcctgaggtataatagcttatttttactagcattttgtttgttcaaytggtttggcatttgggaagagagattctacagtcctttttaaagccattaacttcacactagaattaaaatacatttctaaaggggaaggaaaaaacatctgcctaatgtttagataatgcagtagcttggaagatgcaaactggggcaattagtgc

SEQ ID NO: 609122 - DNA, 549 bp, Homo sapiens
aattaacagaacttgtacatctatggaaatggttaacaaatgaggggaagcgtgaaagacaaccactataaaacatggctctttccttatgagcctactctgaaacaaatggagcaaaggagtaaaagagttaaaaaaatctctgggcagaattctctttgaactgtttctgtgacatctcatattccagaggacacccttaggtggagttaacttaggcttgaagctagttagacctagcatctaactagttctggtcccttactaataaaagcatccagtattttttaaatccgccaataatattcactctctcataataaagatggataggaataattttactcacattcatttttatctaacattcaatgaaatcttcaaccaatcagtgctatccttaacttrcactgaaaatatcactattgaaggtgactcttgtatacagaaaattttattctgcatcctccccctgccaccaaagctaactaaaacaatgagtgacccaggcttctcacagtcattttgtgtccttgacactgctcctgc

SEQ ID NO: 609123 - DNA, 549 bp, Homo sapiens
agtcggtggagtagcagagcgtaggggataaggtcatgggttctgggatctgacagacctgcatttatatcttggccctgacatttaatgctttggcaagttacttaacttttcttagccttagttatactctttgtagaattggaataatatcaaccaatgtgggcaattgttatgaaaatcaaatgagaaaatggacatgaagtccttagctttttttgtgcttaacacagagtgagtactcaatagatggtaattttaaaaagaggggttgtggaatcagagcatgctggtggttagttgttaacagccttgagctactacttctggaagattgtgtttatatgtatttgatgcttattcagaggaaatttaatggtactgtgagtaggaggtgatcattctttcaaaaagagtggaggtgaacatgtacactttactgcaacctgcctctgatagtgtgaccaatgacaggtaacttaacctcagagcttcaatttctttrcctataaagggattcaagttatgtagtcagcacatgtttattga

SEQ ID NO: 609124 - DNA, 584 bp, Homo sapiens
cttcattaggcttatagaggtatgaatttagaaaagaattaaagaattcacaacatcccagggtttctgtgtccaaactactctgcggacaatgaacttggggaagaaatagaaaaaaaatcgtatcagaaagcaaaactaaattataaggtactcaagagaggaaagcttatagcttttaatgaacactttataaggaacattgaagaaaggtgtaaaaacaaccaagagaatgaaaatgggatacagaggaagtgtaaacagtcaagagagagwcattgaaaaggaaggtaggcaaagcagattgaacattcattttaccaattcatgaaaaagaaattttttaaaggaaacaaactaatatttaagatgataatataacatatctttctataaataaaggaatgcctgaatctacaaactgaaagacctaccaaatacaggggaaaattaaccagaattatcaactgtcagacatgttcttataaaattattagaccttaaagatcaagataaatatcctcaggggcctccaggcaaaaaggcaaaataaaaggtaaaaaaaaaaaaatagattgtcctca

SEQ ID NO: 609125 - DNA, 433 bp, Homo sapiens
aagcattataataatatcaaaaaatgtgaatatgcttaagttatctattaataaaaatgatttaaaagttgktatacaaaacaaaacctaactctatgctatatataagagatacacttaaaatgaataattcaaagaggctaagagtaaagaggtaggaaaaaaatgtaccaagtaaaagaaagcagaggacacagtgctgttaccaaagtagacttcaagccaaaaagcattcaatgagacaaagaaggacattttataatattaaaagccacattgtactgtgaacgaaaaattgtctgagacaagtctcaaccaatttagtttattttgccaaggttaaggatgcacccgtgactcagcctcaggaggtcctgacatgtgcccaaggtcactggggtacagcttggttttatacattttagggagacat

SEQ ID NO: 609126 - DNA, 604 bp, Homo sapiens
acatgtttattgaatggtaatatgtgccaggcattgtgctaggctttagagataaaatgttgagcaaaccagatgtgatctctaccttcatggagttcataactagtaggggaaatgagcacaatcacatagtcataaaagtacaataaatgctgataagtggaaaatgccagcatgagtgccctgaagggaaggtagtgcagatgttattaaagtatgtcaaagaaggatccagatctggcctatgagacccatgagaggtgggtcttttctaaagaaagagaatttaactaccgtgtactatgagtatgctctagatgacttgtatagtctgttccagctatgacatattgctgcagttccacacacatgacagaattatggcatcctctgaagttatgctcacttctgttatcttaaccaaaccctacactgcattgccctacctcwctcctttccttcctatggggctgcttgaaagaaccatctatacttgcaccatttcccacggcttagctgttcttcagcccactgaaatctgttttcccccttcctttcagtgtaagcagccatccccaaaataaccaaggatcttatggttgat

SEQ ID NO: 609127 - DNA, 613 bp, Homo sapiens
ttaggaaaagtttttttaaaaaagatattacgaacaactttatgctaaaaaaaaaaagagaacttcgataaaacagataaatccctcgaataaattcaacttataaaaatgtacacaagacaaaaagaaaatttgactagccatatatcaactttaaaaaagtaatccaaaatttaaaatcttcccacaaaaaaaaaaaaactccaagcccaaaaggccataccagtgaattaatctgagtatttttaaaaacgatagcaaaagaggagggaaaaaaaattacctcaagttctagagacattttgttggaaagtctgttagtcaacccatgtcttaactaccacaggtaacctattccaaagcaccctatwccaaagctctctcccctagtgttgggaacctgctctttccatccacagctcaaggcaggagacaacaagcattttgtctgtatggcaggaacaagagaacacaaataccttgcagacaatgaccagagtggcacacactgaaagagttgcagcttctaggagctcagcaggaagcccagcagctcatgctaagtttgtgttccagcagtcaacatgggaggagaacataggtcagaaaacaa

SEQ ID NO: 609128 - DNA, 613 bp, Homo sapiens
ttaggaaaagtttttttaaaaaagatattacgaacaactttatgctaaaaaaaaaaagagaacttcgataaaacagataaatccctcgaataaattcaacttataaaaatgtacacaagacaaaaagaaaatttgactagccatatatcaactttaaaaaagtaatccaaaatttaaaatcttcccacaaaaaaaaaaaaactccaagcccaaaaggccataccagtgaattaatctgagtatttttaaaaacgatagcaaaagaggagggaaaaaaaattacctcaagttctagagacattttgttggaaagtctgttagtcaacccatgtcttaactaccacaggtaacctattccaaagcaccctattccaaagctctctcccctagtgttgggaacctgctctttccatccacagctcaaggcaggagacaacaagcattttgtctgtatggcaggaacaagagaacacaaataccttgcagacaatgaccagagtggcacacactgaaagagttgcagcttctrggagctcagcaggaagcccagcagctcatgctaagtttgtgttccagcagtcaacatgggaggagaacataggtcagaaaacaa

SEQ ID NO: 609129 - DNA, 484 bp, Homo sapiens
tacaacattttccatacaagatcagtgcatatgccacagaaatttaattggttaaaattgctacattccaaggcagattactctataactccctgaagaggggtagtgatctgagtcagtgtgttagctccagcactgtttggtcttaattatttagagaaaaaagaaaagaaaaaggcagaagttgcagctgcaagccacatgacttagatggcatagccaccttcctctcaaggctcaggaaaatttaaagctcccaccaggtgcagtggcaaatgcttgtaatctcagtactttgggaggccaaggtgggaggatcacttgagctcgagagtttgagaccagcctgggcaacatggtgaaaccctgtatctactaaaaatacaaaaattatctgggtgtggtggcacgygcctgtaatcccagctactcgcttgaactcaggaggcggagattgcagtgagctgaaatcgtgccactacac

SEQ ID NO: 609130 - DNA, 642 bp, Homo sapiens
cagtaaatccaaaatgatacttccacaaatgtacctcaactgtcagaataaaagaaactgtgagaataaatgggaaaggctgctgaaaaatacaaatgacctaaaagagtaaattaattgtcatcattactatttattttttactgtctatctaatcccatggccagaaggtatatttctaactgtcatctgtaatgacaaaaggaaagtgcrcagaagcatgtgcctggatcagcatggcccgacaacctctgcaggatgagttgctgtgtgtgcaggtcctgcagcagatggaacagcaagtgtgcacatctgtattattcaggtgatgtgtggatacagaagaaggagaacggaaatgacttttagaaccagtcttgttttctgcttgtgttattttatacaggactacttaatgtctcattttcaaaattgtctgaatatgcatgtctttgatgcaagcaagacacagggctcctaaataaaagaagaaataggaatataagtaaacagtaatgagctgtttttctttcttgtttaaaatatattattctactctggcagcatagagaagccctaagggagcattaagtagaattttaaaaagcacttcctctgactcagtccatactagcttcgcga

SEQ ID NO: 609131 - DNA, 544 bp, Homo sapiens
atcacatagtcataaaagcctagcacaatgcctggcacatattaccattcaataaacatgtgctgactatataacttgaatgtctttataggtaaataaatcgaagctctgaggttacctgtcattggtcacactgctcttctgtctgtggagtgacacttyatctatcaccactaaagtcagaaatgcaaacaactgaccatttccttaaacttatcatatttctcatttggggactttgcacttactgataactttagttagaacagttttcccctccacagccctttctacttatcttcaatacttgttctggtgtcatctttgaagccactgaaagttccattttggggtagatgcctgtagtaagcagatttcttttcttttcttttcttttttttttttcttttttttttttgagacagagtcttactcttttgcccaggctggagtgccgtggtgcaatctcggcatactgcaagctctgcctcccaggctcatgccattctcctgcctcagcctcctgagtagctgggactacagg

SEQ ID NO: 609132 - DNA, 521 bp, Homo sapiens
atgggagctgtgcttggactgctgacccatggaaataatgagctagtaagagtatgttgtcttaagctgcaagttggtggtaatttgttacacagccatggaaaactaatccagcacccstcctgggagttccttgaactctgttgatctccatcatatccctgtccccactgacttgagaatatgctgacttacctgttctctgccccagactctgagctcattgagtacaggggaaatttctttttttctttatatccagtacctggcagtgttttacacaacactggtacagaaaaattgtttgtggaatgaatgaataaaatgactcatgaggaaccaaacacatatatggttggaagagataaatctgcgttttccgtggaaattctttgaaaaaaaaaaaggttctgaaatggtgtttctcaggtttcctgccaataagaaatgaatattttctgtggttatgtacatggtactctctacctccaagctttaattaagataaaagttttgaaatg

SEQ ID NO: 609133 - DNA, 557 bp, Homo sapiens
aaaaattttccaaaatcattttggaggcaattwgaaaagaattgctaagatttgaatctgaagaataattggtgaacaaaccaatgtaatgacaactgatactgaagagaaaccagatgaaaagatttaaagagggaattccttcagaacttggggacagatttcacggaaatataaagaaagcacgtagaaacatagtctaccaacgtaatgtctttcagtagcaaaatttaatgacaataaagcagggttgtgatacttgacagattttatgcctcacattatgcaatttaacattttttggttttttacatgtaggcatttgtttacgcatgcatttggagaacttgactgtgatggagcattagacaatgtgacttgcatgttgacattatcgcaatagcatgggttttatattagcatatctttgatcatgaaaagaagaattttgctcatttttattgacttatggctcaaagagatggttctaaataggcagtgctcatatgtttttattgattttcatgaataaatgcaaacttacagaaataaaaaat

SEQ ID NO: 609134 - DNA, 557 bp, Homo sapiens
aaaaattttccaaaatcattttggaggcaattagaaaagaattgctaagatttgaatctgaagaataattggtgaacaaaccaatgtaatgacaactgatactgaagagaaaccagatgaaaagatttaaagagggaattccttcagaacttggggacagatttcacggaaatataaagaaagcacgtagaaacatagtctaccaacgtaatgtctttcagtagcaaaatttaatgacaataaagcagggttgtgatacttgacagattttatgcctcacattatgcaatttaacattttttggttttttacatgtaggcatttgtttacrcatgcatttggagaacttgactgtgatggagcattagacaatgtgacttgcatgttgacattatcgcaatagcatgggttttatattagcatatctttgatcatgaaaagaagaattttgctcatttttattgacttatggctcaaagagatggttctaaataggcagtgctcatatgtttttattgattttcatgaataaatgcaaacttacagaaataaaaaat

SEQ ID NO: 609135 - DNA, 557 bp, Homo sapiens
aaaaattttccaaaatcattttggaggcaattagaaaagaattgctaagatttgaatctgaagaataattggtgaacaaaccaatgtaatgacaactgatactgaagagaaaccagatgaaaagatttaaagagggaattccttcagaacttggggacagatttcacggaaatataaagaaagcacgtagaaacatagtctaccaacgtaatgtctttcagtagcaaaatttaatgacaataaagcagggttgtgatacttgacagattttatgcctcacattatgcaatttaacattttttggttttttacatgtaggcatttgtttacgcatgcatttggagaacttgactgtgatggagcattagacaatgtgacttgcatgttgayattatcgcaatagcatgggttttatattagcatatctttgatcatgaaaagaagaattttgctcatttttattgacttatggctcaaagagatggttctaaataggcagtgctcatatgtttttattgattttcatgaataaatgcaaacttacagaaataaaaaat

SEQ ID NO: 609136 - DNA, 470 bp, Homo sapiens
tgtagtgttctgtgattttaagaaacttttgggtaaacctttgtacccagaaaggtaaacaattggtaaacaaatggggaaagactctttagttaggcctgtcccccatcagcatcggtttacttttctcacatttcagatcaagttcaacagttctcaggaaactcagcagtctttactgcargaaaagctgcgggagcatctggcagagaaggagaagctgaacgaggagaggctagagcaagaggagaagctcaaagccaaaatcaggcaactgacggaagagaaggcggtaaggtggtccctgccatttgctttactactggaaactgatgaaatggccttttctatgggaaattgagggcatgtacttagacagagaaatctcagctactctgtttggtgccatgaaactaaattaattaaacagggtgaataattggggaggatttaacatgaagtttgaattc

SEQ ID NO: 609137 - DNA, 553 bp, Homo sapiens
ctctctctctctctttcccctcctctgtctcccaattgtcttggcagaaataatgctttccaggtaagagctaaattcaaaggtttgcttcctagaatagaactcatccctattttcccagggctcatggttctccttctgtagcccagagagaagatgagctcagacacacacaatgaggaaaaggacagaatgcttccaaaatcagagctccagcagacagcacttcctagaacttcagctgggtttcattgaaaaggagggctctccactcaggatcctaatctycaagctgcagtctgtctacagctgctcagggatcctatgcattccccctaaggctctttcttggagtcagtgaggagtgttctgggaaatctggcaccaaactccgatcacctggtgatacatggtttggctgtgccccacccaaatctcatcttgaactgtagttcccaaaatccccttaggacggactgggagggacctggtgggaggtaatggaatcatgggggcagttacctccatgctgctctcgtgataatgagtgact

SEQ ID NO: 609138 - DNA, 549 bp, Homo sapiens
tctctctctctctttcccctcctctgtctcccaattgtcttggcagaaataatgctttccaggtaagagctaaattcaaaggtttgcttcctagaatagaactcatccctattttcccagggctcatggttctccttctgtagcccagagagaagatgagctcagacacacacaatgaggaaaaggacagaatgcttccaaaatcagagctccagcagacagcacttcctagaacttcagctgggtttcattgaaaaggagggctctccactcaggatcctaatctccaagctgcagtctgtctacagctgctcagggatcctatgcattccccctaaggctctttcttgsagtcagtgaggagtgttctgggaaatctggcaccaaactccgatcacctggtgatacatggtttggctgtgccccacccaaatctcatcttgaactgtagttcccaaaatccccttaggacggactgggagggacctggtgggaggtaatggaatcatgggggcagttacctccatgctgctctcgtgataatgagtg

SEQ ID NO: 609139 - DNA, 632 bp, Homo sapiens
atttaagattcatttattttggatgcatgtttatagcatctttattcataattgccaaaaactggaagcaaccaaaatgttcttcagaaggtaaatggataaacaaactggtagaaacatcagtcaatgataaaaagaaatgagctctcaagccacaaaaagatacagaggaactttaaatgcayattgcttagtgaaaaaagctaatctaaaagggctacatattgtatgatttcaactacatgaaacttttaaaaagataaaactatagaaagatttgtggttgccaggggtcaggggaaggtggggggctgtgttgaacaggtaagcacaggggatctttagggcagtgaaactattctgtatgattctatattggtgaatacctgacattatgcctatgtcaaaacccacagaactttataacgtgaagaatgaatcctaatgtaaactctgggcttgagttaataataacatatgaatattgattcatcaattgcaacaaatgtatcatagtaacgaagatgttaataataggggaaactgcgtgtgtatgtgtgagtgttgtgggggaggggttgttatatgtgggaactctctgtactatctgttcaactttctgtgaacctaaa

SEQ ID NO: 609140 - DNA, 557 bp, Homo sapiens
tggactgatggagaaaaagcacttggcaaaattcaacactctttccatgatgaaaacacaaaaaaatactaggaatagaagaaaactacatcaacataataaaggccatatgtgaaaagctcatagctaacataattctcagtggtgaaagactaagacttttcctctaagaccaggaatgagataaagatgcccaccctcaycacttctatttgaaatagtactggaagtcctagtcagagcagttagacaagaaaaagaagtgaaaggcattcaatatatcccagaaataaaatgacctgtattgttggacaacatgatttttatatgtagaaagccctaaagatcacacacacacacacacacacacacacacatatatacatataacactgaattcataataaatgatacaaaatcatttattttgtactcaggatacaaaatcagcatgcaaaaatcagtggtatttctatacactaacaataaacaagctgaaaagtaaaataagaaagccattccatttacaatagcatcaaaaagaagaaaatattaga

SEQ ID NO: 609141 - DNA, 557 bp, Homo sapiens
tggactgatggagaaaaagcacttggcaaaattcaacactctttccatgatgaaaacacaaaaaaatactaggaatagaagaaaactacatcaacataataaaggccatatgtgaaaagctcatagctaacataattctcagtggtgaaagactaagacttttcctctaagaccaggaatgagataaagatgcccaccctcaccacttctatttgaaatagtactggaagtcctagtcagagcagttagacaagaaaaagaagtgaaaggcattcaatatatcccagaaataaaatgacctgtattgttggacaacatgatttttatatgtagaaagccctaaagatyacacacacacacacacacacacacacacatatatacatataacactgaattcataataaatgatacaaaatcatttattttgtactcaggatacaaaatcagcatgcaaaaatcagtggtatttctatacactaacaataaacaagctgaaaagtaaaataagaaagccattccatttacaatagcatcaaaaagaagaaaatattaga

SEQ ID NO: 609142 - DNA, 624 bp, Homo sapiens
tgaggatgtggggagactggagcccttatgcactgttgctgggaaagcaaaattgtgcagccactgtggaaaacagtatggcagttcctcaaaaaattaaaaatagaactgtcatctgatctggcggttctgcttctcttctgggtatggatctgaaagaactgaaagcaggggcttgaagagatatcggtggtggctcacmcctgtaattacagcactttaggaggccgaggcgggcggatcacctgaggtcaggagtttgagaccagcctggccaacatggtgaaacccagtctctattaaaaatacaaaaaaattagccgggcgtggtggtacatgcctatagtcccagctgctcaggaggctgaggcaggagaatcacttgaacccgggtggcagaggttggcagtgagccgagattgtgccactgcactccagcctgggcaacagagcgagactctgactccattaaaaaaaaaaaaaagagagacagagatatctggacactcatgtttatagcagcattattcacagcagccaaaagctggaagcaacccaagtgtccattgacagatgaatggatcaacaaaatgtaggacagacatgcagcagccactattcagc

SEQ ID NO: 609143 - DNA, 624 bp, Homo sapiens
tgaggatgtggggagactggagcccttatgcactgttgctgggaaagcaaaattgtgcagccactgtggaaaacagtatggcagttcctcaaaaaattaaaaatagaactgtcatctgatctggcggttctgcttctcttctgggtatggatctgaaagaactgaaagcaggggcttgaagagatatcggtggtggctcacacctgtaattacagcactttaggaggccgaggcgggcggatcacctgaggtcaggagtttgagaccagcctggccaacatggtgaaacccagtctctattaaaaatacaaaaaaattagccgggcgtggtggtacatgcctatagtcccagctgctcaggaggctgaggcaggagaatcacttgaacccgggtggcagaggttggcagtgagccgagattgtgccactgcactccagcctgggcaacagagcgagactctgactccattaaaaaaaaaaaaaaragagacagagatatctggacactcatgtttatagcagcattattcacagcagccaaaagctggaagcaacccaagtgtccattgacagatgaatggatcaacaaaatgtaggacagacatgcagcagccactattcagc

SEQ ID NO: 609144 - DNA, 593 bp, Homo sapiens
ttatcagaatatgtgaatgatgtcagaatattataatatcaataagcaaaaaaggcagctttgcaaatgaatatattaataaatctttacaagcatagctccctactctttaggatttatccaagtaaataaaacaatcttctttctttgctaggtgtaaatgctgggtaatttcacagctgacttttttaagattcctgaactttatttagtggaatgacttctagcagcacaaataagacaaatgataaattgactgttgaattattactcrgggtggcttctagctgatccagcatgattctcaggttaatcagaaaggcccagtgaaggcaaaagaggggcaattttcaccttatcttgtcttataaaatattttctgaaaaatatggacatgcctgtagctttcagttcttcaaaacagacctgtgtcccccacatcccttcttaaagcaaatctctcccaaatccatttaagctttcggaagaggatttgtctaagagaagatataaaagcccattaaaagtctattcacaaagcatttggcaattcatgtatcatctgttctctcgggagccagtgtaagctcatg

SEQ ID NO: 609145 - DNA, 593 bp, Homo sapiens
ttatcagaatatgtgaatgatgtcagaatattataatatcaataagcaaaaaaggcagctttgcaaatgaatatattaataaatctttacaagcatagctccctactctttaggatttatccaagtaaataaaacaatcttctttctttgctaggtgtaaatgctgggtaatttcacagctgacttttttaagattcctgaactttatttagtggaatgacttctagcagcacaaataagacaaatgataaattgactgttgaattattactcggggtggcttctagctgatccagcatgattctcaggttaatcagaaaggcccagtgaaggcaaaagaggggcaattttcaccttatcttgtcttataaaatattttctgaaaaatatggacaygcctgtagctttcagttcttcaaaacagacctgtgtcccccacatcccttcttaaagcaaatctctcccaaatccatttaagctttcggaagaggatttgtctaagagaagatataaaagcccattaaaagtctattcacaaagcatttggcaattcatgtatcatctgttctctcgggagccagtgtaagctcatg

SEQ ID NO: 609146 - DNA, 593 bp, Homo sapiens
ttatcagaatatgtgaatgatgtcagaatattataatatcaataagcaaaaaaggcagctttgcaaatgaatatattaataaatctttacaagcatagctccctactctttaggatttatccaagtaaataaaacaatcttctttctttgctaggtgtaaatgctgggtaatttcacagctgacttttttaagattcctgaactttatttagtggaatgacttctagcagcacaaataagacaaatgataaattgactgttgaattattactcggggtggcttctagctgatccagcatgattctcaggttaatcagaaaggcccagtgaaggcaaaagaggggcaattttcaccttatcttgtcttataaaatattttctgaaaaatatggacatgcctrtagctttcagttcttcaaaacagacctgtgtcccccacatcccttcttaaagcaaatctctcccaaatccatttaagctttcggaagaggatttgtctaagagaagatataaaagcccattaaaagtctattcacaaagcatttggcaattcatgtatcatctgttctctcgggagccagtgtaagctcatg

SEQ ID NO: 609147 - DNA, 593 bp, Homo sapiens
ttatcagaatatgtgaatgatgtcagaatattataatatcaataagcaaaaaaggcagctttgcaaatgaatatattaataaatctttacaagcatagctccctactctttaggatttatccaagtaaataaaacaatcttctttctttgctaggtgtaaatgctgggtaatttcacagctgacttttttaagattcctgaactttatttagtggaatgacttctagcagcacaaataagacaaatgataaattgactgttgaattattactcggggtggcttctagctgatccagcatgattctcaggttaatcagaaaggcccagtgaaggcaaaagaggggcaattttcaccttatcttgtcttataaaatattttctgaaaaatatggacatgcctgtagctttcagttcttcaaaacagacctgtgtcccccacatcccttcttaaagcaaatctctcccaaatccatttaagctttsggaagaggatttgtctaagagaagatataaaagcccattaaaagtctattcacaaagcatttggcaattcatgtatcatctgttctctcgggagccagtgtaagctcatg

SEQ ID NO: 609148 - DNA, 352 bp, Homo sapiens
ttgccctgtgcagtcactttcctacctgaaaacactgtagaaagtgattagatgcgttaaactctgtaaattagttctaagacacagggcaccgaccatgcaaaagagcaaaagagcttcaggcatctgcactccctgcttataggtcacaagtgagatagagaagcaaaatttctrttgaggggttaccagatcttaagtggcctgggagccctagaaattcctcagtgttgtatttgggaagggagaggttaggcaaggggggagtctctctgaccgccgggtgggtgtcgttcgtaagtcaggggcagcagggatgcccctcctaatcccagctgtaacccccaggact

SEQ ID NO: 609149 - DNA, 620 bp, Homo sapiens
gaggtgatgggaatttaaatcattaaaaatacttaactaggaggccattgggctaagatggctccagtgccttgggttccgacataagcaaaccaaatcccaattygatgtaaacaataaagcaaaatctaagcttaaccaattagaaaccaccaaataacctttagctagaaatctgaccaatcagaaaccaccaactgacctctaactagggacttttcacattggctaatcaaatgttttctctgtcttgcttccaagaatacttgatgtttcctctctcacacacttcccacacctcatggagtgctgaaccacttgaggtctgatgatgctcaattcatgaattgctgaatgcttaaattcattaaaattttaatatgactaaatgtatcttttaacacaattatggttggtggtagtagaaaaaaatagaaaagaaaaaaatggaaaaaaagaaaaaacaagaaaagaagccaggcatggtggctcctgcctataataattccaattcttcagaaggacaagacgggaggatttcttgaagccaggagtttgagaccagcctgggcaacacagtgagatcccgtctctacaaaaaatttaaaaaaaattaaaaa

SEQ ID NO: 609150 - DNA, 620 bp, Homo sapiens
gaggtgatgggaatttaaatcattaaaaatacttaactaggaggccattgggctaagatggctccagtgccttgggttccgacataagcaaaccaaatcccaatttgatgtaaacaataaarcaaaatctaagcttaaccaattagaaaccaccaaataacctttagctagaaatctgaccaatcagaaaccaccaactgacctctaactagggacttttcacattggctaatcaaatgttttctctgtcttgcttccaagaatacttgatgtttcctctctcacacacttcccacacctcatggagtgctgaaccacttgaggtctgatgatgctcaattcatgaattgctgaatgcttaaattcattaaaattttaatatgactaaatgtatcttttaacacaattatggttggtggtagtagaaaaaaatagaaaagaaaaaaatggaaaaaaagaaaaaacaagaaaagaagccaggcatggtggctcctgcctataataattccaattcttcagaaggacaagacgggaggatttcttgaagccaggagtttgagaccagcctgggcaacacagtgagatcccgtctctacaaaaaatttaaaaaaaattaaaaa

SEQ ID NO: 609151 - DNA, 487 bp, Homo sapiens
atatttgtccctgcccaaatctcatattgaattgtgatccccagtgttggaggtgggcctggtgggaggtgtwtgggtcatgggggcagatccctcgtggctcagtgctgccctcgagatagtgagtccacatgagagctggttgaagtgtgtggcacctcccctggtccacctgttctctctcttgctaccacttcaccttccaccatgagtaaaagctccttgaggcctccccagaagctgagcagatcccagtaccatatttcctgtacagcctgcagaaccataagccaattaaacctctgtatagattacccagtctcaggtttttttgtatttttttttgagatggagtctcactctgttgcccaggctggagtgcaatggtgcgatctcagctcacggcaacctccacctcccaggttcaagcgattctcctgcctcagcttcctgagtagctaggattacaggcacatgccaccatgcc

SEQ ID NO: 609152 - DNA, 425 bp, Homo sapiens
taactacagaaccaattttctttcccatattacctgttacccaccccacagaactagtgtttggttaaacatccttcgggaagactattcctgcttgattaatcctttgatcctctctttcagttggtttttcttccttttataatccaaatatgggtttttccaaggttccctcaycagtctctctcccagtccctgctccatccttgagagatctcattcactcccaaggcttccactgtcacccatttggaatattcccaaactaattatccatgaagcgccattttcatttctccgtctgctagctgtccatttctgatcgggtagatagcttactgtcccctcaaatttgatatgtttaaaactgaacttatttcttaacaacagatatctttcctgacttatttatttctgctgaattc

SEQ ID NO: 609153 - DNA, 554 bp, Homo sapiens
agcccttcatgtgttttttttttttagacagttctcgtatctcctctgaagttctcttttcctccaccaagtaacataatcctcatttctttcagtagtttgtcactcaacctcctctggggtcttgcgcaattccttatgcatagtaggccttcagtgaatgtttgagttgacagattcctgacatcaattatgttctgagttccactgagattctactgacaactgtcttctactccgattccgctctctagaatgtggaaatagcagtgattctgaggatgttttcatgctgataacatctatacctgattgatgttaaaccattctcttgacctcacgtttcctcctggaatggttgactggtcctcccttcctttctcttttgcgtttgcrtcaattcccagagaagaatgtttaagagaaaaaggtgtgtttgtgtaaatgaatctaaaatgaaagatctaggaaagaagcctaagctttgggggaacatacaagtcctttcatctttcctagttgatggaaaaaactagaaattgtagttgtagtta

SEQ ID NO: 609154 - DNA, 554 bp, Homo sapiens
agcccttcatgtgttttttttttttagacagttctcgtatctcctctgaagttctcttttcctccaccaagtaacataatcctcatttctttcagtagtttgtcactcaacctcctctggggtcttgcgcaattccttatgcatagtaggccttcagtgaatgtttgagttgacagattcctgacatcaattatgttctgagttccactgagattctactgacaactgtcttctactccgattccgctctctagaatgtggaaatagcagtgattctgaggatgttttcatgctgataacatctatacctgattgatgttaaaccattctcttgacctcacgtttcctcctggaatggttgactggtcctcccttcctttctcttttgcgtttgcatcaattcccagagaagaatgtttaagagaaaaaggtgtgtttgtgtaaatgaatctaaaatgaaagatctaggaaagaagcctaagctttgggggaacatacaagtcctttcatctttcctagtygatggaaaaaactagaaattgtagttgtagtta

SEQ ID NO: 609155 - DNA, 449 bp, Homo sapiens
tttgattgcagagtgttatgattttagtacagaggtttcatggagccacctgcagcctgcacatcagagatgtggccaatactgtggtcatctctcctagtgactgagctatacccctgggtatcatggagaatgatgacagcacttcactcccagttggtcattggaaatgcctctggcacctgccacccctggatccctgtggtggccagtagagcaaacattctctaaaatgasatgtaattagccttttcactaataacagatttcctgccttcctgtggtgagtatttttggtctagccattcatgaagctgcatgctcttttatatctctctactgatgaattatccagcctgttttctccagaagggatgtttttctttgacactcagacatctggtcctttgcatttgggaagtataaatgtcattgcatgcctgcatttt

SEQ ID NO: 609156 - DNA, 597 bp, Homo sapiens
tcttctttggaatcatcctgccttattcatatccctcttgaaacaggacaggactggactctaccaaaaagactaactacccaagctttttcccaaaggcactgttggttaacagacatgttgcagaagaatctgtgtgaagccctcaactgctctgacttgggtgcccccagaggctaaattaggtcacaccagctgcataatattaaatggggcaggggcggccggagcaacgctgtgagaagctgacaytcctcaaagcatgaattggaagccaaagtggtagtttttgttttgccttttgaaaatacatctttctatttccctctgtcatttaactaacagctcctctaactttccacccgctcaaaaggcaaaagagacggagggaaggagtcacatcaaggaccaattttccttaagcaaaattcttccttgttagccattctgcaaaaattcattagctgaattaaccattctccacggacctcatctttattcctctcttctttcccctccccgcttctttttaacctttcagcacagaattaagtctttgtgatattcagcacatcaatgaactcacccagccaggcg

SEQ ID NO: 609157 - DNA, 271 bp, Homo sapiens
gcgtggagcgggactggtgcargctgtgtgtgtggaacagtaagttattggctatcaccacagcatggatgctttggagagtgcagtacacaataatattggagagttgggtttaaaacttggacttggccatgctaacaacagtgtactggttaggagcatggactctggagccagactacgcgagtttaaatcctgctgtgccacttactagctgtgtaatcttaggtaccttaggtaatttactaaaacctgtgcctcagcttatctg

SEQ ID NO: 609158 - DNA, 271 bp, Homo sapiens
gcgtggagcgggactggtgcaggctgtgtgtgtggaacagtaagttattggctatcaccacagcatggatgctttggagagtgcagtacacaataatattggagagttgggtttaaaacttggacttggccatgctaacaacagtgtactggttaggagcatggactctggagccagactacgcgagtttaaatcctgctgtgccacttactagctgtgtaatcttargtaccttaggtaatttactaaaacctgtgcctcagcttatctg

SEQ ID NO: 609159 - DNA, 271 bp, Homo sapiens
gcgtggagcgggactggtgcaggctgtgtgtgtggaacagtaagttattggctatcaccacagcatggatgctttggagagtgcagtacacaataatattggagagttgggtttaaaacttggacttggccatgctaacaacagtgtactggttaggagcatggactctggagccagactacgcgagtttaaatcctgctgtgccacttactagctgtgtaatcttaggtaccttargtaatttactaaaacctgtgcctcagcttatctg

SEQ ID NO: 609160 - DNA, 634 bp, Homo sapiens
attttctcattcatcccgaactctggtgagctcagytacaatacagaataataaattaatgtcagtcacacccatgaggactcttttaatgttacccattgcaaaaataccttggacaaattccgtcctttgctttaataggatgagtcctgtggttaactcagatttcatttggaaaaagagctgtctctgccctcgagcaactcggactaatcttgtgtgtccttcattagtacttttaccacatgcctgttttcaccctggagctccctagaatttatgcgtactctgtctctgatgtggcctgtgaacactaccttaatttgcagcacctgcttttgttattaggcaaaagtgcctgagagcttcttttggtctgtttgtttgtatgacagctttttgaaattagcaagaacgtttcttgtcccctgcccccagtctgggtttctgctcagaagttgtctgttcatgctgaatgtaggaatggtagtttgtggagacagcccagaagatgtttatatcgtcaaggatttgggtggaagataaaaatgggaagagggtaaatattttagagcacataaaccaatctgtttcttttagcacagctctttgattcatcaggctaatcatttaa

SEQ ID NO: 609161 - DNA, 634 bp, Homo sapiens
attttctcattcatcccgaactctggtgagctcagctacaatacagaataataaattaatgtcagtcacacccatgaggactcttttaatgttacccattgcaaaaataccttggacaaattccgtcctttgctttaataggatgagtcctgtggttaactcagatttcatttggaaaaagagctgtctctgccctcgagcaactcggactaatcttgtgtgtccttcattagtacttttaccacatgcctgttttcaccctggagctccctagaatttatgcgtactctgtctctgatgtggcctgtgaacactaccttaatttgcagcacctgcttttgttattaggcaaaagtgcctgagagcttcttttggtctgtttgtttgtatgacagctttttgaaattagcaagaacgtttcttgtcccctgcccccagtctgggtttctgctcagaagttgtctgttcatgctgaatgtaggaatggtagtttgtggagacagcccagaagatgtttatatcgtcaagratttgggtggaagataaaaatgggaagagggtaaatattttagagcacataaaccaatctgtttcttttagcacagctctttgattcatcaggctaatcatttaa

SEQ ID NO: 609162 - DNA, 334 bp, Homo sapiens
caatgtagggcagcgaatgttgaggtcttgtaggtacctctctggaaaccttgcccttgaagttctagcttgccttggagatctctgaaatgccttcaaggtcattgtcctatagtcttgatgagtagaacctggcttccttctatccatatgaatctctttagcaaacgtctcttggccacacccttagtattctctgctgaacaaacttttttattctttacrtggtcaggctgatatttttccaaatctttccattctgctttcgttttaattataaattccatttttatatcatttctctcttccttcattttactgtaagtatctaaaa

SEQ ID NO: 609163 - DNA, 596 bp, Homo sapiens
gaaataaaagaaactcatttcctcacagttggaggctgggaagtccaaaatcaaggcgctggcaggttaggtgtctggtacagactcattcatctagatgtcctcacgtggtgcaagggacagaagggtaaaagggacccaagctgggttccttccagcccttttataaggcactaatctattcatgaaggtggagcccccttaatttaatcatttctcaaaaggccccacgtcttaataccaccacaatggagattcagtttcaacacctgaattttggggcacacattcagaccatagcagggggtagggacagacacaaggaaaaaaaaatgggagggattgcagttaagccaggtgagagataagggtgacttgggctggagtgatagctgggtggtgagaaatggttaaatatttttaaaatagaacraacaggtttgctgacaaatttgatgtggaatatgagaggaagccccccccccccacaaattctacagggcttttggcttatgtaataaacaatgagaatttggagttctcatcaacttagatggagaagacagtgtgtgggtagttttttaagtgagggagtg

SEQ ID NO: 609164 - DNA, 532 bp, Homo sapiens
attctaggttaaagggcgtttatgttttcctttgtccagtcataaagwtttcttactgaatgatgactgtaagatgcttgcattctccttcatgtctttttttccttagctggtccccaacccaccacactttcacatacatccctgagaaagaggcctttggccctcatgtgtcacctaaggtgatgtgcttcaactaacatcaagaaaatatcatgtgataagcaaggtgacctctgtggaccactagcacagtcctcaggagaacagacagctgcagttggagctgacttcaggttgatagatttctgtctcctgtccatctttgaacaaccgacaacatggttccatctgttgtccagaaaaaaaaaaaaaaagcgttttctacaatctaatgaaaccatgtcaggtttcaagtcttgcactgaacccaagaacttcctgatatgggaatcaaactgagtgttccttctggttatatactcatcatttttttgtttcctcgttacttagcttttatagtacctgggct

SEQ ID NO: 609165 - DNA, 532 bp, Homo sapiens
attctaggttaaagggcgtttatgttttcctttgtccagtcataaagatttcttactgaatgatgactgtaagatgcttgcattctccttcatgtctttttttccttagctggtccccaacccaccacactttcacatacatccctgagaaagaggcctttggccctcatgtgtcacctaaggtgatgtgcttcaactaacrtcaagaaaatatcatgtgataagcaaggtgacctctgtggaccactagcacagtcctcaggagaacagacagctgcagttggagctgacttcaggttgatagatttctgtctcctgtccatctttgaacaaccgacaacatggttccatctgttgtccagaaaaaaaaaaaaaaagcgttttctacaatctaatgaaaccatgtcaggtttcaagtcttgcactgaacccaagaacttcctgatatgggaatcaaactgagtgttccttctggttatatactcatcatttttttgtttcctcgttacttagcttttatagtacctgggct

SEQ ID NO: 609166 - DNA, 421 bp, Homo sapiens
ctctattctgaactatcatttcgaagatgtttgtgtagtaaacagtcttggaagtagagcagaggataggtgtgtttagtgtccattataataaaaataatgcctttctctggggtaaataaagattgggcagattttattgcagtccattataaaagatttgagttcccttagtttgggttcctcaactgtgacacaaacccactatgtttgttgcattcatctgggctgtttcacatcagcccctgtgaggagagggcaacaaagggagtggacataaacatggagctcaygctgcctgctgtgctgtgagtaatacagtcctttgtctctgatccaggagtctcctatcttttgccagcgtccacaaaattgtgatagtataacttgttacattgcaaatagagtaaaatatcaaacc

SEQ ID NO: 609167 - DNA, 551 bp, Homo sapiens
atgcttagtgcagcaccaatgactcctgctcagaagcctaaggaagagaaatgccttatgaggacaataacctgattttatttcacttgggaacaaggcttttgagtctcttgttgcttctcacagttaaygtaatgtatttatcagatgctgcgaagcgattacttcatctgctccagtcatcagaggcaaataagattaccatgtgagacagcagagaaaggaacttgttttttctaaccacattaaagtcacacagcctatgttgtttacatgaacaaaacacataagaaacaaataaaaaaatcagaaatttgattaaatttcagatgaaccatgttatgaatacggaaacacatacatttacttgaaatccatatcattgtcatcaaaacaggacacaaatgtattgacttgactgccagaggctggaagtaagtgataagagctggaatgtgttgctcagagtggttaacaaggaaatagaaacaatccagtagcaagcaagagaaggacacaatcttcctgagggcaaaagccattgctaactt

SEQ ID NO: 609168 - DNA, 440 bp, Homo sapiens
ccaggctggtctcaaactcctgacctcaagtgatctaccacctcaacctcccaaagttctggaattacaggtgtgagccaccatgcctagccctgggctctgagttttgaagcagctactttgcttaatatctggcttattaactcattctcacttygacgtgttccatcgtggactggatgctacccattaattgtccaacttcagggaacatcagtagacacgtgtttgggcctcatctctgaagtttttgattgattaaatcatggcagggggatggcgggggatgggagtaggggcctgagtgtctgcatttttcagaagctttccaggtggttctagtagatgcaaaagctgagaaatactattgtagaaggatacaaatacacaggtgtggcctttagagatgcttccaaccctgagtttccttataggttgat

SEQ ID NO: 609169 - DNA, 560 bp, Homo sapiens
atacattatagtagaattatttaccagtaagaaggattttctactgggctatttcaaatagagtctctagcacattctacatataagttgattaaaaaatataaggtgttaaaaaatacaagattgacatacagttttttgaaacacatctaactggggaaagtagccaggatgtctcagacctcttatattttcccagaaaagaagttgtttgagacctaaagtgttggtactttaatattttgggatctgggaaaactaactttaagtttgcattattattattaatagggaggtaccagtacagttgagttagacaaacatctaatgggagatttattggatgaagtgaaattatggaggtctctgaggtctttgagcgtcgctattygaaagtgtttaaactttattctgaaagcaggggaagccatcgaagcagggggtgacctgatgagattttcacctgagaaagatcacctagcgggaatggatgaattagaggaagggaagggcagtgtggagattggaatcccagccagtagcttatttcagcagtctga

SEQ ID NO: 609170 - DNA, 560 bp, Homo sapiens
atacattatagtagaattatttaccagtaagaaggattttctactgggctatttcaaatagagtctctagcacattctacatataagttgattaaaaaatataaggtgttaaaaaatacaagattgacatacagttttttgaaacacatctaactggggaaagtagccaggatgtctcagacctcttatattttcccagaaaagaagttgtttgagacctaaagtgttggtactttaatattttgggatctgggaaaactaactttaagtttgcattattattattaatagggaggtaccagtacagttgagttagacaaacatctaatgggagatttattggatgaagtgaaattatggaggtctctgaggtctttgagcgtcgctattcgaaagtgtttaaactttattctgaaagcaggggaagccatcgaagcagggggtgacctgatgagattttcacctgagaaagatcacctagcrggaatggatgaattagaggaagggaagggcagtgtggagattggaatcccagccagtagcttatttcagcagtctga

SEQ ID NO: 609171 - DNA, 605 bp, Homo sapiens
gtggcgtgcattaaattaatagaatgctacatgagctgatttaagaggctttgtataataagttgatcagctgcattggtacgactccctccactgttggcactttggatgtttgctttgtgttttgactgttgtctttgggactgtaaattactcaggaaagctcatcagagtaaatccacatctaattttcatcaagatttttattttattcagctttactgtttggctaattgaggcgtacagaggccaagtgccttggccaaggttatcgagcatgttartatcttagctcagacgagttttctttcagtccctgttgattcctgcattatatattcatcagtctggtaattaacatccagtcatccttgttgctctccttatgaactggctgtgtttaagggttctccacaccagtgggatttatgggaagtctgcatgtccaggcattattttttatctgaaaacgagaaacatatagagatcaattatgataatctcctgcatggcagatgcagctctcgagggatttgttaccccatgacagcaaaatcaagccaggggctgctcggctcaccacttggacgcttgagcggagtgga

SEQ ID NO: 609172 - DNA, 605 bp, Homo sapiens
gtggcgtgcattaaattaatagaatgctacatgagctgatttaagaggctttgtataataagttgatcagctgcattggtacgactccctccactgttggcactttggatgtttgctttgtgttttgactgttgtctttgggactgtaaattactcaggaaagctcatcagagtaaatccacatctaattttcatcaagatttttattttattcagctttactgtttggctaattgaggcgtacagaggccaagtgccttggccaaggttatcgagcatgttaatatcttagctcagacgagttttctttcagtccctgttgattcctgcattatatattcatcagtstggtaattaacatccagtcatccttgttgctctccttatgaactggctgtgtttaagggttctccacaccagtgggatttatgggaagtctgcatgtccaggcattattttttatctgaaaacgagaaacatatagagatcaattatgataatctcctgcatggcagatgcagctctcgagggatttgttaccccatgacagcaaaatcaagccaggggctgctcggctcaccacttggacgcttgagcggagtgga

SEQ ID NO: 609173 - DNA, 605 bp, Homo sapiens
gtggcgtgcattaaattaatagaatgctacatgagctgatttaagaggctttgtataataagttgatcagctgcattggtacgactccctccactgttggcactttggatgtttgctttgtgttttgactgttgtctttgggactgtaaattactcaggaaagctcatcagagtaaatccacatctaattttcatcaagatttttattttattcagctttactgtttggctaattgaggcgtacagaggccaagtgccttggccaaggttatcgagcatgttaatatcttagctcagacgagttttctttcagtccctgttgattcctgcattatatattcatcagtctggtaattaacatccagtcatccttgttgctctccttatgaactggctgtgtttaagggtyctccacaccagtgggatttatgggaagtctgcatgtccaggcattattttttatctgaaaacgagaaacatatagagatcaattatgataatctcctgcatggcagatgcagctctcgagggatttgttaccccatgacagcaaaatcaagccaggggctgctcggctcaccacttggacgcttgagcggagtgga

SEQ ID NO: 609174 - DNA, 595 bp, Homo sapiens
tacctgcttctccattgtgtgtgtgtgtgttttctctttctagaaagatgtgttctgatctcttgattgacataaggtttgttgaagaactgaggttatagatccaatgatttcagacttatgtaaaacactatagtttctcaggcatctgctatccccaccccacaatgctaaaagtaaaacacctgcagcagctggagaaaattggttctggactttcagtttctaatgacctacccctggggagaaacaaacagctctcttggcagttactacagacatcgccacctcagtttgccccagggcaaaagttacactgctggaaaagtgtcaggtgaaaacaggttttataattaaggacaaaaaaataaaggaaacttggtgaatctttcttataaaccastgctgctcagaatatataatttgacagatttaactctaccttcagtgggtggtgctgcaatgtttaattagtttttactctcacgtgaagtgctttgattgtataggactccagagcaatgcatatttatcattacgcctcattgttaccatctgcagagcagtcagtaaccatcagcagatgggcaattga

SEQ ID NO: 609175 - DNA, 595 bp, Homo sapiens
tacctgcttctccattgtgtgtgtgtgtgttttctctttctagaaagatgtgttctgatctcttgattgacataaggtttgttgaagaactgaggttatagatccaatgatttcagacttatgtaaaacactatagtttctcaggcatctgctatccccaccccacaatgctaaaagtaaaacacctgcagcagctggagaaaattggttctggactttcagtttctaatgacctacccctggggagaaacaaacagctctcttggcagttactacagacatcgccacctcagtttgccccagggcaaaagttacactgctggaaaagtgtcaggtgaaaacaggttttataattaaggacaaaaaaataaaggaaacttggtgaatctttcttataaaccagtgctgctcagaatatataatttgacagatttaactctaccttcagtgggtggtgctgcaatgtttaattagtttttactctsacgtgaagtgctttgattgtataggactccagagcaatgcatatttatcattacgcctcattgttaccatctgcagagcagtcagtaaccatcagcagatgggcaattga

SEQ ID NO: 609176 - DNA, 492 bp, Homo sapiens
catgggtaattaaaaaaaaatgcaactgcaattggtttttgtttaaaataagaacaatttattttccccttacagttacatttatgattatattgcaggtgttaaaagaaaaactttagaaaaattaaatttagtagagtttaattgagcaaagaatgattcacgaatcaggcagtgtcctgagccagaataggtttggtgtcaccttgtgctggcttgtggttgaaaaagatttatggacagaaaaaggaaagtgatatacagaagacagaatgagatacagaaacagctggcttagttacagctccacgtttgccttatttgtacacagtctgaacagttagctgcctttgattggtccaaacttggtgattggcacaagcataggtgacagtctgtgtacgcatccagttagattacagttcactatgtatggagaaacctttaggctgamcttaaaatatgtaagaaaccagctttaggctaaaccta

SEQ ID NO: 609177 - DNA, 524 bp, Homo sapiens
ttataaaaatgaactgaatagaaattctggagttgaaaaataaataattgaaataaaaatttactataagggctcaacagcagatttcagcaagcagacaaaagaatcagtaaattttaagacaggtccattgagattatccactctaggtaatagaaataaagagaattaaaaaaaataagcagagactcagagataatcaagcctaaaaacatgcataaatgtagtctcagacgtcaaggataaagagaaagggggaaaaaattaaaaataatgactgaaaactttccaaattggaaggaaaatgttatactatatatccaagaagctcaacgaactccaagtatgataaagtcaaagagatctacaactagatacatcayaataaaactgttgaaggacaaagaaagaatcttgaaacctgaaagaaagaaactactcatcaggtcaatggattctcaataaaaataacaaataatttctcatcagaaaccatggaagccagaagcaatggaattatatac

SEQ ID NO: 609178 - DNA, 529 bp, Homo sapiens
gcaaatcagctggcagaggtgacatgaaactttgctcactaaatgttaatggctgatagtggatcattggctattttgataggaagaggaagtaagagaatgggaggccctgggatgaggtggttttccagagaaggaaaggaagcatattaaatgataagaaaagaaacagctcacggttattgagtatttatgtgccaggctctgttccaagtgctttacgtgaattaactctttcaatttcgcagcaccctgcctgaggtaggtactattactaatctcattttacagataaggaaacaaagtcatggagaggtttggtaacttgcccaaggacatagcagaatggccaagagttgatttctggcatttctagcccaagagtccacacttttggccacagagtgaaagaaaattgtctcagagaaaaaatgacccaggagacaaacttccctacatasacaatgtcgccaaaagtcagcctgttcacttctgagtattagggataaggagaagaggtgttttatgg

SEQ ID NO: 609179 - DNA, 623 bp, Homo sapiens
tatgatgatagctgctggacattgcggtatggtggtgaagaatactggctctgactttagactgcctgggtgctgccaccccccagtatgtggtcttagatggatgacctaacttctctgtgcctcagtgtccttttttgtaaacagggatagcaattgtacctatagggtatgaaacaacacccagtccagtagacattacccacttctgtaatttatttttatttgtacatrcaatgcagcaagcacattacttacatccctttatgccttccagcaaaaatagggaaagcttcatttccccattttatagactgagaacctgaaatgcagagactataaatcattagaaccaggacttgaattgaggttagtcattttacgaaggctgtgatcattcaacttcattacagtgattccccagaccaaaagagaagtttcctttcatgcagccctagacatactggacctgcaacatcatctttactctgggttgtcacattttatgaaggacaaactagaatgtatgaaacagatgatcaagttgatgaaaggtctggaaacccttttaaatgaggtttgactgaaggaactagggatgattacatgggtgaaaaaataaa

SEQ ID NO: 609180 - DNA, 417 bp, Homo sapiens
acttgtgcaccactgaaaattgctctttttcaacatttaaaaaatgacattcttaaaatttgctatgaaaggtaaaaaggaaatctatcttgtagcatactacagataacacaaaaaaatctgtgtttaacgacaagtgtatgtgtgaatgctgacattttatttctagcatttgtagacacagaaaacctatacacagaaaaaatacacctgcaaatctgtaggggggcttttgcccacttttgtcttttggttaatatttagtagtcaggtccttgagcaaattcccaactccattaagtaaaatgaaaatctatatatcggaaagacatcttttctacttctatagccctagccgtcactkatgtttaagttaaaatcttttccataatttttatttgaaaatacatgtttatg

SEQ ID NO: 609181 - DNA, 603 bp, Homo sapiens
tgcaaacactcaacaataccaggcagacaataactactggggggctgtgagcttaatgaagattctggtagttccacagtgttgagagacattgaaattctgacttgtcaaaatgaagggaattcagtgaatatgcagagcattcagttgagacccaagaaaggccaagctttaagagtagagctaccctaacactagagtcatggyaactctagaactgacttactaagctcaggaccaggatcaagctgccaataaattaactgcccgccagaacaagattcaacactctttcaattaaaagagcataatctagactcttagcagtgtagcacgcacaatatacagcacacaatcaatttgatagatgaagaagcagaaaatgtgaccataacttgagaaaatagtcaatagaaatagatatgaagctgataaaaatgttggactcatcaaacaaggactttaaaatagctatttaaaatgtgcttaaggatttatggaaaaagatgaacatactgagtgaacaaatggtgagtatcacagaaaaatgaaatatatgaagaatcaaaatgaaattccagatctgactatatctgaaataaa

SEQ ID NO: 609182 - DNA, 440 bp, Homo sapiens
ttttttttttgtcatatggtgatttaattatttatttgtttaattttagaccttgtgaccagctaccaacttgaagaatggataagagtttacttaagggtgggggcactatcagacttgttctacaggtgaattatggcaaatatttcttgtatattactctcatgctgtaggtgagtagttctcaactggggttgatctgcgcctcaggcagcattgccagttaaatacattacactgtaaggggaagtacaaattaaaaagtaaggggcttaatcactcyctacgaaaaataaggaaagaggttgctcccccacatcctttgccttagagcatttacatttaggacacttgtaatgataagttatctctctctgttcctctctctctctctcagaaatgtatgtaaatcttatttatttatttttgagatggagttt

SEQ ID NO: 609183 - DNA, 440 bp, Homo sapiens
ttttttttttgtcatatggtgatttaattatttatttgtttaattttagaccttgtgaccagctaccaacttgaagaatggataagagtttacttaagggtgggggcactatcagacttgttctacaggtgaattatggcaaatatttcttgtatattactctcatgctgtaggtgagtagttctcaactggggttgatctgcgcctcaggcagcattgccagttaaatacattacactgtaaggggaagtacaaattaaaaagtaaggggcttaatcactccctacgaaaaataaggaaagaggttgctcccccacatcctttgccttagagcatttacatttaggacacttgtaatgataagttmtctctctctgttcctctctctctctctcagaaatgtatgtaaatcttatttatttatttttgagatggagttt

SEQ ID NO: 609184 - DNA, 605 bp, Homo sapiens
aacccactgccttgagggaaaagacacaatcctgccaggattcattacctgctgactaaagaggccttgattcttgaataaacatcagtacttgcctagctatactcactgtgggctttgggtgaggcccagagccctgctgacttcaggtgtgacccagcacatttccagttgtgggggacatagcaagggattcctactgcttgaggaaaggagtagaaagagcaaagggacactgtcttgaagcttaggcaccagctctgccacagtggagtagagcacaaagtgggcttctggggtcactgattctagtccttgactcctgaatgacatttctggacccacgctggtcctcaaagaagcccactgctctgaaggtagagacccaagcctggtggcatttaccagaagctcactgaagtgcccatgagccttgagtgaacatcagcagtagccaggcagtatttgctgtrggcctggggcagtgatggacacaaggacagacaacttcagcatgagaaaagcagaggaggcagtgagaaggactttgtcttgtggcattgggtgccagctcagccacagtagaatagagcactgagcagatt

SEQ ID NO: 609185 - DNA, 581 bp, Homo sapiens
aaggcaacagacgaataggaaaaataatgtgcaagatttagtaaataaatataggaaaactaaaatggccaggcacagttgctcactcctgtaatctcaatgttttgggagggcaagctgggcggatcacttgaggtcaggagttygagactaggctgtccaacatggtgaaaccctgtctctacaaaaaattagcggacttggtggtgcatgcctataatcccagtgaatctggaggctgaggcatgagaatcacttgaaccaggaggcgggggttgtagtgagccgagattgcgccactccactccaccatgggtgacaaagtgagactctccctgaaaaaaagaaaagaaaagaaaagaaaatgcccctagacacattttagtatttacataatgtaaattatttaacacaacagtactgattaaactgtaataacaacgataaataatattgactggcttttgataagtataattctcaaatatgatcagaattagaatatattgctaaagaactttaggaaggtgttaattgaaaattctaattgtgagaattcagtgtccacaagagacatgttc

SEQ ID NO: 609186 - DNA, 581 bp, Homo sapiens
aaggcaacagacgaataggaaaaataatgtgcaagatttagtaaataaatataggaaaactaaaatggccaggcacagttgctcactcctgtaatctcaatgttttgggagggcaagctgggcggatcacttgaggtcaggagtttgagactaggctgtccaacatggtgaaaccctgtctctacaaaaaattagcggacttggtggtgcatgcctataatcccagtgaatmtggaggctgaggcatgagaatcacttgaaccaggaggcgggggttgtagtgagccgagattgcgccactccactccaccatgggtgacaaagtgagactctccctgaaaaaaagaaaagaaaagaaaagaaaatgcccctagacacattttagtatttacataatgtaaattatttaacacaacagtactgattaaactgtaataacaacgataaataatattgactggcttttgataagtataattctcaaatatgatcagaattagaatatattgctaaagaactttaggaaggtgttaattgaaaattctaattgtgagaattcagtgtccacaagagacatgttc

SEQ ID NO: 609187 - DNA, 602 bp, Homo sapiens
tttttaagcaaatttgtaatttttgaaggcttattatgyttttccccaaatttgaatatctaggaaatctctgcgacctaacaattgatggtacactatactttagttggcagcttttttttttctttcttgtaggtatggaaaataatgacccatcttactagtgatgatatgttatattctatgatttatggtaaccagaagaaagtaccacgtgtctcagaagaaaaggcttctggaacttcttagaccttcattattaaaatagcctacacatccatctccctttagctatggacaaactagatcacacttcttcagctttgttctcagtgctttttgtttgttttttgtttttttaaatggagagagcttagtccttaatgccagagtagaagtgcctgttaaactctgctgtttacaagctctgagctctttgagtaattatttaaattcttggaactttggtttctaggccataattttttccttgcaaaggtgtttccataaccagggataatacatgtaaagcatttactactataactatctcttatctccacccttctaccttcctccaagtaaccagcacagccctttac

SEQ ID NO: 609188 - DNA, 602 bp, Homo sapiens
tttttaagcaaatttgtaatttttgaaggcttattatgtttttccccaaatttgaatatctaggaaatctctgcgacctaacaattgatggtacactatactttagttggcagcttttttttttctttcttgtaggtatggaaaataatgacccatcttacyagtgatgatatgttatattctatgatttatggtaaccagaagaaagtaccacgtgtctcagaagaaaaggcttctggaacttcttagaccttcattattaaaatagcctacacatccatctccctttagctatggacaaactagatcacacttcttcagctttgttctcagtgctttttgtttgttttttgtttttttaaatggagagagcttagtccttaatgccagagtagaagtgcctgttaaactctgctgtttacaagctctgagctctttgagtaattatttaaattcttggaactttggtttctaggccataattttttccttgcaaaggtgtttccataaccagggataatacatgtaaagcatttactactataactatctcttatctccacccttctaccttcctccaagtaaccagcacagccctttac

SEQ ID NO: 609189 - DNA, 602 bp, Homo sapiens
tttttaagcaaatttgtaatttttgaaggcttattatgtttttccccaaatttgaatatctaggaaatctctgcgacctaacaattgatggtacactatactttagttggcagcttttttttttctttcttgtaggtatggaaaataatgacccatcttactagtgatgatatgttatattctatgatttatggtaaccagaagaaagtaccacgtgtytcagaagaaaaggcttctggaacttcttagaccttcattattaaaatagcctacacatccatctccctttagctatggacaaactagatcacacttcttcagctttgttctcagtgctttttgtttgttttttgtttttttaaatggagagagcttagtccttaatgccagagtagaagtgcctgttaaactctgctgtttacaagctctgagctctttgagtaattatttaaattcttggaactttggtttctaggccataattttttccttgcaaaggtgtttccataaccagggataatacatgtaaagcatttactactataactatctcttatctccacccttctaccttcctccaagtaaccagcacagccctttac

SEQ ID NO: 609190 - DNA, 601 bp, Homo sapiens
gcctgggtatcaccagcaaaggctgcagaacagcaaagattgctgcctgctccttcccctggaagcttcttcccagagggacacttgcctgatgccagccagagctcttctgtatgaagcgtctattgacccctgctgggatgtctcttagtcaggaggcatgggagtcaggttcccacttaaggagatagtctgtcccttargagagctcaagctctgtgtttggagaatcctccttgttaggatctgctgctgtcttcatatctggcaggcagaagagtttaagtccactgaagctgcacccacagccactctttcctccagttgctctgtcccagagagttggaagttttatctataagcccctgactggggctgctccctttctttcagagatggcctgcccagtgaggaagaatctagagaggcagtctggccacaacctccttgctgtgctatggcgagttccacccagtcctaacttcccagcccccttagcactgtcaggggaaaatcgcctacccaagcctcagtaatggtggacacccctccccctactaagcttgatcatcccaggtcgacttcagactactgtgcttgc

SEQ ID NO: 609191 - DNA, 601 bp, Homo sapiens
gcctgggtatcaccagcaaaggctgcagaacagcaaagattgctgcctgctccttcccctggaagcttcttcccagagggacacttgcctgatgccagccagagctcttctgtatgaagcgtctattgacccctgctgggatgtctcttagtcaggaggcatgggagtcaggttcccacttaaggagatagtctgtcccttaggagagctcaagctctgtgtttggagaatcctccttgttaggatctgctgctgtcttcatatctggcaggcagaagagtttaagtccactgaagctgcacccacagccactctttcctccagttgctctgtcccagagagttggaagttttatctataagcccctgactggggctgctmcctttctttcagagatggcctgcccagtgaggaagaatctagagaggcagtctggccacaacctccttgctgtgctatggcgagttccacccagtcctaacttcccagcccccttagcactgtcaggggaaaatcgcctacccaagcctcagtaatggtggacacccctccccctactaagcttgatcatcccaggtcgacttcagactactgtgcttgc

SEQ ID NO: 609192 - DNA, 505 bp, Homo sapiens
atttttagttctgttattgtattcttcagctccaggatttcttcttgtggtttgtaaaatggtatatattcagtaaactcatttttttcatgcattgttttcctgattttgtttagttgcctatctgtgtcttcttgcatctcagtgagcttctttaagattattgttttgaatttttgacaggcaattcatagatctcaatttttttgggtcaattactggaggtttattggttttattgttttattttgtttcargtgtgtcatgtttgtctgattcttctttgtgtagccttgcattggtgcctgttcatttgaaggagaaaactcctattccagtcattactgactgattttaccaggtaaagaccttaggtccctttatgatggattttcctctgagactgaaattaagtggagttagagctgtgtcatgcagctgctgttgggttcacagtaggcctgttatcagttgtgtagatagatatgactccctctgggccccc

SEQ ID NO: 609193 - DNA, 580 bp, Homo sapiens
tctcccctaatgcgaatgtaactgcagtaaccaaagatttgaatcacaacactcaattccctttgactgcttagaaagcctttccaaaaagggtggataaagcaagcctagtctgtgaagactacaataaatatctgactcttcactgcccaaacactgatgaacatcccaaagcatgaagacaatccaggaaaacatgacctyaccaaatgaactaaataaggcaccagtgacagatcccagagtgatatagatatgtgatctcacagaaagaattcaaaatagctgtgttgaggaaacccccaaaaatccaagataatacaataaagaaattcagaatcccattaaaaattttttaaaatacactgaaataactttaaaaatcaagtagaaactgtacaactaaaaaacccaattgacatactaaagaatgcatcagagcctctcaagagcaaaattgatcaagtggacgacacaattaatgagcttgaaaacatgttatttgaaaatacacagtcagaggagacaaaagaataaaaatgaatcttgcctgcaaaatctagaaaatagcctcaaaagg

SEQ ID NO: 609194 - DNA, 581 bp, Homo sapiens
caaaagctttgatccacaaatagtcctgcaggagctacagaagacacaggtgtaggctgaacagtgccctgaggatgtcatcagcagactgcaaggaaccactgagccccaagcctacaaggccaaggcagggaaggacccccaaaaagagaggaagatgaaaaacggggaggaaatatatatcagggaaaagagataatcagccacaaatggcaatatggagagagggcagaaaggaaagggaaatgccaatcactccttgcagggatcagctggggtccttctaatttccttaggaaaaataagtttgttttccctaagggtgttccctagcccagttgaccctgacttccaggctgatcctgacctccccaaacaaaagtgaatgaaaagtaaaaagagtaaagaagaaaaaagtgaagggagaaaacctccaaaactacacaaagaatcagagtgagcaatgaagttgagagtgaactggaatgcagagtgctccaggtgggcagctgkcagcccaagtggcctcctgtgggctcacagagagggagccatcagccaggagaaagagtcagtcccat

SEQ ID NO: 609195 - DNA, 626 bp, Homo sapiens
aaacccactgccttgagggaaaagacacaatcctgccaggattcattacctgctgactaaagaggccttgattcttgaataaacatcagtacttgcctagctatactcactgtgggctttgggtgaggcccagagccctgctgacttcaggtgtgacccagcacatttccagttgtgggggacatagcaagggaytcctactgcttgaggaaaggagtagaaagagcaaagggacactgtcttgaagcttaggcaccagctctgccacagtggagtagagcacaaagtgggcttctggggtcactgattctagtccttgactcctgaatgacatttctggacccacgctggtcctcaaagaagcccactgctctgaaggtagagacccaagcctggtggcatttaccagaagctcactgaagtgcccatgagccttgagtgaacatcagcagtagccaggcagtatttgctgtaggcctggggcagtgatggacacaaggacagacaacttcagcatgagaaaagcagaggaggcagtgagaaggactttgtcttgtggcattgggtgccagctcagccacagtagaatagagcactgagcagattcctaaggtttccaactacag

SEQ ID NO: 609196 - DNA, 596 bp, Homo sapiens
taaagtatttggtcttttgtctttggttcctgaagcagctttgaaacagcttcagagaaataaaagtgagagacagtttctctctctctctctctctctmtatatatatatataaaaatatatatatatacatacatatatatatatatatatatatatacacacacaaacacacatatatatgtataatgttggggcactttaggcttcacaaaacagaatctctctctgactttctcctgccctccttttacctgctttttttttctcccaaaggcaagccatagaaactaaaaatatactctaatcttcacccagctttctggcttggagctggtcgtaaagaaattctctgacctacctagtttgactgtgggtcataagactcccatttcagaaagagtcctgccccatacccaggaggaaggaatgctgcacagagaaaccaagaagaatctgaacagacaagccttgctgggtttctccaccaagtctattggtattagatcataccctttagtccagtcacatttctacatggttgttcatgcttcattagtgcctatcagataaagtcttcataaaaagcacaagag

SEQ ID NO: 609197 - DNA, 588 bp, Homo sapiens
tttcttcttagttatttatgtttaaattgtgtaagggaaatgaataagggggtgaygtcattcaaacgctaggccgtagtcaggtatacaaatggggaccaaaaaggggcaagacaaagtttaaaaagatcatcattttcattagagatgagagaagaacttagcaacaatgaccatagacgggactgactatgtgactggtctgaggatcttgatcagaggccaacctgtggaagcactgatgcaagtggtggttacaaggtggaggcctagatggaagggatgctttccctatgtggatgctgagtgggaggagcctgtgggtactcaggatggtagttcatgacatactggagagcaagtgtacctactttggtcttacctacattcctgccaaaatggaatctaggaataaagaacaggattaaatctaggttctggaagcccagacatagggtgggtagagtgatattctagcctgaagtgcctgctttggccatagcccttgtaggttgtgcttgatctaaggcttcctcgagcactggctgacaaagcccagcccattggtagtggctaccaatcttttca

SEQ ID NO: 609198 - DNA, 433 bp, Homo sapiens
ttcagccttaaaaaagaaagagatgtgccatttgcgacaacatggatgaacatcataatgatattagcccaaaagagaaagaaaaatactgcatgrtctcatttatatgtggaatttaaacaacaaaaaaaaattcagtggtttttgtgtaaattagtacaatagaagatccaaggtagagtactttaaattagcaagatatttctaactgtgcattttaagaaccatttttatttttcttcagtttggaactacaacctttagatatcaaaatgccctttgtaacttaatttttattcttttttatgagagaggtgcatgtttttcaagtacatttatctgttaacaaaaatagttggagttcgcgaaagcctattatttaggcaaagtcttcctttgcaaagattcagactaaagtactagcaggttttaa

SEQ ID NO: 609199 - DNA, 433 bp, Homo sapiens
ttcagccttaaaaaagaaagagatgtgccatttgcgacaacatggatgaacatcataatgatattagcccaaaagagaaagaaaaatactgcatgatctcatttatatgtggaatttaaacaacaaaaaaaaattcagtggtttttgtgtaaattagtacaatagaagatccaaggtagagtactttaaattagcaagatatttctaactgtgcattttaagaaccatttttatttttcttcagtttggaactacaacctttagatatcaaaatgccctttgtaacttaatttttattcttttttatgagagaggtgcatgtttttcaagtacatttatctgttaacaaaaatagttggagttcgcraaagcctattatttaggcaaagtcttcctttgcaaagattcagactaaagtactagcaggttttaa

SEQ ID NO: 609200 - DNA, 480 bp, Homo sapiens
cattgtgtgagaacacatttgagagtggtggttagggtctttaccaatatattttctatgattatttttactttcaatcttattattcatcacattacatggtagatggcttagcaatatttagacagtaattccacaaaccactttcatcctagaatcacctttgagacattattatttttttaaatgcaaactgccaggcctcatcatggacccaatgaattaatctcttgcattgggatccagagatctgcattttaaacatctgcccaagtgactctcatgsagtttggtacctgactgtagacttatttttgagatgcaaagtttaatgcataccctaccaaatcatgaccccagtgcacctcttaagtggtcatctctgtgctagtttttagagcttgtcacccttgctgtatatacatggcatgctccagggtgcatttaaagcgttattttctacatatgtttagaagtcat

SEQ ID NO: 609201 - DNA, 480 bp, Homo sapiens
cattgtgtgagaacacatttgagagtggtggttagggtctttaccaatatattttctatgattatttttactttcaatcttattattcatcacattacatggtagatggcttagcaatatttagacagtaattccacaaaccactttcatcctagaatcacctttgagacattattatttttttaaatgcaaactgccaggcctcatcatggacccaatgaattaatctcttgcattgggatccagagatctgcattttaaacatctgcccaagtgactctcatgcagtttggtacctgactgtagacttatttttgagatgcaaagtttaatgcataccctaccaaatcatgaccccagtgcacctcttaagtggtcatctctgtgctagtttttagagcttgtcacccttgctgtrtatacatggcatgctccagggtgcatttaaagcgttattttctacatatgtttagaagtcat

SEQ ID NO: 609202 - DNA, 582 bp, Homo sapiens
atttatagaatttttattttagaaaatgaaattgctactgtgtatagctatcattatgcacacatatagtgtattcttgatatgatatggttgtaacatcccaatttcaatatctgagagagtcctccaacttaaaatgttctatttctctacatcttagcagtttctaataactcagtgacttaatattggccctctgtgaatgctaaagccactaaactgaatattttagtccaaaattatttttctaatttatagtaataatgaaaattacgaagtttacaggggtaaacatttgtgggggtagatcttacaatattctgaacatggtttatttaatggtcctttcctggattttgaatattgtgtatagtctggagtttgataatagtaagtattttatctatctatattttcgtattttggttgacatttccaggacaaaacattgttatagccaagaaccatattatgtaataagccatcttctccttctagcagtrtggaaaatatactcctcaacacaaattaatatagaagtaaaaataaacataaacactgaagttacaataccatagtagc

SEQ ID NO: 609203 - DNA, 422 bp, Homo sapiens
taccaagggggatgctgctaaaccattcatgagaaatccactcccatgatctaatcacctcccatcaggctgcacctccaaaaccgaggattacatttcattatgagatttcagcagggacacacatcaaaaygatatcaatactataataatatatataacaatgtaattacaaaattaccaaaagacatgaacagatagacattttactgaagaggacaagcagctgtcaaataagtacatgagaaattgctgtacatcattaataaacatggaatccaaattaaaactacaatgagatatcactacaaatttacaatgcctaatttttttttaatgacagtataaatgctggtgaggatgtaaaaaaagtaaattgctgggaaaagtgatatggtatagtatactctgcaaaatagttt

SEQ ID NO: 609204 - DNA, 603 bp, Homo sapiens
acctggtgggagataattgaatcatggaggcaggtctttcctgtgctcttctcatgatagtgaatgtctcatgacatctgatggctttgaaaatgggagtttgcctgcacaagctctctctttgcctgctgccattcacataagatgtgacttgcccctccttgccttctgccatgattatgaggcttccccagccacatggaataagtccaattagactctttcttttgtaaattgtccagtcttgaattgtctttatcagcagcgtgaaaatacagtaatacatctattatgcatcattttgcctygacaaatgctattttatggattttcatggtagaggattgagggcagcaggagaatacagtggagtcaatgaaaacacttctatgtaaatttaaatttagtaaattcaacatttagatatggtcttgccagaaagcagagacataaaggtactccacagtgtttagaaaggtgtaacaaagtctgaaagagcaaagcaaacctttctcagaaaaaagtgtcttttaaacattttagtgttcaatatattttaaagatgccctatcatgaaatccaatctatttttacagatgtaga

SEQ ID NO: 609205 - DNA, 447 bp, Homo sapiens
ggcccatgtaaggccaaagtggggtggggggaaatagattctctccatctgaaagattgcagatgtctgagcctgatcagggtctgggggggtgctgaattgcacaaggagcttccatttcagtgcagtgagcatcaaatgcatattaggtttcctagggacatctgaaaagcaatactgcttatttttccctcygttgagcacacatggtgtggggcttcaaacttgttaggaaaaaagaaggctagcagagaaaggagaaaagcctagctgagagggagaccaagagtctgtcgccaggcaagaaggaaaaaattgagatgttcgtatttttacaaaatgatttcttgttcaaattgtactcttgcttttcaagagcagccaggaaaatgaagttattcgtacattcaaattttcccctctgctgtcatttcaatttaattattg

SEQ ID NO: 609206 - DNA, 574 bp, Homo sapiens
gcagttcaagggtgcagtgtgctatgatcatgcctgtgaatagtcactgcaccccagcccaggcaatatggcagcaccctgtctcttaaaaaaaaaaaaaaggaacttgcagctgcagtgtttctgagtttcaatcagggtgattctgctagcattctccagcctctgcatgagcattcatacctctgtactttgctcagcatgtgtctcttgtttaaaatccccccactcctctccacctagccaaacccagttcattctgcaatgtgaacaatcaagtttcacctcttcatggtgcttctcttgaatgctgtagctcactggttcccaaatgtttggaatattttaaagtacagacttaaaaacaaattttgtggagttacatcaaaatgatcatctcctgtcaccattatttttgaaaagaaattacattttcatatctraaaggcaggaggaatatgatgtccaattaaggatagtttttataattgaattaaatatctttatatggaaagtacactgtattgtccccgtttttctcattttgctactgattagaaaaagcctcattgca

SEQ ID NO: 609207 - DNA, 572 bp, Homo sapiens
tctgtggtcctctgtcaccccaagctaaagtcaagctcattagcagggcaaatgaggtcttccatgctccatcctttcyctatccagcttcatcttagtccactcctctcctctccttttaaatatgcatttcccaatatgtctcaaccaaatttcatacattttttaaaatttccatattatatttggcttcccccaaatgtaagaaggtctaatatctttaaaatggggaatctaatgatgatggctttgcaaatggctagcatttgtataggcttcacactttgtaagcattcccatgttcttttatttaatcttcacagcaacgatgcagaatgggcaatgttttctgggagatgcttgatgaatatttggatggatggatgaataaatgaatgagtggtgcatggagtcagaaaactggagttacagttattaaccatgtaattttaaataggtaatttaacctctctgaacctatttgctaatctgtaaaattaggtctatacctgcattgtctgtcacactagatggcaaaataatgaaataatgtgtagtaaatagaaatacca

SEQ ID NO: 609208 - DNA, 542 bp, Homo sapiens
ttgtgtttatcctctttcagaaccctgaaagtcagctaccattccattttcctgtaaattatactggcacacacaactgacaggatagtcaaatgcaatgaaataatcttttcagggccagaggcatcatttaatggtcaggatgtaaccccagatgcaaatgtggctcaaatgctacttaccattttattgggcatctgttttgtgccaggcattgccctatgttcttttcctgtaataaaagattacaaatttgtaaggttaccattatcctcatgccacacaggaggaaacagaggctcagataggcttgataactacccaaggtctcactaccagttagtggtatagctgcttgcagaaccctcatttgtctgacctccaactccaccatactttccctgttttaccatactgcctccataagatccatcacagcataagtagcctaacaaacggttttatttcaaaagcaataaascaatatatatttattgtagagaagtaggaaactgagagaaagaaaaaaatgaaacccacac

SEQ ID NO: 609209 - DNA, 429 bp, Homo sapiens
caattaagtttaaaaaattcaaggactttgagcttgrtaatgaaagatttttctctagactaatgtgagcagaaaagttgcccatctgtgcacatttttgtgtgcatttaaaatatttaaaagctgacagcttttaatatgcttacaaaatagtatttctatcagtgctcttttttttttccccttttcttttaaaatagtatcttcctaagggcaagttgcctcttcaatgaaatcatgtttgcagttttactgttgggacccctattcctttggtatgttctgacatgtgtcccctcctccccccttcctttcagaaatattgataacataaatgtgcagataacaggaatttaaatgcttaaggaaatgagcaagagaaactattttagagtaatcatattaagtccaaggaattacacatgacac

SEQ ID NO: 609210 - DNA, 642 bp, Homo sapiens
tttttttttttttcccctctaaagcaagttattttagagggagagtttaccagtgataagagctgtttatgtcctgagcgattgatttgtaattaatgttgcctgggctcttgcctgttggcagaattggtaacagcttgcagtattttttaaattctcttttctttttggtattttgacaatgtcattcatatctcatgaaaaactacctcagacaggttaaatgtgttaaaacatggaacgaaaaggatggaaggagacccagtgctgcctaraaaccttgatcttttgccaaagtatttaaacaatttagtgttttggtttcctagctccaagctgcttctcaaatcccttgctaattaatccagttaatgctttgtagacttactatatgcggtgctttggcttgctcgtctatcattgagaagtccgttttgtttcttggagaaaacctaagctctgttctggtgcagagctatatacagggcttatgacgtgtgagtagtttggggcctttaaaacccgtatgcatgtgtatctatgtaagcatatatatacgtgttctctgcatttcatagtccttaggcttaaaattttaaaataaagacacaaagtagaaaatagaaatcaggtatttcacac

SEQ ID NO: 609211 - DNA, 573 bp, Homo sapiens
gataataaaaaatagacaactgtattctatttgagcctgttttttttgagacagagtcttgctctttcgccaggctggagtgcagcggcgtgatctcagcttcctgcaacccccgcctcccaggttcaagcaattctcctgcctcagcctcccgagtagctgggactacaagcatgtgccaccatgcccagctaatttttgtattttagagagggggtttcaccgtgttggccaggatggtctcgatctcttgaccttgtgatctgcccatgttggcctcccaaagtgctgggattacagtcatgagcctctgtgcccggcctgaagctggttttaagacccattgatgtgagttatcaatacaaaagatctttctaaagtctgaaaggtgaatatctctcatttgcttactagaaagcttaggtgcagaaaaatatataggctatttctttttcccagttaaataattacatcaaacatggaggcacattcaggamtatttactgctagtgaagctcatgatgacttttttttactaaccatttctgaaattcatgtattatgcctaaaaaa

SEQ ID NO: 609212 - DNA, 624 bp, Homo sapiens
caaaccctgacctcaggtggtccgcccccctcggcctcccaaagtgctgggattacacttgtgagccactgtgcccggccctcttttccctgttttgaagggaaaactttccacatttcacctttcagtaccacggtggctrtaggtttttttaattgagttttttgattgatttataactcacatatagtaaaatgaacaaatcttaagcatacagtttgaattttgaaacatgtatacacctgcgtaattaacacctcagtcaagatgtagctcagtttcccatatactcttctctttatttccaattcctttaccccaccagagacaacaactgttctgatttatgttaccatagattagttttgcttttcttaaaccttatagaaatggtattctatagcatttccttacagaaatggaattctcttggttctggcttctttcactcaacataaagattttttgagaatcatccatattgcttcacctatcagcagtttattctttttactggtaagtagtattccattgtataaatattataatttgcttatccatttggatgaacattcaggtgagacacagtttttaaaaatagataacctttatcagattaagaca

SEQ ID NO: 609213 - DNA, 591 bp, Homo sapiens
atatatgttgaatcattcatgtgccccaagtgtgtttktctgggaacaactcaaagttaactctacattttctgaaaaagaaaattagtcagttcaggcagcgtctttctatcaagttgtcatatctttcatatagtaataatgactatcattctaatatttgaatcccttcaaaaaggaatttacataaattctatcacaaaaatttcatttcttaatgatagcacaatttccggaagttgtgttgtttgattttggtttggagtttagggtttttatgtttttaatttaagggtgacgttaaattacatcaccacaagaatgctggtttgtaccacttcctgtgctgagcattttagtacatattatctctaatttacaaaacaacctgccaagtagatagaagtcccacttaaacaatgggcaaaccagaatttagtttaaatagctttcccaaagtcaaacaattaatgagtggcaaaagaaatctgaacctaagtctgtttgatttcaaagtctacagactggccattatactgtttttattacaaattattcaaagataattaaggacattgttataatctagac

SEQ ID NO: 609214 - DNA, 540 bp, Homo sapiens
ctaatgtctaagaatatattaaaggtaagaaaactgtctttaaattgagcaacttattaaagtcttctgctgggcaaagcaagctcacagtgatatcttcagtaaagctttctttttctaaagaaagcctttgagcggactgcatgttttcaatgtaacataaagaaggaaatgcaaaatgtgttgtgaaataataccaamagaagttcaaaagctagaatgtaacttcctaaaggtttttttaaaaaaagtcttctaagcatttaaaacatgaggtctagttcctgttttatagggtgaacgttccactctctacagagtctagcacagtctaaagtgaacactcaaagaataggtgattaatgatttagaagtgtgataataagacctcgggcatgtagactcctggggaaatcagtcttacatggcagttttcaagaaacctgaagatcgctatttttaagcattaaaacttgatttaaatcattttagttataaatgtttccaagcttcattattatctcactgcttttttggaaa

SEQ ID NO: 609215 - DNA, 581 bp, Homo sapiens
ccaatttagagcatcaccatagtatataaaaagcacaagcttcaagcagggatatacaattaacgtaaaattcaaaatgtgatctcagtagagaaaggcaaattgagagaggcataaatggagtactcaaagatacaaaatgttctgttttctaagttgagtggtggatatgtgcattttcatttattctttaaactgtatacatacatatgcattatataatttgtgtgatagctttcataaatttctttaaagaatacagtcacactagaattcaaatcccaactctgtcactctgttctttggacaagttgcttcctagctctaagatttaatcattaaatacttgagggcctaaygtatgccaggcactcttctagctaccaaagcatacaagtgcaagcaagacataatctctgcgctcatggagccctctttttcttacctatataattagaataatatttcttacttcattaggtggtgggcaagaattttattataatgagctctcattaggctcacctccagtttaaagaaataatcattattacagcaatcttgagaaaaagagacaaagc

SEQ ID NO: 609216 - DNA, 588 bp, Homo sapiens
acaaacaaacaaacaaaaagaaagaaagagaaagaaagaaagaaagatacgaacaacagctacaagtagttcagcattcctgagtcaaaaatcaagctgggaaacaggtcccagtgatgtcagctaggtaggtaggggccaagtcatgaagggacatgtgtcccaggtaaaggcatttctgttttaacctgtaggcaatggtaagacattgaagaatttccctcacatttgatctgatttgcctggtttggagctcacagttgaaaaataaagtgaaacaacactaaagacaggaaaacgactgaagtctagataagtgattttggagtgtgggagggaaaatgaggacagaaaaaataaaatcaagctaagggcaaaatgcatacctgaagtacattctcgtgagtcayggatacattgctagcagtaagctgcaaaatttatcaaatggcaaggaaggaagaagagagagagagaatgaagctgactcagaaattgaggggagagaattgggctagaaatgtgttttaggcatcaagaacaaatagatggtaatttttgaagccatgagtataaatgagattttcc

SEQ ID NO: 609217 - DNA, 585 bp, Homo sapiens
gcagcttggtgcttccaagcttctgggactgtgggcaggaataataatgacttatccaactgcagcaacaaatccaactgcacaaccactattcctgcaagtgagctgaaaatgtatggtggtgcctgctagacctcacccctgagaatgcactgcattcgccagactcatattgtcagccctacccatgcaagtggggacatagtatcagcctcttctagttataattttagcatatttcattgattctaaggcttacatattgttcacattataacttcagaaattgagatgcactctacatttacatttttattgatattggaatataaaataatgatgtgttttataatctacggtgtcacgtatctgatgaaatttgsgtatttgaagaacaagatgtaaaaataaattagtttcatctattgtacaacatggtgactatagttaataatattgacttgtttttggttttttggttttttggcttttttaagagatggggtctcgctatatggctcagcctggagtacagtggctattcacaggtgtgatcatagtacactacagagcctcaaactccta

SEQ ID NO: 609218 - DNA, 595 bp, Homo sapiens
  misc_feature 233: n = A,T,C or G
tataaagaacatttttctaatttttatagttctacatttttaaacttttttgagcatgtgttatttttgtcatggaaaaaatggacactgtgatggcctttttattcacttctcttagcctggtatatgtggagaagaattggtcagcttatgcaatgtgtagaaaaactttgggtactaacaaataaaactttcccaggaaacaagttttgaaaatgatttaactttgaggntttaaaaacactttaaacattccctttgcaaaaaaattcattgaaaacaagccgatggtcttaggaaatattcagtttaaacatttacagarcaaaaattggatcctattttaaaatcattcctttataaataagtgtctgaaatattttggaatccagcaaatacattcaaaagcatgtttgattagttggcttgggaaaggaagaaattgggcctgtaaaacaaaccttgctttagaaatccatgaagttgtccctccctacatcaaatttctaaaagcaagatgcctaccacgaaatatgtatggttttcaatttgaggctgaagttatatagaacaatgctgcaagtaggccaccctg

SEQ ID NO: 609219 - DNA, 568 bp, Homo sapiens
aaaaaaaaaaaaaaaaaaaaagaaagaaactaataccaatcttttgaaactgttccaaaaaattgagaaggttggaattcttccaaactcattttgtgagaacagcattacccgataccaaaaccagaaaaggacagacacaaataaaggaaactacaggccaatctccctgatgaacatagatgcaaaaatcctcaacaaaatattagctaaccaaatccaasagttcattaaaaaggtcagaacagatcagaaaaaaaaaagtcgtacatattgagaaagaaagacaaaagagtaacgacaatatttagggaatttggttgaattctttgtactattctttcaacttttaagcctgaaattatgtcaaaattaacacatttgaaacgaatggaagatttttaacgcttcaaattgtttaaaaatatttaactatatagtacatgagagttattctgtaattttaaaaaatagaaacagtatggcccagtggtttagagagaagtctagagaaggatgcctgggtttgattccttgctctgtcactagctgtgtgatcatgagtaag

SEQ ID NO: 609220 - DNA, 488 bp, Homo sapiens
agtattttcatacccattttttttcatttggtctttaagraaatgttgggggaaggataactccccttatcagtgccatttatggagaaggcaactaaagttcaaaatgggtaaagggggtgccgggcatggtggctcatgcctgtaatcccagcactttgggaggccaaggggaaaggatcacatgagcccaagagtttgagaccagcctggacaacagaccccgctctctacaaaaaataatacaattagctgggtgtgggtgtgtacctgtaatcccagctacttgggaggctgaggcaggagaatcacttgagcccaggagtttgaggctacagtgagctgtgatcatgtcactgtactccagcctgggcaacagagtgagaccccatctcaaaaaaaaaaaaaaaagaattagcaaaggaacagaaagcagaaatgggtgactccaagtctcatgctcttaatttactctttttttaaaaaaa

SEQ ID NO: 609221 - DNA, 360 bp, Homo sapiens
gtgagattgaaaagaagaggtaagggagagtgaaatgtcaaaaaaaagtcctggtttccagagtgcacgagataaactggtgccaggcctcgagttagggaacatgggaggatgggtagkctgtaaggaatttgtttacagacatattgagccatatagagtcagaatttaaagagcgctccatgctaaagataaaaaattggaagtcaacaagagtatagagagtaattgaatccgtaggtatgaatgagatcagctataacgtaagaacattaaaaaaaaaaagtcaaggactgaaacttaaaattccatcattaaaggccaggaagaagagaatgagtcagttaagaaaaatgatag

SEQ ID NO: 609222 - DNA, 630 bp, Homo sapiens
tgatttcagtttggttataatggcaaaataaacccctagcacggtacccgttacataattggcaaaactggaaatttgtttactttcaattaggttagggatcagagttaacttgctcctctctcagactctttattatgtaacattttcaggacatgtccaggccaagttcctacactggtctttagactctctcccagggacaatctgtgggcaattattccacctatagtgctttctagccaatgaagatgggataattggcaagccatttttctgaagaagtagaaagctcagtaagctactatggtcaaactgtcctgtcttgcctgatgctcattttgtggttccttaagaaatcctgaagcctgcataaaagcttcaggatggcaaaaaccatgattcttaggatccaaagtggaaatggttctctctacatgtaatgattgttaacctgaagttacaccawggcaatttgatcttttggtgcttttgtaattttcccatagtagacaatcatttgatctgagagggcaaatgccagaatgtctagaacaagtaggacctcgaacaaccaggggaaataacaatggttacactaaattggaagataaaactgtcacctggaca

SEQ ID NO: 609223 - DNA, 630 bp, Homo sapiens
tgatttcagtttggttataatggcaaaataaacccctagcacggtacccgttacataattggcaaaactggaaatttgtttactttcaattaggttagggatcagagttaacttgctcctctctcagactctttattatgtaacattttcaggacatgtccaggccaagttcctacactggtctttagactctctcccagggacaatctgtgggcaattattccacctatagtgctttctagccaatgaagatgggataattggcaagccatttttctgaagaagtagaaagctcagtaagctactatggtcaaactgtcctgtcttgcctgatgctcattttgtggttccttaagaaatcctgaagcctgcataaaagcttcaggatggcaaaaaccatgattcttaggatccaaagtggaaatggttctctctacatgtaatgattgttaacctgaagttacaccaaggcaatttgatcttttggtgcttttgtaattttcccatagtagacaatcatttgatctgagagggcaaatgccagaatgtctagaacaagtaggacctcgaacaaccrggggaaataacaatggttacactaaattggaagataaaactgtcacctggaca

SEQ ID NO: 609224 - DNA, 480 bp, Homo sapiens
gagctttcaatttcttcttgcagatgaggggagctactgaataattttcagccraagagcgacttgacctgacgtgaattttggaaagattgcttttacaggctgtggaggatggatgggtagaagcctgaagtttaatatctgagaacatatcagaagctttcaagtaaaatgaaagtactgagataggtttgccaccatttacaaagagacaatgacactcctccttcttctgactccaggtcaagtaaaacagaatgattaggaaataaaagggtggaggaagctaggtgaagctcatttggggcctcctggcattggtaggaccctgccaagtcctacgcagctacctatattcatttagtaaaatattctctgccatggcaagatctacgaggaaacaatctaggaaatctcaaacaaaataatgatggcttcctttccctacaccttttcccccaacatgtccccaaagaccca

SEQ ID NO: 609225 - DNA, 480 bp, Homo sapiens
gagctttcaatttcttcttgcagatgaggggagctactgaataattttcagccaaagagcgacttgacctgacgtgaattttggaaagattgcttttacaggctgtggaggatggatgggtagaagcctgaagtttaatatctgagaacatatcagaagctttcaagtaaaatgaaagtactgagataggtttgccaccatttacaaagagacaatgacactcctccttcttctgactccaggtcaagtaaaacagaatgattaggaaataaaagggtggaggaagctaggtgaagctcatytggggcctcctggcattggtaggaccctgccaagtcctacgcagctacctatattcatttagtaaaatattctctgccatggcaagatctacgaggaaacaatctaggaaatctcaaacaaaataatgatggcttcctttccctacaccttttcccccaacatgtccccaaagaccca

SEQ ID NO: 609226 - DNA, 480 bp, Homo sapiens
gagctttcaatttcttcttgcagatgaggggagctactgaataattttcagccaaagagcgacttgacctgacgtgaattttggaaagattgcttttacaggctgtggaggatggatgggtagaagcctgaagtttaatatctgagaacatatcagaagctttcaagtaaaatgaaagtactgagataggtttgccaccatttacaaagagacaatgacactcctccttcttctgactccaggtcaagtaaaacagaatgattaggaaataaaagggtggaggaagctaggtgaagctcatttggggcctcctggcattggtaggaccctgccaagtcctacgcagctacctatattcatttagtaaaataytctctgccatggcaagatctacgaggaaacaatctaggaaatctcaaacaaaataatgatggcttcctttccctacaccttttcccccaacatgtccccaaagaccca

SEQ ID NO: 609227 - DNA, 588 bp, Homo sapiens
aagtgatattgctcttcaaatgttagtgtttagtttataatatgtcttttatttgggattcttagttgtcaattggaaggcagtaggagaaaatataagtcaatgttttctttttcaacccaatttagcacatcaattaggaattgagacacctactcctctcagttttttttgttagctccacagtttgttccacttcagtccaaggtacagattgctcacctttcctcttctatgttctcttcctcttttctccacctctcccgccttatgtctccttcctttaagttaggtcatattgcattccaaggggttcctcaataaaaaaagaaccttaaatgtcatctggttcagtagtttcgtttcaagcaataaaaaataactctcctatgcagacaagtatttttgaaaggaccctttcttgacctctggtacactgagcaaccccttgayttcagccctttcttacctgcctttaacaagcagccctttattaaattgttcttttatttcaaagttttttctaaatatcttcattttcttcttttatccttgaccctcccctgtctactggcacacaggatgtca

SEQ ID NO: 609228 - DNA, 611 bp, Homo sapiens
aaccttctaaaattttggaaaacttttaaagagtaatacacaaaattatcaatataccattagataaaagtgaatatgtactgagaatgagtaaagaaaatgtaagaaatgaaaaatgtaaaaggctgacaaatctcatatcacaaattctagaaaaataacaatattttaattaattagctgcttgcatactcctaattttcatcttcaaatgataagaattttgttataattctaaytgagaaaatggaaccataaatttggtctttttccctatgtggttgataaaaatttgttttttaaaaattattgttagatgtgatttcatagacattcttgccatttgtgggattgtcaggggtttgtaacctacaaataaaggaattcttgtttattctatttcacttgatttttataaaaaagaagaaaattcagtgtacacttctatatgcttcatcatcaaatatggaagagaactttcatcttgactaagcatctatgaaagctgaatcatctacttacaaatatacatgtttgataaccgcagggggtttctacagatttgcttctgcctttgcatattttacactttgtttcttcttcattgctca

SEQ ID NO: 609229 - DNA, 626 bp, Homo sapiens
ttaacataggatactatttcaattacagatgctacctgaaatattaacaatgttgatgcagctctactagcaatagatayaagcttatgtaaaaaataccctgtaaccaggaagcaatatgttgatttttaaaaaaaactatattggaacagagaagttaaagctgcaattatgcaacaccactgatgcaatgattttcaaatcaaatatgggttttatgccagtgattctacatgcagacctgtgcacttctctgctgaactccagaccctctactactgtgtcacgattgtctcctcctgcccttcttcccttccttttctccctcttcctccctcttctctccttcctgctttctgcttctctcttctttctttcttgctttcttctctaaataaaaactgaactcttagtttgtacccataattatgctatgggatataaaacaataaataaggcattcctggaatttgaaacctaaaggggagccatgttaaagttgattttgtccatacatatacattataataggtataagtggcagacacaattttcccacagaaacctgatccttttgttttctttttctctccattattggaactcccatccgtcaaatcacacaa

SEQ ID NO: 609230 - DNA, 554 bp, Homo sapiens
taaaataacaagttgcatgaggaaattcaatatttaattctttagggtttttttaaagagttaggttagcattcttcaaaaaggaaaagcattggtcagcaatattataaaattttgtattttaagctgcagagatgactttttaaaaataaagaaccatgggttttcctgttcagcacaagtgtaatatgtcacaagaatcaatatgtctaaaatgcaaatatatttctccttacaaaggtttaaggcgttgctccctaataaataaggtaagaatatcttcacaatatcatttctgtcttctatgaagaaattaggtttaaactagatgtcacaatatccacactaaagcagaaaggaatgggataatccaaaagaataaactktaacttcctacagtaatttgaggtttatcacagcgtaaaacagaggcagctagagggtaatgtccaattaatactgaatggaaatacaattgtgcaaattaactcacacttattcaaattcccaatcaatagaaaaatgcagcaagagcttttttcttcctccctcca

SEQ ID NO: 609231 - DNA, 595 bp, Homo sapiens
aaaaacaataaagaaaaacaaaggaatgataaacattacattcaggatatggttatctctgagggaagggagtrgcacacacatgtcgaaaatatttttaatgtttatttcttaagctgccttgtggatatgcgggtatctctattattgtttacatctaacacatataccagataaaaccttttataaatcattagtttcatttttaaatgtaaattaaaactgttcatctctatattggctgtcacaagtatactaatcatcttaagaagtttaaaaaaaaaaagacatttagatttcacaggtatctgcagaaaaaagataaaagagttgcaaagcaaaatagtctgtagcacaggtgaagaataactattaccataattgaaaaagggaagtaaaagtgtatgattcactgtgtgatttactgtttgatgtcatacacactggaaggcagaaagacaagtactttctaggccagaggacctcattagggcaagtgaaacactcagggctctggcaagtgagcattccagggtagctcagttggactgcaactccagggttagggcaggacttggaaagaggagctggagca

SEQ ID NO: 609232 - DNA, 595 bp, Homo sapiens
aaaaacaataaagaaaaacaaaggaatgataaacattacattcaggatatggttatctctgagggaagggagtagcacacacatgtcgaaaatatttttaatgtttatttcttaagctgccttgtggatatgygggtatctctattattgtttacatctaacacatataccagataaaaccttttataaatcattagtttcatttttaaatgtaaattaaaactgttcatctctatattggctgtcacaagtatactaatcatcttaagaagtttaaaaaaaaaaagacatttagatttcacaggtatctgcagaaaaaagataaaagagttgcaaagcaaaatagtctgtagcacaggtgaagaataactattaccataattgaaaaagggaagtaaaagtgtatgattcactgtgtgatttactgtttgatgtcatacacactggaaggcagaaagacaagtactttctaggccagaggacctcattagggcaagtgaaacactcagggctctggcaagtgagcattccagggtagctcagttggactgcaactccagggttagggcaggacttggaaagaggagctggagca

SEQ ID NO: 609233 - DNA, 621 bp, Homo sapiens
ctctcttcccctcatgggatcacaaaaacgtatgttgatatgaatataacacaagactgaagctgcctggaatgccaagtcaccacatgaagggacgtcagctaccttaaagaccaacaagcgtctacaactcactgtgggtgacaaaagattagaacatacttcattgctaagcaattgaggcttttttgtattgtttcttcttgcagcataatctaacctatacttactgatacacttagtcaaattcaccctttatgtatgtagtctgtctctaagcttcattcatttaatcaatatttattgagtatctattacragcaatcccctcttctaggtatctaggatacatgagggaaccaaatacacaaagatctctgtcctcataaaacttacatttcgctgggagagacaatacatacaaagcataataagtaaattacacggcatgtcagaagatactaagtcctaaggaaaaaagaaaaaataaaatagggtaaggtttaggagttctaggggtggagtgggagtgaagcgggggcagtcaggttcagttttaaatagagtgatctcagttttctcatctgtaacttactgtacccacaacactgaggaacagag

SEQ ID NO: 609234 - DNA, 549 bp, Homo sapiens
tactattatttaagggtttctattaattgcagctkaacttaaacccaattaatatgcccttagaaaagaaggttaaacaacttaattatattaattatgaattaatatgcccttagaaaagaaggttaaacaacttttatgtggggttgatatccaaggtctgactgcaaatcccactttctttgatggattcccccccaagaaacaggtcaagctgctctagagtctctttctacctccttttactcatgtccagagacacaggatcaagcatggtctgctcagagaatcaaacagcaaaactttaactcaacttacagaagacaagtatcttggcctctttccaagttggttttggggtgtttagatatttaagctgatcagtgtaaacatcaccaagtaaaccagtttcagaattatgatcactaaccatctactatttgttacatatctatcagataagctttgcattgaggtctttagtttaaaatatctaatatccctatgtgtttaacagacaattctattagaaaaaaaaacaaaacaaaa

SEQ ID NO: 609235 - DNA, 601 bp, Homo sapiens
accggcgccggagttttgggtccacggataaaatgtgtctcctttatctctaccagaaagtgaaaggaattgaaatcaagagaagggagagattgaagtgtggcaacaagattgaaaggagaaagaggtcgagggatagtgagggaggttggagaagagagtaaaaagaggctgcttaccagatttgaaattggtgagatgtttcttgggctggttggtctgaggacctgaggttgtacgtggatctttctcacggagcaaagarcagcaggacaggggattgatctcccaagggaggtctcctgatccgagtcacggcaccaaatctcatgcatgtccatgtgaagagagcaccaaacaggctttgtgtgagcaataaagctgtttatttcacctgggtgcaggtggtctgagtctgaaaagagagtcagcaaagggagatggggtggggccgttttataggatttgggaaggtaatggaaaattacagtcaaagggggttgttctctggtgggcaggggcgggggtcacaaggtgctcagtgggggagcttctgagccaggagaaggaaattcacagggttaatcactcagttaaggtg

SEQ ID NO: 609236 - DNA, 548 bp, Homo sapiens
tggtaaaaattcccaataccaggcrgatcacatctggatctccggagttggggcccaagcatcagtattttagtgtgcagccagtagtgagaccgctgacactcagtggtgctccacaagcttgaatgtgcctgtgatgcatctggaagtctagggaaaaggccggttttgattcagtagctctgggatgaggcttttccagcgagcttccaggtgacatggatgctgctggtcactggaccacacttcacatagccaggcccaaagggtgtagctctgcctacagaaattgacaccaaaggtcctcagcagcacaggacaaacttgcaccccaagagggctgctgccaatctgttatcagttctataagtggctgctcatccgaagcaccttggcagcttagaagaagaagttggttaccaccctggcgattctgattgattggtctggaagctcttaatctacgttaaaaaatatctccctgggtgattatgggacacagctatggttgagaaccactgttaaaatggccaatattaaatgaattc

SEQ ID NO: 609237 - DNA, 369 bp, Homo sapiens
cttccaagtagctaggattacaggagcatgccaccatgcctggctaatttttaatttttttgtagcgatatgggtcttgctatgttgcccaggctggtctgsaactcctgggctcaagagatcctccctccttggcctcccaaagtgctgggattacagatgtgagtcaacatgcctggcctaggtgtgtcaactgcatttttaccttacaatattttcaacttaccacgggtttatcaggacatagctccatagtgagtcaaggagcatctacacttaacaccactgaactgtgtgcttaaggtgaaaacggtacgttttaagttatgtatttttatcactgccaaaaaaaagacacaggaaaaaagg

SEQ ID NO: 609238 - DNA, 562 bp, Homo sapiens
gtgaggttgtttcaaatgagggagagagcaggggtgaaggcttcaacatgggagtgaacagggactattctaacgtgcaggtcacccactgggcaaaagggaggtgggtgaaaagtctgttttgggtatttgtaataacagaaaaggtcttaacttgtccatgcctagttgggaaaaaaatttttttatatctggattgttctggaaatcccgtgaaattatagcttatgaaaccgtagtgctatagattaaatgtttaggtctccccaaatccatatgttaaaattttaatccctaatgtgatggtatttgaagatgtggcctttgagaagtgattaggtcaggcaggtggagcccttatgaatgagtcccttaggaaaaagaccccagagarctcactcaccccttctaccatgtgagaacacagccagaaggcatgtccataaaccatgaaatgggccctcatcagacaccagctctgccagtgccttgatcttggacttgccagcctccagaattgtgagaagaaaatttttttttcttataagctatttggtctatg

SEQ ID NO: 609239 - DNA, 585 bp, Homo sapiens
ctactttttggatggggttgtttgtttttttattgctgattcatttgagttccttgtagattctggatattagtcctttgtgagatgcatagtttgaaaatattttctcccagtctatgggttgtctgtttactctgttgatcatttcttttgctgtgcagaagctttttagtttaattaagtcccatctatttatctttgtttttgttgcatttgcttttgagttattggtcatgaactctttgtctaagtcaatgtctagaagagtttttccaatgttatcttctagaatttttatggtattgggtcttagatttaagtctttgacccatcttgaattgatttttgtataaggtgagagatgaggatccagcttcattcttctacatttggcttgccagttatccctacaccatttgttgactagggtgtcctttccccactttatgtttttatttgctttgttgaagatcagttggctgtgtttggctttattctacgttctctattcggttccattggtctacatgcctatctttatactagtgtygtgctgttttggtaattatagcattgtagtatagt

SEQ ID NO: 609240 - DNA, 561 bp, Homo sapiens
ttctttcacatacagagaatcctcttgccacctctcaagttgagccaagaagcttcgtgtctttgagtacaggaggctttgggaggtgggggtgaagagctggctggctgaacttgcggcagagctcctggctccccactggctgcctgtggtgtgcagaggacataggaggcccccactcctcgtggagagtgaaagtgagagtaagaggaatgggaatgtgataaggccacagcacactgggactttacaacgggatccagacttcagcagcggagcmcactagatgtgtccatgacaacccacaagccaacaaagacctacagtgccagaggatgcagcacagacccagggcgcttctgcctctctgccctggggtcttcacccagcccacgccactgtggggcagagatggggaggacaaatgggaaaagggtgcctttacctggaagaactgggtcacacaaatgacagggcttaacttggccttgagagggagccgcatttcagttgtctgcaagactctctttaaactagaggagaatgagatctttaaactct

SEQ ID NO: 609241 - DNA, 346 bp, Homo sapiens
tctctctgccctcccaacggaccaatgtctaatgtcagagtacaggacacagggattatttccatgagttcctacactaaaagtggtgttggcaacttttagaaacccaccccttcatcctgggcaagacttcctatcatatggctagaaagcaacatctatgacatttattctgtgacctatgtattactttgtacattgccaaacattcagcaggctagtgagtgakctgtttatttgcaagcttgggccaatgcttcttatctttaaaagctgagtactgccattgccaccatcaattggtacaatcttttttttttttttttttttttgagactgagtctcc

SEQ ID NO: 609242 - DNA, 520 bp, Homo sapiens
tatcataccatccctaattcctcctccctccccgcatctgcaagcagagttggccaggcctcctttgagccatccctgttgccctgtactgatagaatcaatgtacagtctgtttcctctgtgcactcctggagggcagggactattgccttggtcatctttttttatcttcagcccctatcaccatgctcagttctgcatatgwtccataaatgttggctgggtagatggcttctgtttcaacacaaataataaaagctaacatttatcgaacacttactatgtgccaggctctgttctgtgtgctttgacttgaagtatctctttcaatgctcacaattacactcataagatgagtaatatattttccccattttacatttgagtaaactctgtttacgttgagtaaacagagattggttaagtaacttgcctatggccacaaagctattaggtggtcgagttgggttttgatttcagatagtccaactccaggacctgggttcctaagcaaacacta

SEQ ID NO: 609243 - DNA, 520 bp, Homo sapiens
tatcataccatccctaattcctcctccctccccgcatctgcaagcagagttggccaggcctcctttgagccatccctgttgccctgtactgatagaatcaatgtacagtctgtttcctctgtgcactcctggagggcagggactattgccttggtcatctttttttatcttcagcccctatcaccatgctcagttctgcatatgatccataaatgttggctgggtagatggcttctgtttcaacacaaataataaaagctaacatttatcgaacacttactatgtgccaggctctgttctgtgtgctttgacttgaagtatctctttcaatgctcacaattacactcataagatsagtaatatattttccccattttacatttgagtaaactctgtttacgttgagtaaacagagattggttaagtaacttgcctatggccacaaagctattaggtggtcgagttgggttttgatttcagatagtccaactccaggacctgggttcctaagcaaacacta

SEQ ID NO: 609244 - DNA, 534 bp, Homo sapiens
ccaacctcccaggtagatgagctctgtgaggccacttggttcctccygtgtcaaggcagactcctccaccccgctgacctttatccctcatagcttccataaaggtcctctgaggttctacacctacgggtttacactgctacaggtaaggctcactttacacaaacacatatgtgagctgaatgtttgtgaattgattctatactgattggattacatcatcatttcaaaaaccattgttaatctccacctgctcttcagctctcattgacaatcaggcactttagcttaaagttttattgcccccacttccttacttttcttggcaagcagcaatctataaatcaatatttaaatataccaaggaagttcaccattaatggattcccaggtgaatcatcttataaagtgaaaaaattactgcttgataaaaagatcatcccctaagacatttgtattgtgaatatgatttttttcttggcttttattaatcaggttgcatgcatatacttagtggtgtagtaataaatcagt

SEQ ID NO: 609245 - DNA, 579 bp, Homo sapiens
taatttggaggcagagaagggatatgaaaaacattgtataactaaaataggaaaatgtacttggagatccatggaacagagaagggcacaggctgtttccaattctggcaccactgtttacaaagcaaacttttggcaaattatctgatttgcattctcctaacaagtgatggtgttcaccaggttttgatttggtttattggcattcatgtatattattttgtgaagtgtgtgtttaagtcttttgattaatttgaaaattgtattttgtttgttttctattgagttgtaggaattctttacatattcttgacacacgtctattgtcagatacatatattgcaaatatcttctcccaatctgscttccctatttattttaacagtattacatgataagtggaaattttcatttttgaggtagtataatttatcagtttttgtttgtttgtttgtttttgcttttgatggagttcgctctgtcacccaggttggagtacagtggcgtgatcttggctcactgcaatctccgcctcccgggtttaagcaattctcctgcctcagcctcccaagtagctgg

SEQ ID NO: 609246 - DNA, 591 bp, Homo sapiens
agtaagaacatagtttaactayataacattataaataaactggatataattgacttctataggctatttcatcacatgacaacagattatacattcttctcaagctcacatggaatattcaccaagatagaccacattctgggccataaaacacactttaacacatttgaaataatggaaatcatgcaatgtctgctctcagaacacagtggaattaaactagaaatcaataacggaaatgtagctgaaaaatcccaaaattattgcagattaagcaacaaacttctaaataacacaggtcaaagaagaaatctcaagagaaatttaaaaatattttgaggtaattgaaaataaaaagacaacttaaaatttatggatgcagtgaaagcggtgcttagagagaaatttatagtattgaatgcttatgttagaaaaggagaaaggtctaaaatcaataacctaagctctcattttaggaaactaggaaaaggagcacattaaatcagaggaagtagaagaaaagagataatacaaattacagcagaaatcaataaaattgaaaacaggaaacagaaaatcaacaaaaccaaa

SEQ ID NO: 609247 - DNA, 597 bp, Homo sapiens
attgcttgaaccggggaggcagaggttgcagtgagctgagatcatgccactgcactccagcccgggcaacagagcaagactccctctcaaagaaaaaaaaagaatagaacatgccattttgctaacatttaaaaaaattaactaattaatggggggaaaataactcttagaagcccaggaataaaagattaatttaacaacaaaatcagacaataccaaatttaataataaactctacattggaacaagagaaagattccagatattaattataatgtttaatayatttctggaatttttagccagtgtattgagacaagaaaaatcaatacaagttataaaaattggaagtgatgatattattatttttatgaacaaaaataaaaataaagtaattttctatatatcaaatccaacagaatctataggcatattttatgaccaataagagagttccaccctagttttcagaaagaaaatcaatgcagaaatattagagcattcctatttacccatattaactatgtgaaaatatagtggaaaacatgctatttaaataacagcaaaagttttatagtacttcagtataaatttaat

SEQ ID NO: 609248 - DNA, 617 bp, Homo sapiens
accaaacataaactatgtatattaagcaacaacataaagtgcrgtcacttattttaactcctgtaaactctgtgatcaattatgcgcctccatagatcttcattgtgtccctttatctttcttgtctctaccagatcagggccaccctatggtccctcctcttcatgattcatctcccaccattatatccagcctaagacagcctccaaaagcctatagaggatagcggtgttgtcttctccagggcctttctttattattattattgttattattattctttaagtatactttaagttctggggtacatgtgcagaacatgcaggtttgttacataggtacacacgtgccacggtggtttcctgcactcatcaacccttcaactacattaggtatttctcctaatgctatccccccaccacccccacaacccccggcaggctctggtgtgtgatgctcccctccctgtgtccatgtgttctcattgttcaactcccacttatgagtaagaacatgcagtgtttcattttctgttcctgtgttagtttgctgagaatgatggcttccagcttcatccgtgtccctgcaaaggacatgaactcatccttgtttatggc

SEQ ID NO: 609249 - DNA, 265 bp, Homo sapiens
gaatgtgcctggcatatttggagacgagcggtatgtttagttgggtggggtagagcaaattagaaaatttaaagaagatggaaaaaataataaataatacctgtttgcacctctatgtttaccattcttcctaatttatgcagtgttttataggtcattttgacaatattagatttagtgcaatgtctttaaagatattttcraagacattagtccaggaatttcttattattcagtcactggttatcaaaagtgctaaatctgg

SEQ ID NO: 609250 - DNA, 589 bp, Homo sapiens
atagaaaagagatatttgaataaagactttaggaaggtaaagaagagaattatgttgattttcagagaaacaaactgagagaatatcaacctaatttttactagatagaagcaaaagccaacacaaaagctcagaggtgggaatgtgcctggcatatttggagacgagcggtatgtttagttgggtggggtagagcaaattagaaaatttaaagaagatggaaaaaataataaataatacctgtttgcacctctatgtttaccattcttcctaatttatgcagtgttttataggtcattttgacaatattagatttagtgcaatgtctttaaagatattttcaaagacattagtccaggaatttcttattattcagtcactggytatcaaaagtgctaaatctggttgaaccgttgcaacaagttataaagatgctctgatatttgtcatattgttggatttcttttagacaatcacaccaaaccaaaccaaacaaaacaaaacaagctgaaaactttggcaaatcaacaaacgatttaatcctttgtggctcagtagctgagtaccagtaagatccagggagctcaaa

SEQ ID NO: 609251 - DNA, 523 bp, Homo sapiens
ttttgggactccacttacacatgtattatactgcttgatgtkttccgacagatcaccgagtctttatactttttaatgctttttttctcagtgcagtttagataatttctgttgacctgttttcaagctcactgatgttttcttatgcattattcaatctaatgttaagcattagatacggtgaattttttatttcatgaagtatgctttctagtactgtaatttccacttgtctctttttaaggtttctctttctccattgagatttctttattaatgtgtccatccttccttttaattcttgaacttatttctactagctgttttaaagtctttgtctgctactgtcaataactgtggcatctctagtcccatttctactgactttattcgctgggttgtgggtcacgttttcttaccactttgtatgtctagtaatttttttattgaatgctgggccttatgaatgctacaatgttgagtttggattatgttgttttcctttagggtgttgagtattgct

SEQ ID NO: 609252 - DNA, 588 bp, Homo sapiens
tgaatttttcacactttatccttatctactgcctgtctcccgactccaatcaccctgcaagctaaacacgccatatatattcaacaccatcttctctcctgtgaaagaygtgtcatttggctttgtggcccaatgaccacattcttgccttggagacacttgatgggtaatttgagttcagaatccctatagttcggccagtagatctaacccttcaactaagatttcctcttcaacaagcactaactttccccatgcctacgttttgattcaaaagtacaagacgaacaaaggattgaaaagattaaatgtgtgagagttttaattttcctctgggggaaaaaagacagcaagttatgattttcttctaagcaaacaaaccattttccatatgcctctaagagaaaactgcttttctattattctgcacattccacaaataagtccagtggggaggagggtgcctaggaagcagcacattttcttatgttgtagaaaaaatgtgttttccaactcatagtctctaagctctagtaaaatagttaggttcgaggagcaactctgcttttgaaaggcagccagggagca

SEQ ID NO: 609253 - DNA, 488 bp, Homo sapiens
atttgacattacaatttcaggcaatgacatacctaccaactgattcaacatttccattcatagactagcatactgggcaaatttgagttacttgccgcatatggatgagccccaaatgctttgttatgcaaggagtgccaaataagaaagactttytacaacactttagtcttttgggtgtgcatactgtttccacgttttgaggtattctcatatttagcttttatttagccctaaaggtgtagttccatactgtttttaagtgcagcttgagcaaatgataactatgaccccaaaaagttgatgaatacaatggtgcaacaagaacctaccttccagagaatgactccctcttccatcagacactcaagtctactcctcctcctttggtgaataaagtaagtctttactatatcaactcattatgtattatttatttaagcttgtttttattgttcaattgatatttttcctatctgtgaaagttg

SEQ ID NO: 609254 - DNA, 553 bp, Homo sapiens
tctgattggtccactagtggggtggggagacagattccctgaagttcacaaccttactttttcaatgtttttggcttacaagcatatctaataatataagcatgcttttattaattaatgaaagaagaaattgacattgtatattcattataaactcaactatatgcatagaaaaaaatagaacatatataaatagaaaaaacatatgtctaaaggtttacagtgattatctctggatgggattatggttattttctataattgtatgattttctacagtgtcacaagtctttttattattctgaaataggctgagtgcattggcacgtgcctgtaatcccagcattttaagagtctgaggctggtggattgctcgaggccaggagttcaagatcagcctgggcaacatggtgaaacctcattgatacrgttaggctttgtgtccctacccaaatctcatcttgaattgtaatccccgggtgtttagggagagacctggtgggaagtaattagattatagggcagtttcccacatgctgttctcctaatagtg

SEQ ID NO: 609255 - DNA, 634 bp, Homo sapiens
ggtgggctttaggtctggaactattatcaggattgtacagttaggacaggctttgttatgctgtcataaaaaagtaagccaaaaatctcagttgactttgcacaataaaagtttrtttcttgcccaggagatttctaatgcaagtcagataacattccaagagagttatcctccatgcagtgactcagtaatccagattgttttgatctatgaaactgccatatcaacatgttaagttccagatcaccacaataagggaagaaaagtggaaaatcacttaccaggtcttaaatgctttggcccagaagtgacaatggtcttacagctcattggccagaactagtaacatggcccaactgcaaaggctctgtgaaatgtacaataatgctaacaggtaggcattaatctcactttagagatgatgaaaattgaagtatagaaagataagtaacttttccaaagtcacaaagaggttggctcaggggttaaccccaggtaacatggctctacaatacacactcctaaccatgacagtgggccatttgggtagtgctagtattaatcctttgtggcactttaattattgaatttttcttagtttttccatttgtaaattataaataagaatatcaat

SEQ ID NO: 609256 - DNA, 634 bp, Homo sapiens
ggtgggctttaggtctggaactattatcaggattgtacagttaggacaggctttgttatgctgtcataaaaaagtaagccaaaaatctcagttgactttgcacaataaaagtttatttcttgcccaggagatttctaatgcaagtcagataacattccaagagagttatcctccatgcagtgactcagtaatccagattgttttgatctatgaaactgccatakcaacatgttaagttccagatcaccacaataagggaagaaaagtggaaaatcacttaccaggtcttaaatgctttggcccagaagtgacaatggtcttacagctcattggccagaactagtaacatggcccaactgcaaaggctctgtgaaatgtacaataatgctaacaggtaggcattaatctcactttagagatgatgaaaattgaagtatagaaagataagtaacttttccaaagtcacaaagaggttggctcaggggttaaccccaggtaacatggctctacaatacacactcctaaccatgacagtgggccatttgggtagtgctagtattaatcctttgtggcactttaattattgaatttttcttagtttttccatttgtaaattataaataagaatatcaat

SEQ ID NO: 609257 - DNA, 493 bp, Homo sapiens
tatttgctatgagtcgttttccctctgctcctggatctatgcaagaaacaatccttccctttcctccaactgttaggaatcatgtttttgcttcttcctctgcagagtgagtaactcctctgctttgttcttccccttcctccagtgtcaggtttgccttttctttgggaatacaaaatattgctttgcaaacgtgtatctgaatctcccaccttaaatttaggcaagtgtcttcttcaagtctttgtttctgctttatcatgaaaattataaactgtgcagaaaacaagacttctgtagaaaaagttcaaaggaagttacaagagaatgaggaaaggaagatatgaaaaatattattcttgaaaattgaaggttctgaaatgaccataactccatacaattaaaaattaagaggttgggcgcagtggctcatgcctgtaaccccaacatgttrggaggttgaggcaggaggattgcttgagcccaggagttc

SEQ ID NO: 609258 - DNA, 594 bp, Homo sapiens
gctgaacacttgggctggttccatatttttgcaattgcaaattaagctgctataaacatgcatgtgaagtatcttttttgtataatgacttcttttcctcctgggtagatacctagtagtgggattgctggatcaaacagcagatctacttttagttctttaaggaatccccagtgttttctgcagtgattgcactagttcacattctcaccaacagtgtaaaagtatttccttttcactacatcccctcaaatatcaattatgttttgatttttttattatggccattcttgcaagagtgaggtggtatcacattgtggttttgatttgcatttccctgataattactgatgttgagcatttttccatttgcttgttggccatttgtatatcttcttttgataactgtctattcatttmtttagcccactttttgatggggttatttatttcttgctgatttgagttatttgtagattctggatattagtcccttgtcagatgtatacattgcgaagattttctcacactctgtggcttgtctgttaactctgctgattatttcttttgctgtgcagaaactttctagtttaa

SEQ ID NO: 609259 - DNA, 519 bp, Homo sapiens
cttttcacctctcagttcaatgttggctgtgggtttgtcatagatggcttttattaccttaaggtatgtcccttgtatgccgattttgctgaggkttttaatcataaaggatgctggattttttcaaatgctttttctgagtctattgagacggtcatgggatttttgtttttaattctgtttatgtggtatatcacattcattgacttacgtatgttaaaccatccctgtataactggtatgaaacccactggatcatggtggattatctttttgatatgttgttggattttgttcactagtattttgttgaggattttggcatctatgttcatcagggatattggtctgtagtttgttttgctgttgttgttattgttccgtctttccctggttttggtattagggtgttactggcttcatagaatgatttagggaggatttcctctttctgtattttttggaatagtgtcaataggattgatacccattcttttttgaacatctgattagaattca

SEQ ID NO: 609260 - DNA, 629 bp, Homo sapiens
gtgctgacaccacctctcctctaagcccagactgcacatctcatgtctctaaaagagtccccttccttctacttgaggagaggagaggagagggaagagtgggaaggactttgtcttgcatcttggatgtcagctcagccacagcaggatagggcactggtcagagctgcgagaacccctttccaggtcctagctcctagacaacatttctagacacatcctgggccagaagggaacccacttccttgaagggaaggacccagtcctgggaggattcarcatctgctaactgaagtgttggccctgaataaacagcagcaatacccaggtagtacaatgtggcccttgaggaaagcagagggaaaagtaaaggagacttgtcttacaccatagatagcagctctgccacagtagggtagagtacaacacaggctcttggggtccaggattccaggccttggctcttggatggcatttctagacctgccctgggtcagagggctgcccactgccattaaaggtgagtcccaagctaagcagcattcaccacaagctgactgaagagcccttgggctttaagtaaacatcggtggtggcttggcagaatccccccatgggccagtggtggc

SEQ ID NO: 609261 - DNA, 543 bp, Homo sapiens
aagtgtttctctggtcatctaaagaacctgtccatctstgtggtgaccctaatgacctttataagactgaagagtttgctttagagctcaatatccaggtgggaataaaaagatgtgacatccaaatgtagctttcttacttacactatccagacagtgagtttgattcagtgatttaacttatccaagagcctattttcccacttctatactacatcatgtcatattatagcccattataaaatatatacatatataaagttcaaatcattttgattactcatatgctatattatatacattcaatgtattatcctccaaaaaagacccaaggctaccaactggctaatatccatcaaatacatcaaattactagattagtcttattctatcttctacttacaggttttctaattatttgtaataaattttttattattctgataataaaattaatgtatactccctgtgggaaaagttcaaagagaataaaggagaaaaatgtccttaagcttagtaccaagcaataaccaatgttagcaa

SEQ ID NO: 609262 - DNA, 604 bp, Homo sapiens
gactttaaggtttgtggagatgaaaggttgtttgtatacacatacacttaaatatatacacatacattaattttaaaactataataaattaaagccttaccttttaaatgggaactatgaaataattaaaagtaaatttattgtaaaatgagataattaacagagcatctccatttttggtctattttgttactggggaaaaaatattagaaatcattataaagcctgaagtaaactatttctaaatggaagatagtaattttwcctacaaattaacactaatattaacttatttctctaacacaaaatatcaattagagttctgatcttgggtggtacatttctagaatactgaagagaagaatgttgtagaatgtactcatttgtagcaattttctactatttaatacaacctggcagtaaatgttttatcgatttgttcctaatgaatacttaagtgcatgtctgagccagaatttaaatattgtggctgttgaatggcagaaagccaaaaaatcccaaagagctgtattacaaaattgttaactggccttttattattaggtttctaataaaaattcaagaagtttatcacctggatcca

SEQ ID NO: 609263 - DNA, 572 bp, Homo sapiens
ttgttaactggccttttattattaggtttctaataaaaattcaagaagtttatcacctggatccaaatatcaactgtcctcaagttccactaaatttaggatgagtgaaacataaagttttgaaacrttcaacaggactcttgaaagatttctgtaacattcgctgaatgactacccttatttgtccaaagaacatttaatgctctagagagagtatattccaccaaatggtacacatccatataaaaaacgttcttcattacaaaatgagcagtttcttgtaagaagcagtttgttattgtttctgcactagaacacattatttattgacctccatatattccataataaaaggaatatttcactttaaaaaatacctgatcctgatataaattcttatttcctctaaatagtaacttagaacagtttttccttgcctacacagtgaatttgtttatggaaaaggatagttaaagactgaattcctttaatgcccaagtataatgaatatttgttttcatggggaaaatgtttttgcattttgaaacccaaaatccatacccattgttgct

SEQ ID NO: 609264 - DNA, 572 bp, Homo sapiens
ttgttaactggccttttattattaggtttctaataaaaattcaagaagtttatcacctggatccaaatatcaactgtcctcaagttccactaaatttaggatgagtgaaacataaagttttgaaacgttcaacaggactcttgaaagatttctgtaacattcgctgaatgactacccttatttgtccaaagaacatttaatgctctagagagagtatattycaccaaatggtacacatccatataaaaaacgttcttcattacaaaatgagcagtttcttgtaagaagcagtttgttattgtttctgcactagaacacattatttattgacctccatatattccataataaaaggaatatttcactttaaaaaatacctgatcctgatataaattcttatttcctctaaatagtaacttagaacagtttttccttgcctacacagtgaatttgtttatggaaaaggatagttaaagactgaattcctttaatgcccaagtataatgaatatttgttttcatggggaaaatgtttttgcattttgaaacccaaaatccatacccattgttgct

SEQ ID NO: 609265 - DNA, 572 bp, Homo sapiens
ttgttaactggccttttattattaggtttctaataaaaattcaagaagtttatcacctggatccaaatatcaactgtcctcaagttccactaaatttaggatgagtgaaacataaagttttgaaacgttcaacaggactcttgaaagatttctgtaacattcgctgaatgactacccttatttgtccaaagaacatttaatgctctagagagagtatattccaccaaatggtacacatccatataaaaaacgttcttcattacaaaatgagcagtttcttgtaagaagcagtttgttattgtttctgcactagaacacattatttattgacctccatatattccataataaaaggaatatttcactttaaaaaatacctgawcctgatataaattcttatttcctctaaatagtaacttagaacagtttttccttgcctacacagtgaatttgtttatggaaaaggatagttaaagactgaattcctttaatgcccaagtataatgaatatttgttttcatggggaaaatgtttttgcattttgaaacccaaaatccatacccattgttgct

SEQ ID NO: 609266 - DNA, 223 bp, Homo sapiens
tgttactattttcactatttctcttgttgatttttaaagtactataaccccccaaaaattagtttytcttaagcattttgtgtcataattttgggtgcttttcttcttctaataataagtttctatttaaatgaagttttaaataatacattgaatggtcaggactttttttttttttttttacattcaaaaatctagtgagagatcttgaaactttgagact

SEQ ID NO: 609267 - DNA, 223 bp, Homo sapiens
tgttactattttcactatttctcttgttgatttttaaagtactataaccccccaaaaattagtttctyttaagcattttgtgtcataattttgggtgcttttcttcttctaataataagtttctatttaaatgaagttttaaataatacattgaatggtcaggactttttttttttttttttacattcaaaaatctagtgagagatcttgaaactttgagact

SEQ ID NO: 609268 - DNA, 223 bp, Homo sapiens
tgttactattttcactatttctcttgttgatttttaaagtactataaccccccaaaaattagtttctcttaagcattttgtgtcataattttgggtgcttttyttcttctaataataagtttctatttaaatgaagttttaaataatacattgaatggtcaggactttttttttttttttttacattcaaaaatctagtgagagatcttgaaactttgagact

SEQ ID NO: 609269 - DNA, 223 bp, Homo sapiens
tgttactattttcactatttctcttgttgatttttaaagtactataaccccccaaaaattagtttctcttaagcattttgtgtcataattttgggtgcttttcttcttytaataataagtttctatttaaatgaagttttaaataatacattgaatggtcaggactttttttttttttttttacattcaaaaatctagtgagagatcttgaaactttgagact

SEQ ID NO: 609270 - DNA, 439 bp, Homo sapiens
tctgcctgaccaatatggtgaaaccccgtttctactaaatacaaaaaattagccggaactggtggcttatgcctgtaatcccagctacttgggaggctaaggcaggagaatcacttgaacctgggaggtgaagctgcagcaagccaagattatgccattgcactccagcctgggcaacaagagtgaaacccagtctcaaaaaaaaaaaaaaaaaaaaaggcttgcaattagtgtatgtcctttctcacccacrggaaatcaactttcagatggaaagaaatacaaataccaagcgtgaaactcaccttttttttgtcctcttcggttctcattctttcaccatagaccaaaaacacatgctgaccaggatcataacacccaggggactggtcaaccagcatcaactgacaccagcggaaaaggtcccggaggttgaatt

SEQ ID NO: 609271 - DNA, 597 bp, Homo sapiens
ctcagtagttagggtgattggtactgtgataaatcgaatagtttcccctgaagaattcatgtccacccagaacctgtgcatgtgataatatttggaaatactgtctttgcagaggtaatcaagttatgacgcagtcatacaggattagagtgagccctatattcrgtatgactggtatccttacaagaataaggaaatttgaacacagacacagaggtaagatggaaatgtgaagatggaggcagaaattgaattatgctgacataagccaaggaaagccaaagacttctggcaactaccactacctagagggatgcagaaatcgatctccccctggggttttcagggagagcatggccttgctgataccttgattttggactgctagccttaaaaactgtgagagaataaatttctgttgttttaaactacccagcttgtggtaattcattatggccctaggacactaacatagacactaatggtgcattactagaacttgtatgtttattacattgctttttctttacatgacaatttattccattcacgcatgtacacacacacacacacacacacaaacacaattagcccttt

SEQ ID NO: 609272 - DNA, 594 bp, Homo sapiens
agaactaaggcgggccgggctcagaccagcgctgcctcaggatgtaaagtgtaacaagagggccaggggaggtggtgggggacaacatgggcctgtgaggcctgtgggtgcccgcgttccccagctccccccgcagcccgctccacagtggtccgctccggttggttgtcacgtgcgcattcgggttccagacccaaggctgcgtgttctccaccgcttgttgtggccagtgttactgcggtgaccgccagagcagcctcgacgctatggaggagcctggtgctacccctcagccctacctggggctggtcctggaggagctasgcagagttgtggcagcactacctgagagtatgagaccagatgagaatccttatggttttccatcggaactggtggtatgtgcagctgttattggattttttgttgttctcctttttttgtggagaagttttagatcggttaggagtcggctttatgtgggaagagagcaaaaacttggtgcaacgctttctggactaattgaagaaaaatgtaaactacttgaaaagtttagccttattcaaaaagagtatgaaggctatgaagtagagt

SEQ ID NO: 609273 - DNA, 594 bp, Homo sapiens
agaactaaggcgggccgggctcagaccagcgctgcctcaggatgtaaagtgtaacaagagggccaggggaggtggtgggggacaacatgggcctgtgaggcctgtgggtgcccgcgttccccagctccccccgcagcccgctccacagtggtccgctccggttggttgtcacgtgcgcattcgggttccagacccaaggctgcgtgttctccaccgcttgttgtggccagtgttactgcggtgaccgccagagcagcctcgacgctatggaggagcctggtgctacccctcagccctacctggggctggtcctggaggagctaggcagagttgtggcagcactacctgagagtatgagaccagatgagaatccttatggttttccatcggaactggtggtatgtgcagctgttattggattttttgttgttctcctttttttgtggagaagttttagatcggttaggagtcggctttaygtgggaagagagcaaaaacttggtgcaacgctttctggactaattgaagaaaaatgtaaactacttgaaaagtttagccttattcaaaaagagtatgaaggctatgaagtagagt

SEQ ID NO: 609274 - DNA, 506 bp, Homo sapiens
tcctacgagaaaagaggacatgataattggttggcagctcggactgctgaaagaaacctcagtgatttaaggaaagaaaatgctcacaacaaacaaaaattaactgaaasagagttgaaatttgaacttttagaaaaagatcctaatgcactcgatgtttcaaatacagcatttggcagagagcattccccatgtagtccctcaccattgggtcggccttcatctgaaacgagagcttttccctctcctcaaactttgttggaggatccactcagactctcacctgtgcttccagggggaggaggaagaggcccaagcagcccagggaatcccctggaccatcagattaccaatgaaagaggagaaccaagctatgacaggttaatcgatcctcacagggctccttctgacactgggtccctgtcatctccggtggaacaggaccgtaggatgatgtttcctccaccagggcaatcatatcctgattcaactcttcctccacaaag

SEQ ID NO: 609275 - DNA, 604 bp, Homo sapiens
gggactaaaaacttcttggaaagctactggagttcagatccagccaaatggggaaatgttggcaaacaactgagaaactcagttgggactctaaaaattctcttaggagaggtgcagtatcccaggagtgaggcatatgttctaagaggaaaataaaatataattatcataacacagcttaaaactaggtcttgagagcagcaagatgatctgcaagtaattacaaattctgcccagaaaaaaaattcaaaattcttgagtagttctatatcatattatccataaattcagcatactttaaaaaaagtaccaaatatacaaaaaagcaagtaaaacagactgataagaaataaatcagttattaaaaacaaactcatagataatccagatattggagttaacagatagggcatcataacatctatgrtgaatataaaggaaagaaagaaaaaatgaaagacaaaacaggttgtgtcagatttctttctggaagctttaaaatgctcactttattttcatagattctaatttcctaaattatgtttgatgtttcaagcaaaaatcatagcattgtctagtgttattctaaatggatgtaagacca

SEQ ID NO: 609276 - DNA, 565 bp, Homo sapiens
ttttcactttataatactttgctcagatcaatcagaggaatccttatttatgacaatagtcttatgaaatgtatttcttaaagaataagacttgaaagttaaaattgctccttgatccatggcctgcagaatagatgtgttagcagacatgaaaatatccatctccttgtacatcttcatcagaactcttgggtgacctggtactttctcaataaacagcaatctttagaaaggaacctttttttctgagcagaaagtctcaacagtgagtttaaaatattcaggaaacggatgctataaacagataagctgtcatcaggctttgttgttccatttacagagcacaggtagagtagattgagcataattcgtaagggccctaggattttcagaatgaacattggctcaatttcaagtcaccagctgcattagcccctaaaaaaagagtcagcctgtcctttgaagttttgaagtcaagcattgacttctcttctctagctrtgaaagtcctagatggcatcttcttccaatggaaggctgtttcctctacattgaaaatatgttg

SEQ ID NO: 609277 - DNA, 499 bp, Homo sapiens
tgcagcactcctgcactggggcttttgcactagctcagccctctaccaggaggtatcttctgccaggtggccaaatggctccctccttccaatcttggctgaaatgtcatcttcttagtaagacctacccagctccctacttacaattgcaccccacctccatattctggaagctccttcccctgcttagtttttcccaccactctcatcatcttctaaaatagatcatcctgcaattatttatcatgatttttgtccatcctccctccaccagcatagagatccttctctgttttgtttacagctttatccctattgcctggcatccattctgctagatcgatacttgytgaatggcaaatggagtctagagcaagagaaactaacaatttgctttcactggactataattcataaccaaacaagccatatccccactgggagaggagttgaatccatgattctatatcatcccagaaagcaaccattttctctcata

SEQ ID NO: 609278 - DNA, 620 bp, Homo sapiens
cttttgtttgctgccctggagtttccccatcatggaatgatgaattggaatcagacatgggagagcagaaagggggcctctcttgtctaaagtgggagacaggctatcatgaaggaactctggggcaccttctcagtccaaccgccttaagaaagagtgcacgtggaagatgagaatctgcaagttgattctcttaagactagccaagctgtgcctcccggaaagtcttcaagaacccaaagttagggggtgcccagtgagttggaagattatwagagtaaagaagaatcatgaagagggaaggcatttctctcttttttttttctttttctcattttccctttttaagataaaaaaagttcttaaaatttacatatatcctcgggacttttcttttaatagagatgaggactgattatgttgcccaggccagcctcaagcgatccttctgccttggactcccagagtgctgggattacaggcgtgagccactgttcctggccttggctggcatttcttaattaaggggagagcctcacccatgatcacaactcacctatatgcagcagaattggagaaaactgttcagcagctcccagaaacttccctggggcttgtgt

SEQ ID NO: 609279 - DNA, 380 bp, Homo sapiens
aaatatacttctctgtgaagccacwaccttttaggattttctgtcacttgcaggtgaatataaatctgttggatacaatattgtgtgcatggtaggtgggccgtcagtggtgagccggggctgccattcaggtaagaactgactgttaaattttcatgaattttgcatgctggtgaatgtcacgttggtagcctgaaattggccatggtgggagtatttacaccacaggaattggcaaatgctacatacacatcagggctttatttcctccaagagatctggttattgactacttaccatctaccaccacatcactgtgggattaaggattttatccactaaagtttgttcatatagagaggtgatctgacctcttcatt

SEQ ID NO: 609280 - DNA, 488 bp, Homo sapiens
aaattaatctctaagagagaaatgtcagccaccatggcaagcatgtaggtaggataaggaactgagagcagccaccacttccttacacctcctcactccatcttcccatcctaatttcttgatttcctctcaagccaaggggcatgccagccatggagtcaagcacacgagtgcacataaatatttttggggggtgtcmatttgatgtattcattcgatgtttaccaagggccctacatggcagacactatttcaagagctggaaaaacaacaaaaaataaaatagcaataacccctgtgctcatggagacagacattaaacaatatgaataaataaaagtaaaggtgtatgagaaagtgctaaaaataaagccaggaaagaatgagggccggggactgcagttttatatgggtgtcgaggaacgtgttttctcgtatgatatctgaatccagatgtgtaggaaatggcttggcttgggttgggaaac

SEQ ID NO: 609281 - DNA, 546 bp, Homo sapiens
ccaccagtctgaatcctgggtctccaaagaaagagagaataattttgaggttagaccacatgatgcttttacagtgcacttaattttttttaacaaagacatttctaagagtctaaactgcactcttccttaaaaactcrggagtagtctctgttgcactagctattaatgaagaaaacagaattcagtcaactgagaaaataaaaaaaaaacacttttgctcagaaaaacaaggtcctaggagagaaaaaacaaacaaacacaaaaacatgaaggccttttttttaattttataattattatactttaagttttagggtacatgtgcacaatgtgcaggttagttacatatgtatacaggtgacatgctggtgtgctgcacccattaactcctcatttagcattaggtatatctcctaatgctatctctcccccctccccccactccacaacagtccccagagtgtgatgttccccttcctgtgtccatgtgttctcatcgttcagttcccacctatgagtggggacatgcagtgtttggttttt

SEQ ID NO: 609282 - DNA, 571 bp, Homo sapiens
aatcaaaaatctttccttttgtttttatttttcttttgctggctgtttttctccctgcagtatactacctttcatttagtaggaatttagccactttagaggccttgttccccatcctttggaacttttcttcagatttgatmaagtcaggtagagttggccaaacccagtaggaaaaagatggaaacaacatcaaaaacagaaacaaacaaacagcaacagaaaaacacttaagcaaacaaatgaatgaaacaaattatatgatgacttgagtgctctaatggtaaggagaaattaagaccagctggttgttaatcttaactttagccaagacaaaccccaattcagttagttacctagggatgggtctcaggctgtagactgctgtctaccatcctagaagaaggaaaaaaaaaacctcatcttccatgttggaatcgagctcaaactccataaatgagttacctgccttccatagttatggaaagaggaaatcttgccttcgtcatgggaagcaagtaaaactccaaaaaagaggagttgtacagcaaaataaactttagatctcaac

SEQ ID NO: 609283 - DNA, 571 bp, Homo sapiens
aatcaaaaatctttccttttgtttttatttttcttttgctggctgtttttctccctgcagtatactacctttcatttagtaggaatttagccactttagaggccttgttccccatcctttggaacttttcttcagatttgatcaagtcaggtagagttggccaaacccagtaggaaaaagatggaaacaacatcaaaaacmgaaacaaacaaacagcaacagaaaaacacttaagcaaacaaatgaatgaaacaaattatatgatgacttgagtgctctaatggtaaggagaaattaagaccagctggttgttaatcttaactttagccaagacaaaccccaattcagttagttacctagggatgggtctcaggctgtagactgctgtctaccatcctagaagaaggaaaaaaaaaacctcatcttccatgttggaatcgagctcaaactccataaatgagttacctgccttccatagttatggaaagaggaaatcttgccttcgtcatgggaagcaagtaaaactccaaaaaagaggagttgtacagcaaaataaactttagatctcaac

SEQ ID NO: 609284 - DNA, 571 bp, Homo sapiens
aatcaaaaatctttccttttgtttttatttttcttttgctggctgtttttctccctgcagtatactacctttcatttagtaggaatttagccactttagaggccttgttccccatcctttggaacttttcttcagatttgatcaagtcaggtagagttggccaaacccagtaggaaaaagatggaaacaacatcaaaaacagaaacaaacaaasagcaacagaaaaacacttaagcaaacaaatgaatgaaacaaattatatgatgacttgagtgctctaatggtaaggagaaattaagaccagctggttgttaatcttaactttagccaagacaaaccccaattcagttagttacctagggatgggtctcaggctgtagactgctgtctaccatcctagaagaaggaaaaaaaaaacctcatcttccatgttggaatcgagctcaaactccataaatgagttacctgccttccatagttatggaaagaggaaatcttgccttcgtcatgggaagcaagtaaaactccaaaaaagaggagttgtacagcaaaataaactttagatctcaac

SEQ ID NO: 609285 - DNA, 549 bp, Homo sapiens
tcgtcatgggaagcaagtaaaactccaaaaaagaggagttgtacagcaaaataaactttagatctcaaccaaattttgggagatgagggattctctggagatggtgctctcagacctcagaaaattgtcctcttagtttgagccataaagttagctcatgctagtaccaagcaacaacaggagatttgtcaaaggtcaggggcatctctactcacaatccttccatagttaccaaatgtaaaccccgaatactggagacaggtctcagttaatttaraaagtttgttttgctaaggttgaggatgtgtgccagtgacacagcctcagaaagtcctggcaacatgtgcccaaggtggttagggcatggcttctttttatacattttagggagacatgagacatcaatcaatatatgtaagaagtacattggttccatctagaaaggcggggacaacttgaagcatggagggggcttccaggtcacaggtaggtgagagacaaatggttgcattcttttgagtttcagataagcttttccaaaggagggaa

SEQ ID NO: 609286 - DNA, 558 bp, Homo sapiens
cagaaaaataaaagaaacatttgaaagcattaggatggggattgtagccctgaaagaattcaggattcagtccaaattgtgtaaccacccaatgggttcttgcccaaattacaagtccaaattacttgcccaaattacacaattccaaattgtgtaacttgcccactgcctagacagagccaatttatcaagacagaggaattgcaatagtaaaakagtaattcacgcagagctggctatgtgggagactggagttttattattactcacatcagttttcctgataatttggggatcaaagtttaaggataatttggtgggtaggaggtcagtgaatcaggagttctgattggtggggtcagagattaaatcacagggagttgaagctgtcctgtagtgctgagtcaattcctggatggggcccacaaaaccagatgagccagtttatctgggtggtgctaactggtccatcgagtacagggtctgcaaaatatctcaagctctgatcttaggtttgacaatagtgatgttatccccaggagcaacttggggacgttt

SEQ ID NO: 609287 - DNA, 605 bp, Homo sapiens
ggaggtcagtgaatcaggagttctgattggtggggtcagagattaaatcacagggagttgaagctgtcctgtagtgctgagtcaattcctggatggggcccacaaaaccagatgagccagtttatctgggtggtgctaactggtccatcgagtacagggtctgcaaaatatctcaagctctgatcttaggtttgacaatagtgatgttatccccaggagcaacttggggasgtttagaatcttgcaatctccagctgcatgactcctaaaccataatttctaatcttgtggctaatttgttagtcctgcaaaggcagtctagtccccaggcaggaaggggatttgttttgggaagggactgttatcccctttgtttcaaagctaaactgtaaactaagttcctcccagttagttcagcctacactcaggaatgaacaaggacagcttagaagttagaagcaagacggagttgcttaggtcagatctctgtcactgtctcagttataactttgcaatggtggcttcagttgcagaaaataataaaaactcaaaaacagtggatgagactaaaatctaccaacaggtatactaccgtttttttctga

SEQ ID NO: 609288 - DNA, 605 bp, Homo sapiens
ggaggtcagtgaatcaggagttctgattggtggggtcagagattaaatcacagggagttgaagctgtcctgtagtgctgagtcaattcctggatggggcccacaaaaccagatgagccagtttatctgggtggtgctaactggtccatcgagtacagggtctgcaaaatatctcaagctctgatcttaggtttgacaatagtgatgttatccccaggagcaacttggggacgtttagaatcttgcaatctccagctgcatgactcctaaaccataatttctaatcttgtggctaatttgttagtcctgcaaaggcagtctagtccccaggcaggaaggggatttgttttgggaagggactgttatcccctttgtttcaaagctaaactgtaaactaagttcctcccagttagttcagcctacactcaggaatgaacaaggacagcttagaagttagaagcaagacggagttgcttaggtcagatctctgtcactgtctcagttataaytttgcaatggtggcttcagttgcagaaaataataaaaactcaaaaacagtggatgagactaaaatctaccaacaggtatactaccgtttttttctga

SEQ ID NO: 609289 - DNA, 619 bp, Homo sapiens
atgaacaccaccttgaaaataaccaaagygaaacaattgcagatgacaaaagcctcagaacagccatgataaagtctagtcatctctgtggcacactgtagtttaacataacgatcatgattattactgataacatatactgagacataacagaattacaaaaatcttacattgttatggaacacataccaataacacattcatataaatacactctaaagaaaacctgataccatttcatacttaacaatgtttcttgtactattttaatataccaaataagccaaatatgtgtcttttggactttggggtaactaatatctaaaaggttaaccagatttttaaaaaggcttaatttagaatttaactttggaaagcttgtcaaatatcaaaggtttaaacacttgctattacaagataagatcccagattactgtaagtcatttatttagccaaaatgataactcaaaacatttttaaaggcaaaaatctttactcatggatagaggagagactcagttttccaaacaggacccaataaagacagcaagaggccaaataaatctgtctctttgttcctcccctcctttttttttctgtcacttattcaaaaggcaaa

SEQ ID NO: 609290 - DNA, 526 bp, Homo sapiens
caaaaacattctactttccttctataccttgcatgtaaacctrtttttccagtagtctcagatacacgtgttacaatgttaactcttagcagcttttacttttagtgaaaaacctggtaggtaagcagttttaacaatgtataagattgcagagcccatgacttttcccggcttagccaaggtagttggctaactccatataccccaggccttacctagaatctaatggctttaaaacagacaagtcaaacaattactaaaagtcatagcattttatgcccttaaaacatctaccaaacagtatctgacttgcctaatgtagaccaaatgtgtgaactttgaagacgtttttattttactttaccaattatctttaaactttctttatttttcaaagattatcagaatcacgtgaactaaaggcattaatgtttctatttttctgacattatgtttgattcaagtgcttatatttgtttaagccaattaactagagctcttttatataaacatcacacacataaca

SEQ ID NO: 609291 - DNA, 526 bp, Homo sapiens
caaaaacattctactttccttctataccttgcatgtaaacctgtttttccagtagtctcagatacacgtgttacaatgttaactcttagcagcttttacttttagtgaaaaamctggtaggtaagcagttttaacaatgtataagattgcagagcccatgacttttcccggcttagccaaggtagttggctaactccatataccccaggccttacctagaatctaatggctttaaaacagacaagtcaaacaattactaaaagtcatagcattttatgcccttaaaacatctaccaaacagtatctgacttgcctaatgtagaccaaatgtgtgaactttgaagacgtttttattttactttaccaattatctttaaactttctttatttttcaaagattatcagaatcacgtgaactaaaggcattaatgtttctatttttctgacattatgtttgattcaagtgcttatatttgtttaagccaattaactagagctcttttatataaacatcacacacataaca

SEQ ID NO: 609292 - DNA, 526 bp, Homo sapiens
caaaaacattctactttccttctataccttgcatgtaaacctgtttttccagtagtctcagatacacgtgttacaatgttaactcttagcagcttttacttttagtgaaaaacctggtaggtaagcagttttaacaatgtataagattgcagagcccatgacttttcccggcttagccaaggtagttggctaactccatataccccaggccttacctagaatctaatggctttaaaacagacaagtcaaacaattactaaaagtcatagcattttatgcccttaaaacatctaccaaacagtatctgacttgcctaatgtagaccaaatgtgtgaacttygaagacgtttttattttactttaccaattatctttaaactttctttatttttcaaagattatcagaatcacgtgaactaaaggcattaatgtttctatttttctgacattatgtttgattcaagtgcttatatttgtttaagccaattaactagagctcttttatataaacatcacacacataaca

SEQ ID NO: 609293 - DNA, 604 bp, Homo sapiens
tcccatcccttcaaaccttgtgaggcacatcttttctgaatgcttagatgcctctaatgatgctgtcactctgaaagccacctgctcatgtttttatgctgatacttttcttaaagtatatgcttctgraagtgttgtgtaaggaactaacacagtacatgatgacattagccagtaataggatactttcataaaaatttaatcaacatattaatataaaattgttttacttaaaagtccttgttctttccttgaaggaaagtttctcttgtatccccttctgttctttctcaaagttaatttagagattgagaaggagcagtgtcaaatctattttttcctctgtaaaattctttattggcctgatattcaccatatctcactaagaagcctccaaagctgcctaattccagccttgcacccttattactttacacaatgacagcaggttataactctgagccccattcatattcacacacatttacaattataccagaaaagaccctacctaaaatccaccttgcttagggaaagacacaggattataaatagcaactatttctgctacttgcaagttaaaaatattttcttgatccaaaaa

SEQ ID NO: 609294 - DNA, 604 bp, Homo sapiens
tcccatcccttcaaaccttgtgaggcacatcttttctgaatgcttagatgcctctaatgatgctgtcactctgaaagccacctgctcatgtttttatgctgatacttttcttaaagtatatgcttctgaaagtgttgtgtaaggaactaacacagtacatgatgacattagccagtaataggatactttcataaaaatttaatcaacatattaatataaaattgttttacttaaaagtccttgttctttccttgaaggaaagtttctcttgtatccccttctgttctttctcaaagttaatttagagattgagaaggagcagtgtcaaatctattttttcctctgtaaaattctttattggcctgatattcaccatatctcactaagaagcctccaaagctgcctaattccagccttgcacccttattactttacacaatgacagcaggttataactctgagccccattcatattcacacacatttacarttataccagaaaagaccctacctaaaatccaccttgcttagggaaagacacaggattataaatagcaactatttctgctacttgcaagttaaaaatattttcttgatccaaaaa

SEQ ID NO: 609295 - DNA, 604 bp, Homo sapiens
tcccatcccttcaaaccttgtgaggcacatcttttctgaatgcttagatgcctctaatgatgctgtcactctgaaagccacctgctcatgtttttatgctgatacttttcttaaagtatatgcttctgaaagtgttgtgtaaggaactaacacagtacatgatgacattagccagtaataggatactttcataaaaatttaatcaacatattaatataaaattgttttacttaaaagtccttgttctttccttgaaggaaagtttctcttgtatccccttctgttctttctcaaagttaatttagagattgagaaggagcagtgtcaaatctattttttcctctgtaaaattctttattggcctgatattcaccatatctcactaagaagcctccaaagctgcctaattccagccttgcacccttattactttacacaatgacagcaggttataactctgagccccattcatattcacacacatttacaattatacmagaaaagaccctacctaaaatccaccttgcttagggaaagacacaggattataaatagcaactatttctgctacttgcaagttaaaaatattttcttgatccaaaaa

SEQ ID NO: 609296 - DNA, 511 bp, Homo sapiens
gctagtttccatgcttggcctcagagcccattccaatgactcacccaagcaaggagatgcccacctctggccatcttggagatgtgtgtagactagatctgcttgactcacaagtcttcactcagccaaaacatccgcccaagcagaaagacccctacctctgcacatttcagagaagtgtaggggctatacctactcgatctagaaggtcaaagagcttttcaattcagccaaaaccccaccccacagctcttccaggacagggaggtaatcctacatcatgcatttcatagaaccrtatcttctggtcccacccatcctgagcagcaattctgcctcacctcagagcccagcttgcagtcttgcccagctactcatctcaaagagcagaactgcccagccagggaatgcatcctgtgaccaacctgaccagaagccattgcagtacctagccatcagctccgactgacaacagtctcaccagtggtgtcaccagacagcagaacctaga

SEQ ID NO: 609297 - DNA, 505 bp, Homo sapiens
cagggtggggcatcgcctcacccagaaagtgcaaggagctggggttcttcctcccccagccaagggaagccatgagggactgtgctatatggtccagatactatgcttctcccacagtttttgcaatccacagaccaggagattccctcatgtgccaacaccagcagggccctgggtttcaagcacaaaactgagtggctgtttgggcagacactgagctagctgcaggagttttatttatttatttatttattttaatttcataccccagtggcacctggaacccgtgtgacagaacccttcactmccctggaaaggggtctgaagccagggagccaagtagtgtcactgtcactcagcgggtcccacacccacggagcccagcaagctatgaaacactggcttgaatttgtcactgctagcacagcagtctgaagtcaatctgggatgatggagcttggtggggcaaggggcgtccactgacagtgttaaggaggctgggaag

SEQ ID NO: 609298 - DNA, 505 bp, Homo sapiens
cagggtggggcatcgcctcacccagaaagtgcaaggagctggggttcttcctcccccagccaagggaagccatgagggactgtgctatatggtccagatactatgcttctcccacagtttttgcaatccacagaccaggagattccctcatgtgccaacaccagcagggccctgggtttcaagcacaaaactgagtggctgtttgggcagacactgagctagctgcaggagttttatttatttatttatttattttaatttcataccccagtggcacctggaacccgtgtgacagaacccttcactaccctggaaaggggtctgaagccagggagccaagtagtgtcactgtcactcagygggtcccacacccacggagcccagcaagctatgaaacactggcttgaatttgtcactgctagcacagcagtctgaagtcaatctgggatgatggagcttggtggggcaaggggcgtccactgacagtgttaaggaggctgggaag

SEQ ID NO: 609299 - DNA, 556 bp, Homo sapiens
aagtttattaacaaagtaaaggaataaaagaatggctactccatagacagcgcagcctcaagggctgctgttgcccatttttatggttatttcttgttgatatgctaaacaaggggtggattattcatgcctcccctttttagaccatatagggtaacttcctgacattgccatggcatttgtaaactatcatggtgccaatgggaatgtagcagtgaggacgaccagatgtcactctcattgccattttggttttggtgggttttggctgactccttaactgcaacctgttttatcagcaaggtatttatgacctgtattttgtgctgacttcctatctcatcctgtgacttagaatgccttaactgtctgggaatgcagcctagtaagtttcagcctcatttcacccagctcctatttaaaatgcagttgctctggttcacacactgctgatggagattcatcttctgtaacttcaggmtgaataggggctatgatattcctacctaactatgagcgtttcttgcattcaaggtagagaggagctcagtcagaa

SEQ ID NO: 609300 - DNA, 343 bp, Homo sapiens
tgaatttataggcataaaggtgtttgtgttatccctttattatagttyaatatctgtcaagtctattgagatgctttccctattacatttatgatattgataatttattacccctaggatttttgtttctttgaggaaattactctagctggagttttattaattttattaatctttccaaggaatagcttttagcttaattgattttctttcttgtttttttttttttttttattatactttacgttctgggatacatgtgcagaatgtgcaggtttgttacatgggtatacatgtgccatggcggtttgttgcacccatcaacccgtcatctaggttttaa

SEQ ID NO: 609301 - DNA, 599 bp, Homo sapiens
tgatactagctgttggtctgctgtatattttttttaaatataggtcaatagcttttcaggaacaggtggtttttggttacaggggtttccccttagtggtgatttctgagatgttggtgtaccaatcgcctgggcagtgtacactgtgcccaatgtgtagtcttttatcccttaccccctcctacctttcaccctccgagcccccagagtccattatatcattcttatgcctttgtgtcttcatagtgtagctcccacttataagtgagaacataagatatttggttttccattactgagttacttcacttagaataaagktctctaactccatcgaagttgctgtgaatttcattatttcattccattttatagctgagtagtattccatggtatagatataccacatttttctttatctacacattggttgatgggcatttaggctggttccatacttttgcaattgtgaattgtactactataaacatgcatgtgcaactgtctttttcataaagacttattttcctttgggtaaatattgagtagtgggattactgtaccaaatggtagttctattttttgttcttaaggattct

SEQ ID NO: 609302 - DNA, 468 bp, Homo sapiens
ccttgtttgcagattatatgatcttatatttggaaaaacctaagggctcacaaaaaactattagaactaatgaaagtattcagtaaagttgcaagatataaagtcaatatagaataatcagtagcacttgtgtatgccaacagtgagcaatctgtaaaacaaatcaagaaaggtatcccatttacaatagccacaaataaaataaagtacctagtaattaacttaaccaaagaagtgaaatatctctataatgaaaactataaaayactaatgaaggaaattgaagaggacatagaaaaatggaaaggtatttcatgttcatggtttagaacactccatattgctaaaatgtccttactatccaaagcaatctacagattcaatgcaattcctatcaaaataccaatgacattcttcacagaaatagaaaaaaaattctaaaatgtatatggaaccacaaggacccag

SEQ ID NO: 609303 - DNA, 567 bp, Homo sapiens
gctcttagtatgacaagttacattttgttgaaacatgcacgttttcatattctgttataaaaccctagatcttattacaaccttctattttaaatgacttcctctgactacactctagcaggtaaaaaagagggtacagtgttgtaattgtcaggtagaagtggaagtccattttctctacttggctttcactgacatccaatggcgggttcattattattgctgggaagtttccaccrgtaccacattatagctgagtggcttttaatagcattacaatagggatgacttcattacttcttggcagtggtgaaagtcctgactctctattaggcttcctctgacaccaccctagaggggagaaaggtgcttttttactgccagatgggagtggaagtccaagcttgccacctggtctccactgataacgctaaggaaggaaaacgctaattactcgctgatgggaatgaaaggcctagtttcctactcaactttcctcactaccactctgatagggctgctacatttctcattatatcctctcaaggaagtaagtttaggcttcct

SEQ ID NO: 609304 - DNA, 556 bp, Homo sapiens
tttatctcatcttcactttggcccacagtggactatcctttgaaggttcaataaggcccccatcttatgttagagatactcccagttctccargctgtgcccaaaagccatccctcaagggggaagcctgttgtgaccactcaaccagagtacctcttccaaccactgttttttcacctgagataaagcccacttgtcaataactgccttgcaggcattagctgagggttagcttccctggtatctccactccaaacagtcattcctaaaaaacaaggactgcgtttgctcaaccttgagtctcccacagttcatgtattacagtgggtatgggtttaaatagactgacaactatgacagggaacatgggagcagaggacaggattttgtgttggagagagaggctaagccactgaatgggtacagctcatacccacaccagccatcagacaggacaaatgcagccaacttggaaagtggcaatcacttagaaatgactgaggatgacaagataattgaagcaattgctcagctgcattgggagaaagtaataata

SEQ ID NO: 609305 - DNA, 596 bp, Homo sapiens
tgtgcttagattatttataagacattcaaacagaataagtccagaggtgagaaatctgggctgaccacaggagcagaggactctcattagcatgtgaatagagactgaggcctgaaagtgggcaagatcatctatgagagaggagagggtgagagaaaggaacaggacttaagaccagtaggagaggtttcaagatgattgactagggacatgccagttctcttyagaaagaagatcaaagttactgtgaatggacaacttttgaatggaaaatggaggaaagagggccaggacctttaggagtacccacaggaagaagctggagctcaggaaaagaaagcagcaagagcctggctgagatccctgaggatctcagagccctgtggacagggtaaatgggagtgcttctctgctcccctcacccgtctggcaatctgctgactgtcaaagcccctctgccccaaagccccactgctgggtagtgccactgcaccaccagaccacctgcaaacataccccattacccatggtaaaccaacaagtatctgagacaagtctcaatcagcttagaagttttattttgccaaggttaagga

SEQ ID NO: 609306 - DNA, 507 bp, Homo sapiens
gtgaataagtgtttccttttctccacaaagtcaccagcatcattttattttaccagttattttattttattttactttttaataatagccattctgactggtgtgagatgatatctcattgtggtttgaattgcacttctccaatgatcagtggctttgagctttatttcatatgcttgttggccacatacatgtctccttttgatagtgtttgttcatgttcttgggccactttttaatggtattattttttgttttgttttgttttctgagacgatgtctcagtctgttgcccaggctggagtgcagtagcacagtctccactcactgcaacctctgcctcccagtttgaagtgattctcctgcctcagccaccctagtasctgggattacaggcatgcaccaccataccaagctaattttgtattttgttggtttaaagcccgttttatcaaagatgaggattgcaacccctactttttttttctttccatttgcttgctcagt

SEQ ID NO: 609307 - DNA, 519 bp, Homo sapiens
ataagtgagttcggaaaaggtgacaggatacaagaccaatatccaaatatcaattgtatttatgtatgctagcaatgaactcgtggacacgtaaattaaaaatacaataccatttacaatcccttcaaacaatcaaatgcttaggggtaaatttaacaaaacatatatagaactctgttaaaaatcaaaagaatatttaagtaatggagaggcataccatgtccatggattggaaatcttaacatagtgaagatgtcaattatcctaaatataaacacagttttaatgcaatgcctgtcaaattatcaacaagatttttttcagatatagataagattattctaaattatatatgagaaagcaaaagatctaaaataggttaaacagttttgaaaaaaagaggaggatgcagtgagccaagatcacacctctgcactacaacttgggtgacagagtgagactccatctcaaaaaaaaaaacaatggattmcatatttgaacataaaatgcaaaattata

SEQ ID NO: 609308 - DNA, 646 bp, Homo sapiens
acaaaattgtagaaatggagaacggattagtggtttccagcatttaaggaaggagtgagtgtggaagggaagtgggtgtgcctataaaaggaaagcataatagatccttgtggtgatgcaaatgtttyacatcttgaataaataaaactggcaaaccattagcaagattaaacaagaaaagaaaacagaagatccaaataagctcaattagaaacaaaacaggagatattacaaccaataccacagaaatacaaaagatcattcaaggctactatgaacacctttatatgcacaaactagaaaacctagaggagatggataaattcctggaaatatacaaccttcctagattgaacaaggaagaaatagaaattctgaacagactaataacaagcagcgagactgaaaaggtaattcaaaaattgccaacaaaaaagtccaggaccagatggattcacagctgaattctatcagatactcaaaaaaagaattggtactaatcctattgacactattccaaaagataaacagaaattcctcctgaagtcattctatgaagccagtatcaccctagtaccaaaaccaggaagacataacaaaaaaagaaaactacagaccaatatccctgatgaacacaggtgcaaaa

SEQ ID NO: 609309 - DNA, 646 bp, Homo sapiens
acaaaattgtagaaatggagaacggattagtggtttccagcatttaaggaaggagtgagtgtggaagggaagtgggtgtgcctataaaaggaaagcataatagatccttgtggtgatgcaaatgtttcacatcttgaataaataaaactggcaaaccattagcaagattaaacaagaaaagaaaacagaagatccaaataagctcaattagaaacaaaacaggagatattacaaccaataccacagaaatacaaaagatcattcaaggctactatgaacacctttatatgcacaaactagaaaacctagaggagatggataaattcctggaaatatacaaccttcctagattgaacaaggaagaaatagaaattctgaacagactaataacaagcagcgagactgaaaaggtaattcaaaaattgccaacaaaaaagtccaggaccagatggattcacagctgaattctatcagayactcaaaaaaagaattggtactaatcctattgacactattccaaaagataaacagaaattcctcctgaagtcattctatgaagccagtatcaccctagtaccaaaaccaggaagacataacaaaaaaagaaaactacagaccaatatccctgatgaacacaggtgcaaaa

SEQ ID NO: 609310 - DNA, 400 bp, Homo sapiens
tatcaaaaaagataatccaccatgatcaagtgggcttcataccaaggatacagggatgctttaacatctgcaagtcaataaacagaattaaaaacaaaacataattaaatataattaaaaacaaaaatcacatgatcatctcaatagatgcagaaaaagcatttgacaaaatccaacatccctttatggttaaaacgctcaacaaaatgggcatagaagggacataccttgaggtaataaaagctatctatgacaaacccacarccaacattatactgaacggggaaatgttgaaagcgttctccctgagaactgaaacaggacaaggatgcccactttcaccacttctattcaacatactattggaagtcttagccagaacaatcagacaagagaaaga

SEQ ID NO: 609311 - DNA, 374 bp, Homo sapiens
tacaagaaaaactgcaaaaccctgatgaaagacatcatacatgacacaaacaaatgaaaacacatcccatgatcatagatgggtagaatcaatattgtgaaaatgacaatactgccaaaacgatctacaaattsaatgcaattcccatcaaaataccatcatcatttttcccagaactagaaaaaacaattctaacattcatacaaaaccaaaaaagagctcacatagccaaagcaagactaagcagaaagaataaatctagaagcaacacattacccgacttcaaactataccataaggtcacagtcaccaaaacagcatggtactggtataaaaataggcacacagaccaatggaacagaattgagaaccca

SEQ ID NO: 609312 - DNA, 482 bp, Homo sapiens
gtcacagtcaccaaaacagcatggtactggtataaaaataggcacacagaccaatggaacagaattgagaacccagaaataaagccaaatacttacagccaactgatctttagcaaagcaaacaagaacacaaagtggggaaaggacamccacttcaacaaatggtgctgggataattggcaagtcacatgtagaagaataaaactggatcctcatctctcaccttatacaaaaattgattcaagatgaatcaaagacttaaacctaaaacctgaaaccataataattctagtagataacatcagaaaaatccttctaggcatttggcttaggcaaagacttcgtgaccaagaacccaaaagtaaatgcaacaaaaacaaagataaatagatgggacttaattaaactaaaaaccttccgcacagcaaaagaactagtcagtagagtaaacaggcaacccacggagtggaagaaaatctttg

SEQ ID NO: 609313 - DNA, 547 bp, Homo sapiens
atttgtgacaaacatgtgtgcattagtgtatcacatttcattccgttgctcatttattcatacgaaaaaagatgctcacttactctttcttgagagggtatatgcttttataaacaaacctcaggtttttttcctctgggaaaccctgactaatacacattgaactccgatccaggctagaccctcacatttatcctcacaaaaactctggagctaagtctattgtgcctattgcccaaatgcaaaaaccagatcagcttgagatcatagagtaagaaagagacaggcaggccttgaactccagctccagcccacagcrctacttgcagggaatgcttggtggagagagtggaaaccatccaggcttatcctgttaccttcacccctccatggcatattatggagaaactgtgtgctatattctttctccatctcatttctttttgggccttggcccctgaattttttggaatctaagctattaacattgttggatgtaggattaaaatcttagaatgttgtttctggacataatttagcctgtcct

SEQ ID NO: 609314 - DNA, 520 bp, Homo sapiens
attttctccaagtttgagtggcacttttgtccacattctgaaatgttcctaattgcatatgctgtcttcagtgatcccctctgtcattactatttaattcagtgcagttgttgacaatgcagtttgtcaccatttgtcaagccatcctctgaccctggtggcattttaccaggaagggcccctgtgctccaagtcccacgttaaaacatgccaacccccagcaattagtgtcatggaaaggatctttcaaaggactggagatggtcctacacactataatcaatagatgaaaatttcatttaccatcttgagttttattgtatgcaatgctggtggaagagggcagatagatagatggagctcaagaacacccagtcccttcatatgctgcaggtgaattaagtgagttggactgcccatactgggggtcatgacttccattctgcyctcacttgagactattgggtatgtgtccctctggattgggcgggaacttttgtcagtactctccagactgcct

SEQ ID NO: 609315 - DNA, 583 bp, Homo sapiens
aagtggtctcagaaccacatttggagaaattctggtgcagggattagagaatgatgaaactgcaaatgtgggttggggcagatattgtggtagagtcggtgggtttgcagggggtattcctataaattttacagataaatcaatgaaagaagcaatagaaaataggaggcattcatctggttcagcagcctgagccaccccacccttcctgaatatagatggtggtgcagaaggtgctctctgctccacgctcaggcagatctccaggcattcagagagcatctgctcacctgaagcagcagcctcagtcatcccacccctcctatccagaaatcttggtacagtggcggggtgggtggctctccactacatgcccaggtacatctccaggcatctggaacacccactctcctggacttagagcttaggccactcccagtccccatgcagagaacttggggccaagaaggtttccaagctccatgcctaggcaagcttttgggtgcttggtggccttccrctggattttccctagccactggtgcttgtacttgccactgggggacctgtaggtgggcctgcc

SEQ ID NO: 609316 - DNA, 606 bp, Homo sapiens
caaaactgtcagtcagtatatgctgtctgacatcattcagtgtatgggtcagagcagtattaacaagtaaggaatatactgctcccagaactcaacgaggccttccagatgttgcactttccttccttgttgtgagaggtgcaaggtgcaataatttgttttttttttttttatcatggatgggattgctctgcgtgcccctaaacaacggcgacctaaaaaaatatgtttatatgccaggcccctcaatcttcatagggtttatctcccatgttgtgagtgagtgtgcattgccaaggccaccaatgtgcaagctacttcttgctcatctggtctaattagcatgatttctgtgatatagtgaatccaggtgatgttctgtgggatattgagatattcagatctcttctgtattatggcagaggaccagagttaacatagccatgtagcaaaatgactaatatatattcttgtctgtcccataagaatgtgaactttttctgaccctctttttcaaatagtatgaaaaacaacagtcgcygaattaatggctacataccttataccagaggctatgccaatctgctctagaaaatattccacatt

SEQ ID NO: 609317 - DNA, 584 bp, Homo sapiens
gcagtagcaaaagctgcatgatgtaactattttgaaactctggagtctattggaaagtttgcaacttccaggrgaaggcttggatggtaaattgtggttaattttggtcaatttcagttcttagctcagtaatagctacccattccccactcccagccctgtggcaagcaaccctccatgtgttccaagagcaacttgtaggagccagtgtgggcaaaaaggacactgtcctccaaatattgcaattctatcctctgatcactgcttgctgcttctgatcacagatgtgaagacaaaaaggcaagagaccattgttgttgaacctcccccattgtttcaaccctctactcctccagttgaagtgacatccagaggattcaaagtcctggcatctctttttcctcctctatttctctattttcccccttttgtgagccagacataaagacaaggacattcaaaagcaattgcacatatggggaaaattagaaagccactgtgaatgcccagaaaaaaatgcaagctgagaaaagaagtgaaaagactttaaacttacttctcaggtcaatccttggcacagagaa

SEQ ID NO: 609318 - DNA, 563 bp, Homo sapiens
catcactcaccaatcagagcttcacccgccaccatcactcactagtcacagcttcatctgccaccatcactcatctaagctttacccactgcagtcattcaccaatcagtgtttgccaactccctagaaccttactagtgccaatgaagtttctggaaaaacagtatgtgacatttttcatttttataaaacctctaacaactgagcacgatggctgacaggcgtgaggtgggaagatcacttaaggccaggagttcaagaccagcctggacaacatagtgagacccccctgtctctactaaaaatcagaaaaattagtcaggcatggtggcatgtgccttgtaatcccagcaacttggaaggctgaggtaggagaattgcttgarcccaggagttggaggctgcagcgagctatgattgcaccactgcagtgcagactgggcaatagaccagaccctgtctcaaaaaaagcaaaacaaaacaaaaacaatttttttaaaaaatagaaaaatattctcaaagtccagcaggaggcaattggttaaatagattatgctccactt

SEQ ID NO: 609319 - DNA, 552 bp, Homo sapiens
acgtgcaggagttttggaagctggcagtgcacccagtcccggctctcctccattctggtgggtctcaccagagattggccaagaagagatcaaactgttcctggaccaaactgagggtggggctgctatctctcgtggcccaataacgagatgcagatgaactggggagaaagagactttttatttctgtaaccagttacaaggagaagacctggaaattatctccagaccaactcaaaattacaaagttttccagagcttatataccttctaagctatatgtctatgtgtaagtgtgcattcatctcaagacrtaagtaattgacttatgttaatctataactaaggtctgagtcctgaagaccttcctctggatcctcagtaaatttacttaatctaaaacccttatcttgtctcctaaatcatgggggtttgggaagttccttcagacccccagtaaacttatttgtggagtcctggggaatttcttcagatccccaataaaacttatttaatcctaaatgggtcctgttaagaattcctttgttattt

SEQ ID NO: 609320 - DNA, 552 bp, Homo sapiens
acgtgcaggagttttggaagctggcagtgcacccagtcccggctctcctccattctggtgggtctcaccagagattggccaagaagagatcaaactgttcctggaccaaactgagggtggggctgctatctctcgtggcccaataacgagatgcagatgaactggggagaaagagactttttatttctgtaaccagttacaaggagaagacctggaaattatctccagaccaactcaaaattacaaagttttccagagcttatataccttctaagctatatgtctatgtgtaagtgtgcattcatctcaagacgtaagtaattgacttatgttaatctataactaaggtctgagtcctgaagaccttcctctggatcctcagtaaatttacttaatctaaaacccttatcttgtctcctaaatcatgggggtttgggaagttccttcagacccccagtaaacttatttgtggagtcctggggaatttcttcagatccccaataaaacttrtttaatcctaaatgggtcctgttaagaattcctttgttattt

SEQ ID NO: 609321 - DNA, 475 bp, Homo sapiens
actggtgaattgactgtttcacccttcaattctgtgagtttttgcttcatgtattgctgcgggataattaaggaatcagagagaccgatggggttgaggaggaattatttaattatttaggcgcaccgacccaatcagattaacatccaaaggaccgggccccaaacaaagagtcaagctaccttttaagcattttgtggggtggggggagatttgtgcagggggaagagtattacagaagcgagaaacaaagacagttattcagttaagacatgcattacattatttcttacttttcaaggaacaacacgttttatgactcaagattatctgtttagtgaccttgcagctgcacagctagagaaacagagtcttcgcaatgcctgggaaagggagagataaggctcactagccacagaaaaacagmcagttaatttttaaaggactccagccctttctcttcctcaaggggaat

SEQ ID NO: 609322 - DNA, 391 bp, Homo sapiens
cccagaagaaatttttgtaaagttgacagctgattctaaaattttacatagtaatcagaataggttgatattaggatagacagatagttcaatggaatagaatgcagagtttagaaatagacctacacagaaatagtcaattgattttttaatagttgctttttgataagggtgctaaggtaatgtgatagagaaaggaaagtattttcaattcaaatggctgaaatgactggatatccattgagggaagaaagggactttagcctttcacacaatacacaaaaattatggaattctgaagaaaataagagaaaatgttcatgaacttggggtaggcaaaaatttaatagatgagscaaaaaaaaaaaaggcccaaaccataaaaatggtt

SEQ ID NO: 609323 - DNA, 518 bp, Homo sapiens
catcttaaaaaaaaaaaaaagacaaataactaaaacaataatcataaatctatgttgctgggcacagaatgtaaaaagatgtaatatgtgacactaacaatgtaaagagggaaggacagagaagtacaatagtagaacttttgtacactattgaaactaagttggtataaatttaaaataggttgttataaatttgttaattgtaatccctgtggttactactaagaaaataaaatattcagaaagtaaatgaaaagggaaacaaaatggcacactaccaaaagaccacttaaacaccaaagaatgcagcaatgggggaatagaagggaaaaccaaatacctaaygcacgcggggcttaaaacgtaggtgatggattgataggtgcagcaaaccaccatggcacatacatacctacttaacaaacctgcacattctgcacatgtatcccagaacttaaagtaaaataaaataacaggtataaggcattaaaaaaaaataagaaaatggcagaagtcct

SEQ ID NO: 609324 - DNA, 505 bp, Homo sapiens
gaattcaagaccagcccggccaccatggtgaacccccatctctactaaaaataaaaataaaaacrtaagtagaggaatttaaatggcagaaaaattaaaattaaagtaaaaatgctttaaaagcaacagtgatcttaaacgaaatttactaatttctatgtgactatttcatttataaaattagtaaatttcatttaaattaagatcacttttaaattaggatcatttcataaatgaaataatatctatcttccttccatgatgaagtaatggggatcagatttactgttctgttttaaacagccatcaaaaaaacccatcaaagtgtatggaacaatgattcccagaccttaaacaacagatggcaccccatctcctaggagagcaacccctaggagacgacaaaccaaccaggtgaggtttatgattgtcccatcttcctgtctggagagtttttggacaatggagcaggaagggagaacccaaaagagcctggcagtccctg

SEQ ID NO: 609325 - DNA, 506 bp, Homo sapiens
atggtgaacccccatctctactaaaaataaaaataaaaacgtaagtagaggaatttaaatggcagaaaaattaaaattaaagtaaaaatgctttaaaagcaacagtgatcttaaacgaaatttactaatttctatgtgactatttcatttataaaattagtaaatttcatttaaattaagatcacttttaaattaggatcayttcataaatgaaataatatctatcttccttccatgatgaagtaatggggatcagatttactgttctgttttaaacagccatcaaaaaaacccatcaaagtgtatggaacaatgattcccagaccttaaacaacagatggcaccccatctcctaggagagcaacccctaggagacgacaaaccaaccaggtgaggtttatgattgtcccatcttcctgtctggagagtttttggacaatggagcaggaagggagaacccaaaagagcctggcagtccctgagttgaggagacaagttgagaattc

SEQ ID NO: 609326 - DNA, 506 bp, Homo sapiens
atggtgaacccccatctctactaaaaataaaaataaaaacgtaagtagaggaatttaaatggcagaaaaattaaaattaaagtaaaaatgctttaaaagcaacagtgatcttaaacgaaatttactaatttctatgtgactatttcatttataaaattagtaaatttcatttaaattaagatcacttttaaattaggatcatttcataaatgaaataatatctatcttccttccatgatgaagtaatggggatcagatttactgttctgttttaaacarccatcaaaaaaacccatcaaagtgtatggaacaatgattcccagaccttaaacaacagatggcaccccatctcctaggagagcaacccctaggagacgacaaaccaaccaggtgaggtttatgattgtcccatcttcctgtctggagagtttttggacaatggagcaggaagggagaacccaaaagagcctggcagtccctgagttgaggagacaagttgagaattc

SEQ ID NO: 609327 - DNA, 506 bp, Homo sapiens
atggtgaacccccatctctactaaaaataaaaataaaaacgtaagtagaggaatttaaatggcagaaaaattaaaattaaagtaaaaatgctttaaaagcaacagtgatcttaaacgaaatttactaatttctatgtgactatttcatttataaaattagtaaatttcatttaaattaagatcacttttaaattaggatcatttcataaatgaaataatatctatcttccttccatgatgaagtaatggggatcagatttactgttctgttttaaacagccaycaaaaaaacccatcaaagtgtatggaacaatgattcccagaccttaaacaacagatggcaccccatctcctaggagagcaacccctaggagacgacaaaccaaccaggtgaggtttatgattgtcccatcttcctgtctggagagtttttggacaatggagcaggaagggagaacccaaaagagcctggcagtccctgagttgaggagacaagttgagaattc

SEQ ID NO: 609328 - DNA, 352 bp, Homo sapiens
agctccagccacctttttaagartaaattgctgggcaggtgggggagggctagtcacagaacgaaactgtaagccagaccaggtgtgaggaggggaggtgatagaaggattatagggtggaggagcagaggctgaggaagtattgggacctagcttgggctggtgaggagggtagaggtcagatgggtctgtagaaaaggaagattagaaagactcagcgacgcttggggttgggactgaggggacaggcgggagggaaagaaggaagatttgggacgagttgcactgggcacagagactaggaagggactgatgtgtaaaagaatgtctggacgtcaggcacctcagatca

SEQ ID NO: 609329 - DNA, 352 bp, Homo sapiens
agctccagccacctttttaagaataaattgctgggcaggtgggggagggctagtcacagaasgaaactgtaagccagaccaggtgtgaggaggggaggtgatagaaggattatagggtggaggagcagaggctgaggaagtattgggacctagcttgggctggtgaggagggtagaggtcagatgggtctgtagaaaaggaagattagaaagactcagcgacgcttggggttgggactgaggggacaggcgggagggaaagaaggaagatttgggacgagttgcactgggcacagagactaggaagggactgatgtgtaaaagaatgtctggacgtcaggcacctcagatca

SEQ ID NO: 609330 - DNA, 352 bp, Homo sapiens
agctccagccacctttttaagaataaattgctgggcaggtgggggagggctagtcacagaacgaaactgtaagccagaccaggtgtgaggaggggaggtgatagaaggattayagggtggaggagcagaggctgaggaagtattgggacctagcttgggctggtgaggagggtagaggtcagatgggtctgtagaaaaggaagattagaaagactcagcgacgcttggggttgggactgaggggacaggcgggagggaaagaaggaagatttgggacgagttgcactgggcacagagactaggaagggactgatgtgtaaaagaatgtctggacgtcaggcacctcagatca

SEQ ID NO: 609331 - DNA, 352 bp, Homo sapiens
agctccagccacctttttaagaataaattgctgggcaggtgggggagggctagtcacagaacgaaactgtaagccagaccaggtgtgaggaggggaggtgatagaaggattatagggtggaggagcagaggctgaggaagwattgggacctagcttgggctggtgaggagggtagaggtcagatgggtctgtagaaaaggaagattagaaagactcagcgacgcttggggttgggactgaggggacaggcgggagggaaagaaggaagatttgggacgagttgcactgggcacagagactaggaagggactgatgtgtaaaagaatgtctggacgtcaggcacctcagatca

SEQ ID NO: 609332 - DNA, 612 bp, Homo sapiens
gctgtaagacatgaccactcactgggtggcttaaaacaagagaaattcactctctcatagttctgggagtgggaagtctgaaatcaaggtgtcagcagggttggttccttctggaggctctaaggaagaatctgtccttgcttctctcctagcttctggcagctgctggaatttcagagatgcataggccctcaatgtggggtgggagggaagtaggtggaggtccttggctcatggacacattgctccaatctctgcctctgtctccatgtggccttcccctctgggtgtgtgtgtgtgtcttaaatctctttctcttatgaagmcattggttattgggtttaggtcccaccttaaattcaggatgatttatctcaatatccttaactaaattacttctgcaaagactctaagtgaagtcacattcacaagtacaaggggtaggacttggacagatcttttggacagccactattcacccaggtacagtcatcatagttattactttcaattcaggctcctattgtctcttgactatactcttataatagtctccttgcctgcagtcttcacacagcaacccattctcagtaaagtatccccagtgagctt

SEQ ID NO: 609333 - DNA, 581 bp, Homo sapiens
aacctatgttgatatttagcatgtatgcasaggatagatgctatcctgtagcatgatcatttatatgcatgtgcgtacacatgcatttactttttataaaaatgatataatactgaacatgctattctgtagtcagtttttaaaagaatgtatcttttttttttttttttttttttttttagatggagtcttgctctatcatcaggctggagtgcagtggcacaatctcggctcactgcaacttctgcctcccaggttcaagtgattcccctacctcagcctcctgagtagctgggactacaggtgtgtgccaccacgcctggctaattttttgcattttagtagggacagggtttcacaggttggtaaggatggtcttcatctccagaccttgtgatctgcccgcctcggccccccaaagtactgggattacaggcgtgagccaccatgcctggtgcccccccctttttttggggtgggggaaacagggtctcactgtgtccccaggctggagtgcagtggcacaatctcagctcactgcaacctccgcttcccaggcttaagcaatccttccatttcag

SEQ ID NO: 609334 - DNA, 458 bp, Homo sapiens
actagggagccttgcaatccagaccgtggtggaaggccttaaccctacctagcactggaactgttttagggagccgtgggaaatataaaagtaggagcagccaagaaaagagccttgcttgcattcccagtctccagtgctgatggagggaagccattttttatcctacctcccaggggaccttgcagaaatctttgagctaacttargcagtggtcacaggttgagatatgctctcaattgaaatacacagtataatctctagtgagggcgaactctcttggccagcactggagaatgagtgggaagtgtgctgcagccaccagtgcaggagctgggtgcctggctttgcaggcagacaggaagaggcatggactgaaagcctcagttgccatctccactgggaaggtttatcacctgcgggagttttgagttctgagcacagactgcctggatctt

SEQ ID NO: 609335 - DNA, 331 bp, Homo sapiens
ctgttctagcagaggttctccatgagggccctgcccctgcagcaagcttctgcctggacatccaggcattttcatacatactctgaaatctaagcaaagttttccaaaccttaattcttgacttctctgtacctacaggctcaaaaacataygtaagctaccaagatttggggcttgcaccctctgaagcaatggtctgagctgtacatttgcttattttagctttggctggagctgaagcagctggggtgcagggcaccatgtcctgaggttacatagaacagcgggggcctgggcctggcccaggaaaccatttcttcctcctaggcct

SEQ ID NO: 609336 - DNA, 561 bp, Homo sapiens
taatttgaattccttattattgtgtgcctgtggatgcaccctttttccccttttctttctccaagctgattataagccttttgaagtcaaggaatgcatcttgaatgcccatattcaaaacaagattttagtatgagactgaccttataagatttatacagttagtaaaattaaatttaacaattattcatagtacacttattataaacaaatcactgttctaagcactggattaattgcttgtgttgttgttgttgtttgtttgcagatggacatcatagcttacagaagagtgatcatcatatatagaagaattatgatccactctttcgtttttctcccccaactctgtcctcacttcctaacttgcataccatagcctagtcacaccaaatgtctcaktagttcatgaatatgtggtggttttgaagctttcaaacagtgagcatgtaattttctctgcctggaatgcttttcatatcttttctttttcttgagatcgagtcttgctctattgcccaggctggagtgcagtggcctgattttggctcactgcaaact

SEQ ID NO: 609337 - DNA, 498 bp, Homo sapiens
ggtgagctatgattgtgccactgcactccagcctgggtgacagagggagacactgtctctaaaataataataataataataaaaagcaaagggttatattagctagtttagagagctgttgcaaaggcttaattatataataccagccatagtggaggcaactatggaaggttggtttactccttcccttgtccccagatatgactctgaaaattctgtcattctacatgaaccctctctctaaggtacagctcacacattccacactctaatccttgtagagcatcttccactagctgtagtcactctggactccaacctccactgcctcagtacagagcctcatgttactatgtcctgagctcttgtcttcccaattccattctctgcctctccaatacatctcacgaagagctctttctgaatcatcmgtcaagcacattgttttagagctacacccctttctatgactctcttttccctaaccaaaactgaagc

SEQ ID NO: 609338 - DNA, 573 bp, Homo sapiens
gtggactttggttttcctttccgaagcaaatccaaagcacggtgggctgtggggacacctactgttcactttgcacagttcatcttctttttccagagagagcygaagaccgattttaattagaagcgagtgatctgcattttcctgttaagagctatagcctaacagatcagagtcaatatgagttacagtattcctcactagagactttcttaagttgacagctggagtcaaaataatagattactgccgagctgaaagactcagttgtaagagcctgggttgaggagtctggaatccactgcaactctattcactacaaaggagaattcaggataaggcaatctattactagaccctgaacaaacaaccttatataattataacagtaattatcgcaccaataagctcttactcatgtattgagctttagatttgtaaaaggcttgcccatgtattatctcatccaatgctgagagcaatgactcccaagaaaccatccaatggcacaagtccagttggtttttatattgctttgcatttcaaagtgttttcctcttaattcccaactag

SEQ ID NO: 609339 - DNA, 592 bp, Homo sapiens
tgtcatggtatgtactggtagtaatggtagaaacatagaatctatacacacacacagacacacacacacagacatgtgtccatgttttaaagcacttagtaatggcaagagtcctttttatgtatgtaaagatgtgatttctgattacatttattactcaattttcttgaaaagttaaggatgcttaattgttaacagcagttagttaaaagcagaagatagcattttaagggagcaataataccatggaattgtatcatttgtgattgtacttcttagaagaagagatgcacaaggaaatgagaattttatattgtaattcaggaataaaaagaattgagygtgtctaagggcaaaagtgatatgaaagtatgacatactttcagagacaactagagtatgtatttacttttaaagtagacttttggaacactgaagtgtgacttgcattgataacaataactttttggtaagaataaaccaaattctgagaaatcaatgagaagacaagggattcaaatgttttaaacaacttgctagaattgcgggtttttttttgagtcaaagtcttgctctgtcacccaggctggag

SEQ ID NO: 609340 - DNA, 453 bp, Homo sapiens
gaaaactcatgaataatccacccctcatttagcatatgatcaagaaataaccataaaaatagccaaccagcagccctcagggctgctctgcytatggagtagccaccctttcattcctttactttcttaataaacttgctttcactttactctggtggctaactcttcaattccttcctgcatgaagccaagaacccagatggcctcccaggctgaaccccaatttgggggttctgtatatcctgccgttttcaaagtgtgatctttggagcagggcataaactgcacctgaagtcttgttagaaatgcagactctcaggccccacccaaacctgctgaatcggaacttgtgtttcaaaagatctcctggcgatgcccatgcatattgaagttgaagaagctcggtttcaaatgttctgaaataattcttcctcttttctatgcgttgaattc

SEQ ID NO: 609341 - DNA, 453 bp, Homo sapiens
gaaaactcatgaataatccacccctcatttagcatatgatcaagaaataaccataaaaatagccaaccagcagccctcagggctgctctgcctatggagtagccaccctttcattcctttactttcttaataaacttgctttcactttactctggtggctaactcttcaattccttcctgcatgaagccaagaacccagatggcctcccaggctgaaccccaatttgggggttctgtatatcctgccgttttcaaagtgtgatctttggagcagggcataaactgcacctgaagtcttgttagaaatgcagactctcaggccccacccaaacctgctgaatcggaacttgtgtttcaaaagatctcctggcgatgcccatgcatattgaagttgaagaagctcggyttcaaatgttctgaaataattcttcctcttttctatgcgttgaattc

SEQ ID NO: 609342 - DNA, 577 bp, Homo sapiens
gtcccctggagttgtacaatgcgatggcattatttatttgtatatttgttgaacaaaatattaattgaacaaaagacaatacattatgccatagttctgattcaaaatatttgtttcactctttttattaaaattaagataaaaaagatcaggattgttttagaataatgtaaaatgcaatgcttaaatagaaaatgacgttttaaattaaagacatgctttcaagaacttaagttaatagatttttttttctgartgactttaagcatgacttaaatattctaacaggccaatggtttattgatcagaaaaacttaggcattaaattactggctgaatactgccctaggaatcccatttgtctttagattatagggtgattaatttgataaatagccaagatatattttcatctctgtaacatctaaaagcataatctaatgctcattgttcttctatccagatatgttctgaagtagtgtgtctgacagcacaattaagcatttaaatatttcacaagtgtcaatatgccccaaaatcagattagtgaaaacatctcacttacatgtatttaaaa

SEQ ID NO: 609343 - DNA, 583 bp, Homo sapiens
tatgagattcaaaaccagatggctaccaatctcattttattttgcaacactttatgattctggagaaaacatcgaattcttcacatcaccagtgacataggtcagacatgcttaatactgatgaaggaaggagatttgaattttatgacacttactacagtttgttataagacaggtggttatttaaatttgcccgctctgtgccctcaatgaaaagtrtaaatgccagcaacacatgtatttttaaatcttctagtagccacataaaacatttaaaagaaatagttaaaattaattctaaagtaatatatctaaaatatgatcacttcaatattaatataaaaattattaatgagatcttcttatattattcttatgctatgtcttggaaattcagtgtacattttataattttagcacagtctgttcggactagctgcatttaataagctcagtcacatgtgcccagtgaaatataaactaccatcagagaatactataaacccctctaggcaaataactagaaaatctagaagaaatggataaatttcctcgacacatacaccctcccaagactaaacca

SEQ ID NO: 609344 - DNA, 609 bp, Homo sapiens
ctcaagggctactgttcagattcttttgtctcatgtggtgttctcttgatgtggtgctctcctccttccactagagatggggcttcctgagagctggactgcagtgactattattgctcttctgggtccagccacccagtggagccaccagggcttcaggcttgtactggggagtgtctacaaagaatcctgtgatgtgatcgaccttcaggtctctcagccatggataccagtaactgctccagtggaggtagtaggggagtgaaatggactctgtgagggtccttggttatagktttgtttactgcactcgttttctcaaatgctggttatggtagcagtgaagttgtcatgtggacagactcaggacctctggttagccaggatgttacagatgatagaattagctgttgttttctcctttcttagagcagcattgttcttttatgagttgttgtaatggcttgagctggttgacctccagccaggaggtggcaccttcaggaatgcatcagctgcggtagtataggggggaaacaaacttgtcctaaggtcttctggataaatattcaggtttctcaggtgatgggtgaggccttagagcttcca

SEQ ID NO: 609345 - DNA, 432 bp, Homo sapiens
atgtatttatttattttacataaagaaaaaataaaacatgaattagaagacaaatataaagttccacacaaatgtgaaggttactattaattataaggataaaaagggaactatgaaaataarcaaatgatacaatataagcaaacattaattttgaatattacatatgaaaacatattagaaaagagtcattagattaaatgactcaaataagaagtacattagctcaaaactttcaaatacagtggctccatatataaaacctcctaagcccccacaatttttataaaaccttactgtggaaagatatattatgttttatgacatgtttgcatgtaaatatgaattagattatacatgttgggtaaatagattgatatcagtaaggacatgcttgtttatatgcaattttccccatcaggtaaatgtttt

SEQ ID NO: 609346 - DNA, 572 bp, Homo sapiens
aatatacacacacgtgcatacacccatccatacatacctttatgaccattacaaaaggaaacagaggaaggaaaaaccagaaaacaatgaagtcgaatacctacaaaggttgaaaataagggtgaacgatatatgagaaagagtaacaattttttggggttaaacttttccagtgttttgacttttaaattatgtcatatgtatttttaaaggaaaattaaatcaactagaatgagaagggaaaaaataagctggaacaaagcactgtaattatatttcaaaaaaatagctacattgaaaaaagtaagagacagaacgaaaaaaaagaaaaaggaaagaagaaaaagtactttatgaataaaatatttaactatatgccttcagtcttaggtaatcaggagatgacaaatctctaatttgtgtgtgtgtgtgtgtgtgtgtgtgtgtgtgtgtgtgtgtgtgtgtatatatwtgtattcatatgaatgaaacagctctgaaaacatttcagatgtcttatcaaattgatctaacaagtaaatgtgttgattttgtctaaagttgggttttca

SEQ ID NO: 609347 - DNA, 605 bp, Homo sapiens
agtacagatatgggacaatttgagcatgaaaataaagacagcaatcaattgtaaacatttgagtaaaaaagaattcttaaatcttcagcaatcctaaatacatacatgcataaatgagacaggaatactatttcttaccttgaaatgctgagtacttcttgataaatgcagattaagtgatgtcgtttaaatattaggttggtacaaacgtaattgcaggttttgatattaataatcctttttgcaaattaaagactggtgaaagagagaagtatagtcaccaacggttgaaaacttgaggagggaagttctgagcaaaaaaaaaaagagagagaggragatatttgcatgaacttaaagtgtgtttccacagactacaaggaaaagaacagtaactacaaaagaaaaacaagcaactgaaattaatatcactgatgagcaacagacagacatcacatgcctcatgaagtgatgttctgaaaatcacacaacatatcttttatagtattctggctgaaaatatataaacttgtttaaatcatgagattgtatcaaacaaaatcaaattgaagatttgtttttattattaaataaggggggggtgg

SEQ ID NO: 609348 - DNA, 394 bp, Homo sapiens
ttactgcatcctcaaactcctgggctcaagggatcttcccgcctcagcctcccaagtagctgggactacagacaatgccaccatgcgcagctaatttttaaaaaaggtcttttagagatgatgtctcaacatgttgctcaggctggcctcaaactcctggcctcaagccagcctcctgcctcagtctcccaagtagctgagattacaggtgtgagccactgagtccaaagctaataatttgkttttttgccatttaaataaggtggttatgtagtaggcaaactctttttggtttatgagtgtcaatctgaagatataagacttagaagcagtagcagatatgcttattttttctccatttttttcttgaactgcaactagaggaggaccaaat

SEQ ID NO: 609349 - DNA, 524 bp, Homo sapiens
gccttcctttttcaaaaagcagtcatgctgagaaacagacggcttgtctattggcagcctgcttttgttttggcctacaatgaggtttcttcaaaaaggaaaaagaaaaaaacttaaaaaaatccttctttccactgttgtccattagaagaatttgtaaaatccaagtttttgcgctcttaggatcttataaagaatctacatgctgagcagatgtggaaagttctggaacatttaaaatcctttggcttagtggtgtattgtgactttttttctgcacacctttctcaggtagtagctgcattatctaccatggagtactcacctttctggccagtaaaattcaggcctcaaatatccttctcatctcatcttttgtagaatttgtttgttcattgagaacaaaggagacttatataagcctcataggagggtgttctaacattctctttaaaatgtctarcagtccttgtcagtatacttgaagtttgtgatagatatggaaaagtgtggctgactgtgct

SEQ ID NO: 609350 - DNA, 558 bp, Homo sapiens
taaccagtgtgtatatctgcagttagatgatggctccaggggcactgagagcctgccattttgtcagtgttccctctacatctgcatggaagtggagtgtaaaattattctggtgacctgtatatcacataatattgcagaccacctgccagttgtyccaccagaagcatcacaacagagacagcatccttctgtttccaggatcttgccatagtctggcgttggcacctgttgtttatttagatcattcaaatggtgtgatttaaccttctataacaaatggaatatagcttggctttatggtttccctcatataaacaacagtaaacaaacccatgatttattcaaaaagaatttatggtttgtctttctctcaattgtaaagaacgaagcatttgtaaacgaaaacatgatcctcacccagacttataaaatgaattctaccagacagcctagacaacaaatttatgacattttgtggggtgatacagaatgtttgaaactgagtggcctgggagaggaagacagaatggattcagctgtaggaggagggaataa

SEQ ID NO: 609351 - DNA, 440 bp, Homo sapiens
gaattctaatatattccagagaaagggggatacaccaccccttatttttttaaaaaaagaagattgtggtcacatttttgctatgtagtctagcaaattaatttgtattctamacaatgggagagaatgttgaagagttaaattaaaacaatgaaggagtagaattttagaatattataggaataatgacaatacaggaaagaaataattattacattatatgcaattatatccttaagtgaattatagagattctattattattgatattaataatacgttggtttaaatctaaaacatattaccatattgtactacctagtatagtgctgggcacaaacagaagtttaatgtttcttgagttttgacacatgtattagccattcagtaactcgttagacagcctaatgagggctgaaacttgagaatatgtgctagaa

SEQ ID NO: 609352 - DNA, 400 bp, Homo sapiens
aggacctacattacaagcatgaattaaaagttaatatgggtctgaagaaacaaaaatattttataaacattaagacaattctttacagaaaaggcaagtcttctaagtacacaaataggttgccaaacagaagtttaaacttcaaatacaaatatgatagtataaccagaraaaccatctaacctaatgtatgggtattataattttaggaagaaaagactgcagaaaagggaaaaatgttagttactgggccagggagctcagtacccaggacttgaacttcagagccaccagcaagacatgagttgttgcctggctgtttgtcctagcatctaattcttcagggttctccagtggacagacagatttgcttatgttgtgagttaatgattaagaattc

SEQ ID NO: 609353 - DNA, 567 bp, Homo sapiens
aatgatcatcaagcctaaagtgttcctaagctagccyatcctctagacactttttgttgtgatgatgtctgatgactgatctgtttttttttttaactaaagaaaaatatccacttaggggaaattcaaggaagatcaaattttctttttccagtgagttgttagaatttgaaaagccaataatttaacaggcatgttgtttgcttgtttttaacaatctgcagaagcactattattacaattgctataatattcaaaaattggcctctactttcacagctcatgtttccctttaaagtctgaagaaagccgaagagttcatctcaactatctcttgaactttctcctttttgctttccttcttttgtatttcattgtttttcttgagtctatctcaatgatagtttctttgcttgcatggtgggaattgcaacgtgggcaaatgtcaaccctagtcctctttcattctggcaaacgtgttccttctctcataattcttagcttctctacaggtgtccagtgttctatggctgcccctactctttgcagtctcagccacacagacct

SEQ ID NO: 609354 - DNA, 567 bp, Homo sapiens
aatgatcatcaagcctaaagtgttcctaagctagcccatcctctagacactttttgttgtgatgatgtctgatgactgatctgtttttttttttaactaaagaaaaatatccacttaggggaaattcaaggaagatcaaattttctttttccagtgagttgttagaatttgaaaagccaataatttaacaggcatgttgtttgcttgtttttaacaatctgcagaagcactattattacaattgctataatattcaaaaattggcctctactttcacagctcatgtttccctttaaagtctgaagaaagccgaagagttcatctcaactatctcttgaactttctcctttttgctttccttcttttgtatttcattgtttttcttgagtctatctcaatgatagtttctttgcttgcatggtgggaattgcaaygtgggcaaatgtcaaccctagtcctctttcattctggcaaacgtgttccttctctcataattcttagcttctctacaggtgtccagtgttctatggctgcccctactctttgcagtctcagccacacagacct

SEQ ID NO: 609355 - DNA, 592 bp, Homo sapiens
aaacttactcaagctcccatgtgttcaactgtacacagaactgtgttgcctatgttactattgagaattgttcatacttctgtctaaggttgattcctcctcttgtacatgagtttgcatctttttccacctaatcaaaacctcatgcaggcaatttcctctactctctttactggatcattcagactagcacagagatgggctgcttttttccttctgcttaaacaaatccaaacaaaacaaacaaacaaaaatgcttttcccttgatctcacttctttgattctcgactcatgtccccattctcttctggagtaagactacttgaaatagttgcttatacttttggtttttgatgcctgttgtcctttggtttttgaaccctctccaaccatgcttttactgctatcagtccactcaaattgctcttgtcaagcttaccagtgaccactgtgtttctaaatccaatagtcatttcttagtcytcactttggttttgacttattagtacaatttgatatggttgattactctctcattcttgaaacatttacatgatttggctttctaacccatcatactcaccaggtttt

SEQ ID NO: 609356 - DNA, 590 bp, Homo sapiens
cattaaaaattattttattattttcctaattatcttgttagttatctactattttactatggtgttagtggatactctacatcatgcatccttgatttaaagtctaatattattccttatattattttcttggtgttagaatactttaattccatttactcacctccttcattttgtgttaatattgtcatgcattttaattcaatgtttttttttatacccataagaaattattattggggtaaatatgtgggtaaataatatgtccaatagttgtttagatttacccacataattaccctttctattgctctcaatttcttaagaaatcagagggcttccagccaggataattttccttctgctcaaagaattttctttcagttttttttttagcttgggtaatatattctttagtgtactggtaatgaatttctttagtatgcttgtaatgaattctcttagtttttgcttttctaaaaaaayctttattttacatttattttcaaggaatatttttgatgagtatagaattctagtttggcagttattttctatttacactttgtatatatgataccattgtttgt

SEQ ID NO: 609357 - DNA, 500 bp, Homo sapiens
ccatgctgggtggccataagcccaactaaactgtacacattttatgagtttaaaggattgggagattgatatgggagaagacatggagtctctgccactcctgactaagagcaaacttaatacaacttgatttatattattgtttattcattattttggcaagttttcactggcaacctgcactgagggatacattcatgtagtcaatgtgtgaagatgagctgtaaaaaaaataaatgtgtaaaacagrgtgtctatgttagagttcctgggaaatacactccatgatggagttgaacctgtaggcagtttgctggggagtgcaccctggtcagccccggtggggaagtgaagggaagagtgcggggcagtgaaagtagttcaactgttaccacaaagtcctcatgggagctctgggtctgggataggaaagtggttgttgtctcactttggagcaaggggtcctttgtaccctatcctcttcactgactaattaggga

SEQ ID NO: 609358 - DNA, 500 bp, Homo sapiens
ccatgctgggtggccataagcccaactaaactgtacacattttatgagtttaaaggattgggagattgatatgggagaagacatggagtctctgccactcctgactaagagcaaacttaatacaacttgatttatattattgtttattcattattttggcaagttttcactggcaacctgcactgagggatacattcatgtagtcaatgtgtgaagatgagctgtaaaaaaaataaatgtgtaaaacagagtgtctatgttagagttcctgggaaatacactccatgatggagttgaacctgtaggcagtttgctggggagtgcaccctggtcagccccggtggggaagtgaagggaagagtgcggggcagtgaaagtagttcaactgttaccacaaagtcctcatgggagctctgggtctgggataggaaagtggttgttgtctcactttggagcaagggrtcctttgtaccctatcctcttcactgactaattaggga

SEQ ID NO: 609359 - DNA, 566 bp, Homo sapiens
acaatctttttttaagactgaggagttaattttatctgacagatagaagttcatggttattttattgattttatttaactattgatcagcccacatgttctgtaggtcagtaattttatagcactagttaatctgccttagttggttcctatagctcgagcagagggtttgactttgagataagaatcctggagcagcttatttttgtatttcgcaaaacaacatataactcaaggcatgagtttctttttaatgcagatacgatggccagatagttactctggcttttgttttgttttgttttgtttttgtgtttgttttagagacagggtctttctctgttgctcaggctagggtgcagtggcatgatcattgctcactgcagccttgaacttctggccccaagcaatcttcctgccttggctgccaagtagctgggactacagctgcatgccgygatgcctagctaattttcttatttttttgtagagatggggtcttgcaatgttgctcaggctggactctggcatttgacaaaaaattacagctgtgtataagggttgatc

SEQ ID NO: 609360 - DNA, 625 bp, Homo sapiens
tgactaaatagttttacaagcttgcatggaagatttatattcttttgtttgcttttattggaattttttttgttaagataccctgttactagaagtatttataaatctttgaggccgagatatttcttactaacaatgggcctctttctttctctctctcccctacccatacacagatgggtagaacagttctttttctgactccttactctggatggaatcattaagagatttcttgagcaacagaacaaaatggagatgacattttgctacttgaacaactttcaggttatgacctaccctaaccccagtttggacaatcgacaggcaggctttgactcttccaaaaatagattaataatttgagcattttatttgaaaaccattgctaktttaaattggcaaaatcagtgtctttcagcaactcattctttaaagtctgagcaagtcatatactacatcacaaagtgatagatcagctactgtttttatcatgcctattctagtttgggaactagtcagtggccagaactgtatccacctctttcttatcctgaaggtgataagatctttatacatgctcagggaaatacaaatgtatgccacaaaatggaataatgtaaga

SEQ ID NO: 609361 - DNA, 568 bp, Homo sapiens
ttcactctaaaatgtggtatgaacaccattgtgcatattttgatctcttatgataaaatctctgatgtggacataagtgttcatattcgtaaggctttgtggtctatattaggtgactccaatttttaaaaaaatcctgagattctataaaatttttgacccaggagagctaccttgtcaaaagtcacatggctaactatgggcagagttgtgtctaattgtattatccagtagcatatggattaatacaattctctatgaaaatacaaaattcagaagcaaaggaaatgtattttttctccaatcattattactacccttgagataagactagtggaattattaaataatttatgcattttcaatgatttttcccctcttatwcttattttcttcactcactatgcataagtctttctggacaaagtgtaagctcattgaggatagagatcaatttatatacatacttattttttatctaacgctctaagttattgtctttttaaatttttaattgattgtcttgatcttgacgtagacaattaaatcatttacagacagttttttc

SEQ ID NO: 609362 - DNA, 590 bp, Homo sapiens
acttatttttttctaaacatacttgtggccatcccctcccttaatacctgcttgagaaactctgctctcttgtttcacccctgagtatggcatttgctgttagcttctgagaaatatttatttttttgatcatgtaaggaaagttgactatttttttaactcaggaattgatattgcattttatcaagtatcttttccacttttattgaaataatcacatattttttcttctttaattcttaaaaacaatgtcttgtcaaaagtaaatcattcctrcacataatagagaggttaagaagataagctttgtgatctctttacagtctgtcttccaatactaggcctatcacttatcatgtgaaatttggcaagttaactttgcctgtctttgtcttcttgtttagaaaatgaagtgaggtagtagtcacctaacaaagtgctatgtacagtgcttggcaaatagcaggcaactagtaaatgctgacttgtttattgctgagtattaataacgatagctgttaaaagcatggtaacttttaggatcgtacacatttgacaactttttaatgcttttagtttttagaattagt

SEQ ID NO: 609363 - DNA, 609 bp, Homo sapiens
  misc_feature 463, 464, 465, 466, 467, 468, 469, 470, 471, 472, 473, 474,475, 476, 477, 478, 479, 480, 481, 482, 483, 484, 485, 486,487, 488, 489, 490, 491, 492, 493, 494, 495, 496, 497, 498,499, 500, 501, 502, 503, 504, 505, 506, 507, 508, 509: n = A,T,C or G
  misc_feature 510, 511, 512, 513, 514, 515, 516, 517, 518, 519, 520, 521,522, 523, 524, 525, 526, 527, 528, 529, 530, 531, 532, 533,534, 535, 536, 537, 538, 539, 540, 541, 542, 543, 544, 545,546, 547, 548, 549, 550, 551, 552, 553, 554, 555, 556: n = A,T,C or G
  misc_feature 557, 558, 559, 560, 561, 562: n = A,T,C or G
gtgctatgtacagtgcttggcaaatagcaggcaactagtaaatgctgacttgtttattgctgagtattaataacgatagctgttaaaagcatggtaacttttaggatcgtacacatttgacaactttttaatgcttttagtttttagaattagtcttttcatgttatccttgcctcttcttgtggcacttttgataattattgtttctctagactactattattttatctagattttcaatttcacctgtatctatgatatttgycttatatctctaattttgcatattatgttttctttctatattttgttattaattagggttgctagatatttgtctacttcattgggcactagaaaagatttcatatcattttgcaatttctagatatgttacatttttagtttattaacttctgcttctatctctataaattcctttttttgactccttttggcttannnnnnnnnnnnnnnnnnnnnnnnnnnnnnnnnnnnnnnnnnnnnnnnnnnnnnnnnnnnnnnnnnnnnnnnnnnnnnnnnnnnnnnnnnnnnnnnnnnnttgtatactctttggctgaatcttaaagtttgagttgtatagcaata

SEQ ID NO: 609364 - DNA, 441 bp, Homo sapiens
atctaatgatctcctaggtaatagaattcattcataataaacaagtaagagttgtctcatggtatgagaaactgctcttgaaggaggataatggaatttaaaaaggtcatgaaatctggtcagcacttgacatgcttagatgcagtgccgatctcctcaaacatacttttagctaatctcagatgcagagtctggggtagtgagggtgatgggggtaatatggaggagaccttgcctgcctgcctgcctgtctgtctatccacctaccaacctatcaatcttctatcatctctctgttcattgtattctactcttactcaattttgaaaaattatgcattttttatarttgagtaagcagagtacctttggaagcacaggaaataaggaaagggaagtgagcgctaataaatcgatggggaaccagaaagatgagtgtctg

SEQ ID NO: 609365 - DNA, 572 bp, Homo sapiens
tggtcctgcagtcctatgagaaaaaaatcctgggaaagacagatgacaggagaaagcagcaaggtagggaatgagcaatttgcaagggagaagtttaaaaagcccaggtctgcaggtgaaatgtatttcacatgaattccagatggacagatcacataggcaaatcacgtttcaattttttttaattattatgtytgttagtgaaaatccactcaacagttatgcaaaacctggaccttactggcccagaaagcagggaaggccactgagaggaacagatcctttccacaagagaggtggatccccagttctcaatcagctcccagctctaactctaatataggccaagaaaagaatgccgtaacaacggctgccttcaggcaagtggcagatgcaggggggtggctggggacacatccaaggcacagaggcacaatagtgatggctttatacaagtaccatcagtaagggcttaaaagaaaacttgaaacaggtgcattagatttggtggagcagttccccaaaagtatcagggaaattcatttgtattcattgttgaaggttgagcaact

SEQ ID NO: 609366 - DNA, 565 bp, Homo sapiens
tgttttagtccattcaggttgctataacaaaatgctatagactaggtagctcataaaccacagaatttatttcacaatcctggaggctaggaagtccacaattaagacactggcagatttggtgtctggtgagggaatgctttcttgttcatagatggtaccttctcggtgtgttctcacatggtcaaagggcaagacagcactctgaggtctcttttatatggtcactaatcacctcaccaaggccccaccacctaatgcyatcatcttgggcactgggaatttaacatatgggttctgggggtaggaggacacaaacatttacaccaaagctgactccttctcagcaatcatccagtccttttaaattgggacactaacctttttcttgccagcaatcattttaaaaaatcaatttaaaataataaaaattatagtaaataccataatagcagagaaggatatgtaaaaattaaaaatgttctacccatcacccttttcctttgcctcatcttattccccaaggaaccactcttaacaatttcttatttatccctaagatatt

SEQ ID NO: 609367 - DNA, 486 bp, Homo sapiens
acctcccaatgcccttttcattcttttctccccagtacctggcacacagcctggcccgagtatttacggaataagttacagtgccagatgcttctgtaatgagccagtgctaagtccatggcttttttcatgatttaaaattcagaacagtctcagattgggtgcaatggctcacacctgtaatctcagtactttgggaggctgaggcaggaggattgcttgtgtttaggaattcaagaccctgggcaacagtgagaccccgtctctataaaaaaatttaaaagattagcgaggtgtggtagcacatgcctgtggtcccggctactcaggaggctgayatgggaggcttgcttgagctgggaggctgagggtgcagtgagctgtaattacatcatcactgcactgcagcctgggttacagagtgcataatgatcccattcaatgtgggacctccaggccctccactctaaggctggtgaatatagc

SEQ ID NO: 609368 - DNA, 548 bp, Homo sapiens
tgcacaaatttgtgtaagtgtacaccaatctgttttcttttcatagaaatccaattgtttcttctgcttgttctcatcttcaactcatacctctcttctcagaggttgcagtttctgagaaacacactgaaaatcctccataagtgatttagaccacgcaaaaacaagagacaactctcacctgagctgaaatggttcgctgaaaggtttttccagttgatgtttcattagagacattactctgtggtgtccagtaatgttmtgacatctgagatgaaaggtcaaaaatgccatcagaggtgacaaataagcccccatgggttcacagtttctaccattagatattgagtcttaaaagcatcccaagtagggtacaagtctacccagaccttccatcacataaagcgattcaagacctcagtcaagtattgcttcttatatcatcatccctaccttttcccctatgaagttaagacatatgtattaggacaaatttaatgcacacaagatataaactgtagcaaagaaatgtttgaaatctgaaaaca

SEQ ID NO: 609369 - DNA, 460 bp, Homo sapiens
ccagccaccacgttatgaggaagcccaagctacatggagaggccacatgtaggtgttytggccaacaaccccagctcagatccagcccttagccaacatcaactgcaaggcaaatcatgacaatttgttgtcacatttgaatacccagcatattttccaggggaaagaaaaaggattgagatagtttaattatcttcagatgatttcagcccccagcccctgagtcacccctagcctttgagtcttcctagctgaggccccagacatggtggaacagagacaagtcattccccaccttgccctgtctgaattactgtcctgcataagctgggagcctaatggttgatttttaccactgagttttgaaacaatttgttacacagcattacataactagagcaactccctctgagaattgtttctaggtgctctttccacctgtttttgttttttttttttt

SEQ ID NO: 609370 - DNA, 606 bp, Homo sapiens
cagatattttacaaaatgtattacctttggaattgaaaagtatcgtcctctccagctgcctgcagtccgtggaccacccttgctggatcagacacctctccaaaccccagcagcaccacaggcccagttttccatgagcctgtgaagaataagcccagctcacagtagagctgctaacagccatcatgaaagagaccagaaaatacaaaatccttagctgtgtgagacctaaacacacttaaattcgttcaactgaaaatgaatattgttttggcttgcctatttcaaaaggacagaagacctaaaaccttttatagttttcggttcaagttttgcctttccttgcaggctgattctttgttgtgccagacagccaagattcatgtttcgtagcagctgggagcctcaataatttaagcaaaatgttgcctctttcagccaagraaaatgcagctcaccaaggaatgttgcattgtagcatctgaacagagtgggggtcatagccataaaactctcctagcgtcctagcgagggcaggaatggagagaccccactccctcacttcagtgccttcttggctttccatagatgaagagcagggagtat

SEQ ID NO: 609371 - DNA, 516 bp, Homo sapiens
gtgggggtcatagccataaaactctcctagcgtcctagcgagggcaggaatggagagaccccactccctcacttcagtgccttcttggctttccatagatgaagagcagggagtatgggagaaytttctagatgctgttagcttccaagaagccatctgaaagttactgtagtttatttttcctaggcaaacaagacaagccatcacacttcctttcaactttggattgaaaacaatttgggcatgatttcctcaaccaaatcaaattaatacacttgccatttattttggcttgtaaaattccttttcatattatttcatgaacaggagaaaaacagagagacattcaatgaagtgtacattttgtggtaaaattggtatatcttacctggaaaatgagtctacagcagtttatttctttgtgaaaatgtgaaaatgccaattcagtgtcaaaaatagcatatactacatttcattaatttaatagtgtcattgaccttaaaactgctaaaatag

SEQ ID NO: 609372 - DNA, 578 bp, Homo sapiens
cctcactcaccagccagggacagaggacatctccaagggatttgggggtctggaagattgcgggcagtgaatttgtagtaccagatgttggattttgttttctgtgtgttcagattacctcttgctgggtaacaacccaccccagactcagtggcataaagcaacaacaaccgtttattattcttatctctcctggttttttattattattttattatccttatctcttctggctttggccagactcagctgggaagttctcacttgaggtcgytcatgcggctgaagtcagcagtgggtgggctggaattgtctcaaaagcatagtcactcacatgtctggctgttgatcctgaatcaactttagttgagattttcaccagaacacttagaagtggccccttcatgggactggcttcctcacaacatggtggtttgggtctgagggtagagtggagagagaggcagtgtcagctgtgtcaccctggatgacctggcctctgaaatcaagcagcattcctcccaccacattctatttgctagaggcaagttgccaggaccagcccatattcaaggagt

SEQ ID NO: 609373 - DNA, 559 bp, Homo sapiens
aaattatgagctgtttgagttgtaaagtgtgtctagaatctaatgtcatatagttttaaaagttgctttggaacattgtttcatgcattgtcgataatcactaatactctagacctgcactgtccactatgagagtcaactgccccaygtgacaagtggcgaccatatcagacagcggagaatagagcatttccattgttgtggaaagctgtgttggacagtgctgctgtaggccagttgcatccatggaatttggagtgggcatgttggatgtagcatctatgaacagtcgttccctaaaatgctaattgccagccccatttggatccgacattctgacctgccgatgtagctatcagatgcgtgctcagtgaaggcccagtggagacagaggaagtgatttctctctgtgcctgttttggtggggtcaattagaaaacattctctccagatcatgtgccaaaggtgtacagatggggaagggggctggtgtgggggaagggggctggtgtgggggaaggggcggagcaggtaagctttctggggcacttggtcactc

SEQ ID NO: 609374 - DNA, 559 bp, Homo sapiens
aaattatgagctgtttgagttgtaaagtgtgtctagaatctaatgtcatatagttttaaaagttgctttggaacattgtttcatgcattgtcgataatcactaatactctagacctgcactgtccactatgagagtcaactgccccacgtgacaagtggcgaccatatcagacagcggagaatagagcatttccattgttgtggaaagctgtgttggacagtgctgctgtaggccagttgcatccatggaatttggagtgggcrtgttggatgtagcatctatgaacagtcgttccctaaaatgctaattgccagccccatttggatccgacattctgacctgccgatgtagctatcagatgcgtgctcagtgaaggcccagtggagacagaggaagtgatttctctctgtgcctgttttggtggggtcaattagaaaacattctctccagatcatgtgccaaaggtgtacagatggggaagggggctggtgtgggggaagggggctggtgtgggggaaggggcggagcaggtaagctttctggggcacttggtcactc

SEQ ID NO: 609375 - DNA, 599 bp, Homo sapiens
tcttctaaatatttaagaaaaaaaagaacactaatcatacacaaacttttcccccaagatagaaaagtaaggcatacttcccaacttataatgacaagaacgttgtaaaaaaagaaaattacaaagaatctctcccatgaacatagatgcaagaatcctaaacaaaatactagcaaaccaaatccagtaatgtaaaaagaatattacttctttaccaacctgaatttgttctaaaaatgtaaagttagcttgacatttgaaaatcaatcactgtaacccaccttgttaacagaagagaaaaatcatgattatctaaatagacacagaaaatgcatttgacaaaattcacacctatttatgacaaacactcatagcaaactaggaataaaagtgaatgtccttaatctgatagaaaatgtctacagatgccatagagtaaacattctatttaatagcaaaatatgtaagctttcccttgagatcaggaataagctaagaagcccastatcaccataaacattcaaattctacaagaagttcttccaagtacaataatgcaagaaaaattaataaaagagataatgagtggaaagggagaa

SEQ ID NO: 609376 - DNA, 460 bp, Homo sapiens
taatattggctgtgggttgtcacatatggcttttattaccttcagctatgtcccttctatggcaattttgctgaaggtttttataaaaaagggatgccagattttgtcaaatgctttcctgtatctattgagatgatcacatgatttttgtttttaattgtgtttatgtgatatatcacatttactgacttgcatatgttaaaccatccctgtaaacccatatgaaacccacttgatcatggtggattatgtttttgaagggcttttgaatttggttagctagtattttgttgaggatttttgcatctatgttcatcacagatattggtctgtagttttctttttttgttatgtccttttctggctttggtattaggatgatrttggcttcatagaatgatttaggaaggattccctctttctctatcttttggaatagtttcaggattgtcacgaattc

SEQ ID NO: 609377 - DNA, 517 bp, Homo sapiens
gaagagatttaaatataaaagctgccaggaagaataggggaggaaaaatgattaaaagagcatgagactgtagatctattgagactggatagagaccaggaaggtaaaatgacccagatgcatggtatggggtgttctccagcagctgcccaggctatgactaggctcaaggaaggcagcccaaagttggtgttttgtcactgcagttacaaggggtaacaagaaaaatattgacaagatgggaattgaaacactaggtcatgaaatttaggctggactggggtatcagtccctcaataaatctttgttaacagggaagtgaaagaaaatagaaacctaatggagacatcccaccaacctaatcactgagccctactgattttacatcccaaatctctgtccattctctccacctctctccacttccactctcactacatggtcaccagcatctcttacctcctgactcatctccygacatccaccattgatcatggcatcccaaaattacttatta

SEQ ID NO: 609378 - DNA, 501 bp, Homo sapiens
cttactaacaatatgatcattttgctgaacggagtgtgaatctaggatctaaatatagatatttttctaacaacatgggccctgtaggctacaccagtcaggattaaatttagctgcatacagcaggaaacctaaatatgaacctttatcggttggggatcccagcatgaaagagatggcacattgacattttgggctggatgatttaaaaaaaaaaaaaaggaagaaagaaacagatggcatattygaaagagtttagctgaaacaaagtttaaagaagccagtatttatagaggtatggacagggttcaggaaacaaagaggaatgatgacgctccctggggttagcagcagtggaaggccattccaccccctaggctgaggggatggtgtgaatggagcccatcaagagctgcagcctgggaggaagggctgctgagcaggtgctatgcccatagaggaacagagcctctgctagacccaagacaatgcaagcaggga

SEQ ID NO: 609379 - DNA, 555 bp, Homo sapiens
agggatcttggggagagggctgcaaaaggaaaataaccaacacaacagcttatctgtctcacattgtaacaatctggaggtaggcaccccggcctgagatgctggctccagggtcctcaggagcccaggcttccttccttatagtcacctcccattccaagatgacttctggagctcctgacctctcactcttttccaggaagcaagaaggagaaaggagagaaggggtaccttccagttgagtagggcctctttaagaagttccccagcagccctacccaagacttccacatagatttagtattttgtctgggcatgttgcttcccaaaacaaaatccrggtttattagttaaaaaaaaaaaaagtacaatggatattgagtaggccctcctaaaacaatgcttgaggaaacattgccagaaatagttttactgaaagatggtaggagttttctcagggattttttgtttgtttgtttatgctgcctcttataccaactgatatggtttgaatgtttgtcccctccaaaactcatgttgaaatttacttggcca

SEQ ID NO: 609380 - DNA, 567 bp, Homo sapiens
gcaatgttggggaatgggtaggtagttgtgtacagaagcacttctcaaatttygatatgcttgcaagccacctgggggtttgttaaaaatgcaaattctgattcagtaggtttgggtgggcacctgagattcagcattttcaaaaagctcccagatgattctgatgctacgagtccaaggaccacactttatgggttttaactttgctgaacatgagacccaccatggggaattaaaaaattaccaatgcccatgctccatttcagacccataactcagagtttacaggagttggatccagacataggtaatttgtgtgtgtgtgtaacattcttcaagtagttttgttttggaaccagagttgataaccattagatttggattagcgggaaaagttattaaattcagagacataagccaaagttctatcctaattatactacttctgtcaggcctctgagcccaagctaagccatcatatcccctgtgacctgcacgtacacatccagatggccggttcctgccttaactgatgacattccacctcaaaagaagtgaaaatggcct

SEQ ID NO: 609381 - DNA, 636 bp, Homo sapiens
tgttacggactgaatgtgtccctccaaaattcataagctgaaatctaatccccaatctgctggtattgagaggtggtgcctttgggaagtgattaggtcattagagtgatgtcctcatgagtgggattagtgcccttataaaggagggagcatctgtcctttctgctgcgtgaggacacagcagcagggcaccatctatgaatcctggatctcatcagacaccaaatctactagttctttgatcttggacttaccagcctctagaacagtgagaaataaatttctgtcrtttataaattatccagcctaaggtatttttgttataatagcccaagtggactaagacagtaactgattcacagaaatttggttttcaagacgttttagaccaagagaacccctaaacatataggtggatgtaagctggttaacttatcttgcgctgactgtgctgagcattatcagtttctaatgatatcaagctacttagaaagcaatgaagctgaaagttcttctaaaacaaaatgagaactttgaagaagctttttaaaagtaagttttgtttgttttagttcccctgggtaggcaaacatataaacagagctccattgtctcttcaaaacccacttaattagg

SEQ ID NO: 609382 - DNA, 636 bp, Homo sapiens
tgttacggactgaatgtgtccctccaaaattcataagctgaaatctaatccccaatctgctggtattgagaggtggtgcctttgggaagtgattaggtcattagagtgatgtcctcatgagtgggattagtgcccttataaaggagggagcatctgtcctttctgctgcgtgaggacacagcagcagggcaccatctatgaatcctggatctcatcagacaccaaatctactagttctttgatcttggacttaccagcctctagaacagtgagaaataaatttctgtcatttataaattatccagcctaaggtatttttgttataatagcccaagtggactaagacagtaactgattcacagaaatttggttttcaagacgttttagaccaagagaacccctaaacatataggtggatgtaagctggttaacttatcttgmgctgactgtgctgagcattatcagtttctaatgatatcaagctacttagaaagcaatgaagctgaaagttcttctaaaacaaaatgagaactttgaagaagctttttaaaagtaagttttgtttgttttagttcccctgggtaggcaaacatataaacagagctccattgtctcttcaaaacccacttaattagg

SEQ ID NO: 609383 - DNA, 546 bp, Homo sapiens
gcgtgggtgtgttctcaaggtcttaggaaaattccggaagtccagcagatgttttctgttaggaggcaatggaagccccaagagctacatcttcttcttcattctcttaattataagtttacttatgaaatcattttttttcttaagtatytctctgccaatacttacaaaatagaaggctggccaaagtagtcaactcatgagccttcctgtgtaaccagaatatgtgtacgtgggcaggaaatctctataggaagcagaaatctaggtccatcattataaatgctttatcttctgaataactcttttagttactgaagtggaattacaacttttttaatcttatcaattataaaagtatattcaggtttcattgattacaatatttttcccccttttggaaaatgatgtaattaatagtcatcatagtaatttttctgtttttttggttctctatataaacattaataaatggggatagattcaaggaatcagaagttaatgaagcatattttaaacatttagactttctgctgtcttaatttt

SEQ ID NO: 609384 - DNA, 570 bp, Homo sapiens
attcaaggaatcagaagttaatgaagcatattttaaacatttagactttctgctgtcttaattttgaatacrtgtttgaatacctatgggaggctacttttcttactgcatttgctttactagcttctgtgttatgaaatctaaccatcaactctttcagggagaaggaatgaacatttccgtctgaccaaagtttcaaaagtcaagaggtgaattaatgttcagaaaatacttaaaatcttatttaaatttctcatctgcttaagaactttttcacttttttttctgtagtaggtatctgaagaccaactttttcacttttatcacatatgcaaattgatctccaaaaggtttattagagattgggtctatatatcaaaaggtactttatgaatgaattaagaagggagtttcctatctaggctggctagttagtgaggttgcagaagcagtcagcataaaaactttgttaaagttcaggaatccagctggctgtatgttttggagaatttgtctgattactacacatggttactagatctatcgtgaatatggaacaaattcaagaac

SEQ ID NO: 609385 - DNA, 570 bp, Homo sapiens
attcaaggaatcagaagttaatgaagcatattttaaacatttagactttctgctgtcttaattttgaatacgtgtttgaatacctatgggaggctacttttcttactgcatttgctttactagcttctgtgttatgaaatctaaccatcaactctttcagggagaaggaatgaacatttccgtctgaccaaagtttcaaaagtcaagaggtgaattaatgttcagaaaayacttaaaatcttatttaaatttctcatctgcttaagaactttttcacttttttttctgtagtaggtatctgaagaccaactttttcacttttatcacatatgcaaattgatctccaaaaggtttattagagattgggtctatatatcaaaaggtactttatgaatgaattaagaagggagtttcctatctaggctggctagttagtgaggttgcagaagcagtcagcataaaaactttgttaaagttcaggaatccagctggctgtatgttttggagaatttgtctgattactacacatggttactagatctatcgtgaatatggaacaaattcaagaac

SEQ ID NO: 609386 - DNA, 570 bp, Homo sapiens
attcaaggaatcagaagttaatgaagcatattttaaacatttagactttctgctgtcttaattttgaatacgtgtttgaatacctatgggaggctacttttcttactgcatttgctttactagcttctgtgttatgaaatctaaccatcaactctttcagggagaaggaatgaacatttccgtctgaccaaagtttcaaaagtcaagaggtgaattaatgttcagaaaatacttaaaatcttatttaaatttctcatctgcttaagaactttttcacttttttttctgtagtaggtatctgaagaccaactttttcacttttatcacatatgcaaattgatctccaaaaggtttattagagattgggtctatatatcraaaggtactttatgaatgaattaagaagggagtttcctatctaggctggctagttagtgaggttgcagaagcagtcagcataaaaactttgttaaagttcaggaatccagctggctgtatgttttggagaatttgtctgattactacacatggttactagatctatcgtgaatatggaacaaattcaagaac

SEQ ID NO: 609387 - DNA, 618 bp, Homo sapiens
gttgttacaagttttaaatatggtttctctcattttgtccccacggcaactgcatgtagtgacacgaactccagtggagaggagagaggacaggggctcagatgggaccagtgtcagggctggccggggtgcactcagatctggggagctggctgactccaccaggcccttactgctccaagggaggtctgtgtcggcgtcaccygggggcttgctataaatgcagagtctcaggcctggccccagaactcctgaatctgcatttgaactgatccccaggatactccttggtacataacagtttgagaaccaatgcacgagaccaccataacccccatcctggcattcctgagggaagagataggtgactttcaataagaaaaacctcttaagcatggagttggggctcagtagaaaggtctggcttactgggtcatgcagaggaacataagagtatttatgtgggttaaatattatctctaattcaatcagtcttggccttatacttcagtgatatctacaagacagactccattttgactatcgtgaggacggggcgcgggggctgcccattgttttccctctctgaagtcatggctggtgcgcacatgggccatc

SEQ ID NO: 609388 - DNA, 594 bp, Homo sapiens
gaatgaggactgctgccaaggatacatatacacacacgcacagatgtatacatacatrcttcttaaatttaaaaggtgtgaagaataggtgacggagaaaaaacatgagagagaacaaaatgtatgaactctattagaagttaacttctggcagtgtagtaggaaaagcgtctcggctaatgtataaattaccaagaaaaaaaaaagagtcccactaaaaaaaccaggtactcacatctaaatttctaattaaattacaattacttttgaagctcatcccccatagagaaacttctcctgggatgtgctctaggatggacctgagttttgcttctattggagccagtcatgcaagagtgagagggtccatttgcaaatagaattgcatgcagggtcttgctgtgaatttactgacatgctcctgcttatgctgtcacttccttaagaccagacagcctgtgaaccctgatgagtatttccagtcctgtgccgggctctcagcctgggactgcttggggcctacacctcgcccacttctccccagtctgcatcgatgaaggaagccatcagtgtccgtaggggcagcagatcagc

SEQ ID NO: 609389 - DNA, 596 bp, Homo sapiens
tctgtttcaaaattgcctcactctgtccttatgtcttccccccagattgtgacacagatgtgaaaagggccgttggaggtgacagacaggaggccatccagccaggtactctgggaagtgcaggtggctttaggacactagagaactctcatttggtctgctggttaagctcttgcagtatgcgtgggataagaaatattaataatatgtgcaagccacgtttgatttccatggcacaacakagtggcctggtgagcactatacattgcatgaatgacaacctggtagagacggagagacatttaaccaaacccctcttgtcagaaatcctttttcactggaaagcaccagtgcattccaactcagctccacaggcacgtgtgctgccaggagggtccaggcagaggaggctgagcccagcccagacggtggcgaggatgtcaggccaagatgggagcctggtccagattcccaggcacacagacaaaagaaagctccaagagtgactgttcttgcaagagagcctcttagacaaagggctctcacaataccccagctggagtgtcactgctcccagccacaccaaccagaagtgc

SEQ ID NO: 609390 - DNA, 596 bp, Homo sapiens
tctgtttcaaaattgcctcactctgtccttatgtcttccccccagattgtgacacagatgtgaaaagggccgttggaggtgacagacaggaggccatccagccaggtactctgggaagtgcaggtggctttaggacactagagaactctcatttggtctgctggttaagctcttgcagtatgcgtgggataagaaatattaataatatgtgcaagccacgtttgatttccatggcacaacatagtggcctggtgagcactatacattgcrtgaatgacaacctggtagagacggagagacatttaaccaaacccctcttgtcagaaatcctttttcactggaaagcaccagtgcattccaactcagctccacaggcacgtgtgctgccaggagggtccaggcagaggaggctgagcccagcccagacggtggcgaggatgtcaggccaagatgggagcctggtccagattcccaggcacacagacaaaagaaagctccaagagtgactgttcttgcaagagagcctcttagacaaagggctctcacaataccccagctggagtgtcactgctcccagccacaccaaccagaagtgc

SEQ ID NO: 609391 - DNA, 596 bp, Homo sapiens
tctgtttcaaaattgcctcactctgtccttatgtcttccccccagattgtgacacagatgtgaaaagggccgttggaggtgacagacaggaggccatccagccaggtactctgggaagtgcaggtggctttaggacactagagaactctcatttggtctgctggttaagctcttgcagtatgcgtgggataagaaatattaataatatgtgcaagccacgtttgatttccatggcacaacatagtggcctggtgagcactatacattgcatgaatracaacctggtagagacggagagacatttaaccaaacccctcttgtcagaaatcctttttcactggaaagcaccagtgcattccaactcagctccacaggcacgtgtgctgccaggagggtccaggcagaggaggctgagcccagcccagacggtggcgaggatgtcaggccaagatgggagcctggtccagattcccaggcacacagacaaaagaaagctccaagagtgactgttcttgcaagagagcctcttagacaaagggctctcacaataccccagctggagtgtcactgctcccagccacaccaaccagaagtgc

SEQ ID NO: 609392 - DNA, 596 bp, Homo sapiens
tctgtttcaaaattgcctcactctgtccttatgtcttccccccagattgtgacacagatgtgaaaagggccgttggaggtgacagacaggaggccatccagccaggtactctgggaagtgcaggtggctttaggacactagagaactctcatttggtctgctggttaagctcttgcagtatgcgtgggataagaaatattaataatatgtgcaagccacgtttgatttccatggcacaacatagtggcctggtgagcactatacattgcatgaatgacaacctggtagagacggagagacatttaaccaawcccctcttgtcagaaatcctttttcactggaaagcaccagtgcattccaactcagctccacaggcacgtgtgctgccaggagggtccaggcagaggaggctgagcccagcccagacggtggcgaggatgtcaggccaagatgggagcctggtccagattcccaggcacacagacaaaagaaagctccaagagtgactgttcttgcaagagagcctcttagacaaagggctctcacaataccccagctggagtgtcactgctcccagccacaccaaccagaagtgc

SEQ ID NO: 609393 - DNA, 619 bp, Homo sapiens
agggaggctggggcaggctgggggtgggtggtgattgaggaactgatcagtttctgaaacgcatgtcactttttatggtgctgaaatatactgcccttctgtcgccacatgcagaagaggataaaatgcccaattcaaggattgcaaaaatcagagagtctattccagatctaagacccacacatgcaaacccaagtgcatggctccctgggtacagtttgtaacattgccagtgaaagtcatgtctcttcattgtgagtaaatcacaccgttaaaactctgagtacggtctagctgattaacgtcaggttaatccagatcctttattctgtattccagttactcccagctcccaggcagtgatggctttaccggcccaggaggkccccgggccctgctcattggatctttttggtgggatacaccccacagaacacagaaaacattcccttttccgtatccatacataggagtgccgagcctgccgtgtacttgatcttgtcccacagaatcacctgccagtctcatcgttgcaggcttctctcctgcatgcacagtgggggtggcggagacctcagaagcctttccttctgagcactgcgagactgtcagctgcggg

SEQ ID NO: 609394 - DNA, 525 bp, Homo sapiens
aattttcatgtgccaatggcacgtgccaatattttcctggtattcttaggtcatcttcacacccaagagcatggcatgactcatggctgagatggtgtgttcccattgtgccatgtgactgtcattaccccatggggcctctgcaggtagtaagcagctaacagccctgcagagtctgccccaggtggaagcagagaggaaaggcgtgtgggtggccttccaaaggcgggctcccggtgagttgagcaagcaggccgcctgtcttccagggtgactgctcaggatctgtggcacagcccagggacaggaccaagagttatatctattttgcatttagactgaaaagcrgtctatatatatgagagaaaaaaaaattctttaagttagcattatattgagttggttccgctacgataatacaaacacacaccacattggccaagtaagaaaaaaggttacgagccaaaagtggggcagtgggcatggggagggggtttgaactggctgtgatgcacagcttttttc

SEQ ID NO: 609395 - DNA, 585 bp, Homo sapiens
cattacctggacaacatagtgcctccaagagaacttggagatacagataataaaagtttacttcagctaacagtaacagaagactagataagtcattccaccactccagctaagggtatcttccttcttttagacattaaacaaattgtttaattgacaaagaaaaatggtatatatttatyatgtacaacaagttgttttgaaatatgtatactttgtagaatcaacttccttttaataaataacaaaatgtaaagaattgctaggtcaaaagtattgaaaagaatcaagagactttagctctttatatggcacctctttctctagaagcatttgtcatcaaaaagtagctattcatggactgagccacagttgtgacaacatcccagagctgcaggtcaatgtcaaagagtccccagacagccaagggttgtgtctaagtcagcatggctgaaccaagttcaaatcaactggatgagcagataatctcaagtcttggaactgattaaaggaatccttgtttctagtgcccccaaaaaggaaaaaaaaaaaaaaaaaaaaaaacctttccagaggaagataatg

SEQ ID NO: 609396 - DNA, 489 bp, Homo sapiens
ttagctctttatatggcacctctttctctagaagcatttgtcatcaaaaagtagctattcatggactgagccacagttgtgacaacatcccagagctgcaggtcaatgtcaaagagtccccagacagccaagggttgtgtctaagtcagcatggctgaaccaagttcaaatcaactggatgagcagataatctcaagtcttggaactgattaaaggaatccttgtttctagtgcccccmaaaaggaaaaaaaaaaaaaaaaaaaaaaacctttccagaggaagataatgttatcttttccctcaaaatatttttcagataacttcatcacttgtgtcttcagtgagtaacatactatgacagactactggaatattttcagtaattatagcagaatgggctggggaggagtatggagaagcatacaccagctttaaagccttcctcttagacgtgaaacacatcatttccactcacactacattgccta

SEQ ID NO: 609397 - DNA, 633 bp, Homo sapiens
cttattggctgtaataattttgtaaaacgacacttctgctcatctgctacttgattacccagggatagcggctatatagaaaaggcaggatacatagattgatattctcttgttgatagtcattacagactcttaagtttaaacatatttgatagtttttaacccattgaaatctgtatctttattaaggttcaaattatcctacccttggtgaatacaagcctctttgaattgactcttgtgtccttttgacacaaacctagtagctttttatagcttctatgctatctggtatgtcaaaatgtcccagtttcattttgtacacttcctgtccacaatcaatgttccaagaacccctctttttaaaaaatrgaaatgatctttgagaccatagtctggatgctgtgaatgtgtgttcatagtgagctggtcattgtttcttgacctctttatggatagagctagaaattgcacacacacacacacacacacacacacactcctttttcttttcctaaacatgtctttccagcatgccccttcttttctctttgttatagcatgggattcatcacaatatgtttttattgcttctttttattttcccaaattttagaagaaagattggttagc

SEQ ID NO: 609398 - DNA, 633 bp, Homo sapiens
cttattggctgtaataattttgtaaaacgacacttctgctcatctgctacttgattacccagggatagcggctatatagaaaaggcaggatacatagattgatattctcttgttgatagtcattacagactcttaagtttaaacatatttgatagtttttaacccattgaaatctgtatctttattaaggttcaaattatcctacccttggtgaatacaagcctctttgaattgactcttgtgtccttttgacacaaacctagtagctttttatagcttctatgctatctggtatgtcaaaatgtcccagtttcattttgtacacttcctgtccacaatcaatgttccaagaacccctctttttaaaaaatagaaatgatctttgagaccatagtctggatgctgtgaatgtgtgttcatagtgagctggtcattgtttcttgacctctttatggatagagctagaaattgcacacacacacacacacacacacacacactsctttttcttttcctaaacatgtctttccagcatgccccttcttttctctttgttatagcatgggattcatcacaatatgtttttattgcttctttttattttcccaaattttagaagaaagattggttagc

SEQ ID NO: 609399 - DNA, 583 bp, Homo sapiens
tggacctaattaaactaaagagcttttgcacagcaaaaggaacagtcagcagagtaaacagacaaaccacagagtgggagaaaatcttcacaatctatacatctgacaaagsactaatatccagaatctacaatgaactcaaacaaatcagtaagaaaaaaacaaacaatcctaccaaaaagtgggataaggacatgaatagacaattctcaaaagaagatatacaaattgccaacaaacatttgaataaatgctcaacatcactaatgatcagggaaatgcaaatcaaaaccacattgcaataccacatcactcctgaaagaatggccataatcaaaaaatcgataaactagatgttggcgtggttgcagtaaacagggaacacttctgcactgctggtgggaatgtaaactagtatagcgactatggaaagcagtgtggagatttcttaaagaactaaaagtatagctgccattggatccagcaatcccactactgggtgtctacccagaggaaaagaagtcatcatccgaaaaagatacttgcacacacatgtttatagcagcacaatttacaattgcaa

SEQ ID NO: 609400 - DNA, 583 bp, Homo sapiens
tggacctaattaaactaaagagcttttgcacagcaaaaggaacagtcagcagagtaaacagacaaaccacagagtgggagaaaatcttcacaatctatacatctgacaaaggactaatatccagaatctacaatgaactcaaacaaatcagtaagaaaaaaacaaacaatcctaccaaaaagtgggataaggacatgaatagacaattctcaaaagaagatatacaaattgccaacaaacatttgaataaatgctcaacatcactaatgatcagggaaatgcaaatcaaaaccacattgcawtaccacatcactcctgaaagaatggccataatcaaaaaatcgataaactagatgttggcgtggttgcagtaaacagggaacacttctgcactgctggtgggaatgtaaactagtatagcgactatggaaagcagtgtggagatttcttaaagaactaaaagtatagctgccattggatccagcaatcccactactgggtgtctacccagaggaaaagaagtcatcatccgaaaaagatacttgcacacacatgtttatagcagcacaatttacaattgcaa

SEQ ID NO: 609401 - DNA, 583 bp, Homo sapiens
tggacctaattaaactaaagagcttttgcacagcaaaaggaacagtcagcagagtaaacagacaaaccacagagtgggagaaaatcttcacaatctatacatctgacaaaggactaatatccagaatctacaatgaactcaaacaaatcagtaagaaaaaaacaaacaatcctaccaaaaagtgggataaggacatgaatagacaattctcaaaagaagatatacaaattgccaacaaacatttgaataaatgctcaacatcactaatgatcagggaaatgcaaatcaaaaccacattgcaataccacatcactcctgaaagaatggccataatcaaaaaatcgataaactagatgttggcgtggttgcagtaaacagggaacacttctgcactgctggtgggaatgtaaactagtatagcsactatggaaagcagtgtggagatttcttaaagaactaaaagtatagctgccattggatccagcaatcccactactgggtgtctacccagaggaaaagaagtcatcatccgaaaaagatacttgcacacacatgtttatagcagcacaatttacaattgcaa

SEQ ID NO: 609402 - DNA, 330 bp, Homo sapiens
gtgggaggggaacaagagacaaaagatgacaaatatgatgcagtgtatactgctccagtgatgggtacccaaaatctcacaaataaccactaaagaaccgactcatgtaaccaaatgccacctgtaccccaataaattagggagaaagaaattttttttwaaaaaaaagaagaactagtggaagtgtttattaagctggataagaaaacaataacgcaaatagatttggggatataattttcatgccatgacttcagaaatagaagttgcaaagtaaaaacccctattcatttctgggaagcctattaccactattatcctggtatatgg

SEQ ID NO: 609403 - DNA, 594 bp, Homo sapiens
cccagtcaatcgtttgttatagcaacttgagctggctgagacaaagaggatttggccagtcacagagcaggaattctagaaggcacggtgacggggtttgaggtgacagggaaggttgtgggattgggacayattagggatttacagagaggaacataaatggaagttcaagtggtagcaaacgttctcagaggtttggacttatggggataaccaaagcaaactgtgaattgaggcatactagggatggccatgattatgtcttaaaggcagattagctttgggctctagcattccattatgctcccaaaatttctattgttgatattgctactggttgctcaggtcataagcagttattctggcagacaacagagcaggaccactcctgaaggctttggtcagtgttctagctacaaacaagggcctaacgcaaagataatttggcaaatgatgaaagcttattaagatggaagagactagggtgtatttaaaaagctgatgggaaagagatcaaggcaaagcaaagggttgaagacacagaagaaagagaaggtgatgacggagaagtccctgagccagctggacaagatg

SEQ ID NO: 609404 - DNA, 609 bp, Homo sapiens
ctctgcacaggaaatacagaaacgtggaggagaaggcgcttgcatgggtatggaagaaggctctgaagcctctcccatgtttgggcaactctgttttatgagctacgggtccccagagcagaagctggaatctcactttccccacctccatcgcagctacaacaggcacggggcacaggctcctccaatcagacacacctgctcaagatggccggtttggagaatttggaggagggtctgacaaggtgcactccagggaagggtggcagtggaycccacactcagcagccatcgtaggggtagtgatcctgagcactcacactaagcggcagaagctggggtctttatgggacagacgcacaccacctccattatgctcttgtgaaattctcagaaaccccaagaactgtgaactatccctagataaactccctttcttcttaaaccaaaaataaaataaaaatgctttcttaatgttatggtaaaaacatttgattttttactttttaatgccagatttcagtgtcctcaaataaatatttccacctagagattaagaaagaggtaaaatgacattattaaactgaaaaactcagttcagtttacatc

SEQ ID NO: 609405 - DNA, 609 bp, Homo sapiens
ctctgcacaggaaatacagaaacgtggaggagaaggcgcttgcatgggtatggaagaaggctctgaagcctctcccatgtttgggcaactctgttttatgagctacgggtccccagagcagaagctggaatctcactttccccacctccatcgcagctacaacaggcacggggcacaggctcctccaatcagacacacctgctcaagatggccggtttggagaatttggaggagggtctgacaaggtgcactccagggaagggtggcagtggaccccacactcagcagccatcgtaggggtagtgatcctgagcactcacactaagcggcagaagctggggtctttatgggacagacgcacaccacctccattatgctcttgtgaaattctcagaaaccccaagaactgtgaactatccctagataaactccctttcttcttaaaccaaaaataaaataaaaatgcyttcttaatgttatggtaaaaacatttgattttttactttttaatgccagatttcagtgtcctcaaataaatatttccacctagagattaagaaagaggtaaaatgacattattaaactgaaaaactcagttcagtttacatc

SEQ ID NO: 609406 - DNA, 642 bp, Homo sapiens
taccctgtaatagtggttatagcggaggacaacatggacatggtccctccctttgtgaaaagtaaagaaacgaatcatatgtctccataattattacactcatcataaatcctaaaatgaaaacatatacagtgttatgagagcatatattatgaatatgtgatttattttatggggttaaaaagggattccttataaaatttatgtttatttaaagtaggactgaaagataaggaagagttagctagcagaaaaggcaagggtggggagagtgttcaagacaaacagaaaatcatatttgaaagaatctacatatgaatcagaataagggcttagctgccataattagaaatacrgaaaagagaagggacacaagttgtgagttgaggccctagagatttgaaggtgctgcaccagtaagaatttttaaggatttttgacttagggggaatagaaagctgctgaagggatttaaccaaggaagtgacgtaaaggcttgcattttaaagaatagctctcaatgaagaatgaggaatacactgaagggagaaagaatgtgttaaaaaagtagcgagagtattacagaagtccagatgggatatgatggtattggacaatgtgataaaagtgaaattggaaaga

SEQ ID NO: 609407 - DNA, 624 bp, Homo sapiens
acatatgggaatctccattagataaacagtggatttctcagcagaaaccactgagaggagtgttagggatatgttggccaaaggattcaaaattttaattagatgaaaggaataagttyatgagatctattgtacaacatggtgactgtagttaatgcattctattcttgaaaattgccatgagagtagattttaattgttatcatcacaaaaaggaaaagcatgtgtggtaatgtgtgtgcatttagccatttcaccatgtatacatatttcaaatcaacatattgtacacaataagtatacaccttttcgtcaattaaaaataatttaaaacaaaaaaatacatgccaaaacgaaaagagagtgtagacactgaatccaacagaagtcagaaaatactgtataaaaaggctaataaatagaaaccaaaattacatgatggaaataattctaaatatgtcagtatctcagtatatatcaacatatgaagatcacacaactaaaaggcagatataatcacatctaataaaattctgtcacatatatgatagacacacttgaaactacacaggaatgttaaaattaaggaagtatagttaaaaatatggagcgtaaaagtaccaa

SEQ ID NO: 609408 - DNA, 592 bp, Homo sapiens
tataaaataataaagaacatgtatcaamttggatcaattgaggctactttggttttatcagccaaacctcacactactttctgtctctaacatggcaattaggaaggataactactatttgtgaagagttttactcactttatcatcattaatttacaaagcaactctatgaggtagttatttccattcagataacaaacttgacactgaaagggttttaatacctcctcatggaaacataaatagagtgatgaggtcaggatggttgcaggtctatttgctctatctttcccacttttttgtgctaaacttgtattgtcactgtctgatcttttgctctgaaccatagtagacccaaccaaataccacagggcctacgtcctacttgacaacacatttttctatagaataggcatgtaattttggggccaaaatccagaagaagagggaagcccaaggtgctaagtgcagcatttggaccacttttcctttagaggcatctgaaaattttggagattgtaaatgagaggctgaaattgagaagagctctcatgagactcaaaaagcaaaagaataaccaacaatagacaat

SEQ ID NO: 609409 - DNA, 592 bp, Homo sapiens
tataaaataataaagaacatgtatcaacttggatcaattgaggctactttggttttatcagccaaacctcacactactttctgtctctaacatggcaattaggaaggataactactatttgtgaagagttttactcactttatcatcattaatttacaaagcaactctatgaggtagttatttccattcagataacaaacttgacactgaaagggttttaatacctcctcatggaaacataaatagagtgatgaggtcaggatggttgcagktctatttgctctatctttcccacttttttgtgctaaacttgtattgtcactgtctgatcttttgctctgaaccatagtagacccaaccaaataccacagggcctacgtcctacttgacaacacatttttctatagaataggcatgtaattttggggccaaaatccagaagaagagggaagcccaaggtgctaagtgcagcatttggaccacttttcctttagaggcatctgaaaattttggagattgtaaatgagaggctgaaattgagaagagctctcatgagactcaaaaagcaaaagaataaccaacaatagacaat

SEQ ID NO: 609410 - DNA, 583 bp, Homo sapiens
ggataactactatttgtgaagagttttactcactttatcatcattaatttacaaagcaactctatgaggtagttatttccattcagataacaaacttgacactgaaagggttttaatacctcctcatggaaacataaatagagtgatgaggtcaggatggttgcaggtctatttgctctatctttcccacttttttgtgctaaacttgtattgtcactgtctgatcttttgctctgaaccatagtagacccaaccaaataccacagggcctacgtcctacttgacaacacatttttctatagaataggcatgtaattttggggccaaaatccagaagawgagggaagcccaaggtgctaagtgcagcatttggaccacttttcctttagaggcatctgaaaattttggagattgtaaatgagaggctgaaattgagaagagctctcatgagactcaaaaagcaaaagaataaccaacaatagacaatccaaaaaggaagttaaaaaaattccatttacaattgcatccaaaggaataaatacctaggtataaatttaaccaagaaagtaaaagacttatatat

SEQ ID NO: 609411 - DNA, 622 bp, Homo sapiens
acttatatatataacacttcaaaacattactgaaagaaattaaagacctgaataaatggaaaagcatctaatgttcatggattagaagacaatattgttaagaagtctatactacccaaagcaatcygcagattcaacgcaatgcctatcaaaattccaatggtcttttttgcacaaatagaaaagatgattttcagattcagagggaattgcaaggggattcaaatggctaaaacattcttggaaaaaaaacacaaagttggagggcccacatttctcaattttgatagattcttagctatgacatcaaaagcacaagcaacaaaagaagaaaatagacaaattggacttcattaacacttaaaacttttgtgcataaaaggacagtaaaaagaacatgaaaagacatgcaaaccatgtatctgattagggtttagtattcaggatatattaaaaatgcttacaactcaacaacattcccaatgacccccatcttctactactctcactctttttaaataacttactcttaattgtgcgttggacctactgacctgtgtataatcagtataatatgtcaagagtgatgggatgtggcttccattaaaaactttcatcttgc

SEQ ID NO: 609412 - DNA, 622 bp, Homo sapiens
acttatatatataacacttcaaaacattactgaaagaaattaaagacctgaataaatggaaaagcatctaatgttcatggattagaagacaatattgttaagaagtctatactacccaaagcaatccgcagattcaacgcaatgcctatcaaaattccaatggtcttttttgcacaaatagaaaagwtgattttcagattcagagggaattgcaaggggattcaaatggctaaaacattcttggaaaaaaaacacaaagttggagggcccacatttctcaattttgatagattcttagctatgacatcaaaagcacaagcaacaaaagaagaaaatagacaaattggacttcattaacacttaaaacttttgtgcataaaaggacagtaaaaagaacatgaaaagacatgcaaaccatgtatctgattagggtttagtattcaggatatattaaaaatgcttacaactcaacaacattcccaatgacccccatcttctactactctcactctttttaaataacttactcttaattgtgcgttggacctactgacctgtgtataatcagtataatatgtcaagagtgatgggatgtggcttccattaaaaactttcatcttgc

SEQ ID NO: 609413 - DNA, 575 bp, Homo sapiens
ctacagccccggctgataccttcactgaagcccacaagagaccatgaaccaaaggactcagctaaaacatgcccaaattcctgacctgcagaaagagtgaattaatcaacattgttgcttaagccactaagttttgtrgtaatttgtaatttgttaggcagcaatagacagctaatacaatagactcattcaaaacccagtagaattttatttcttgaaattgacagtttgattctaaaatataaatagtgatccaatggcaagtatagtcaagacagttttaaagaacaacaaagctggataatttatacctccagatattaagacctattataaaaatacagaagtataacaatatggaattggtacaaggatagactaacttatgaaacagaataaagagtctaaaaatagagccacatatatgcagtaccctgctttatgacataggtgactttgcaatgtagagggagaatggatgatttttttaataaattattactgggtcagttgggcacacacatgaaaaaacttaatttgatatctatctccatgtcgaatgcagatataaatgt

SEQ ID NO: 609414 - DNA, 607 bp, Homo sapiens
tgaaaggtagaacaatgacatcttaggcaaaaacgtcagagaatgtcttaatgacctcagtgtaggcaaaaatttcttaaayagatacaaaaagtgctaaagtgctaacttaaaaaaataaaaatttttaatgtaaagaacctcggttcaaaaaagtacaattaagagagttaaaggcaacccggatagggggagaaaatatttggtatgcatattcaacacaggactgaaggactcatatctagaatgcatttttttaaacatacaaattagttagaaaagagttaaaccaaactttaaaaagggcaggaagcaaaaggcttgaatggtgtttcacaaaagatgacatgtcagtggccaaatgtgctcaattgtattagttgtcagggaaatataatttgcaaacaaaatgagattactagatatcactacaatctgcctacatggctaaaacaaacaaacaaaaaggttgatgaggatgtggagcaactggaacttccatctgctgctggtggaagtataagctactacaatcattttggaaaacttattagcatcatctaataaattaaacgtgcatatcccacgacccagaaattccacttct

SEQ ID NO: 609415 - DNA, 607 bp, Homo sapiens
tgaaaggtagaacaatgacatcttaggcaaaaacgtcagagaatgtcttaatgacctcagtgtaggcaaaaatttcttaaacagatacaaaaagtgctaaagtgctaacttaaaaaaataaaaatttttaatgtaaagaacctcggttcaaaaaagtacaattaagagagttaaaggcaacccggatagggggagaaaatatttggtatgcatattcaacacaggactgaaggactcatatctagaatgcatttttttaaacayacaaattagttagaaaagagttaaaccaaactttaaaaagggcaggaagcaaaaggcttgaatggtgtttcacaaaagatgacatgtcagtggccaaatgtgctcaattgtattagttgtcagggaaatataatttgcaaacaaaatgagattactagatatcactacaatctgcctacatggctaaaacaaacaaacaaaaaggttgatgaggatgtggagcaactggaacttccatctgctgctggtggaagtataagctactacaatcattttggaaaacttattagcatcatctaataaattaaacgtgcatatcccacgacccagaaattccacttct

SEQ ID NO: 609416 - DNA, 581 bp, Homo sapiens
aacagggaattaccctgttccatgcaggcccaaatctcccagtggcatggaacaacctggctggccctttcctcaaggtggaatcagacatattgacacctttctgacttacaaacctcctatctgtctakctccttcaggagaccacaagctccccttcaaaagaagccacgttttgcacatgttcacatttagcagaattcttggcccagagcctggcaagcaacagacattcagcaaatgagcaatgatgttgccttgacaatgcatttgctggaaagtacaccagtgtcaaagaaacagaagggatggcaggaacgtggccaggggacacttttatgcctcttgttcttaacataaggaattttattacatctacctggaagattttaatgttttgtttttgtttcctttgattttgccctatacttgacttcaaatatccctctcctaagttctaactatggtattctttgctataattgtctgattaccagagagattaataagctttttcagtttgcctcataaatcacaaatttctacaagtgggaggttttcaaaaaagaggcaaactcaca

SEQ ID NO: 609417 - DNA, 579 bp, Homo sapiens
aataacagggaattaccctgttccatgcaggcccaaatctcccagtggcatggaacaacctggctggccctttcctcaaggtggaatcagacatattgacacctttctgacttacaaacctcctatctgtctagctccttcaggagaccacaagctccccttcaaaagaagccacgttttgcacatgttcacatttagcagaattcttggcccagagcctggcaagcaacagacattcagcaaatgagcaatgatgttgccttgacaatgcatttgctggaaagtacaccagtgtcaaagaaacagaagggatggcaggaacgtggccaggggacacttttatgcctctkgttcttaacataaggaattttattacatctacctggaagattttaatgttttgtttttgtttcctttgattttgccctatacttgacttcaaatatccctctcctaagttctaactatggtattctttgctataattgtctgattaccagagagattaataagctttttcagtttgcctcataaatcacaaatttctacaagtgggaggttttcaaaaaagaggcaaac

SEQ ID NO: 609418 - DNA, 581 bp, Homo sapiens
aacagggaattaccctgttccatgcaggcccaaatctcccagtggcatggaacaacctggctggccctttcctcaaggtggaatcagacatattgacacctttctgacttacaaacctcctatctgtctagctccttcaggagaccacaagctccccttcaaaagaagccacgttttgcacatgttcacatttagcagaattcttggcccagagcctggcaagcaacagacattcagcaaatgagcaatgatgttgccttgacaatgcatttgctggaaagtacaccagtgtcaaagaaacagaagggatggcaggaacgtggccaggggacacttttatgcctcttgttcttaacataaggaattttattacatctacctggaagattttaatgttttgtttttgtttcctttgattttgccctatacttgacttcaaatatccctctsctaagttctaactatggtattctttgctataattgtctgattaccagagagattaataagctttttcagtttgcctcataaatcacaaatttctacaagtgggaggttttcaaaaaagaggcaaactcaca

SEQ ID NO: 609419 - DNA, 568 bp, Homo sapiens
gcaaattctttttcagtaatacaggctgcatgacatcttaccacctaccacctgaactactcgaaagttgaatttagctagtagcctccatcctatttcaccccacaacttccttccctgcctttatgtctttagcattagtgaagaaaaccatataaaagtatgcattggggccttcctgaaccaattatgtctcatttcaattggtgccaatacagtgccaagggtgtgcttggtcaattccctctacaatttccttcaggggacttyccaaaattcacaactaattttgcagaaagatggccatcttattatctttaattttatgaaaaaaggtaaaatataaaatatcagaatgacaccagagaagagcagcctcacttttcttaatcccaattcaaaaaaaaaaaaaaaactgtctgggaagaattctcacttgcaatcatacacacgtttgaagaaagaaagactactatgtgatcggcagttctactataacaaaaaaaattttaagtaggaaaaggaattggatctctccaaaaagagaaaaagcatgttttcccagaga

SEQ ID NO: 609420 - DNA, 568 bp, Homo sapiens
gcaaattctttttcagtaatacaggctgcatgacatcttaccacctaccacctgaactactcgaaagttgaatttagctagtagcctccatcctatttcaccccacaacttccttccctgcctttatgtctttagcattagtgaagaaaaccatataaaagtatgcattggggccttcctgaaccaattatgtctcatttcaattggtgccaatacagtgccaagggtgtgcttggtcaattccctctacaatttccttcaggggacttcccaaaattcacaactaattttgcagaaagatggccatcttattatctttaattttatgaaaaaaggtaaaatataaaatatcagaatgacaccagagaagagcagcctcacttttcttaatcccaattcaaaaaaaaaaaaaaaactgtctgggaagaattctcacttgcaatcatacacacgtttgaagaaagaaagactactatgtgatyggcagttctactataacaaaaaaaattttaagtaggaaaaggaattggatctctccaaaaagagaaaaagcatgttttcccagaga

SEQ ID NO: 609421 - DNA, 570 bp, Homo sapiens
ggcagtttttcctgtgctctctctctctactgccttgatgtaagacatgcctagcttcctctttgccttccttcatgattcctgaagcctccccagccatgcagaactgtggatgytaattatacctcctttctttataaattacccagtctcaggtagtatcttcatagcagtgtgaaaacgggctaatacaggagtaaagattaaagaaatggagtaaaataaacatgtaaaaagcaagagaattatgagctagcaatggaaaataataaataaagcttgggaagagaaaagttggagaattttacatatattagaccactgggaaagggaaacattcagcaaagggaaccaaggagcataatttcaaaaaggagtagacaaagctttgttttgtctcatggttcaactatagaagtacatccattaggagatacatattgacatttattgaaaggaattggcttacacacttgcaggagctggctaggcaagcctaaaatcaatagggaaggctggcagggaaggcactggctggagctccagtccacaggtacagttcctttcttc

SEQ ID NO: 609422 - DNA, 570 bp, Homo sapiens
ggcagtttttcctgtgctctctctctctactgccttgatgtaagacatgcctagcttcctctttgccttccttcatgattcctgaagcctccccagccatgcagaactgtggatgttaattatacctcctttctttataaattacccagtctcaggtagtatcttcatagcagygtgaaaacgggctaatacaggagtaaagattaaagaaatggagtaaaataaacatgtaaaaagcaagagaattatgagctagcaatggaaaataataaataaagcttgggaagagaaaagttggagaattttacatatattagaccactgggaaagggaaacattcagcaaagggaaccaaggagcataatttcaaaaaggagtagacaaagctttgttttgtctcatggttcaactatagaagtacatccattaggagatacatattgacatttattgaaaggaattggcttacacacttgcaggagctggctaggcaagcctaaaatcaatagggaaggctggcagggaaggcactggctggagctccagtccacaggtacagttcctttcttc

SEQ ID NO: 609423 - DNA, 469 bp, Homo sapiens
agctaaaactttggaatgattttacagaaatgctgaacccataggtatcccaaactttgtctttaaactgaataaataacaacatgggcaactgacacttaatgagcatttaatatgtgccggccaccattcctaagcactccacatctattatctcttttaaccctcaaagaactgtatgaggagctaactgtatgtcatagtctttttttaaatatatatagatacrgttatgattgataatatattaattctttcaaaaagtgtatgaaaatcacaatagatttttattatgtaatttctcaatcaatagatattatgctgaggtaggaacttaaatttgtactgacatttgaacttgtctttgaaattttctataggggacatttcttttttctatttaaaatgtattatttaatatgtgatacatgaaaaatatatgtaacatatatgtaactgatgaagtaac

SEQ ID NO: 609424 - DNA, 595 bp, Homo sapiens
tcatagtctttttttaaatatatatagatacagttatgattgataatatattaattctttcaaaaagtgtatgaaaatcacaatagatttttattatgtaatttctcaatcaatagatattatgctgaggtaggaacttaaatttgtactgacatttgaacttgtctttgaaattttctrtaggggacatttcttttttctatttaaaatgtattatttaatatgtgatacatgaaaaatatatgtaacatatatgtaactgatgaagtaacactataaacttataactgaagatctagaacattgccgagagcttgcatctttatatgtggtccttccttatattattaacctggcatctccctgttcctacacccactcagaggtaatcattactcttaattgtttattatttctgttttaaaatacattgtaatgatattgttatagacaaagtttttgttttcctccaaaattcatatgttgaaacataatccccaatatgatggttttcgcaggtggggcctttgggaggtgactcagtcatgagggaaggaccttcatgaacgggatgagggccctgataaaagagata

SEQ ID NO: 609425 - DNA, 595 bp, Homo sapiens
tcatagtctttttttaaatatatatagatacagttatgattgataatatattaattctttcaaaaagtgtatgaaaatcacaatagatttttattatgtaatttctcaatcaatagatattatgctgaggtaggaacttaaatttgtactgacatttgaacttgtctttgaaattttctataggggacatttcttttttctatttaaaatgtattatttaatatgtgatacatgaaaaatatatgtaacatatatgtaactgatgaagtaacactataaacttataactgaagatctagaacattgccgagagcttgcatctttatatgtggtccttccttatattattaacctggcatctccctgttcctacacccactcagaggtaatcattactcttaattgtttattatttctgttttaaaatacattgtaatgatattgttatagacaaagtttttgttttcctccaaaattcatatgttgaaacataatccccaatatgatggttttcgcaggtggggcctttgggaggtgactcagtcatgagggaaggaccttcatsaacgggatgagggccctgataaaagagata

SEQ ID NO: 609426 - DNA, 595 bp, Homo sapiens
caaattggaaaggatgaagtcaagttatacttgtttgctgatgatataatcttatacttggaaaaacctaaagactccaccaaaatctattcaaactgataaagaaattcagtaaagttgcagaatacaaaatcgatacacaaaaatcagtagaatttctatatggcaacaacagacaatctgaaaaaaaagcaaaaaagtaatccaatttataatagccacaaataaaatatataggaataaacttaaccaaagaagtaaaagatctctgcaataaaaactgtcaaacattgatgaaagtaattgaagaggacacacacacaaaaggatattctactttcatgggtggaaaggatcaatattgttaaaatgtccacactacccaaagaaatctacagaatcaatgcagttctaccaaaataccaatgacattcttcatagaaatagaaaaagtaatcytaaaatatacatgggatcacaaaagaccaagaataactaaagccatcctgagcaaaaagaacaagactggaggaatcacatgacctgacttcaaattatactacaaagttacagtaactaaaacaacacggtacga

SEQ ID NO: 609427 - DNA, 447 bp, Homo sapiens
caaaacaaaaataggtaagtaggatcacatcaagttaaaaagctgctgcacagcaaacgaaatatttcatcaacaaaatgaacagacaacccacagaatgggagaaaaatatttgcaaactttccatctgacaagggattaaccaaaatatataaggagctcaaacaactcaataggaaaaaatctaacaatcctattaaacaatgggcaaaagatctgaatagacacttytcaaaagacgacatacaaatgtcaaacaggcatatcaaaaggtgctcaacatcactgatcaccagagagacgcaaatcaaaactgcaatgagatatcatctcaccccagttaaaatggcttatatccaaaagtcaggcaataatgaatactggtgagaatgttaagaaagagaaacacttgtacattgtttgtgggaatgtaattagtacaaccac

SEQ ID NO: 609428 - DNA, 447 bp, Homo sapiens
caaaacaaaaataggtaagtaggatcacatcaagttaaaaagctgctgcacagcaaacgaaatatttcatcaacaaaatgaacagacaacccacagaatgggagaaaaatatttgcaaactttccatctgacaagggattaaccaaaatatataaggagctcaaacaactcaataggaaaaaatctaacaatcctattaaacaatgggcaaaagatctgaatagacacttctcaaaagacgacatacaaatgtcaaacaggcatatcaaaaggtgctcaacatcactgatcaccagagagacgcaaatcaaaactgcaatgagatatcatctcaccccagttaaaatggcttatatccaaaagtcaggcaataatgaatactggtgagaatgttaagaaagagaaacacttgtacattgttkgtgggaatgtaattagtacaaccac

SEQ ID NO: 609429 - DNA, 509 bp, Homo sapiens
  misc_feature 273, 274, 275, 276, 277, 278, 279, 280, 281, 282, 283, 284,285, 286, 287, 288, 289, 290, 291, 292, 293, 294, 295, 296,297, 298, 299, 300, 301, 302, 303, 304, 305, 306, 307, 308,309, 310, 311, 312, 313, 314, 315, 316, 317, 318, 319: n = A,T,C or G
  misc_feature 320, 321, 322, 323, 324, 325, 326, 327, 328, 329, 330, 331,332, 333, 334, 335, 336, 337, 338, 339, 340, 341, 342, 343,344, 345, 346, 347, 348, 349, 350, 351, 352, 353, 354, 355,356, 357, 358, 359, 360, 361, 362, 363, 364, 365, 366: n = A,T,C or G
  misc_feature 367, 368, 369, 370, 371, 372: n = A,T,C or G
aataaagaaaatgtggtacttatacataatggagtactatcaagccataaaaaagaatgagatgctatcatttgcaataaagtggatgaaactgaaggtcgtcrtgttaagttaaataagccaggcacagaaagacaaacatcacatgttcttacttatttgtgggagctaaaaattaaaacaagtgaacccaggaggtagaaagtacaatgatggttaccagacatgagaaggtagcgaggaaggagcaggaatggggaggttaagggtagnnnnnnnnnnnnnnnnnnnnnnnnnnnnnnnnnnnnnnnnnnnnnnnnnnnnnnnnnnnnnnnnnnnnnnnnnnnnnnnnnnnnnnnnnnnnnnnnnnnnattagaagttcataacaaaaaggaatgatcaatgcttgagtggataaccccattacctggatgtgtttattacacattgtatgcctgtatcaaaatatctcatatactttataaatatactcacctaatatgtaccc

SEQ ID NO: 609430 - DNA, 615 bp, Homo sapiens
  misc_feature 77, 78, 79, 80, 81, 82, 83, 84, 85, 86, 87, 88, 89, 90, 91,92, 93, 94, 95, 96, 97, 98, 99, 100, 101, 102, 103, 104,105, 106, 107, 108, 109, 110, 111, 112, 113, 114, 115, 116,117, 118, 119, 120, 121, 122, 123, 124, 125, 126, 127: n = A,T,C or G
  misc_feature 128, 129, 130, 131, 132, 133, 134, 135, 136, 137, 138, 139,140, 141, 142, 143, 144, 145, 146, 147, 148, 149, 150, 151,152, 153, 154, 155, 156, 157, 158, 159, 160, 161, 162, 163,164, 165, 166, 167, 168, 169, 170, 171, 172, 173, 174: n = A,T,C or G
  misc_feature 175, 176: n = A,T,C or G
ggtagaaagtacaatgatggttaccagacatgagaaggtagcgaggaaggagcaggaatggggaggttaagggtagnnnnnnnnnnnnnnnnnnnnnnnnnnnnnnnnnnnnnnnnnnnnnnnnnnnnnnnnnnnnnnnnnnnnnnnnnnnnnnnnnnnnnnnnnnnnnnnnnnnnattagaagttcataacaaaaaggaatgatcaatgcttgagtggataaccccattacctggatgtgtttattacacattgtatgcctgtatcaaaatatctcatatactttataaatatactcacctaatatgtacccacaactattaaaaataaatttaatttaaaaatccaacagaaaaacataataattttgtccatacagctcttgcacaaattttgttagatttttgtcaacataccttacatttttattcctttaaaaaggtatctttttgtaatattaattaatcttttcattttaaaataattatagctttgcatgscattataagaaataatacaaagaaattcatacatgcttcattcagtttccccaagggtaacatcttacagaatcattgtgcaatatgacaaccaggaaattgaccttgatagtat

SEQ ID NO: 609431 - DNA, 522 bp, Homo sapiens
ctgtctttcaaatttgtcccagaaaaagtcctttctagaagcttgcagacatttgcaagtctcctttccaatgttatttacagtattaaaataacaagatgttgttttgctaaaatctcagccagtctaaactgagtcatgtcagttaaacagtgccttggctactttaagcaataaaggttataggtaatattyccccaagaccagtggaaactagaacattctccacttatggagtttgtaacacaaattttctattgtcttacaaaatcacaatatcattatcacacctaagaaacataacataatgcatgcttcatagtagtctatagtaagggcattttatagttgtagaatagtcttctactgaggatcatttgggttatttccagtctggcttttcataagtcattatcagaactttcataatgaaataactcctaaaagaatatagaagtttaattttggcttagagctacacattcaagtccttctgcaagtaaccagctctggattttggaa

SEQ ID NO: 609432 - DNA, 484 bp, Homo sapiens
tcctgtcctacttcctagggctctcaataaaacatatgccaaattgcgaacccttaatattgttctatatatgtttagtgacagtgacrgtgtacaggctacaaaactaggagcttggcagaaatcaagaacaaaaggaccaacctctagccagttgaaaaatgacagtgatcttggtggacagtacacactaccatgggtcctttccttcagcattcactgcaaatgttatgagcagtacgctgattgtgctgctctcctcaacatgcataatttgggaaaatgagtcaagctttttgcttcccccctactccctctttacaattcaaagccaaagcccactctcaaacagtgtttcttaaatgttgactcaagaacaaaacagactgagagacaattgtttaaagtcaatttagaaatatctacccaaagaagaaaaataatgaatgccaatgtccagatggctttcatgattaataagttg

SEQ ID NO: 609433 - DNA, 632 bp, Homo sapiens
tccactgacaacttgcatcatgtgctggaaaagctacagacactcaaagccaacccatgaaagcagccaggagggatgctgtaccctgcaaagccacacaggcagagctaccstaggtagtgggagctcacctcttgcatcagcatgatctggatgtgaaacatggagtcaaaggagatcattttaagatttgacggccccactggatttcagatttgcatggggcctgtagcctcttcattttggccaacatttggaatgagtatatttatccaatgcatgtacccccattgtatctaggaagtaactaacttgcttttgattttacaggctcataggcagggacttgccttgtctcagatgagacttgggactgtggacttttgagttaatgctgaaatgagttaagactttgggggactgttgggaaggcattattggttttgaaatgtgagaacatgagacttaggaggggccagggatggaatgatatagtttggctgtatccccacccaaatctcatgttgagttgtagcttccataattcccacgtgtcatggaagggactcagtgggaggtaattgaatcatgggagagggtctttcccaggctgttctcatgatagtgaatat

SEQ ID NO: 609434 - DNA, 464 bp, Homo sapiens
catgggttttgttctcccacttgaaccctgactaaacataatcggacactaaataaagccaagaataattgtgtttttcaggaaaatgctattcacaaatgtaggctgcatgtcatcttaaaatgtaccatacagaaatatttttactgtaaaagattccatgtgccatatcttatattcaacaactaggccaagaattctacagtccaaagtcaagtcacaggagttttaattcagcttcacaaggttgaaatttgcagtgatacacaccactttattttaaagagaatagatcacagaagagagtagccattgcagcaacagatccatacatatagaaaagttgagcctawgaggaaaaaaaaatggcattcctaataattgggaaaggaatggtctgtttgaggaatagtactgaagcaactgggtagatccatggaaaaagcagaaataaaatttaatcc

SEQ ID NO: 609435 - DNA, 607 bp, Homo sapiens
gtaatagtatcacaggggcttgcatatgtccaacctaatcaaattgcacacatcaaaccgatgcagttctttgtatatcacttagacccccaataagctgttaaaataaataaataggaatagaagttacaatagactacaccaactgggaaaaaatccattttagacctccatatcttgcctttgtgaaaaatactagtaagaagaaaagaaaattattttaacacaaaaatatattgatttattcaaaaactatttatcacctgctcaggtagagtcactggggatatatatgatgagcaagacagacgcagttcagagttcctaccttcaaggaaatacctaatttgcaaagtgagagatgtaaccatcaccacttccttagagatagatgatgccccaaagatctgattgagagctaatagtgactaaacattgaaattctaacatcagatcatttcccttatgcctgagttttagaggcttcwagtgttcataaattacaatagaaagattcaacccaaagaaatgtagaatgaaatcccacacaacaaaacagaggattaacaatgcaaaataatgggcagtcaaactctttatgcccagt

SEQ ID NO: 609436 - DNA, 566 bp, Homo sapiens
gcctgtctttactttaatctcttaatcccatcatcttcataagctgaggaggatgtatgtcacctcaggaccctgtgatgattgcattaacttcacaaattgtttgtagagcatgtgtgtttgaacaatatgaaatctgggaaccttgaaaaaagaacaggataatagcaatgttcagggaacaagagagataaccttaaactctgaccgccggtgagccgggtggagcagagccatatttctcttctttcaacagcaaatgggagaaatattgctgaattctttttctcascaaggaacatccctgagaaagagaatgtgtccctgaggggaggcctcaaaaatggccgcttctgggggtggctgtattttacggtcaaagctgtagggatgaaataagccccagtctcccgtagtgctcccaggcttattaggatgaggaaattcctgcctaataaattttggtcagaccagttgtctgctctcaaaccctgtctcctgataagatgttatcaatgacaatgtgtgcccaaaacttcattagcaattttaatttcgccctggtc

SEQ ID NO: 609437 - DNA, 540 bp, Homo sapiens
ctcccaggactatctaaggccccttctgactgggccagcagttaccaccttggctcctcttgtgttggcacggcgccattgacacctaggactctctccgctggtagaagcatgctccacccagcgccatgtgccatcactgccccaaaccatctggagggctttgtgctmcccaccctgggctcaactgaggcacagcaggtgcaaggccctttctcagaaaccctctacagcatctgatatttgaccatcttcacttttggggtggggcccaggaagctgcattttaaacaaataccccaatttacttggaggcaaatagtacataagccacactgtgtacacgtacatttcaaatacaaagatttcagatcagacctgcccttcattttcatgattttgctttttttgacagtgcagcaattcctggattgaggacaaacactgaataactaagctattctttatctgaagcacgccagcacatcctgtctttgtttaagccaaatgtgcctcctctgctgttatatatgattgtta

SEQ ID NO: 609438 - DNA, 314 bp, Homo sapiens
acctgggtaactgaaaaacagcaaaggtttcccttgtatctgcctaatagaaaagaaatcagacttggtgattatttgataacaaaatgaattaaagtagaaaatttgggcattacccaaagtgtactttatcttgaattagccatttgtgctctctattcaaccgaaattaaacaaataatgtttaacctacacctctccacaacagcttgaatgtgctcagactccatcatttggatatttcagggaaattcttttctatcttaaacatctatgyaattcccactggggttgtagagagccagagaggcatc

SEQ ID NO: 609439 - DNA, 577 bp, Homo sapiens
tctttccataccaggaattcaacaaaaagaaagatccagccacacctttatagcacctgctaaagtgacatggaaatcttggcactatttaatatgcagatatttcaaagacaaccctagaagtgtttaaaaggaaaactgtgttggaaaaagtatttcatgcctttctttattttctttcctcaatatgtttactgagcctcatgtgtcacaaatgatgcaatgatgacagacacaraagtgagtaagacagcctttgccttcaaatattccatgctcaagtgagagaaacagacaaggaaattaccagccattgtagatgttgattttgactacacataaagatgcccaggtatctttaagagcagagttgggggtccctaaagtactcttaagatgggattgttgaggggagttaggtttccatagagaggtggggcaagaactcagatcaatggcatgatataaaaaatgtgtaattagccttgatgttttcacagtagtgattatgaaggggtgtcatgtatacatactggcatggctaattcctattttgagaggggacagtacacaaaaa

SEQ ID NO: 609440 - DNA, 577 bp, Homo sapiens
tctttccataccaggaattcaacaaaaagaaagatccagccacacctttatagcacctgctaaagtgacatggaaatcttggcactatttaatatgcagatatttcaaagacaaccctagaagtgtttaaaaggaaaactgtgttggaaaaagtatttcatgcctttctttattttctttcctcaatatgtttactgagcctcatgtgtcacaaatgatgcaatgatgacagacacaaaagtgagtaagacagcctttgccttcaaatattccatgctcaagtgagagaaacagacaaggaaattaccagccattgtaratgttgattttgactacacataaagatgcccaggtatctttaagagcagagttgggggtccctaaagtactcttaagatgggattgttgaggggagttaggtttccatagagaggtggggcaagaactcagatcaatggcatgatataaaaaatgtgtaattagccttgatgttttcacagtagtgattatgaaggggtgtcatgtatacatactggcatggctaattcctattttgagaggggacagtacacaaaaa

SEQ ID NO: 609441 - DNA, 585 bp, Homo sapiens
ctgcagaccttaagccagtttcagtcaaattatagaggctgcacacaaactgtctttgtgtcctatgattcactgtttgatgtaagaaccaaattccacctcattttaatgctaaaatcctgcctcaaggtgaacatgggatgtatgttacatacatgtttaaccatgcatttggctccctacataaagatgtaaagcttttctccgaaacctgctgaacatgtatgattttaytgtgtaatttggagactatcaacaataaaacccaactcgttcttcccgtctttgaagagggagcatctttgttcaatgctggagactttctcttctgggcttgcaaactgatgtcaccaatgaagctctcctttctactacttagccattctggtggtcttttgggtgacattagccattagtaatgaagttatttccattgaatagcagggtttgaagggtttaacatttgatgtaggtcatgcaaagataacaaatactggtgaatttagaagaaggcaactttaaaatttttgcttctggccttactagccctagtgccttccactcatttagatgctaatgatcatt

SEQ ID NO: 609442 - DNA, 585 bp, Homo sapiens
ctgcagaccttaagccagtttcagtcaaattatagaggctgcacacaaactgtctttgtgtcctatgattcactgtttgatgtaagaaccaaattccacctcattttaatgctaaaatcctgcctcaaggtgaacatgggatgtatgttacatacatgtttaaccatgcatttggctccctacataaagatgtaaagcttttctccgaaacctgctgaacatgtatgattttattgtgtaatttggagactatcaacaataaaacccaactcgttcttcccgtctttgaagagggagcatctttgttcaatgctggagactttctcttctgggcttgcaaactgatgtcaccaatgaagctctcctttctactacttagccattctggtggtcttttgggtgacattagccattagtaatgaagttattkccattgaatagcagggtttgaagggtttaacatttgatgtaggtcatgcaaagataacaaatactggtgaatttagaagaaggcaactttaaaatttttgcttctggccttactagccctagtgccttccactcatttagatgctaatgatcatt

SEQ ID NO: 609443 - DNA, 585 bp, Homo sapiens
ctgcagaccttaagccagtttcagtcaaattatagaggctgcacacaaactgtctttgtgtcctatgattcactgtttgatgtaagaaccaaattccacctcattttaatgctaaaatcctgcctcaaggtgaacatgggatgtatgttacatacatgtttaaccatgcatttggctccctacataaagatgtaaagcttttctccgaaacctgctgaacatgtatgattttattgtgtaatttggagactatcaacaataaaacccaactcgttcttcccgtctttgaagagggagcatctttgttcaatgctggagactttctcttctgggcttgcaaactgatgtcaccaatgaagctctcctttctactacttagccattctggtggtcttttgggtgacattagccattagtaatgaagttatttccattgaatagcagggtttgaagggtttaacatttgatgtaggtcatgcaaagataacaaatactggygaatttagaagaaggcaactttaaaatttttgcttctggccttactagccctagtgccttccactcatttagatgctaatgatcatt

SEQ ID NO: 609444 - DNA, 589 bp, Homo sapiens
tcaatattccccaaattagccttgtttttcaatgtttgtgtccataccacttttcttctttcctgagtgttcctctccccttcttagcctgctccatttctgtcagttttctctgtgaacataggcttggctgcaccacacagatcagtcactctgtgttcctaccgtgctctgctcccccacacatagtgtctgacggtgacttttcactatgacttctgcactggtgcctcaggagtctcctcatgtgatgtgtgtgtgtgtgcatgtgtgtggtaactggcatttgggtaggcagacttcctggccttccaaccaactcaagtgttaaataatgacagggttcagaaagtgctgccccaaaaatgtggcaccttggcatctgagaaaacagcagaagcaggaaggtctctctggctcttccctgctcctctctcatgaagcaagccctaaaagaattatccgatcttcttctgaagaggtcctcattcaaaaggtaccttccttagacccagagaaaaggaatgtccttatcayacttcacaactgttcacgtttgatcaaaccaaagaataaatatatgcaggtt

SEQ ID NO: 609445 - DNA, 432 bp, Homo sapiens
aagttctttgtctctgacccaggagacttgtgtcttctgccagtatccaagaaacatggcaggctaacttgttggcttgcraagcttagtaaaagagccttaacagttctttgcccaggtttttttttttttctttttttttggatgccattaggcttgtcttggattggggcccctggtgcaaatcattgctggatggcaagcatgaggcagaggtcaaatctggagggaaaagcagtactggcctaaggcaaatcagatacattatcaaggggccaggcgtgatggctcacacttgtaatcccagcactttgggaggccgaggctggtggatcacctgaggtcagaagttcgagaccagcctggccaacatggtgaaacccgtctttctaaaaatacaaagattagccgggcatggtggcacgtgcctgt

SEQ ID NO: 609446 - DNA, 582 bp, Homo sapiens
atttgaagtgtatcaccaaggtaaatgaatcaacttggaaacattctgcagatgtcgaaagaaagtctattatatgaaacagcaatcttcatatttggcaaaaataaattcaagtgaaaggcaccttagtgaacagataatttgctacacagtgtcaggttttccctctttccctgtaccatccaagcactgtgcataatctcttttatgtcagaatgtctgattcacaggatgttcataaatcaaaaccgtagtcccatccagtaaacctttttctctctgggcataaagccatattccctacagatttcaaagcatatatttctacaattatagagttacatctttttctttagcaatatgtctactaaattatattcatgatacaatagcgttgaagtaggaggcaaaactcaactctggaggtggggcttggacagtggaacaaattgaggactagctaaaaagagtccagggcagaagcaccaccccataagacatgcccacyagggccataaactgcccattaattggtatacaagtaaaagtgggtatgaatgtgagtgcagactgtgtctgagc

SEQ ID NO: 609447 - DNA, 601 bp, Homo sapiens
tttcctctgtaatttgtagttttgttctaattctatttggtagaaaaatttcaaattctagcaatatagtrttgctttagaaaagaagatatatactggcaaaaaaaaaaaaaaaaggaaaacaagcgtttgtatttcaaccaatctgagccagtactgggtaccatttttagttgcttagctttatttagcaagtgctggagctggggagatacagagatagatactccaagacagggcctctgaccttaagttcagtccactaaatatttactgagtattttaatatacaacagatatccagagtgataatatacaatcactgcatcctcaaagatctaggaatacagttaattacaggaacaggaaaataaaattaataatgcaagataatatatatgaaggtcaaatgagtgacctgagagttcagaggagtgagaaatcatttcaagttggaatgaataaaaaagacttcatgggagatgtggaatttgaataagtcttattggatggggaatgcttgagtaaatggtatgatagagggcattattttatagggggaatagctaacaaaaggtatatagataggaaggcacaaggc

SEQ ID NO: 609448 - DNA, 601 bp, Homo sapiens
cattaacccctttatcatatgaacctctctgtgtgatggcttacaaaatgccaacttgcttcttcaaagccactaagggagagatggtcccagcaacatagttacagtagtatgcaactcaattacataaatataatcaagtacatcctgtcacttttgccatattctattgtttaggaggaatttgcaggtcctacccacacacaagaggaaaagtttatacaaaaacagagatattaggatatagagatcaygacgaggtcaccttagaaactgtccattacagggggccctcactgccacctaaccagtggataatccagctccaaaattccatttcagactctggttcttcagaccactccccttacaactgaattaagttgggctccctgggaaagagattgggaaacagatgtagactggcatacaagaagtttattgtggagttctgacaatactactagtgaatgagtgagaaaagcaggattggttgagagagaaaaatggaactgtaatgtaactgcaacagaggccttagctaattgcacagagttctaagagctggaatggctcttcaaaatcattctgaattaaggta

SEQ ID NO: 609449 - DNA, 601 bp, Homo sapiens
cattaacccctttatcatatgaacctctctgtgtgatggcttacaaaatgccaacttgcttcttcaaagccactaagggagagatggtcccagcaacatagttacagtagtatgcaactcaattacataaatataatcaagtacatcctgtcacttttgccatattctattgtttaggaggaatttgcaggtcctacccacacacaagaggaaaagtttatacaaaaacagagatattaggatatagagatcatgacgaggtcaccttagaaactgtccattacagggggccctcactgccacctaaccagtggataatccagctccaaaattccatttcagactctggttcttcagaccactccccttacaactgaattaagttgggctccctgggaaagagaytgggaaacagatgtagactggcatacaagaagtttattgtggagttctgacaatactactagtgaatgagtgagaaaagcaggattggttgagagagaaaaatggaactgtaatgtaactgcaacagaggccttagctaattgcacagagttctaagagctggaatggctcttcaaaatcattctgaattaaggta

SEQ ID NO: 609450 - DNA, 477 bp, Homo sapiens
acttttttctcagcttcctctccctctagtacaggtttgaccagtagccaaagaccctaaattgtgaagagaggtatagtctgctcacccagttccctttttccttcttcttcaaagtgtaggttcaatgsggacaggagcgaggaaagagggattgaggcaaattgaccaggtggaaagatagttctttgtacattagttcttgttattggactggtcatgaatacccactgtcccaggcatccaaaacactggctctctcatgtggtgcctgcgtgagttctttggcaatggtgaaggacttctccaccacacagttccctaaactgtgggagacctggctccagttcaacccctttaagtcccttttactcacatactcccaccatctgtgggatacccacagtctccagctattggagtctcctttcctggcaggaagtgatcctaagtggtattccgagtagatggctcaaa

SEQ ID NO: 609451 - DNA, 542 bp, Homo sapiens
tggttttgttttctttaatcaaacacactttgttaataacatcttaggcagattccagattccataggatgcagtcacttttttctcagcttcctctccctctagtacaggtttgaccagtagccaaagaccctaaattgtgaagagaggtatagtctgctcacccagttccctttttccttcttcttcaaagtgtaggttcaatggggacaggagcgaggaaagagggattgaggcaaattgaccaggtggaaagatagttctttgtacattagttcttgttattggactggtcatgaatacccactgtcccaggcatccaaaacactggstctctcatgtggtgcctgcgtgagttctttggcaatggtgaaggacttctccaccacacagttccctaaactgtgggagacctggctccagttcaacccctttaagtcccttttactcacatactcccaccatctgtgggatacccacagtctccagctattggagtctcctttcctggcaggaagtgatcctaagtggtattccgagta

SEQ ID NO: 609452 - DNA, 598 bp, Homo sapiens
ttaacaggaaaagtccctgttctgttacaaatgaaccatattgctcaatatgtgtgtggacaacagactgacttaagaaataatgcaatcaggcagcagatacttgacaaaaactcagagatgcccaaatttcgaygtacagtatagatgtgtactattggaacttggcagcaaatgccatatgaataagtcttgcagaaatcttaggcagagttccttttaggctattccacatctcacataatatacagcctatgaggcaaaaaacacttagactcacccaataataaataccctttttgtgaatgacatctcaaagttaacaggcaagccacagatatttgcaatattgcaaccaataaaggattgatattcaaaatatttaaggattccttagtatccatgagaaaacaatgggcaactgtgatggccatggaattgcattacccagatctcccttcaagagaaactgctaaggaagagcagttggcagatagctgcaacacctctggatccactgtagtgttcatatcaaggccaggttctccaggtcagctcccagagagcaactgaacatggcaagcatctagggtctgac

SEQ ID NO: 609453 - DNA, 646 bp, Homo sapiens
atggttttgctgtagtttggtatcacaccaaacttttaaagtatagtttaaatcaatggttttgctgtagtttggtcacacaccactgattagggcacagagattttgagtgttcatgctataatcccagggtaaacatatatttggatcactgacggtattaaaaccacattctaactgcatggttcagtgaatcaatttcattatcttcatatatgttaaacagagcttgttgactgaatctgtccttcaaaacataatctggtagaaaatttcatttatttcacaaaatttgaattggcactttcttgctacttatctcaatacactagaagaacagaaatagttcctctattaggttcacaagatgactaacaaaaaggcatcatattaaacaaaccctctaytacccaattttctacctagaggggtgacgtgggaaatgatttggcctttaatgatttctttcacgtccaaagtttgctcttgttttcatgattctgttgatctctggattccacaagtatgcaaatgacttaccactgtgcaaacaactatgcattagtcagaacgttcataaagttttgcataggaacctggaagaggttcatcataaaaggacagatataatttaaaatttggtagt

SEQ ID NO: 609454 - DNA, 646 bp, Homo sapiens
atggttttgctgtagtttggtatcacaccaaacttttaaagtatagtttaaatcaatggttttgctgtagtttggtcacacaccactgattagggcacagagattttgagtgttcatgctataatcccagggtaaacatatatttggatcactgacggtattaaaaccacattctaactgcatggttcagtgaatcaatttcattatcttcatatatgttaaacagagcttgttgactgaatctgtccttcaaaacataatctggtagaaaatttcatttatttcacaaaatttgaattggcactttcttgctacttatctcaatacactagaagaacagaaatagttcctctattaggttcacaagatgactaacaaaaaggcatcatattaaacaaaccctctattacccaattttctacctagaggggtgacgtgggaaatgatttggcctttamtgatttctttcacgtccaaagtttgctcttgttttcatgattctgttgatctctggattccacaagtatgcaaatgacttaccactgtgcaaacaactatgcattagtcagaacgttcataaagttttgcataggaacctggaagaggttcatcataaaaggacagatataatttaaaatttggtagt

SEQ ID NO: 609455 - DNA, 646 bp, Homo sapiens
atggttttgctgtagtttggtatcacaccaaacttttaaagtatagtttaaatcaatggttttgctgtagtttggtcacacaccactgattagggcacagagattttgagtgttcatgctataatcccagggtaaacatatatttggatcactgacggtattaaaaccacattctaactgcatggttcagtgaatcaatttcattatcttcatatatgttaaacagagcttgttgactgaatctgtccttcaaaacataatctggtagaaaatttcatttatttcacaaaatttgaattggcactttcttgctacttatctcaatacactagaagaacagaaatagttcctctattaggttcacaagatgactaacaaaaaggcatcatattaaacaaaccctctattacccaattttctacctagaggggtgacgtgggaaatgatttggcctttaatgatttctttcacgtccaaagtttgctcttgttttcatgattctsttgatctctggattccacaagtatgcaaatgacttaccactgtgcaaacaactatgcattagtcagaacgttcataaagttttgcataggaacctggaagaggttcatcataaaaggacagatataatttaaaatttggtagt

SEQ ID NO: 609456 - DNA, 478 bp, Homo sapiens
gcctcagaatcaccgttttcaaatctggctgtataatacagtctccagggagcttttatacatactaataccccagacaattgaatcaaaatcttgggggcaagccttcagcatctgcatttttaaagcttgctgcttgctggtgatgcccaagaaggttcaagccactgagctaggatatcccagagctggtctgaattcagcasgggtgactgagtctctagatgcctctttccccaagtaaaggcagtgagagtgtagggttagatttgctgcatcaccaggtcttctctgcttagtcctacatgccagcattttagatacaccagatcaatactttcaggagcaagcatcacatatatgtagaagtaaaatgaaaaagccaggacaagtggcaccaccacatacgccttgttgacctaggtcaagtctcttaagattccattttctcatttgcaacgtgaagctggcatttccc

SEQ ID NO: 609457 - DNA, 205 bp, Homo sapiens
tgaccttacagggttgttaggtggatcaaataggataatgtttgtgaatttgctctataaactttaaatacaatgagcttaaacaccttgtatgtagacgttcacaaattcaacaaatatgatgtctatcatacccaaactaatgtataggttcaagcaaaactaataccaatcaraatcccagcaagctttttttttttataga

SEQ ID NO: 609458 - DNA, 604 bp, Homo sapiens
aaggaggatttgtcttgcaacttggatgccaacttaaccacagtagaatagggcactgggcagagtcctgaggcccctattctaggtcatacctacaggacatctctagactcaccctgggtctagagagaacctgctggcttgaagggaaggacccagtcatgtcaggattcattatctgctgaccaaagggtccttaggccctgaataatcagcagtggtaaccaagcagtattcaccatggaccttgggtgacattcagagccatgttggcctcaggtgtgacccagcacattcctagctgtggtggctatggggagagactccttctgtttgaagaaaggaaaggaaagcataaaggggactttatcttgcagcttgggtaccagtttggccacagtggggtacagcaccaagcaggctactagggtccccatttctaggccttggctcctggatggccattctggatctgccctaggctagaggggagctcacttatctgaaaggagagatcgaggcaygacaacattcaccacaaggtgactgaaggacccttgggccttgagtgaacatcggtggtagccaggcagttcttgctgtg

SEQ ID NO: 609459 - DNA, 540 bp, Homo sapiens
tgtgggcctggggcagtggtggccatagagagagaatcctctgcttgaggaaaggggaagaaagagtaggaagaactttatcttggagcttgggtgctagctcagccacagtagaatacagcagcaggtagattcctaagtttcctgactccaggcaggccctggatcttgaatatcatctgtggacccatctggggctgggaggagcttgccatcctgaagggaaggacacaagcctggcygagcttgccacctactgactgtagagccctttcgccttgagtgagcataggtagtagccaggaagtggtcactgtgggccttgggcaagacccagtactgtgctggcttcaggtctgactcagtgcagtcccattgctgatggccacagagatgcttgtgtcacccctcccccagatccaggcagctcagtacagggacagagaacccatctgagagaaagtaagggaagagaacaagagtctctgcctggtaatctagacaattctcacacatctcaccaaagaccaccaacgtggt

SEQ ID NO: 609460 - DNA, 510 bp, Homo sapiens
acatttaaagaagaactaataccaatcctacccaaactattctgagaaatagaggaggagggaatacttccaaactcattctatgagrccagtattaccctgataccaaaaccagacaagacatatcaaaaaaagaaaaccacaggccattattcctgatgaacagttatgcaaaaaccctcaacaaaatattagcaaaccaaattcaacaactcattaaaaagatcattcatcatgaccaaatgggatttatcccagggatacatagatggttcgacatatgcatatcaattaatgtgagacattatattaacagaatgaaggacaaaaaccataagatcatttcaattgatactgaaaaagcatttgataaaattcaacatcccttcatgataaaaaaaaactcttgaaaaactaagcataaaaggaacatacctcaacacaataaaagtcacatatgaaagacacatatacacaatggaatatacacaatggtatatatagctagca

SEQ ID NO: 609461 - DNA, 482 bp, Homo sapiens
acagagtcttgctctgtcacccaggctggagtgcagtggcaggatcttgttcactgcaacctctgcctcccaggttcaagtgattctagtgcctcagcctcctgagtagctgggattacaggcgtgtgccaccacaccaggctaatttttgtatctttagtagagacagggtttcgcagtgttggccactcaaactcctggcctcatgtgatccatccacctcagcctcccaaagtgttgggattacaggcatgagccaccacacctgacctggccagtgatagccattctaactggggtgagatgatatcccsttgtggtttagatttgcatttccctcatgattagtgatgatgagcattgttttcatatatttattggacatttgtatgtcttttgggaaacgtctgttcacatcatttgcccatttttaaattgaattttttttttttttttttttgctgttgagatgtttgaattct

SEQ ID NO: 609462 - DNA, 523 bp, Homo sapiens
ggtgtgatgggagggggttacctactgatgtggcagcatcccacccccacctcccccgccgctcacagcacactacgtttctgtattggaaaataaaaattagcattcacaagtttaatattctgaatttggtaatgaggctggtttaattttgctgatccaccatttctccaaattatttgacatcaggactcttwctgtaagagcagggtatctgttaactcacgcagagccagtgttcaagagaatacattttgggaaattttgtcaagcaggtgtataattggaattctaactaagtactaaaataacagatgctgttcttcaggttctaatctcacagaaaaataagatcaatacttcctccaagtagattccatttaaccttgtttttagttcacacagggcaaaaacatggcagagagcattctaggcaaattcggagttattaaaatgtaacatcttggtggctcgaggaaggaaaatattctgttgatgtgatgtataatttttatataataat

SEQ ID NO: 609463 - DNA, 523 bp, Homo sapiens
ggtgtgatgggagggggttacctactgatgtggcagcatcccacccccacctcccccgccgctcacagcacactacgtttctgtattggaaaataaaaattagcattcacaagtttaatattctgaatttggtaatgaggctggtttaattttgctgatccaccatttctccaaattatttgacatcaggactcttactgtaagagcagggtatctgttaactcacgcagagccagtgttcaagagaatacattttgggaaattttgtcaagcaggtgtataattggaattctaactaagtactaaaataacagaygctgttcttcaggttctaatctcacagaaaaataagatcaatacttcctccaagtagattccatttaaccttgtttttagttcacacagggcaaaaacatggcagagagcattctaggcaaattcggagttattaaaatgtaacatcttggtggctcgaggaaggaaaatattctgttgatgtgatgtataatttttatataataat

SEQ ID NO: 609464 - DNA, 523 bp, Homo sapiens
ggtgtgatgggagggggttacctactgatgtggcagcatcccacccccacctcccccgccgctcacagcacactacgtttctgtattggaaaataaaaattagcattcacaagtttaatattctgaatttggtaatgaggctggtttaattttgctgatccaccatttctccaaattatttgacatcaggactcttactgtaagagcagggtatctgttaactcacgcagagccagtgttcaagagaatacattttgggaaattttgtcaagcaggtgtataattggaattctaactaagtactaaaataacagatgctgttcttcaggttctaatctcacagaaaaayaagatcaatacttcctccaagtagattccatttaaccttgtttttagttcacacagggcaaaaacatggcagagagcattctaggcaaattcggagttattaaaatgtaacatcttggtggctcgaggaaggaaaatattctgttgatgtgatgtataatttttatataataat

SEQ ID NO: 609465 - DNA, 523 bp, Homo sapiens
ggtgtgatgggagggggttacctactgatgtggcagcatcccacccccacctcccccgccgctcacagcacactacgtttctgtattggaaaataaaaattagcattcacaagtttaatattctgaatttggtaatgaggctggtttaattttgctgatccaccatttctccaaattatttgacatcaggactcttactgtaagagcagggtatctgttaactcacgcagagccagtgttcaagagaatacattttgggaaattttgtcaagcaggtgtataattggaattctaactaagtactaaaataacagatgctgttcttcaggttctaatctcacagaaaaataagatcaatacttcctccaagtagattccatttaaccttgtttttagttcacacagggcaaaaacatggcagagagcattctaggcaaattcrgagttattaaaatgtaacatcttggtggctcgaggaaggaaaatattctgttgatgtgatgtataatttttatataataat

SEQ ID NO: 609466 - DNA, 568 bp, Homo sapiens
  misc_feature 1, 2, 3, 4, 5, 6, 7, 8, 9, 10, 11, 12, 13, 14, 15, 16, 17,18, 19, 20, 21, 22, 23: n = A,T,C or G
nnnnnnnnnnnnnnnnnnnnnnnctttatatgctcaaccttatttacaatcttgctcatttaattttactaattttcaatatctcaaataaacattaataatgtttttctaataccccatatttatcattatccatcacaaacacctattttaaatgccaaacagcctgtactccagtagctaggattcacaagcttttgacactttccccaccttcttcttagtttaggctcccctgaatttatttctgcatttctatcttgtcagtctctttggtcatactctttttgggattttgggacatttgtcctcagttcttgccttctcctgcgtactactagttctgagaatcggagggttggcgataactaaggttttaaaggcactcagcaatagaaacatatatgtgtgtgtgtgtgtgtgtgtgtgtrtgtgtgtgtgtatacatatgcctgggtcaggcaagagactcttttattcttctccttcaagagtaaattaatctctgcctatttaattttgccttgttgcttacattattgtgaggagaaagaggatttggtttgaa

SEQ ID NO: 609467 - DNA, 603 bp, Homo sapiens
tctgcctcctgccaaagggcggaaggctggcaagtcccagtgtgagcagaaagtgccagatgtagaagccaagaaacaaaactctctggggctccctctgggactgctatctgggctgtgcatttggccaccccctcctagcaaaggcaatggcttccagactcctgtgcagtcatcctcttgctgcttgcctagggcaagggcaccttgtgcgagaggattgcccagaacttaggcctccaacatttctctagtagccactgcttgcgggagaacatcaaggccaacaccrgagttggtgacatggccaagcagtacatagagaaaggtcttttggttccagacctgtgatcacatgcctaatgatgttggagttggagaatagatgtggcagcactgcctcctagatggctttcctaggacatcagggcaagctgatgtcctggacaaaatctgtgaagtgaatctagtgatcacgttaaacattccatttgaaacacttaaagatcctctcctagcggaagggtatataacctggaatttaatccacctcgtatatgtggaattgatgacatcgctggtgaaccattagcccagcatgag

SEQ ID NO: 609468 - DNA, 603 bp, Homo sapiens
tctgcctcctgccaaagggcggaaggctggcaagtcccagtgtgagcagaaagtgccagatgtagaagccaagaaacaaaactctctggggctccctctgggactgctatctgggctgtgcatttggccaccccctcctagcaaaggcaatggcttccagactcctgtgcagtcatcctcttgctgcttgcctagggcaagggcaccttgtgcgagaggattgcccagaacttaggcctccaacatttctctagtagccactgcttgcgggagaacatcaaggccaacaccagagttggtgacatggccaagcagtacatagagaaaggtcttttggttccagacctgtgatcacatgcctaatgatgttggagttggagaatagatgtggcagcactgcctcctagatggctttcctaggacatcagggcaagctgatgtcctggacaaaatctgtgaagtgaatctagtgatcacgttaaacattccatttgaaacacttaaagatcctctcctagcggaagggtatataacctggaatttaatccacctcgtatatgtggaattgatgacawcgctggtgaaccattagcccagcatgag

SEQ ID NO: 609469 - DNA, 572 bp, Homo sapiens
gacatttagttaagggaaggatgacatcttttgttaaagagcatcttccatcaaaaggattttcggggaaaaacataataaatacagattaatctttagctgtcacactcagctataccagcctgaaaaagaatgcagaataactgaggaactatcataattacctttctgagtatggacagattaccaaaaaaattggtaaacttacccctagcatttgacatataaatattaaatgtatacatcacatatcttacagaatattatcaacatttatgggagccattgagctatgctatgcacttggtacttagcgtataaaaatgcttaagagatgatctctagcttctggtagtttataaatttttaaaaatatctttgatagtgcttacatctacatttastaagtagtggtagaatttcatgtattgtgtattttagcacaagaaaagagagaaaggcttaagaagcttaattaatcagatagcttagtattgagatcagagatttctttaagaatctggtaaaaactgaaatgtcctccatccctataaaaatactcacacaccaga

SEQ ID NO: 609470 - DNA, 503 bp, Homo sapiens
ccctactcgatgtagttatgcctgcatttgatatcatgaactgcggtagctttcctgcaactatgaggagaactaagagtaggagggcaaagcaaaaggatgaaaatatatatatatatatatatatatggatccctggtgatgtaaagcatgaagtgatccaatcctgaagccatcttaccttgagagttcttgttagataggataataaattttccttattatttatgccaagttgaattgtatgttatctgttatttgtagttacaagtaccctaaatacatacaaagccttgttctgcactgacgaaggcatttcttctctaggtctctagaactgcaagttctaccatgtttgtgaagcaacccagaaaagtcccagttcagaataattttcctctccgctgaactcctttattgactcagtttggcrtttccttccctccctctctttctctctctccactgtcaccacctctctttttcatcctgtaaatgttaag

SEQ ID NO: 609471 - DNA, 522 bp, Homo sapiens
ttcttaaaaataaattcatgggaagtagtccctactcgatgtagttatgcctgcatttgatatcatgaactgcggtagctttcctgcaactatgaggagaactaagagtaggagggcaaagcaaaaggatgaaaatatatatatatatatatatatatggatccctggtgatgtaaagcatgaagtgatccaatcctgaagccatcttaccttgagagttcttgttagataggataataaattttccttattatttatgccaagttgaattgtatgttatctgttatttgtagttacaagtaccctaaatacatacaaagccttgttctgcactgacgaaggcatttcttctctaggtctctagaactgcaagttctaccatgtttgtgaagcaacccagaaaagtcccagttcagaataattttcctctccgctgaactcctttattgactcagtttggcgtttccttccctccctytctttctctctctccactgtcaccacctctctttttcatcctgt

SEQ ID NO: 609472 - DNA, 526 bp, Homo sapiens
tatatatcaaatttcttcacaactgcagcaaaacgagttgggttcataatcagcaaagtgactcctttcagaatgctgtgctttttctaygattatactgggcaactagtaaagtctgccctaaaaactctccaggctaaaatcctattaatggccataaactttgaggccattgagggacttaccattcgtttcttgttgtaacatactcaactttaaaaaaatatattttttaaataagcccaccaatatacaaacaaaaataccatctagctttgtctcacagtagtcctctgagtttctacagtaggatatgccaaccttacaatgagctcattttcttctaaaatacatggtttgctttaaacacagaatatatctactttagggccttgacatggaagatattgtcaagctgatttacaactcattgatctgccatacttttgatacaaagagacatgactgtcaaatagggcatgtcgtccatcattcctcctaacaaagtctattttactcctgggat

SEQ ID NO: 609473 - DNA, 577 bp, Homo sapiens
atgactaactatattttgaggaaggaacaagatagcctttagactaaatagactctactttttaatctgtggccaaatgcttgaaagagattaaaggaaaatgcaaagatatgtcaatataagaaaacaaaataaaataacaaaataagaaaacccttttattcctaaatttgatttataaatgtcaatatggactcatgatatattttcttttaaaaaaacataaatcaaggccgggcrcagtggctcacgcctgtaatcgcagcactttgggaggccaaggcaggtggatcacctgaggtcaggagttcaagaccagcctgaccaatatggtgaaaccctgtctccactaaaaatacaaaaaaattagccagacatggtggcacacacttgtaagtccagctgtttgggaggctgaggcaggagaatcacttgaacctgggaggcagaagttgcagtgagctgagatcacgccactgcactccagcctgggtaacagagtgagactccatctcaaaaaaaaaaaaaagaaagaaaaaaagaaagaaaaagaaaaaaaaccataaatagaacaaat

SEQ ID NO: 609474 - DNA, 629 bp, Homo sapiens
aattatttgacccaataacttctaggagtttatccaaagataaagactgatgtatgtggatgtttatcatagtgttttttttatcatgatgtataattgaaaatttacctaagtaatcaacaataggggattgtactaataaattatggtacagctatatgatggaaaactctagctgcttttaaaaatrtttaagtgttttggggaaaagttatgaaatgttaagagaatattataaaaagtatgatttgatatttatgaattatataaactgtgttgatttaaatatagaaacatatctagatactgatgataaaaatataagtctggctgtgggagtacagatatagaagtagaaatgttccaaaaaaaaaggtcacagttgaaaaaaatataccccctgttaaaagttactgtctcttctttattacatttaaatttattttaagcatttatacccttcactgggaaaactgactagccataagcagaaaactgaaactggaccccttccttacaccttatatgaaaattaactcaagatggagtaaagacttagatgtaaaacccaaagccataaaaactctagaagaaaacctaggcaacaccattcaggacatgggcatgcg

SEQ ID NO: 609475 - DNA, 629 bp, Homo sapiens
aattatttgacccaataacttctaggagtttatccaaagataaagactgatgtatgtggatgtttatcatagtgttttttttatcatgatgtataattgaaaatttacctaagtaatcaacaataggggattgtactaataaattatggtacagctatatgatggaaaactctagctgcttttaaaaatatttaagtgttttggggaaaagttatgaaatgttaagagaatattataaaaagtatgatttgatatttatgaattatataaaytgtgttgatttaaatatagaaacatatctagatactgatgataaaaatataagtctggctgtgggagtacagatatagaagtagaaatgttccaaaaaaaaaggtcacagttgaaaaaaatataccccctgttaaaagttactgtctcttctttattacatttaaatttattttaagcatttatacccttcactgggaaaactgactagccataagcagaaaactgaaactggaccccttccttacaccttatatgaaaattaactcaagatggagtaaagacttagatgtaaaacccaaagccataaaaactctagaagaaaacctaggcaacaccattcaggacatgggcatgcg

SEQ ID NO: 609476 - DNA, 629 bp, Homo sapiens
aattatttgacccaataacttctaggagtttatccaaagataaagactgatgtatgtggatgtttatcatagtgttttttttatcatgatgtataattgaaaatttacctaagtaatcaacaataggggattgtactaataaattatggtacagctatatgatggaaaactctagctgcttttaaaaatatttaagtgttttggggaaaagttatgaaatgttaagagaatattataaaaagtatgatttgatatttatgaattatataaactgtgttgatttaaatatagaaacatatctagatactgatgataaaaatataagtctggctgtgggagtacagatatagaagtagaaatgttccaaaaaaaaaggtcacagttgaaaaaaatataccccctgttaaaarttactgtctcttctttattacatttaaatttattttaagcatttatacccttcactgggaaaactgactagccataagcagaaaactgaaactggaccccttccttacaccttatatgaaaattaactcaagatggagtaaagacttagatgtaaaacccaaagccataaaaactctagaagaaaacctaggcaacaccattcaggacatgggcatgcg

SEQ ID NO: 609477 - DNA, 578 bp, Homo sapiens
ttcagtttcaaatgatattttctgccactgttccttgaaattcaaattttgagggtgctcattatttggtacccgggcactgatttattcatatctattaaaatacatatataaaaacaaaaataaaacacgaagaaaaaaagaaaaaaaatacatatacaagtatacacggtacaaaattgtgtgccatactgtgtactcattcatgaccaaaagacactgatcatttgtaagcttattctagtaaactgaataaaataatatagctaatattttatacttactttttctgctcctactgaaaaactggacatcttaatagttacttcatactaccaatctagtaataaggtctggtggccccmaaatgaaaaaaaaaaaaaaaaaaagcgaaaggggactgagtatttacgttttttagcattggattaaaaaaaaataaaaaacaacatcagtttccaaaggctagctctgaacattttgcctcctcttgaccttaaattgtgggctcaccctggagaataaatcttaatagtgaattatacatagcaactttgaagacaaataatattagtgca

SEQ ID NO: 609478 - DNA, 544 bp, Homo sapiens
tcactaacattaatactgtttgccatgatgtgagagttggtctttttttttaatgccccagaagctaaaggaaaataaatactgtggtagggaaaaataataccttacttggcattttgaagtcattgctcaatccttcttgagcaagaaaaccatagtaatgactttgttttacctaccgcaattatggtacacctcgcagcaatcctycacaatattttcctccctctgttcaagtcctgctaaataatctctggaaaccattaactaagagtacggttccaattttcctgttctccctcctctgctgcctcagtgtcatgttggcgtcaggacaaagcaaacttgtatgacatcacagagcaaactcattttctgtaaaccagccccttggtagtttaccgctactggaacccaacgctgtcaacagtgtggtctttgtttggtgggtgttgctctaaaaatttttttaaagtttcccaacaccttcttcttttaaacagaggcaagctgctggaggcgccgtcctcgcctggcccgcccc

SEQ ID NO: 609479 - DNA, 634 bp, Homo sapiens
acggacggtggtggccacagcatgaatagctttatgatcacagcaaggctttggctcagaaaaatgtggagctatgaaggacttttcttcaggagccacacagcctacatttcaaaatgttcatgttggctgtttggttgagtggaagcactgcatgacttgcctcaagaggagactccctgactgctcaactccattttgggcagtggtatgctgctaaatgtttaaaaacagactctgagggtgaggagcaccaatttgtagtgtttgatttccatggtgtaaactctcccaccatggctgatttcaagctgccagtatgactcactgaacatggagttgtgaagagatgtgcataaaygactcacaatactgactctagtcccaacgtcactgttaccactgagaacatttaaaaataagggagaattctgtaaatctgattggaaatgtgaatgctattttataagtctatataaatgcaatgtcttctattggtctattactgtcaatcaaacacagagcccaagtccttagaattttttttttttaagaggcagggtctcactctgtcatccaggctggagggcaatggtgcaatcacagctcattgcagcctcaaactcctgaaaag

SEQ ID NO: 609480 - DNA, 611 bp, Homo sapiens
attagcaaacctgggtctgggacgcaatccccgacattctgactgatccagaatggggccccaagatccttatatttctaaagttccccaggtgtggttatgtcatatgagtgaggagaaccacaggcagagaggttttgagaaaggatgctgaggccatactacgtgggttcaaatccctgctccactagttactagctatggctcagtttccttatttgtaaaaacggagataactgataacacctcctttgttgtgaggcttgactgactgaatccatttattgatctcagtggattattgtacggatttggcataacacctggtacatagcaaatgttcaattttaatcacatgcatcatacctatacatgtgtacatgtgaatatgtcctaaggattaaacagtttgatgcatataaagggcttagcactgtctccatatagaaaatactcagtaaatataagctgagctgatgctgacagtactggtmgtaggacaacttattgcaactgactgtcttctgtctggaatttcatcctttcctcactgcatggcagcctttgcttcagaaaaccacaactttaaaaggtatggggataagaataaa

SEQ ID NO: 609481 - DNA, 589 bp, Homo sapiens
tgaggctatttagctagacttccttagtttttatttaattagtcaatatttaagagagccttggagataaaaagaattctagtgaaacctaggcattattattttccaaacaggaggaaatgtactgatcttcagactttcaatagacatgatatatttggtctgagagagagagacagagagagagagagasagagagagagagaagcccaaccgttatctaaaccttttaaggacacaattatacaagagtgccttgcaaggttttcaactctttataactggaagagaggaaaacacttattactgaaatccagataatcaaaacactttgttttaatcagcagtttctacccttttcacattctatatcaattcacaaggagtgaccttcatcttaggtataatggggtcaaaacctacctctgcaggtgtttctcccttacctgccttaatctgtggcccaggttaagcacacctgcaggcaggctcaacccaagatagccaggagttctattatgagtagactgatgtagaaagatctctcttgaaattccctttagctgacaaagcattgaaatcacctctg

SEQ ID NO: 609482 - DNA, 586 bp, Homo sapiens
gtggtgaaaatctttcttaaaataaatcccttgggacaagacatagcatcccacacatgggacatccagacctgagagtagttgagtgagaacattacattccctgatctaaaggggacagctctcttaatgtggccttaaggaggtgtcgccttctgtaagaatcacactgcactggtggctcacaatgttgtggaggaaataataccaagcaagtgttcccatgtgcacttgaacaattatttttaactaaaatgtagcaatttacagttatttctatttaatgtcatcttgctactataacaactcacataaatcctttaaaatgtttactaataggtcacacatatataaaaaacatagacagtttttaaaaacaattawgaagaaagaatatccttgggaccactgtccaggttgggagataaaacactgccaggacctcagaagcccccagtgagccccttctctatcatacccactccttcacctctggaggtagctgttatactgctttttgtgacaatcatattaaatcatattaattttctttatagttttaccatctatgtatgtatccctaaat

SEQ ID NO: 609483 - DNA, 578 bp, Homo sapiens
ttcagtttcaaatgatattttctgccactgttccttgaaattcaaattttgagggtgctcattatttggtacccgggcactgatttattcatatctattaaaatacatatataaaaacaaaaataaaacmcgaagaaaaaaagaaaaaaaatacatatacaagtatacacggtacaaaattgtgtgccatactgtgtactcattcatgaccaaaagacactgatcatttgtaagcttattctagtaaactgaataaaataatatagctaatattttatacttactttttctgctcctactgaaaaactggacatcttaatagttacttcatactaccaatctagtaataaggtctggtggccccaaaatgaaaaaaaaaaaaaaaaaaagcgaaaggggactgagtatttacgttttttagcattggattaaaaaaaaataaaaaacaacatcagtttccaaaggctagctctgaacattttgcctcctcttgaccttaaattgtgggctcaccctggagaataaatcttaatagtgaattatacatagcaactttgaagacaaataatattagtgca

SEQ ID NO: 609484 - DNA, 605 bp, Homo sapiens
ttagcatacaggttttaaatttcccacattaaacagtacattttaaatttccacttatgttaagcgtsttgatattgtgggtttgaaagtaagtcccctctgaaaaacaggaactgtgcttgtctgttaccagttcttgtggtcgatatggtaactattttgatttttcagaagggaggaaaagcagttaaatctagttaaaattaaaaccagttaaaattaactggctcgtgagatttcagtgcagctgttccacacatagcaacactaagagtgagttgtttattaccatgattaattattattagttgttacttctttttgagcagtggcatagattatttatatttttggtctaaccttggaaaatagaaactgcaagcgtagagaggttcccgtttgctaatttgcatgtaccctgtttttgtttttgccaggtaggtgtgtgcatctcaagtacacgagagtaatttagcatgtcagcactttcctaccagcagtgcttgctgactcatgcagctgttgtagcactcagctggccgcactgtaaactgcccatagtaccagcaccgcccttggagagctccgggctgctgggctggtta

SEQ ID NO: 609485 - DNA, 578 bp, Homo sapiens
ttcagtttcaaatgatattttctgccactgttccttgaaattcaaattttgagggtgctcattatttggtacccgggcactgatttattcatatctattaaaatacatatataaaaacaaaaataaaacacgaagaaaaaaagaaaaaaaatacatatacaagtatacmcggtacaaaattgtgtgccatactgtgtactcattcatgaccaaaagacactgatcatttgtaagcttattctagtaaactgaataaaataatatagctaatattttatacttactttttctgctcctactgaaaaactggacatcttaatagttacttcatactaccaatctagtaataaggtctggtggccccaaaatgaaaaaaaaaaaaaaaaaaagcgaaaggggactgagtatttacgttttttagcattggattaaaaaaaaataaaaaacaacatcagtttccaaaggctagctctgaacattttgcctcctcttgaccttaaattgtgggctcaccctggagaataaatcttaatagtgaattatacatagcaactttgaagacaaataatattagtgca

SEQ ID NO: 609486 - DNA, 614 bp, Homo sapiens
acctaccaggattgactcaggaagaaatagaaagcctgtaacagaccaatcacaaatagattggagaagtaatgaaaaacctctcaacaaagacaagcccaggaacagatagcttcacagctgagttctaccagacattcaaagaattgataccagtacttcttaaactcttccaaaaaaatagaactagaaggaatactttcaaacacattttatgaggccaggatcaccctgatacccagccagccaaagacatcacaagaaaagaaaatttaaacccaatttctctgatgaatattggtgcaaaaagccccagtaaaatattaggaaaccaaatccaacaacacatcaaaaagattacatgtcatgactaagtgggatttatccctggcatacaaagctggtttaacatctgcagatcaatcagtagtgatacattgcattaacagaatgaaagataaaaatcacatgataatcttaattgacacagaaaaagcatttgacaaagtccaacatcctttattgagaaaaatgctcaatagtgtatgtatagaaggaaagcttctctrtgtaataaaggccatttatgaaaaacccacagctaacattataat

SEQ ID NO: 609487 - DNA, 578 bp, Homo sapiens
ttcagtttcaaatgatattttctgccactgttccttgaaattcaaattttgagggtgctcattatttggtacccgggcactgatttattcatatctattaaaatacatatataaaaacaaaaataaaacacgaagaaaaaaagaaaaaaaatacatatacaagtatacacggtacaaaattgtgtgccatactgtgtactcattcatgaccaaaagacactgatcatttgtaagcttattytagtaaactgaataaaataatatagctaatattttatacttactttttctgctcctactgaaaaactggacatcttaatagttacttcatactaccaatctagtaataaggtctggtggccccaaaatgaaaaaaaaaaaaaaaaaaagcgaaaggggactgagtatttacgttttttagcattggattaaaaaaaaataaaaaacaacatcagtttccaaaggctagctctgaacattttgcctcctcttgaccttaaattgtgggctcaccctggagaataaatcttaatagtgaattatacatagcaactttgaagacaaataatattagtgca

SEQ ID NO: 609488 - DNA, 586 bp, Homo sapiens
gaaggggaacatcacactctggggactgttgtggggtggggggaggggggagggatagcattgggagatatacctaatgctagatgatgagttagtgggtgcagcgcaccagcatggcacatgtatacatatgtaactaacctacacaatgtgcacatgtaccctaaaacttaaagtataataataaaagaaaaaaatacatttcatttaatccaatatatctaaaacaatatgatttttctaagttattcactcaccctttctttctatatctcattgcttcctcatggatttatttctttactttgctggggtacttctttacagaatactttcattgtatgttacamattatgaagacttgtgtaattgagaatatctgtttcatccttataataaaattgtttagctgcatataaaagactaaatttgaagttatttgccttcatgtttagaatctttatttgcttatttctcaaatctatctgactatatgtaacagtctattttttcttgttcatttttgatctgatcttttatttttaattaaatttttcatagttattttctacttcatttcagataa

SEQ ID NO: 609489 - DNA, 475 bp, Homo sapiens
aatgaccttcgcttagctgactctccagattaactgactgaccttctgtttactctattttttcatgaccatgctgaatccctatagcccagtagtctactgtgatacactgatatacttttgctcttcctgttttatttgtatgcttaccaagagttgattgggtttgttcccaacctgtttctgccacctgtacatattataatgactacacaatttaattatatacttcagcaatccataaaatctcaggrttaaaagagtgtaatttccatgaacataaagtagaatccttcagaaacagtctataaagaaaagtcacttatttttactgaaaaataattgtttataaaaatcaatcatttctatatactaggaattataatttgaaactgaatgttaaaaaaacagcatttatgattgttcacaggatctatatgctgaaaactatgaaacacagatgaaagaaatcaaa

SEQ ID NO: 609490 - DNA, 545 bp, Homo sapiens
atatccaacagagctatccttctaatatgaagcagagaagtctttcccaaacaacaaaagctgtgagaatttgtcaccagacccatctgacaaaaaatgctaaagagagctcttcaaactgaaagaaaaaaatactaacatgcaaaaacaaacaaacaaamaaaagtgtaaatatataaaacccactggtaaaattgagtacatgacaaacccagaatactctaatactgtaattgtgttctgcaatctactcataactccagtaagaaatctattaaaaacaataatacctacatcaacctgctaaaagatagaccaccaaacaattgttttgcatttatttctgggtcctctattctttaccattggtctacgtgtctgtttttatttcattactgtgctgtttcagttagtataactttgtcatatattttgaagtcaggtagtgtgatccctccacctttgctctttttgctcagattgctttggttacctggagtattttgtggttccaaacaaattttaggattactttttctatttct

SEQ ID NO: 609491 - DNA, 573 bp, Homo sapiens
gaagcgctgtggatgattatctcacatggaagggacggtctgtctagcttcttacagccaaagggggaatctgaagttttgtaaccttgagtgcagttattattaaaggagatcaaagtcagatattaggggagagacaacaygggaagtgcctgctggtacagataagcacctctttataggattttgagaagaaccctgaagtaccttggcttggactctattggtagctcaagataatatcatcagacttgcctaactcctctggaggaagtaagagtttgtttagttcaggtcaatagacacattgtaagtggagcgcctgttcagtccaggcattgtactaagccagtggttcttaaacctgaatgtgcattagaatcacctggaaggctagaccctacctcgagaatccctagtttaggaggtatgggtaaagaactttcagtaagttcccacatgatactaaagctgtggtctggggaacacactttgacaaccacagctagaaacatggtagctgctgcgtggtcttaaaggaagagacctttaagcagtcactgcactgcagtg

SEQ ID NO: 609492 - DNA, 476 bp, Homo sapiens
accaccacatgaaaatttcatgttgyactttgatagccatgcccacttctcttccactgccaccccctcattagcctctggtaacaactaatttgttcttcatctctataattttgtccttttcaggaacattatataaatggaattataaagcatgaaacctttcaagattggctttttcactcaacataattccctggaaattcatccaggtttttgcaagtgtcaagagttcagtactttttgttgctgaataatattccatagtatggatgtaccacagtttctttcaccatttgcctgtggaaaaacagagcaatatccaaagtgagtataacgtttcaaaatttgtgggacacaattaaagcactcctgagagggaaatgtttagatctaaattttacctttaaaagaggaaatgtctcaagtcactaatctaagctcttatgttaagagcttcttgttgaggaaggagt

SEQ ID NO: 609493 - DNA, 565 bp, Homo sapiens
ttgtgggacacaattaaagcactcctgagagggaaatgtttagatctaaattttacctttaaaagaggaaatgtctcaagtcactaatctaagctcttatgttaagagcttcttgttgaggaaggagtattgaagactccaactattcttatggatttatctaccttcatttcacttctatccattatatcamatgttttgcagcactgttgttttgtgtgtatacataaaggattgctctgtcttctttgtggattgacccttttattataattttcttcgctgtgaagtcttttttatctgaagttgatatagtcactcctgctttctcttgaataatatttgcatgatatatctttttatatcttttaaaacctgcctatatctttatgattgaagtaagtttcttatcaacaacatatagttagttcatgctttttgattcactctgccaatttctgtattttaattgctgtatttagaccatgggcatttaatataattattggtatattaaaattaagactaccagtttattttttggtttttgtttgttctctgtttt

SEQ ID NO: 609494 - DNA, 565 bp, Homo sapiens
ttgtgggacacaattaaagcactcctgagagggaaatgtttagatctaaattttacctttaaaagaggaaatgtctcaagtcactaatctaagctcttatgttaagagcttcttgttgaggaaggagtattgaagactccaactattcttatggatttatctaccttcatttcacttctatccattatatcaaatgttttgcagcactgytgttttgtgtgtatacataaaggattgctctgtcttctttgtggattgacccttttattataattttcttcgctgtgaagtcttttttatctgaagttgatatagtcactcctgctttctcttgaataatatttgcatgatatatctttttatatcttttaaaacctgcctatatctttatgattgaagtaagtttcttatcaacaacatatagttagttcatgctttttgattcactctgccaatttctgtattttaattgctgtatttagaccatgggcatttaatataattattggtatattaaaattaagactaccagtttattttttggtttttgtttgttctctgtttt

SEQ ID NO: 609495 - DNA, 565 bp, Homo sapiens
ttgtgggacacaattaaagcactcctgagagggaaatgtttagatctaaattttacctttaaaagaggaaatgtctcaagtcactaatctaagctcttatgttaagagcttcttgttgaggaaggagtattgaagactccaactattcttatggatttatctaccttcatttcacttctatccattatatcaaatgttttgcagcactgttgttttgtgtgtatacataaaggattgctctgtcttctttgtggattgacccttttattataattttcttcgctgtgaagtcttttttatctgaagttgatatagtcactcctgctttctcttgaataatatttgcatgatatatctttttatatcttttaaaacctgcctatatctttatgattgaagtaagtttcttatcaacaacatatagttagttcatgctttttgattcactctgccaatttctgtattttaattgctgtatttagaccatgggcatttaatataattattggtatattaaaattaagactaccrgtttattttttggtttttgtttgttctctgtttt

SEQ ID NO: 609496 - DNA, 308 bp, Homo sapiens
gaaaacctatataataactcatatttttgcttaccatgttctttgttccttcccccgctctaaaattctttcttgtattattgcctttctgtttagagcatttccttcagccattcttttcaaggtacctctgcttgtaacaaattctcttgamtttccttcatctgatttgtcttgatttcccttttattcccgaatatttttgctggatgtaggatcctgtgttgaccagtattctctttcgacatttgaaaaatgtgccattttcttctggctttgatggtttcttatgagaaatctatcattca

SEQ ID NO: 609497 - DNA, 630 bp, Homo sapiens
tcttttgctgtagtcccacaggtctctatgactctgttcatatttttcagtgaattttttctcttttgctcagcttgtatagtttctattgctctgtctacaaattcaccarttctttttctcctccattctgccattgaactcatccattgaatttttttttaattttggttattgtattttttcatgcaacatttttcatttggtttttctttatatcttctatttctttgctgagattttgtatttctttgctagactttctatttgttcacttgctttgagtgtgtttgtaactgcccattgaagcacttttatgatggctgctttacagtctttgttggatcatcctaacatttctctcttcttgatgttgcatctatagattgttgattgccaattttttttcattcagcttgctatcttcctggttcttgatatgacaagtgactttctgttgaaacttggattttcaggagtaccatgtgatgagtctctgaatcttacttaaccctctgtgttagacgacttcctctgacatcttgtggcagagaaaggggaggatgccacctcattattgacaggtagaagaagtccacacttcccattcagctcccattgacacccaag

SEQ ID NO: 609498 - DNA, 630 bp, Homo sapiens
tcttttgctgtagtcccacaggtctctatgactctgttcatatttttcagtgaattttttctcttttgctcagcttgtatagtttctattgctctgtctacaaattcaccaattctttttctcctccattctgccattgaactcatccattgaatttttttttaattttggttattgtattttttcatgcaacatttttcatttggtttttctttatatcttctatttctttgctgagattttgtatttctttgctagactttctatttgttcacttgctttgagtgtgtttgtaactgcccrttgaagcacttttatgatggctgctttacagtctttgttggatcatcctaacatttctctcttcttgatgttgcatctatagattgttgattgccaattttttttcattcagcttgctatcttcctggttcttgatatgacaagtgactttctgttgaaacttggattttcaggagtaccatgtgatgagtctctgaatcttacttaaccctctgtgttagacgacttcctctgacatcttgtggcagagaaaggggaggatgccacctcattattgacaggtagaagaagtccacacttcccattcagctcccattgacacccaag

SEQ ID NO: 609499 - DNA, 630 bp, Homo sapiens
tcttttgctgtagtcccacaggtctctatgactctgttcatatttttcagtgaattttttctcttttgctcagcttgtatagtttctattgctctgtctacaaattcaccaattctttttctcctccattctgccattgaactcatccattgaatttttttttaattttggttattgtattttttcatgcaacatttttcatttggtttttctttatatcttctatttctttgctgagattttgtatttctttgctagactttctatttgttcacttgctttgagtgtgtttgtaactgcccattgaagcacttttatgatggctgctttacagtctttgttggatcatcctaacatttctctcttcttgrtgttgcatctatagattgttgattgccaattttttttcattcagcttgctatcttcctggttcttgatatgacaagtgactttctgttgaaacttggattttcaggagtaccatgtgatgagtctctgaatcttacttaaccctctgtgttagacgacttcctctgacatcttgtggcagagaaaggggaggatgccacctcattattgacaggtagaagaagtccacacttcccattcagctcccattgacacccaag

SEQ ID NO: 609500 - DNA, 559 bp, Homo sapiens
gtgtttgtaactgcccattgaagcacttttatgatggctgctttacagtctttgttggatcatcctaacatttctctcttcttgatgttgcatctatagattgttgattgccawttttttttcattcagcttgctatcttcctggttcttgatatgacaagtgactttctgttgaaacttggattttcaggagtaccatgtgatgagtctctgaatcttacttaaccctctgtgttagacgacttcctctgacatcttgtggcagagaaaggggaggatgccacctcattattgacaggtagaagaagtccacacttcccattcagctcccattgacacccaaggtgggggaagtcctcattattacctggtgggtgggagagtccgggatcctcactggccctccactgattcctccctggctggagggtgtaagagcccctcattattcctctccatgtgacctccactgataccacagggtggtggctttgtgacctctgggctgaagcgacagtcctgattttccgttaggcctcctttgatgtctcctcagtgg

SEQ ID NO: 609501 - DNA, 559 bp, Homo sapiens
gtgtttgtaactgcccattgaagcacttttatgatggctgctttacagtctttgttggatcatcctaacatttctctcttcttgatgttgcatctatagattgttgattgccaattttttttcattcagcttgctatcttcctggttcttgatatgacaagtgactttctgttgaaacttggattttcaggagtaccatgtgatgagtctctgaatcttacttaaccctctgtgttagacracttcctctgacatcttgtggcagagaaaggggaggatgccacctcattattgacaggtagaagaagtccacacttcccattcagctcccattgacacccaaggtgggggaagtcctcattattacctggtgggtgggagagtccgggatcctcactggccctccactgattcctccctggctggagggtgtaagagcccctcattattcctctccatgtgacctccactgataccacagggtggtggctttgtgacctctgggctgaagcgacagtcctgattttccgttaggcctcctttgatgtctcctcagtgg

SEQ ID NO: 609502 - DNA, 427 bp, Homo sapiens
ggtgggggaagtcctcattattacctggtgggtgggagagtccgggatcctcactggccctccactgattcctccctggctggagggtgtaagagcccctcattattcctctccatgtgacctccactgataccacagggtggtggctttgtgacctctgggctgaagmgacagtcctgattttccgttaggcctcctttgatgtctcctcagtggtgtgtggaaggggcacctcattgcttccaggtgggggttggggtggaaattcaggcctcccatttgatctttgctagcatggacatggctggcagtaggaacatagtctttcctgaagtgtttgactggagcaaaaagtaattattgtctaaagggcttctgcctctttcttggtcctttggctagtgagagtaaacttttgttggtttat

SEQ ID NO: 609503 - DNA, 427 bp, Homo sapiens
ggtgggggaagtcctcattattacctggtgggtgggagagtccgggatcctcactggccctccactgattcctccctggctggagggtgtaagagcccctcattattcctctccatgtgacctccactgataccacagggtggtggctttgtgacctctgggctgaagcgacagtcctgattttccgttaggcctcctttgatgtctcctcagtggtgtgtggaaggggcacctcattgcttccaggtgggggttggggtggaaattcaggcctcccatttgatctttgctagcatggacatggstggcagtaggaacatagtctttcctgaagtgtttgactggagcaaaaagtaattattgtctaaagggcttctgcctctttcttggtcctttggctagtgagagtaaacttttgttggtttat

SEQ ID NO: 609504 - DNA, 427 bp, Homo sapiens
ggtgggggaagtcctcattattacctggtgggtgggagagtccgggatcctcactggccctccactgattcctccctggctggagggtgtaagagcccctcattattcctctccatgtgacctccactgataccacagggtggtggctttgtgacctctgggctgaagcgacagtcctgattttccgttaggcctcctttgatgtctcctcagtggtgtgtggaaggggcacctcattgcttccaggtgggggttggggtggaaattcaggcctcccatttgatctttgctagcatggacatggctggcagtaggaacatagtctttcctgaagtgtttgactggagcaaaaagtarttattgtctaaagggcttctgcctctttcttggtcctttggctagtgagagtaaacttttgttggtttat

SEQ ID NO: 609505 - DNA, 607 bp, Homo sapiens
tactttctaccaccttttaggtttttcttacgtttgttttatatgtagtatccaggatttttaactggacttggaagaatagggaaaagtatggctactttagcttcccagcagcacataattttttgatatatttgatacataccaaagaatgtatgtaagtatatatgtgtattataaagtaatagcactaacactaaaccttttaaaatggcaaatatataatagactttttcctaatgaaaaatgaaaactacactactcaatcccacactaaaccacttgaggtatcaatgtaagtttggccttctaggactctgaaataaacatcctttgcctcgagaacctgccaatgaatgagtcttgatcccatgactgggttagcataccactgttggtggttgttgttatttaaaagccacctttcctctattctgaagtttcctgcctccgggctacatgtcaacatcaggaatgacgcagccttacagctggcaagactgtgaagccggtgactcaggataaygaaaataaacactctcattgctgaggagtcccacagtctctggctactttgccctattttctgccccatcctgtgccttct

SEQ ID NO: 609506 - DNA, 563 bp, Homo sapiens
ccccacttttctcagcacttcttcttcctgccaccttgtgaagaaggcgccttgcttccccttcaccttctgccatgattgtaagtttcctgagtcctccccagccatgctaaactgtgagtcaattaaacctctttcctttatgaattacccagtctcaggtatttcctgatagcaatgtragaagagactaatacaatgatgaactcatggtttttatgtcctcagtgtgtttcagtcaactgcattcacaatccttttcatgtttacagtgtttcttctttgacccatgggggtcctttcatgttggtgtctgtgtcggtttcacacgacccgtcagtctccagtggcttccttgcttcacggcccaacaagatgtctcagctcctcttgtattttttttcctagacttgaaagcagtcattccttccaagagccctgattgcttctactaggcctgttgattatattttaaaatatgaagtacgtgtctctttatgtgcatcagcattgacctgaaaggtgacacctatgtctacaactccactccaaagcctcctaca

SEQ ID NO: 609507 - DNA, 586 bp, Homo sapiens
gaccttggtgatgaccttaagcaataggatataaataactcccacaagcttagtgttccaattatggaacactcggtataaacgggttaagaaataattatccctgtctaattagcactgctcctacctaataaatcttgaaagtaagacaaaagaatcaactgtctccaagtaatttatctacatcccaaaacaaagctcaacaatatttccatccccccagaagataacattgcaatgtctggcatcctgtcaaaaattaccaggcatgcaaaaaggcaggaaaatacaacccacaacgaggagcaatgtcaatcaactgaaactgaccaagagttaagaaaggtattagaattagcagacaaggacaaatattcaagattttaggcagagatatgaatatataaaaacacaaatcaaatttctagaaataatatctacaatgtgcgagatgmacagtagactggataggattaatagcaggtagacatttcagaagaaaagactattgaacttgaagacatagcaatagaaatatccaaaatgaaaaacagaaaagaaagtttaaaaaaaatgaacaaagcat

SEQ ID NO: 609508 - DNA, 586 bp, Homo sapiens
gaccttggtgatgaccttaagcaataggatataaataactcccacaagcttagtgttccaattatggaacactcggtataaacgggttaagaaataattatccctgtctaattagcactgctcctacctaataaatcttgaaagtaagacaaaagaatcaactgtctccaagtaatttatctacatcccaaaacaaagctcaacaatatttccatccccccagaagataacattgcaatgtctggcatcctgtcaaaaattaccaggcatgcaaaaaggcaggaaaatacaacccacaacgaggagcaatgtcaatcaactgaaactgaccaagagttaagaaaggtattagaattagcagacaaggacaaatattcaagattttaggcagagatatgaatatataaaaacacaaatcaaatttctagaaataatatctacaatgtgcgagatgaacagtagactggataggattaatagcaggtagacatttcagaagaaaagactaytgaacttgaagacatagcaatagaaatatccaaaatgaaaaacagaaaagaaagtttaaaaaaaatgaacaaagcat

SEQ ID NO: 609509 - DNA, 567 bp, Homo sapiens
aatctactttttcttttctttttttttttttttttttttttgagacaaaatctcactctgttacccaggctggagtgcagtgacaccatctcggctcactgcaacctctgcccctctggttcaagcgattctcctgcctcagcctcctgagtagctgggattataggtgcctgccaccatgctcggttaatttttatatttttagtagagatggggtttcactgtgttggctagactggtcttgaactcctgacctcaagtgatccggctgccttgggtttccaaagtgctgggattacaagggcgagccaccatgcctggccagtaatctattttttaagtttcattttgcaaagaagaaagcattctacatgataggttgtattagaatgcatccaaagccatataaaataaagcatccacttactacaagaagaaagaaatactgagttagcaatatcaaacatttttttaaaatttcacactatcrtaatatcacaatatttgaaggattctgctgagtcacctcattctgagaggagacagggtagcaaaagacatacatgt

SEQ ID NO: 609510 - DNA, 534 bp, Homo sapiens
gctggtggctcacgcttataatctcagcactttgggaggccgaggcaggyggatgacctttggtcaggagttcgagaccagcttggccaacatagcagaaccctgtctctgctaaaaatacaaaaattagccagacgtggtggtgcgcatctgtaattccagctactggggaggctgaggccagagaatcgtttgaacccaggaggtggaggttgcagtgactgcactccagcctgggtgacagagtgagactctgtcttaaaaaaaaaaaaaaaaagaaagaaagaaaagaaagaaaaaaaactgcatcagcaagtacgagtttttaaaatgcaaaaatttcccaaatttctactgaaaagatttatctgggagtaataaaaaagtgagagtttgagaaacttatgcaagaccatatcaaaaagccctagaagttaagaaattttggcttaacattgacccaaactttcttccaaaaagctaggttaagaaaacatggcaatattatacctcaatacaactgtttaaagaaaa

SEQ ID NO: 609511 - DNA, 538 bp, Homo sapiens
gtgcagtggctcacgcctgtaatcccagcactttgggaggccgaggcgggtggatcacgaggtcaggagttcaagaccagcctggccaagatggtgaaaccccatttytactaaaaatacaaaaaattagctgggcgtggtggcgagtacctgtaatcccagctactcaggaggctgaggcaggtgaatcgcttgaacctgggaggcagagattgcagtgagccgagattgcaccactgcactctagcctgggtgacagcaagacgtctcaaaaaaaaaaaaaaaaaaagcaaaagatttgaacagatactccatataagatgcatgtgaatgacgaattagcacatgagaagacgctcaatattatcttcaggaaaacgcaaattaaaagtacaagagaaactggtacacattacatctgacgactaagctctgatgtttttatcttgcccaaattcctatctaaggggtctggagagtcatcccccacaagccataattctcatcagatgggttttatttgaccctatacatagtg

SEQ ID NO: 609512 - DNA, 538 bp, Homo sapiens
gtgcagtggctcacgcctgtaatcccagcactttgggaggccgaggcgggtggatcacgaggtcaggagttcaagaccagcctggccaagatggtgaaaccccatttctactaaaaatacaaaaaattagctgggcgtggtggcgagtrcctgtaatcccagctactcaggaggctgaggcaggtgaatcgcttgaacctgggaggcagagattgcagtgagccgagattgcaccactgcactctagcctgggtgacagcaagacgtctcaaaaaaaaaaaaaaaaaaagcaaaagatttgaacagatactccatataagatgcatgtgaatgacgaattagcacatgagaagacgctcaatattatcttcaggaaaacgcaaattaaaagtacaagagaaactggtacacattacatctgacgactaagctctgatgtttttatcttgcccaaattcctatctaaggggtctggagagtcatcccccacaagccataattctcatcagatgggttttatttgaccctatacatagtg

SEQ ID NO: 609513 - DNA, 538 bp, Homo sapiens
gtgcagtggctcacgcctgtaatcccagcactttgggaggccgaggcgggtggatcacgaggtcaggagttcaagaccagcctggccaagatggtgaaaccccatttctactaaaaatacaaaaaattagctgggcgtggtggcgagtacctgtaatcccagctactcaggaggctgaggcaggtgaatcgcttgaacctgggaggcagagattgcagtgagccgagattgcaccactgcactctagcctgggtgacagcaagacgtctcaaaaaaaaaaaaaaaaaaagcaaaagatttgaacagatactccatataagatgcatgtgaatgacgaattagcacatgagaagacgctcaatattatcttcaggaaaacgcaaattaaaagtacaagagaaacyggtacacattacatctgacgactaagctctgatgtttttatcttgcccaaattcctatctaaggggtctggagagtcatcccccacaagccataattctcatcagatgggttttatttgaccctatacatagtg

SEQ ID NO: 609514 - DNA, 351 bp, Homo sapiens
aacttttttaggtggtgaccagataatttaaaattatctatgtggctcacatgatatttctattggaagcactgttctagatgggtagaagcytaagacattagaacttgaagggcctcaggcatcacctagagtgtcctctccttttagaggtgaggaatttggcacaggaggagtttaaatgacctccagagaactggaacccagacctcttttctcccagccaaggttgcatagaatgcaatgacaagccaagttgcgtaagttgaggtaatggattcaaagtaccacacatggttataacaagatggtagtgtcagtaaggtgtttcaaacatgagatgatatgtat

SEQ ID NO: 609515 - DNA, 351 bp, Homo sapiens
aacttttttaggtggtgaccagataatttaaaattatctatgtggctcacatgatatttctattggaagcactgttctagatgggtagaagcctaagacattagaacttgaagggcctcaggcatcacctagagtgtcctctccttttagaggtgaggaatttggcacaggaggagtttaaatgacctccagagaactggaacccagacctcttttctcccagccaagkttgcatagaatgcaatgacaagccaagttgcgtaagttgaggtaatggattcaaagtaccacacatggttataacaagatggtagtgtcagtaaggtgtttcaaacatgagatgatatgtat

SEQ ID NO: 609516 - DNA, 579 bp, Homo sapiens
accccaggtctcccgaacctctgggtcttcctgggtcatggactgtttctcaactcttccaacttatgaaacatgctagggatggctgttgttgtgccaaatggtttctctactacatccaataaaataaagacatttcttttccagaaatgcttaaaaatagttaaaacaattcttctgttgttgtttgttttgttttgttttctgagatgggggggtctgtctgtgttgcccaggctgatctcaaactcctgggctcaagccatcctcccgccttggcctcctaaggtgttgagattacaggcatgtgccatcgtatcctgcaacacagttgttctttatgtttcaaaatacctaatcactaagtgtaaaggacttccaattctaaatttaaaatatgaaataaatataccaatgtcatataaaagagcactcatatacctaggtgtaactaccggtaagattgtgratcagtttcttaacctctgtttcctgcaaaatggcagttataatatttccctttccaggtaaatattggggtaaagtgttttcttaatagatggtagcagttgttgatga

SEQ ID NO: 609517 - DNA, 566 bp, Homo sapiens
ttacttcactcatgcttgatttttattatcttcacagatacctaaaaacaaagtaatgtttgaaccaaacagagataagctggagagactagactcagtcattggtttagacccatctctgacacttcccagacacgtgtcaaagctttctggagctcacagctccccacctctaaaatggcaagagaagaaaactagacartggctagctagtttcttttgagcactaatcgtctctgattccagacttctagcatccacagatatatttggtgctttggtgtatttctagaaccagacagtttccttcccacatggcagaaacaaagctctcagaagccaggggagacagggtttgggccgtgctgagaccctgccagcctggcacaggcaggctctgtctggaaggcacccagaccacattcctgatccaaatacccagtgtctgtgacatttgaaagtacctttccaacctcaagactcaagctgtggctcgattatttaatgcactcagaagcagttaagtattacttaccttgcagcctttgaatcttagcagaagaggt

SEQ ID NO: 609518 - DNA, 624 bp, Homo sapiens
tttccttcccacatggcagaaacaaagctctcagaagccaggggagacagggtttgggccgtgctgagaccctgccagcctggcacaggcaggctstgtctggaaggcacccagaccacattcctgatccaaatacccagtgtctgtgacatttgaaagtacctttccaacctcaagactcaagctgtggctcgattatttaatgcactcagaagcagttaagtattacttaccttgcagcctttgaatcttagcagaagaggtttaccattatatgactagattgagcaaggaaaagtttcctcctgtttcttaagtgtgtctatattttaattctctatttttaagtggagatacacctagagtaggaaagttgcttaaaggtcacctgtcctgtggtttcaatacccatttccaaattagaggtacctgggcattttcctaaaaatatggattccagggcccacttcagattgactaggtcagaaactgagggtgttggacccagcaatctgtggtttaaccagccctgcaagtgattctgatgagcggctgggtttaggatacactgccatggacctccttttagaattatggaaacatttctgtgggaagcagcactct

SEQ ID NO: 609519 - DNA, 566 bp, Homo sapiens
ttacttcactcatgcttgatttttattatcttcacagatacctaaaaacaaagtaatgtttgaaccaaacagagataagctggagagactagactcagtcattggtttagacccatctctgacacttcccagacacgtgtcaaagctttctggagctcacagctccccacctctaaaatggcaagagaagaaaactagacagtggctagctagtttcttttgagcactaatcgtctctgattccagacttctagcatccacagatatatttggtgctttggtgtatttctagaaccagacagtttccttcccacatggcagaaacaaagctctcagaagccaggggagacagggtttgggccgtgctgagaccctgccagcctggcacaggcaggctctstctggaaggcacccagaccacattcctgatccaaatacccagtgtctgtgacatttgaaagtacctttccaacctcaagactcaagctgtggctcgattatttaatgcactcagaagcagttaagtattacttaccttgcagcctttgaatcttagcagaagaggt

SEQ ID NO: 609520 - DNA, 547 bp, Homo sapiens
ttgccttcagctggcaaggccagcaatatasctttactttcctacctcaggggtatatcaactctggctttgtgtcataatcttatttggagagaccttgatcgcttttcacttctacaagatatcacactggtccattacattgatgacattatgctgattggatccagtgatcaagaagtagcaaacacactggacttattggtgagacatttccatgccagaggatgggaaataaatatgactaaaattcagggaacttctacctcagtgaaatttctaggggtccagtggtgtggggtctgtcaaaatatcccttctaaagtgaaggataagttgctgtgtttggcccctcctacaaccaagaaagaggcagaacacctagtgggcctatttggattttggaggcaacacattcctcatctgggtgtgttactctgacccatttattgagtgacccaaaaggctgccagtttgagtggggtccagaacaggagaaggctctgtaacaagtccaggctgctgtgcaagctgctctgccacttgg

SEQ ID NO: 609521 - DNA, 547 bp, Homo sapiens
ttgccttcagctggcaaggccagcaatatacctttactttcctacctcaggggtatatcaactctggctttgtgtcataatcttatttggagagaccttgatygcttttcacttctacaagatatcacactggtccattacattgatgacattatgctgattggatccagtgatcaagaagtagcaaacacactggacttattggtgagacatttccatgccagaggatgggaaataaatatgactaaaattcagggaacttctacctcagtgaaatttctaggggtccagtggtgtggggtctgtcaaaatatcccttctaaagtgaaggataagttgctgtgtttggcccctcctacaaccaagaaagaggcagaacacctagtgggcctatttggattttggaggcaacacattcctcatctgggtgtgttactctgacccatttattgagtgacccaaaaggctgccagtttgagtggggtccagaacaggagaaggctctgtaacaagtccaggctgctgtgcaagctgctctgccacttgg

SEQ ID NO: 609522 - DNA, 616 bp, Homo sapiens
tttggcaggcccccataggtgaatcacagtgcaggcctctaggattttggagcagggccttgccatcttctgtagataactactctccttttgagagacagatcttggcttgttactggactttgatggaaacaacgtttgactatgggtcatcaagtcaccatgtaacctgaactgcctgtcatgaactgggtgctttctgacccatttagccatcaagtgggtcatgcacagccttccaccatcaaatggaagtggtatatacrtgatgaggcttgagcaggtcctgaaggcacaagtaagttacatgaggaagtggctcaaatgcccatggtctccacacctgccgccctgccttctcctccccagcctgcaccaatggcctcatggggagttccctgtgatcatttgacagaggaagagaagactagggcctgggtcacaggtggttctgcacaatatacaggcaccactcgaacgtagacagctgcagcactatagcccctttctaggacatccctgaaggagaccagtgaagggaaatcttcccagtgggcagaacttctagcagtgcacctggctgcacactttgcatgaaaggagaaatggctagatg

SEQ ID NO: 609523 - DNA, 557 bp, Homo sapiens
gttactggactttgatggaaacaacgtttgactatgggtcatcaagtcaccatgtaacctgaactgcctgtcatgaactgggtgctttctgacccatttagccatcaagtgggtcatgcacagccttccaccatcaaatggaagtggtatatacgtgatgaggcttgagcaggtcctgaaggcacaagtaagttacatgaggaagtggctcaaatgcccatggtctccacacctgccgccctgccttctcctccccagcctgcaccaatggcctcatggggagttccctgtgatcatttgacagaggaagagaagactagggcctgggtcacaggtggttctgcacaatatacaggcaccactcgaacgtagacagctgcagcactatagcccctttctaggacatccctgaaggagaccagtgaagggaaatcttcccagtgggcagaacttctagcagtgcacctggctgcacactttgcatgaaaggagaaatggctagatgtgcrattatatactgattcatgggctgtagccaatggtttggctggatggtc

SEQ ID NO: 609524 - DNA, 551 bp, Homo sapiens
tgcaaagtattaatcctgggtgtgtctgtgagggtgttgccaaaggagattgacatttgagtcagtgggctggggaaaacagacccacccttaatctggtgggcacaacctaatcagctgccagtgaatataaagcaggcagaaaaacatgaaaaggtgagactggcctagccgcccagcctacatctttctcccatgctggatgtttcctgcctttaaacatcagactccaagttcttcagttgagactcagattggctctccttgctcctcaagctygcagagagcctgttgtgggaccttatgtttgtgtacgttaatactcaataaactccccttcatgtgtatatatatcctattaattctgtccccctagggaaccctgactaatacaatctccatgtattttttttttggctataagcttactttttccaaaactttttatttaaaaaattctcaagcctacagaaaagttgaaaaaaatatagtgcaacccgtatctctatctatatctatatctttatctatatctatatctatagatatat

SEQ ID NO: 609525 - DNA, 561 bp, Homo sapiens
tgggacatcttctccctctgatcctcccacctttcaaatgaacttttgtgattacattgggccttccccgataattcccccattttaacgtcctcaacttaattgcatctgcaaagttccttttgccatataaggtaccatattcacaggttctagggattaggatacagacatatttggggggtcattattttacctaccacaatgacatagcacaatgccaccttctctgtgataccctccctggttccattctagaaatgtcattctagaagaaatgtaaagaagagattgggagggggcaggacatttaccatccttggggcactggtctcagtgccacctgtcttggctgtccagagaagcctggatggcaatgatctgyggcctccacctttctctaacctgctctctgggcatgttctctcacctccctttccctgttttttgacctgacattgaacttccttcaggtctgagtcaaagagacttcatacccaacccattgtggtttgtggaggcgttcactaaaggaaatgaagaggaaattctacccacagg

SEQ ID NO: 609526 - DNA, 533 bp, Homo sapiens
cttgaacccaggtctagctgagtccataaaacccaccctctgctttgtcaccctattattgcctcccatctcacaatgacagaagaggtctcctactcagtgttgagggtattaaatagggatggataggtctggcagatgagagtgtttttccagagctttaaattccaatggtgtttagtcacctcatttattagattccttacccaagaattaagttaaaaaatgggctctttctccaaaatccctttcagatgtgttggccagcacagcactttggggccttcatcaccccaaggtgagtcaccatgcaaaccagttgtgcttttctrggagaggggcttagaccctccacataagttccttttgaaagagtttttcctggaagccccacaaagtaactgttgcttttgtcttgttggccagaactgtgtcaaatgactactcagcaaggcaggctaagaagtaaagtttgagttttggtttttttttttttaagtttgggcttctctattctttccctcctctgttca

SEQ ID NO: 609527 - DNA, 577 bp, Homo sapiens
gtttgtacaataattgttttctttctttcaatttgtgtttaatgtgtatttcttgtaaacagcacatagttggatctaacaatatctaacttttaattggagtgtttagtctacttatagttaatgtaatattgatatgattgagttcaagtctctaatcctgctatttgttttctatttgtatgtctgttctttgtttctctgttcctagttttgtgtcttttggggagctaactttaaaaaaagcagtgtttcattctattatattgaatttttagcttttttttttggttttattgttttactggttgctctagggtctataatatgcatcttcatcttaatcacaaattgtggytttccttgattttattcagcctgaggttcccttgatgtcttgggtgtgtgggttgatgcttttaatcaaagaagaaaaaaatttgggccagtatgacttcaaatttgtatgtttttctacccactcctttttttctcttactttttgggattccaattacctgtatgttagtctagttaatactttctgatgggtcaacatgactcttttttttttgtt

SEQ ID NO: 609528 - DNA, 565 bp, Homo sapiens
gtccaattaaaagacaaaataatcaaattttttaaaaccccaaatctacatattggtatatattaggcatatataaamtataagggagaagtcctgttcgacattgataacggccagggtgtggagtgggaggaccgtgtgttcttatttttcaagtaggaataaccaaaatgtagtaataggtagctttgttaagcatttactaaataactaggctaagcattttatgtgttttttctcagttattaatgtccagcaggttttcttcattgactttctcaatagcagtcacaccaaaggcaatgtgaccagggatagcaggggttagcaccactctgtaggagagctttcggacacagttgctcccaaatccaagaagtgaagttttcgttttttagaataaaaactctgaagcaataactctgatatttagtccaaacaaaccttccttcccacccttagcctgccaaccttcactctcaaactcagtcaaaatttttaatgtagaggtcgagacccaaaggacatcacactgactttgcagttaagagatggaagaagcata

SEQ ID NO: 609529 - DNA, 565 bp, Homo sapiens
gtccaattaaaagacaaaataatcaaattttttaaaaccccaaatctacatattggtatatattaggcatatataaactataagggagaagtcctgttcgacattgataacggccaggktgtggagtgggaggaccgtgtgttcttatttttcaagtaggaataaccaaaatgtagtaataggtagctttgttaagcatttactaaataactaggctaagcattttatgtgttttttctcagttattaatgtccagcaggttttcttcattgactttctcaatagcagtcacaccaaaggcaatgtgaccagggatagcaggggttagcaccactctgtaggagagctttcggacacagttgctcccaaatccaagaagtgaagttttcgttttttagaataaaaactctgaagcaataactctgatatttagtccaaacaaaccttccttcccacccttagcctgccaaccttcactctcaaactcagtcaaaatttttaatgtagaggtcgagacccaaaggacatcacactgactttgcagttaagagatggaagaagcata

SEQ ID NO: 609530 - DNA, 403 bp, Homo sapiens
atatgtatcaagagcctcaaaaatgttgattcctttattccccttttagaaatgaagcatggggaaatacagacagatgtagagaaagtttgttctaggatgttcacttataacagggtaatttatgctagaaaaattttggtcctgatttttattttaagttttattttaggtttaggggtatgtgtgcaggtttgttayataagtaaacttgtgtcatgggggtttgttgtacagattatttcatcacccaggtattaagtctagtacccactagttatttttcctgatcctctccttcctcccacccccaaccctctaagagggttgctcccctctgtgtgtccatgtgttctcatcattcagttcccaccaataagtgagaacatgtggtatttggttt

SEQ ID NO: 609531 - DNA, 591 bp, Homo sapiens
catttttcaatgagatttcaattaatcctctccatttggaccagtatttatataaccacatctgctttacttttctggtaaatcccaattttgtttgacttgatagtctgtctggacaactgaatcccaaagcctctcagaatctaagagaaagtttatagttttttctggacaagaactcaagttgttggtgccccaatttttttttttttaagcagaggcagtacttttgattctgtgaagaactttaaaaataaaacttgttcttgctgaatgtagataacattttagcaaarttgtcctttctaagaactataagcaaaacagtctatatcagtggctttcaaaatttttcactgcagcacacaataaaaattcattttatgtctcaacccagtttcatgaaacaaaactcaacattactttgttttggtgcattctgttattttctattctattccatttctttaaaaaaatgcgaccagaactggtggctaactcctgtaatcccagcactttgagaggctgctgttggaggatcaattgaggccaggagtttgagaccagcctgggcaacatagtgagaccttg

SEQ ID NO: 609532 - DNA, 648 bp, Homo sapiens
aaacaaagttagttggctgggtgtggtggctcatgcctgtaatcccagcaccttgggaggctgaggcaggtggatcatgagatgaggaaatcacaaccatcttggccaacatggtgaaaccccgtctctacaaaaaatacaaaaattagctgggtgtggtggtgcatgcctgtaatcccagctacttgggaggctgaggcactagaattgcttgaatccaggaggcggatgttgcagtgagccgcaaytgcaccactgcactccagcctggcgacagagcaagactccgtttaaaaaaaaaacaaaaaacaaaaaaaaaccaagttagttacttccaagacacaaaggggtcataggcactgactaaatactcgcattccagtatggagaaattggccaaaagaaagtggttacaggccccatgcaagtctgaaaccaagtagggcagtcattaaatgataaggcttcaaaataatatcccttgactgcatgtttcacatctagagcacactggtgcaagaggtgggctcccaaggtcttgggcaaccctgccccagtggctttgcaggggttattctacatgattgatctcatggacttctgttgagtgtttgtggcttttccaagcacatggtgcaagttacagtc

SEQ ID NO: 609533 - DNA, 648 bp, Homo sapiens
aaacaaagttagttggctgggtgtggtggctcatgcctgtaatcccagcaccttgggaggctgaggcaggtggatcatgagatgaggaaatcacaaccatcttggccaacatggtgaaaccccgtctctacaaaaaatacaaaaattagctgggtgtggtggtgcatgcctgtaatcccagctacttgggaggctgaggcactagaattgcttgaatccaggaggcggatgttgcagtgagccgcaactgcaccactgcactccagcctggcgacagagcaagactccgtttaaaaaaaaaacaaaaaacaaaaaaaaaccaagttagttacttccaagacacaaaggggtyataggcactgactaaatactcgcattccagtatggagaaattggccaaaagaaagtggttacaggccccatgcaagtctgaaaccaagtagggcagtcattaaatgataaggcttcaaaataatatcccttgactgcatgtttcacatctagagcacactggtgcaagaggtgggctcccaaggtcttgggcaaccctgccccagtggctttgcaggggttattctacatgattgatctcatggacttctgttgagtgtttgtggcttttccaagcacatggtgcaagttacagtc

SEQ ID NO: 609534 - DNA, 589 bp, Homo sapiens
agaggaccaatgcatgatgctagcaaatcttgcatgggtaaaaaactatttaaaccaacttcaagaaattaccagttgtcaactttcaataaagtataacagaaaatattcacaaatacgtgcaaaaactaaaaaaatacttctctcttttctaactatgtttctgtgtgaggctggattttctttatacacctcaacctgatgaacatattaaaacagattaaatatgggaatcaggtatgagaatttagctgacttctattgagtcaggtattaaagaaacttattaagagtgaaacaaagccactcttctcactttttaaaaracatagttacttttataaagaatatgttatttattataatagatatgggtttttcattattttaaaaataatttttactttgagaggctgaggcaggtggatcacaaggtcagcagattgagaccatcctgcccaacatggtgaaaccccgtctctactaaaaatgcaaaaattagccaggcgtggtggtgtgtgcctgtagtcctggctactcaggaggctgaggcaggagaattgcttcaacctgggaggcggaggttgca

SEQ ID NO: 609535 - DNA, 589 bp, Homo sapiens
agaggaccaatgcatgatgctagcaaatcttgcatgggtaaaaaactatttaaaccaacttcaagaaattaccagttgtcaactttcaataaagtataacagaaaatattcacaaatacgtgcaaaaactaaaaaaatacttctctcttttctaactatgtttctgtgtgaggctggattttctttatacacctcaacctgatgaacatattaaaacagattaaatatgggaatcaggtatgagaatttagctgacttctattgagtcaggtattaaagaaacttattaagagtgaaacaaagccactcttctcactttttaaaagacatagttacttttataaagaatatgttatttattataatagatatgggtttttcattattttaaaaataatttttactttgagaggctgaggcaggtggatcacraggtcagcagattgagaccatcctgcccaacatggtgaaaccccgtctctactaaaaatgcaaaaattagccaggcgtggtggtgtgtgcctgtagtcctggctactcaggaggctgaggcaggagaattgcttcaacctgggaggcggaggttgca

SEQ ID NO: 609536 - DNA, 552 bp, Homo sapiens
ttgcagtgagccgagattacaccattgcactccaacctgggtgatggaatgagactstgtgtccaaaaagaaagtggtgagggaagttgagaggagaggagaatgggcaggacctactacccctctcacttcctattgattcagttgttttaccttgcttaagcaaataaaagtttgaaactcatatttatttcctattgttgctataataaattaccacaaactttgtggcttgaaacaacagacatgcattatcttatagttttggggatcagaagtgtagaaatgggtcttatggggctaaagtcaaggcagggctgtgttccttctggaggctctaggggagaatctgttccttgcctttttcaacttctaggggctgtttctctcccttccttggctcatggcctccttcaataatgacatcactctgacctctgtctttgtagtcaaatctcctctctcttcagcttccctctttcatcttttaatgacccttgttattacattgggccctgtattacttcattctcacactactataaagaaata

SEQ ID NO: 609537 - DNA, 578 bp, Homo sapiens
tttctcctagatattatttttaacctagttccttttgatttgcaaacaaatctaataaggagtatatggctatttttgaagcccacctaagatggagaagtacttgggcagaaccagcttcaacaggaaaaaagctcatattcataaaataagtgtgaaaacagaattcagtaaaaccccttgataatgcaaattcaggaaaaacacaattggcagtttaaattatgtaccataagaacattgtgagaacttgataaagaccgttatgagmtatctgaaaataaattaaaattaaaattttttctttcttatgtcctttaattggatagtttttaaagtgtgtttaaaattcttaactttatttgaaactagcataaattgcctttatttccagttcattgttcaaatattgtattttgcaactgttgccaaaaatgcacatccataaataataattgatggtttgaaattaaataaaagaaaacgctgctagacttttagtctgaaatcttttaattacaaaacgttttcttttcttttttttttttttgctaggttgggtgttgaaaacaaagacg

SEQ ID NO: 609538 - DNA, 578 bp, Homo sapiens
tttctcctagatattatttttaacctagttccttttgatttgcaaacaaatctaataaggagtatatggctatttttgaagcccacctaagatggagaagtacttgggcagaaccagcttcaacaggaaaaaagctcatattcataaaataagtgtgaaaacagaattcagtaaaaccccttgataatgcaaattcaggaaaaacacaattggcagtttaaattatgtaccataagaacattgtgagaacttgataaagaccgttatgagatatctgaaaataaattaaaattaaaattttttctttcttatktcctttaattggatagtttttaaagtgtgtttaaaattcttaactttatttgaaactagcataaattgcctttatttccagttcattgttcaaatattgtattttgcaactgttgccaaaaatgcacatccataaataataattgatggtttgaaattaaataaaagaaaacgctgctagacttttagtctgaaatcttttaattacaaaacgttttcttttcttttttttttttttgctaggttgggtgttgaaaacaaagacg

SEQ ID NO: 609539 - DNA, 578 bp, Homo sapiens
tttctcctagatattatttttaacctagttccttttgatttgcaaacaaatctaataaggagtatatggctatttttgaagcccacctaagatggagaagtacttgggcagaaccagcttcaacaggaaaaaagctcatattcataaaataagtgtgaaaacagaattcagtaaaaccccttgataatgcaaattcaggaaaaacacaattggcagtttaaattatgtaccataagaacattgtgagaacttgataaagaccgttatgagatatctgaaaataaattaaaattaaaattttttctttcttatgtcctttaattggatagtttttaaagtgtgtttaaaattcttaactttatttgaaactagcataaattgcctttatttccagttcattgttcaaatattgtattttgcaactgttgccaaaaatgcacatccataaataataattgatggtttgaaattaaataaaagaaaaygctgctagacttttagtctgaaatcttttaattacaaaacgttttcttttcttttttttttttttgctaggttgggtgttgaaaacaaagacg

SEQ ID NO: 609540 - DNA, 552 bp, Homo sapiens
tttgcaccctgagactccgtaccacgatcctgtaacattagcaattatgaaaattattaaatggttgatatgaatgaaggagttagttctgttttctggtgtcacagggcaaaccaggaacagcccatgatgatgcaagcatacagatgcagaaggaaaaaatgagaatgacaaaagtcaaaaagaaaaaccaggaagacatccttgggagggctatgagttggtactaagatctaggctaaactgtaaaaagttaagggacagggaagccacagctagctagcatcaggttacactggttttccttgaatgtctttgcatttcaccagttccatttaaactgcagataggakagctgtctatactgccacatatttaagtaattatagtcatgtggaaccactataaatgactaaaccactaaaaaatgactaattttaaagaacatcagctgttttgctatgaacagtactcttatcctcattctttaggttagaaacccttctttggtaaggaactaattctgtaagatttgggtggggctaacacatc

SEQ ID NO: 609541 - DNA, 589 bp, Homo sapiens
agatcttctgagacctattcacaatcacaacaacagcacgggaaagacccgcccccgtgactcagtcatctcccaccaggttcctcccacaacacatgggaattatgggagctacaagatgagaattgggcagggacacagagccaaacggtatcagtcctaaacctctaatcgtcttttaccagcccccatcctgaagctacacagaagctgccagccaccagtcatttyattagcatacaaaaaaattattcctttggaaatcacaaggattttatgagttttatgccaggaaatggaatgaagaccaagtatagattttacagtatccagctatatttcaaggtagtcatatttgatgaagtaaaattcttttaaaagaatttcagctaagaaatgcagactcagatgaaataattaagctaaacctgtataatccaataccgtagccacaagccacatgtggccacttaaattcattaaataaaactaaaaattgagttttcagttttattaggcatattttaagtattcagtaggccacaggtggctaagggctgccatactggacagtatacagacagaacat

SEQ ID NO: 609542 - DNA, 414 bp, Homo sapiens
tcacatatttgaaaaagagaaatgagacctgtgtggtaaaacatagtgagcaagagagaaagctgcattgtaattattttctacttctgcataacaaattataacaaattgaacatcctcttactagctcacagttctataagtcagaagtctaggtgggaatgagtgtggtggctcatgctttaatctcaacaatttggaaggccaaggtgggaggatcrcttaagcccaggagtttgaacccagcctgggcaacatggtgcaaccccaactccacaaaaaaaattttttttcttaattagcctggcctggtggtacacgcctgtagtcccagttacttcagaggctgaggtgggacaatcacttgagcccaggaggttgaggctgcagtgagccatggtcataccactgtat

SEQ ID NO: 609543 - DNA, 581 bp, Homo sapiens
aagattttcttattcagggactcaggaccaataaattatttaaacatttaggctaactctgtcacagcttgggcaagagaaaactttaatcctgaagccatttttaacaattcccctcattttttwatatttctcacccagttatcaagtcatgtccattccacctcttaagcatcacatgaatttgtccacttctttcagctttcactgacctctccttgtccagaccattctcatcttttcatttgtattactgcaaaagaattctaactggctccctgactcaagtcttgctccctatgcgtttgctgcccagcatctatttctgcttctcttggtagcagtactcaaaatttcctttggagaaacaccactttcccattctcaaccatctaatttgggtgagatttaacctcatcctcagttccaagagtggattctggttagcttggctacctagtgaattcctattgatttccactgaattagtaaattcactaactcacttagtgaatttatctattcccttcacaatccttattattttaggccaatgagatcccataaaatgtttgttgggg

SEQ ID NO: 609544 - DNA, 581 bp, Homo sapiens
aagattttcttattcagggactcaggaccaataaattatttaaacatttaggctaactctgtcacagcttgggcaagagaaaactttaatcctgaagccatttttaacaattcccctcattttttaatatttctcacccagttatcaagtcatgtccattccacctcttaagcatcacatgaatttgtccacttctttcagcyttcactgacctctccttgtccagaccattctcatcttttcatttgtattactgcaaaagaattctaactggctccctgactcaagtcttgctccctatgcgtttgctgcccagcatctatttctgcttctcttggtagcagtactcaaaatttcctttggagaaacaccactttcccattctcaaccatctaatttgggtgagatttaacctcatcctcagttccaagagtggattctggttagcttggctacctagtgaattcctattgatttccactgaattagtaaattcactaactcacttagtgaatttatctattcccttcacaatccttattattttaggccaatgagatcccataaaatgtttgttgggg

SEQ ID NO: 609545 - DNA, 624 bp, Homo sapiens
ttataaagtcacattattgactgtaagatgctatcagagggccgggtgtggtggcttacacctgtaatcccagcactttgggaggccgaggtaggtgggtcacgaggtcaggagttcaaaaccagcctggtcaacatggtgaaacctcatctctactaaaaatacaaaaattaactgagcgtggtggtaggcacctgtaatcccatctactccggaggctgaggcaggagaatcatttgaacctgggaggcagaggttgcagtgagccaagatcatgccattgacytccagcctgggtgacaagagcaaaactctgtctcaaaaaaaaaaaaatgctatcagaaaactccagagtgctctctcttcgactgcacaggcagcaatgactactattaccacctggaccaaagggatcattcagaattggcacgagtttcaactttattctttacatggaaatgcatagattgccccttattggttgcctcatgtccccagaaaacatatattgaatccctaacctttggtaccagtgaatgtgaccttatttggaaatagagtccttgtagatataatcagattaagatgagatcattaaggtaggccctactccgatatgactgg

SEQ ID NO: 609546 - DNA, 610 bp, Homo sapiens
taaaaatacaaaaattagccaggcatggtggcacatgcctgtaatcccagctactagggaggctgagacagaagaatcgcttgaacctgggaggcagaggttgcagtgagccaagatcatgccactgcactccagcccgggtgacagagtgagactccatctcaaaacaaaaacataaaaaaaaagaaagtcagccaaacagtaacagcttcaccctaatcagctcatttcatatcaaccaatcagcaagtcttgctggagtatccacacttctacagataaagggcaagcacttcctgaacattcccactttgggaaaaatccaccaataccttagcatctccattcttcccaaaaccctatgtaagacaaagtctgggtcttatattcaggtcataaatagattttctcagaaaaatcacataatgattatgaatttgtcatttttacccagtgtattaacagtttttgctttatatgttttgyagctatgttgtgtggtgcaaaaaagattcaaggtcattccatgttttggtgtattgtacatataacatgaaacattctgtgttctactcagtgtctttgcacttaattcaattttgtgtgatat

SEQ ID NO: 609547 - DNA, 484 bp, Homo sapiens
tgtgggctggagaaggaccagctaaggacaatacacaccaaagtatggtggtggaaagcggcttgtcacttttctaggttagtattttcctggcatttcctgggcattcttttaaagtcctggaaatgtaaggcaaatggccttttatcactatggcaatttggtcaagaaaaatgtaagcaaaatctacatttccaaaaagcaatatcgtgtgtttattcatttttttttcttcttccagctgccacattaatgtcaggatgctccacaacggtgacaggtcatgagacttttcagattattttgctgtgaatttttaaatatttcaygtaaaccatagactgactgtaatgtttagtacagttttctcaccccataggtcctttgccaaataaaataccgggaaggaaagtctgagagatttttatgtgtggattctttttatcattccttaaaatatatttcctctcttagcaacaaagga

SEQ ID NO: 609548 - DNA, 484 bp, Homo sapiens
tgtgggctggagaaggaccagctaaggacaatacacaccaaagtatggtggtggaaagcggcttgtcacttttctaggttagtattttcctggcatttcctgggcattcttttaaagtcctggaaatgtaaggcaaatggccttttatcactatggcaatttggtcaagaaaaatgtaagcaaaatctacatttccaaaaagcaatatcgtgtgtttattcatttttttttcttcttccagctgccacattaatgtcaggatgctccacaacggtgacaggtcatgagacttttcagattattttgctgtgaatttttaaatatttcatgtaaaccatagactgactgtaatgtttagtacagttttctcaccccataggtcctttgccaaataaaataccgggaaggaaagtctgagagatttttatgygtggattctttttatcattccttaaaatatatttcctctcttagcaacaaagga

SEQ ID NO: 609549 - DNA, 559 bp, Homo sapiens
ccggccgcggtggctcatacctgtaatcccagcactttgtgagattgaggcaggcagatcgcttgaggtcaggagtccgagaccagcttagccaacatggtgaaaccctgtctctactaaaaatacaaaaactagccaggtgtggaggtgcrtgcctgtaatcccaactactcgggaggctgaagcaggataattgcttgcaagactacttcataggcagtggtgtgtactttctctgggaggcccataacgccttgtctctctctttttatgatattatcaactattgatgactattacctagatccaccaaattcattaggtgttcagaaattttcatattctaattctatactttgtcttcatatattagttgaaattcttctacaaaaagaaactctcatatcagttatttggttatcatgaggcacatagagtacacatacaaaggcaggataaataaccctttccttttattttaccacatttcaaagaaaaagatataacaaactttgaataagtagccttaaaagtaaatcatatttttatttcaaagata

SEQ ID NO: 609550 - DNA, 604 bp, Homo sapiens
tgtatttacataactaagaagggtcattaagtgattcttcctagaataaatagtatctcccacatgcttttaaagccacctctagatttaaaactaggtggcaacttttaaattgagtctttctcagcagagagtggtttgtttttctttgaaagtatatgctgaggcctttcaactaagacattaagttctttagaattgtgcacatagtaagtgctcaacaaataattgtatgagtggagaaagacttttccagattaagaagkgtgggtaaaaggatagatctaccccatgaaactctcctctctgtcatgggagccagtgggtagcccagctcagatcagatggacccagggatcaagagcaccgctattcggtgtggtccccagaccagcaccataagcacagtcagggaaattgtaacaaatgcaaattcacaggccccaccccaggcctactggatcagaatctgttttcacaaatcctctgggtggttcttatagacaataaagtttgagacccattcatctacagtagcccagtgtggactgtattaacacgagatgacatggggacccgtgctagttttaggccagaccagcaa

SEQ ID NO: 609551 - DNA, 602 bp, Homo sapiens
atctgacattagtatgggatatttgtcacaactaatgagacaatatcmgtacattttattaactaaagtccatactttattcagattgcctcagtttttacctaatgtctttttgttgttgccataggatcccattgaggatactgtagtagacttagttcttctgtgttcttaggttcctcttggctgtgacaatttctcagactttccttgtttttgatgatcttgacagttttgaggattattagtcaggcagtttgtaaagtgtccctcaacttggatttgtctgatgttttttgcacaggtagtctggggttatatgttttgagggaggaattcaacacaggtaaagtgccatttttgtcacatcatatcaaggtacatactatcaatacgatttagcactgtgaatattgaccttgatcactatggaggattggtttctccatggtgatcaaaggataccaaaatccatggatgcttagtccctgatataaaatggcataatatttgcaaataatctatgcacatcctcctgtatactttaaataatctctagattatccataatacctaatacaatggctacacatcaattcatt

SEQ ID NO: 609552 - DNA, 602 bp, Homo sapiens
atctgacattagtatgggatatttgtcacaactaatgagacaatatcagtacattttattaactaaagtccatactttattcagattgcctcagtttttacctaatgtctttttgttgttgccataggatcccattgaggatactgtagtagacttagttcttctgtgttcttaggttcctcttggctgtgacaatttctcagactttccttgtttttgatgatcttgacagttttgaggattattagtcaggcagtttgtaaagtgtccctcaacttggatttgtctgatgttttttgcacaggtagtctggggttatatgttttgagggaggaattcaacacaggtaaagtgccatttttgtcacatcatatcaaggtacatactatcaatacgatttagcrctgtgaatattgaccttgatcactatggaggattggtttctccatggtgatcaaaggataccaaaatccatggatgcttagtccctgatataaaatggcataatatttgcaaataatctatgcacatcctcctgtatactttaaataatctctagattatccataatacctaatacaatggctacacatcaattcatt

SEQ ID NO: 609553 - DNA, 578 bp, Homo sapiens
acttaatgccactgaactgtacacctaaaaatgactaggatggtaaattttatgttacgtatactttatcacaattcaaaatttttttcttgatattgatgccagggccagactaattgaatcagtctataagggttagggctggaggtttgctgttttgtaaaagctccttggcattttctgttgcacagacagcgtcagagtttgctctagaacaacacatccccactctggccctactccctggaaacactcctcttcagtaccaaaatgtcatttgctagtttgagtcaaaataagaatgaaaatcaatgacatcacctcctgcgaatattctcttgagtatatycttcttggagaagagaaaagaagattctgtcctggtttgccaacaagaaagagtcctctgtgttcttattctattctgaaacaaacctcactctgaattctctggcccaggaaaaaaagctgtggtatctggagaaagcaaatggatcccaggctccaatcaacggaagaatgcctggggaatcagaagaacattatggtgttgtataaatttctggtgaggtttcagc

SEQ ID NO: 609554 - DNA, 571 bp, Homo sapiens
ctgtgatttcgtttgccaccgaaaggtgagcctgtttattaggcatctgctagacaacagagaccactttacttaacctaaggtgggatcttagagacagcaggagtcacatgactgtctccggcagccttcacaatcttatgtgtagtcagctctgcaagtcctgctatgtggttcaactaaaactacagctggggatctgtccattaaagcgttgatatcctaataaatctgcccctccttcctagccccagagttcaggcttttcctgctcatctggacccttgaagcagctcctccctatcttgctgaaaaggtagagatctaatcataacactcccatgggctagaatcttcagcagctccctactatctgtaagcagctataatgaccttcaaggacctctgcagtgctgacttyacgtaacgatgtaattagatggtaagttctcttagggcagggactgtgtgtcttgttcagctttttatcagaaatggcaaagtggcttgtgcttcacaggtccagaagagtctcctgaactggattaaatccaaagtaaaaagaaaaata

SEQ ID NO: 609555 - DNA, 616 bp, Homo sapiens
ttaactagctctgtgatcttggagatattctctcttctgtaaaatgaaaatggggctaaatggtcactagtgtctctcagctttaaaaatctatgayttttaaaaggtagaataaacttttccaaagaactggagacactcaaatccatttctttccatttttttactgtgaatcttaaagatcaaagattttagcacagctcccattggggttcattcaacagacatgtgcttatcacagatcagtaaacttgaagggctgaccctgtgttcttattgataagtctgcaaacctctcttcatcctaggttttaaagtccacttttagaacaatactaaggagattgcttagacaagccttttgtcaatcctttctcctccccaggatataatccagtgaaaactgtccattagggctaattctgaagaataccattcctcctatagcagacgctataggtggcatgtcaccaagtcccctcttcagaactgacacacgcaacccccagctgctggggagagcagctactgatggcttacagctgcactcttcactaggctttcccagtgccacagggaatcacctcacccaagtttatgccctgtgggagaatta

SEQ ID NO: 609556 - DNA, 580 bp, Homo sapiens
gcaccagcctcaactgccatcactcccagcttgactacagctgcgtagccctgcacgattcaggctgatcctggctttgctctggttatttcagcctagaacgcccttcctactcatcctgcccatcctttaagacccagttgaggtcccatttaggaagctgattatggcctgtctccacctaatcagcagcgcacacacacacacacatactccaagctgggttaggtacccctcctcaagggtccgcatacggatgctggggtcataatgctcttacaccactttacattattttgcagtgatctatctttgacacagggcctgaaagaatacyacagtctagggccagcctggtatagtggtgagtgtggactctggagctagcagtctgggttcatgtcccagctctgctgctacctagtttgtaaacttgggcaagttacttaacctctctgtgcccaaatttcatcagctgtaaaagaaaaaaaaaggtaatttgagatatctacttcatgacattgttgtgaagatgaaatgagttgatacctgctgtatgtatgatataaacgtttgctat

SEQ ID NO: 609557 - DNA, 514 bp, Homo sapiens
ttttatgcctcaattaacagaataagctgtgtgtgcatatgaatgctgcacatccaattacttttttcagcggtatggaaatggtaactggaccctcgtctggaagctttgccactgtggctatcacattcaaagggaaaacgtgtatctaggaaaccagctatgctgaaggtgaattttctcagggatcagtttttttctaccaaggaatcatgtcctttttgggagcagggattctttcagccttaaaagaacaatgatttttatagtacacaaatcaaaactttattttttggaaaacaattattgatcaacatgtatcatcagcaatgcagcaaagtctccagccagactgcagagatttaggctgctcaattctccagtggccctgggggttgagagatccatagtgattgctacttgcaaagctctattaatgacacaactttttccatgctttcatastaaaatacaaaagtatgccaaagaaaccacaaaagtgatatgtaaaaag

SEQ ID NO: 609558 - DNA, 514 bp, Homo sapiens
ttttatgcctcaattaacagaataagctgtgtgtgcatatgaatgctgcacatccaattacttttttcagcggtatggaaatggtaactggaccctcgtctggaagctttgccactgtggctatcacattcaaagggaaaacgtgtatctaggaaaccagctatgctgaaggtgaattttctcagggatcagtttttttctaccaaggaatcatgtcctttttgggagcagggattctttcagccttaaaagaacaatgatttttatagtacacaaatcaaaactttattttttggaaaacaattattgatcaacatgtatcatcagcaatgcagcaaagtctccagccagactgcagagatttaggctgctcaattctccagtggccctgggggttgagagatccatagtgattgctacttgcaaagctctattaatgacacaactttttccatgctttcatactaaaayacaaaagtatgccaaagaaaccacaaaagtgatatgtaaaaag

SEQ ID NO: 609559 - DNA, 462 bp, Homo sapiens
catcagggtggcttttcttcagctaaagctaattggctttcaaacaacccattgggtttttaaattcattgtttaaaatgctgaatattataataaatactgtttggtccaagagaagacttggaaatagcttagagatgagtagggagccagccatactagccttctttgggtttctccaaagcctctctgcctcaggktctttgcattctgaatggtagaccattcagtctacccagaatgcctttcccaccctccctccccaccttcttcacctgaccaactctcacctatcctttggatttctgctcaaatagcattttttgactctttagaatagttacagcttctgagaactctttccatatttccttcaaaataactatctcagcttgtaatgaaatatctggatttttaaaaattaatgaatttccctctttcttctactcactgtctctaatt

SEQ ID NO: 609560 - DNA, 609 bp, Homo sapiens
tctggattatacaagaattttttaaaaaaccaataataaaccaaatagttaaatagaaaaataggcaaaagataacagcaattactttactttaaaaacccagaaatgttgaataaatacagcaaactgctcatctttatttgcaatttggaaaatrcatgtcagtaacacaatgagagattattttacaactgaaaagttagcaaaaataaaaatttggcaaaacctagtgttggtgaggaagtggaacaatgtgaatgagttgaacaactcaaaaacattttgaaaagtgacattattttataaagctgagtaagcatgtactttatgacccagttctaattccaggtatatgccgtagaaaaaaatgtatatataccctagagaaaatatatgatacagacaaaatatacaagaatattcaaagcagccttattcataaggtcagataggtagataggtggatagatgacagatgatagatagatagatagatagatagatagatagatagatacatagatagatacatagatagatgatggatgggtgggcagatggagacaaagaaaaccacattttccttaataggaaagcaaataaattttt

SEQ ID NO: 609561 - DNA, 609 bp, Homo sapiens
tctggattatacaagaattttttaaaaaaccaataataaaccaaatagttaaatagaaaaataggcaaaagataacagcaattactttactttaaaaacccagaaatgttgaataaatacagcaaactgctcatctttatttgcaatttggaaaatgcatgtcagtaacacaatgagagattattttacaactgaaaagttagcaaaaataaaaatttggcaaaacctagtgttggtgaggaagtggaacaatgtgaatgagttkaacaactcaaaaacattttgaaaagtgacattattttataaagctgagtaagcatgtactttatgacccagttctaattccaggtatatgccgtagaaaaaaatgtatatataccctagagaaaatatatgatacagacaaaatatacaagaatattcaaagcagccttattcataaggtcagataggtagataggtggatagatgacagatgatagatagatagatagatagatagatagatagatagatacatagatagatacatagatagatgatggatgggtgggcagatggagacaaagaaaaccacattttccttaataggaaagcaaataaattttt

SEQ ID NO: 609562 - DNA, 403 bp, Homo sapiens
tgcacatttttcccaatgaatgtcctcatcaggrcgctatttcttatgctgtcattatccagagatgccttcttcataggaatcatgctgctctcaagtgtatacatggtcattcttttgtccaggcatcagaggcactcccagcactttcacagcagcagccttatattaaggacttctctagtgaaaatggccaccaagaccatcctgatgctggtgaattcctttgtgctgaagtactcagtggacttcatcctatcatcatccacaatgctgttatgggtaattgagccctgtcacctatggagtccacaagtttgaggtcaatgcctatgccactgtcagacctctggtgctaatcagatctgataaaagaatcatcaatattctgcaaaagtttcaa

SEQ ID NO: 609563 - DNA, 403 bp, Homo sapiens
tgcacatttttcccaatgaatgtcctcatcaggacgctatttcttatgctrtcattatccagagatgccttcttcataggaatcatgctgctctcaagtgtatacatggtcattcttttgtccaggcatcagaggcactcccagcactttcacagcagcagccttatattaaggacttctctagtgaaaatggccaccaagaccatcctgatgctggtgaattcctttgtgctgaagtactcagtggacttcatcctatcatcatccacaatgctgttatgggtaattgagccctgtcacctatggagtccacaagtttgaggtcaatgcctatgccactgtcagacctctggtgctaatcagatctgataaaagaatcatcaatattctgcaaaagtttcaa

SEQ ID NO: 609564 - DNA, 588 bp, Homo sapiens
  misc_feature 379: n = A,T,C or G
cagtcaatgttatatttaaaaattctctttgatctagcaaaaactttatagcaaagattctctcttaaatgtgaaagacattataaagatttattacattattgtttgtaccagagagattgaaaaaatataaatattcttcaatgagagatgaattaattaaattatgctataaccatacaaatttcatagaactgtgataaccagtgaggaaacttatctttaagtatgaacactttattgaatttatagaaatctatggaacttggagctttattaaaaaaaagttccaacagcaagaaatagtcaataattcagtaaaaatatgatactatagttttaaaatacggagattttatctacatacatgtatatattnatatgatctagacttcttcagtttatatcctgcttctaccacttagctctctgagtgatctcttgtacaagatataaaaactttctgtgtcatagttgtctcattaataaaaagctgataataatgacaccaatataatgaggattaagctccaracactgctcttggtacaggagctatatgttagtttcagtgtcataataattact

SEQ ID NO: 609565 - DNA, 577 bp, Homo sapiens
acacaacacttaaaatgcaaaggattcaaycaaatataccatgtcataccatactaagaaccaggaaaatctgaacaggaatttgaaaatatagtcaaaaggtgcaaacaatgagaattcatagaggtcataattatctatcaaagattttaaactatatattataaaactgcgtcaacaagcaattacagctggacacagtggctcacgcctgtaatcccagcactttgggaggcagaggtggttggatcacttgaggtcaggagttcgagaccagcctggccaacatcatgaaaccccatctgtactaaaaatacaaaaattagccaggcatggtggttcacgccgtgattccagctacttgggaggctgaggcatgagaatcacttgaacccaggaagcagaggttgcagtgagctgagatcattctactgcattccagcctgggcaacagagcaagagtctgcctcaaaaaaaaaaaaaaaagcaattacaaacttaattttgaaacaaaggaaacaatacaaagtttcacaaagaaatcaagaaagaaacaaataccaagttgaaaattaaa

SEQ ID NO: 609566 - DNA, 577 bp, Homo sapiens
acacaacacttaaaatgcaaaggattcaaccaaatatamcatgtcataccatactaagaaccaggaaaatctgaacaggaatttgaaaatatagtcaaaaggtgcaaacaatgagaattcatagaggtcataattatctatcaaagattttaaactatatattataaaactgcgtcaacaagcaattacagctggacacagtggctcacgcctgtaatcccagcactttgggaggcagaggtggttggatcacttgaggtcaggagttcgagaccagcctggccaacatcatgaaaccccatctgtactaaaaatacaaaaattagccaggcatggtggttcacgccgtgattccagctacttgggaggctgaggcatgagaatcacttgaacccaggaagcagaggttgcagtgagctgagatcattctactgcattccagcctgggcaacagagcaagagtctgcctcaaaaaaaaaaaaaaaagcaattacaaacttaattttgaaacaaaggaaacaatacaaagtttcacaaagaaatcaagaaagaaacaaataccaagttgaaaattaaa

SEQ ID NO: 609567 - DNA, 577 bp, Homo sapiens
acacaacacttaaaatgcaaaggattcaaccaaatataccatgtcataccatactaagaaccaggaaaatctgaacaggaatttgaaaatatagtcaaaagrtgcaaacaatgagaattcatagaggtcataattatctatcaaagattttaaactatatattataaaactgcgtcaacaagcaattacagctggacacagtggctcacgcctgtaatcccagcactttgggaggcagaggtggttggatcacttgaggtcaggagttcgagaccagcctggccaacatcatgaaaccccatctgtactaaaaatacaaaaattagccaggcatggtggttcacgccgtgattccagctacttgggaggctgaggcatgagaatcacttgaacccaggaagcagaggttgcagtgagctgagatcattctactgcattccagcctgggcaacagagcaagagtctgcctcaaaaaaaaaaaaaaaagcaattacaaacttaattttgaaacaaaggaaacaatacaaagtttcacaaagaaatcaagaaagaaacaaataccaagttgaaaattaaa

SEQ ID NO: 609568 - DNA, 577 bp, Homo sapiens
acacaacacttaaaatgcaaaggattcaaccaaatataccatgtcataccatactaagaaccaggaaaatctgaacaggaatttgaaaatatagtcaaaaggtgcaaacaatgagaattcatagaggtcataattatctatcaaagattttaaactatatattataaaactgcktcaacaagcaattacagctggacacagtggctcacgcctgtaatcccagcactttgggaggcagaggtggttggatcacttgaggtcaggagttcgagaccagcctggccaacatcatgaaaccccatctgtactaaaaatacaaaaattagccaggcatggtggttcacgccgtgattccagctacttgggaggctgaggcatgagaatcacttgaacccaggaagcagaggttgcagtgagctgagatcattctactgcattccagcctgggcaacagagcaagagtctgcctcaaaaaaaaaaaaaaaagcaattacaaacttaattttgaaacaaaggaaacaatacaaagtttcacaaagaaatcaagaaagaaacaaataccaagttgaaaattaaa

SEQ ID NO: 609569 - DNA, 633 bp, Homo sapiens
tcatctgagaaaaggcaagtccctttcacctatgagcctataaaatcaaaagcagattacttacttactagataaaatgaaggtacaggaattgggtaaatacaagcattccaaatgaaagaaattggcccaaacaaaggggctacaggccccatgcaaatctgaaatccagcagagcagtcaaatcttaaagctccaaaatgacctcctttgactccgtgtttcacatccaggtcacaytgatgtaagaggtggagtccgatggccttgggcagttctgcccctgtggctttgcaggatatagccccactcttgtctactttcagggctggcattgagtgtctgtggcttttccaggtgcatggtgcaagctgttggtggatctaccattctggggtctggaggatggtatcccccttcatgcaacttcactaagtggtgccccagtagggactctgtgtgggggctctgatcccacatttcccttctgcactgccctaccagaagttctccatgagggcccctcccctgcagcaaacttctgcctgtgtatccaggtgtttccatacattatatgaaatataggcagaagttcccaaacctcaattcttgacttctgtgcacccacaggct

SEQ ID NO: 609570 - DNA, 617 bp, Homo sapiens
ctgaggttttaccaaatttccgttatgagaaaagacatagctttacacacgaggtcataatacagtaatatttatcaacttagaaagctaaaacacattctcaaatatttcgatttgtaactggtgcgatgcaatactgaaagcctaggaaagtaatttgtatgtggaaactgcctcaaagttgaaggtgggaaagttggttctacttcctatggtgtacctmcttgttcactataaaacccttcggttttcttaattatcaaaaatatcttgtatatattcacagtgctaattcagtaggttagtcctgtattggctagtgtgatttttcagaccaagaagcgactgtacttccaaatctcatttgcgttttttgacacaggaagagaaaacatccgagggagttaaggttttctcactttttatacaattacaaaaatttaccaattactatgggcagcaattagatagaagaagggcccaagattcataatgccctagaaaaggtagtaatgttcagtaggattaaacttactaaacttcttgactgctacataagttaccaaggattacctttgaagatttcaataagtaattgaaacaattagataatagct

SEQ ID NO: 609571 - DNA, 595 bp, Homo sapiens
caggactatcagggctggggtggagatggcaggaggttggagatgaggtcagggctgtgtccatctgagcagagcctggggcggtaccctctctgtgctggtctgtacctcacactgtaagtcactggatcccacggcttatttggccctccagaacatcaggaggtcccccaccaactctggtgcgaggtgacaggtgcagatgagttgatgcagggcttaactctcctgaycccccatgacaccggaactctcctgatcccatcaccgaagaaccaagctgtcccccactctgcccctgagagatcaagctctaatcatggcctcccttgctcacacattctccatggttccacattggccttgtgagaaaatttctgcatccagcctgacattcaaacaccttgccctaatcagctcctgcctacttctctctatctttgacaaatatttctgtctagaaggtccttttttcccttcttcacctagccaactcctattcacacttcagaactcagctcaggtcagatgaggtggttcatgcctgcaattccagcactctgagaggccaagacaggaggattgcttgaaccca

SEQ ID NO: 609572 - DNA, 595 bp, Homo sapiens
caggactatcagggctggggtggagatggcaggaggttggagatgaggtcagggctgtgtccatctgagcagagcctggggcggtaccctctctgtgctggtctgtacctcacactgtaagtcactggatcccacggcttatttggccctccagaacatcaggaggtcccccaccaactctggtgcgaggtgacaggtgcagatgagttgatgcagggcttaactctcctgatcccccatgacaccggaactctcctgatcccatcaccgaagaaccaagctgtcccccactctgcccctgagagatcaagctctaatcatggcctcccttgctyacacattctccatggttccacattggccttgtgagaaaatttctgcatccagcctgacattcaaacaccttgccctaatcagctcctgcctacttctctctatctttgacaaatatttctgtctagaaggtccttttttcccttcttcacctagccaactcctattcacacttcagaactcagctcaggtcagatgaggtggttcatgcctgcaattccagcactctgagaggccaagacaggaggattgcttgaaccca

SEQ ID NO: 609573 - DNA, 616 bp, Homo sapiens
aaacatgccaagctctgtatcaatcagagcccagctgactcagaacacttcactataccattccggcccttcaataaatgtctggcattttctttctttctttctttttttgagatggagtctcactctgtcacccaggctagagtgtggtggtgtgatctcggctcactgcaacctctgcctcccaggttcaagcaattctcctkcctcaagcctcctgagtagctgggattacaggcacgcgccaccacgcccggctaatttttgtattttaggagacaatcaccatgttggccaggctggtctcaaacacctgacctcgtgatccaccagccttggcatcccaaagtgctgggattacaggcgtgagccaccacggccagccatgtctggcgttttctaacccttcaggtatggccttacatattttctcatcaggagacctttccttagtgctcccagtgaaccatcatctctcttaccacaccattagtgcctctcattgcatcaccacctaggacgttttattgtttgtaattttatttagtggtaggcagtggggcaagagatacctaaattacttctctcaatatttccattggtttttctctgagat

SEQ ID NO: 609574 - DNA, 616 bp, Homo sapiens
aaacatgccaagctctgtatcaatcagagcccagctgactcagaacacttcactataccattccggcccttcaataaatgtctggcattttctttctttctttctttttttgagatggagtctcactctgtcacccaggctagagtgtggtggtgtgatctcggctcactgcaacctctgcctcccaggttcaagcaattctcctgcctcaagcctcctgagtagctgggattacaggcacgcgccaccacgcccggctaatttttgtattttaggagacaatcaccatgttggccaggctggtctcaaacacctgacctcgtgatccaccagscttggcatcccaaagtgctgggattacaggcgtgagccaccacggccagccatgtctggcgttttctaacccttcaggtatggccttacatattttctcatcaggagacctttccttagtgctcccagtgaaccatcatctctcttaccacaccattagtgcctctcattgcatcaccacctaggacgttttattgtttgtaattttatttagtggtaggcagtggggcaagagatacctaaattacttctctcaatatttccattggtttttctctgagat

SEQ ID NO: 609575 - DNA, 588 bp, Homo sapiens
tatgattattaaacgtatgtgacagtatttaagcactttaaatactgcttttaagggtttcctatctcaagaaatttgctcctctataaatcttatattgtactaatatcctgcttttgtcttgaaaaagtaaaacataaaaatatatgcatttaatttaaaagacaatttatactgttcacacagattataggttcaactgattcatttggtctgatgatttaaaaagctgagaactggagcttttagtaaaaaattattatcctattctgttctttaccgcattctcgtgtcactctgtgctcactcatatacaaaatgacattatctccttatagccgaaagaaacaaaacaagtgtcatatttaatgcaattggtrataatcgagagtcagcactgctcactttcaagcatttcaggatagaggctttctggggaaccttttaagtggtatcgtgtgcttggttttaaatatggacaggtctcaatacttcactagttgtatctaaggttcttggttttttctttttaagaactcagtcttaataaaacttacatatttgaataaagtgtcatggccactgaaa

SEQ ID NO: 609576 - DNA, 588 bp, Homo sapiens
tatgattattaaacgtatgtgacagtatttaagcactttaaatactgcttttaagggtttcctatctcaagaaatttgctcctctataaatcttatattgtactaatatcctgcttttgtcttgaaaaagtaaaacataaaaatatatgcatttaatttaaaagacaatttatactgttcacacagattataggttcaactgattcatttggtctgatgatttaaaaagctgagaactggagcttttagtaaaaaattattatcctattctgttctttaccgcattctcgtgtcactctgtgctcactcatatacaaaatgacattatctccttatagccgaaagaaacaaaacaagtgtcatatttaatgcaattggtgataatcgagagtcagcactgctcactttcaagcatttcaggatagaggctttctggggaacsttttaagtggtatcgtgtgcttggttttaaatatggacaggtctcaatacttcactagttgtatctaaggttcttggttttttctttttaagaactcagtcttaataaaacttacatatttgaataaagtgtcatggccactgaaa

SEQ ID NO: 609577 - DNA, 588 bp, Homo sapiens
tatgattattaaacgtatgtgacagtatttaagcactttaaatactgcttttaagggtttcctatctcaagaaatttgctcctctataaatcttatattgtactaatatcctgcttttgtcttgaaaaagtaaaacataaaaatatatgcatttaatttaaaagacaatttatactgttcacacagattataggttcaactgattcatttggtctgatgatttaaaaagctgagaactggagcttttagtaaaaaattattatcctattctgttctttaccgcattctcgtgtcactctgtgctcactcatatacaaaatgacattatctccttatagccgaaagaaacaaaacaagtgtcatatttaatgcaattggtgataatcgagagtcagcactgctcactttcaagcatttcaggatagaggctttctggggaaccttttaagtggtatygtgtgcttggttttaaatatggacaggtctcaatacttcactagttgtatctaaggttcttggttttttctttttaagaactcagtcttaataaaacttacatatttgaataaagtgtcatggccactgaaa

SEQ ID NO: 609578 - DNA, 562 bp, Homo sapiens
cttgacttcctgtgttcaagcaatcctcccacctcagcttcctgagtaacttggactacacgcgtgcatcatcacacccggctaatttttttcattttttttttttgtagagacagggtcttgctatgttgcccaggctggcctcgaactcctgagctcaagcaatcctcctgcctcagcctcccaatgtgctccaattataggcaggagccaccacacttggcctgcttcctcagacttctttacaacactgagttcctaaagataatgaaaaatwtgtaaagactttcagaggggaagcataatcaagaatttcattcccagccaaagtggtgttcacgtgtgaaggcaaagactgagaaaggaaactactcatggatacgtggctgactgaaggaattcaaaataaagaactaaaaagtaggaaagccaaaataaattaagtatagaagcttacatataaataactcctgtaaatataatcacaaaactcaatgtaaaaacaaaaccattgaacataagggaacacagggtaaagaaaatgaataattacgtgtaagta

SEQ ID NO: 609579 - DNA, 155 bp, Homo sapiens
agctatcatcatcatcatattattattatttgatatgtcattgtagagagttcaagtggtctgcctagtttctaaggaagaatatggatagatcccacactggaatgagaygttccaggctgcccaaggtattgcctttgacatttaagtggtag

SEQ ID NO: 609580 - DNA, 591 bp, Homo sapiens
tgcagaagaatatttgatataatattaagaaaatatagagttgtttttcacaaaacctgtcacataatcacccccaaatttgctccagtttaccttcagtgccatattattatgtttcctgtgtgtgccatgatwtttttttaaaagattgagtagccctgatacagagaaataagtaggctaaaaacaggtccttatggaatatctaccttgcaagagaggggttgatgaagaagagagcaagagcagctatccggcatttgggaaacagactcctcctcataaggtagaaaattccctgaattacatttacagctgggctgccaaaacagatgacagctgtccacaatagatcaataatgtcaaatgccactgagagatgaagtaaaggatgaaaaacatccactgaatttggtaattaggaagcactacagaccaagtatggtggcacatgtctataaacccagcactttgagaggccagagcaagaggattgcttgagcccaggagttcaagaccagcctgggcaacatagggagatcctagctctacaataattttttttagttagctggacatggtgatgcatga

SEQ ID NO: 609581 - DNA, 579 bp, Homo sapiens
cagaatgtggagaaaagcgaacttcactgagccaaaggatgatgttgtagcccaatgcaaagaagctaagaatcataataaaacaatgcatgttctcacttgtaagtgggagccgaataatgaaaatacatggacacattgaggggaacaacacacactggggcctgtcagagggtgggggttgggaggagggagaggatcagaaagaatagctaatggatgctgggctcaatacctgggtgatgggatgatctgtgcagcaaaccaccatggcacacatttgcctatgtaacaaagctacacatactgcacatgtgtccctgaatctaaaataaaagttggaaataaaaataataattattgttattcaaaaggattttatcagaactaaatgaggtgtattgaagtgctttagaaattataaaacctcatactatattgaagatattatcgaatatggtgagcaagaaaggtttgagtagaacagtttgggtattcttggaagacaatgcactctctgctacrtggtacagcagatactttccccatgattgtaactatgtatgcagatgtagaaag

SEQ ID NO: 609582 - DNA, 516 bp, Homo sapiens
gcaccagtatgtcactggctttatgtctcctcctttcacagatacataaatcctcatgatccttcccccaaattcctgactcctttcctgcttggaagtttttctctttattctgcttggcagccaaaaaattctctttatcataagtgataagaataaaaatactattctgatgttaaagaaggaatgccgtagtttctgaagtgaaattggacacaaagtgcttatagtgtcaatttgcaaagccgttgaaagttttcagaacttctgtaatttccacagttcatctgagccatttyttcccccaatctgatttggcctgcttttccagcattcagcatgttcatttcttatttaatagttttattgaatgatgaatgtgaattatttcgattttcatcgcatatgtatcttctgtcatctaacatggtaacgtgacactgcttctgcaagaaaatacattctcatctacagatacacaaattttgataaaaatctagttaaaagatctagcaa

SEQ ID NO: 609583 - DNA, 590 bp, Homo sapiens
aacaaacaaaaattatcagtatgttcttactaatctattgattgtattatcctgctccctattggctaaaatcaagtcaccctgctggtgcgtagttattaagccaacttgtatcctcccttgaatattaattatgctcctattgtgcactcttcttcctatatattactgtaccctcttcattttagtctaggcacagggtctctggagttgcaaaatcctggtcaacttctccaacatctcagtaaaggagaattcatttctaactgctggatctgccaccagcaccatcagctctcttcaggggttcttttcatggcccctttaatcccatctacccttaacctgaccatacattgtttaaatagaggccagckgtctaaacccaatcctttaactttcagactgcctcctactcatcaagtttctttctttaatcttaccccatgtaaaaactattctgttgctttaggaaatgaggaattaaacttcacctgagcaaggtggattccttgcaattttccttcttgttacaactttacttggcaccccacctctaacttaaatacctgtacatataacttaactca

SEQ ID NO: 609584 - DNA, 441 bp, Homo sapiens
acatggagcaatatgcaaacaattatcaggagcattgcttgctatcccccaactgcacaattcataacctgaatctcataattctcaatcacactcaggagggcattcacatctgtgccactccaagaattgtttctctttgtggcaatgctcataactgcctcctgtggcccactgcccactctccttatacttttattctgctggagcaagcctattcttgcatagacaatgtataattaatargtgagtcatccttgagaatgatagggttaaatggaataaccatccataactctaccgctcaacatgaggcccctattctagcaaggcaagggcttagcatggtcatagcaggaagaggcctatttgcctagcgggcccttggagaagtttcacctaccctaaggtcaccttacacaatctgacacaacagattgg

SEQ ID NO: 609585 - DNA, 601 bp, Homo sapiens
tattccatagtttgaagaaccctcccgaatattttatgtcccccaccagtacctgggaccagactaattaagcagtgacatctaaacggtacactccaagaccaaacctgttttcctcatgatgccagataataaatgcacatacttgaatttatcaaatgccctcattcatggctgaaaacagccaagaccaacagtgctcacagtgctgagcctggactgtgactaatttggtgccatctccacatccactttggtgcaaatatttagcacatataaatatagctttatcattktttacaaatgtattgttaataaaatataaacataactttaaactatgagtaattttgtgttttacttaaaaaaacattattttagaagcaaaagaagtatttgaaaagaatatgttgttcagttatttaacagagtgtagacaataccattttcactaatatatcaattttttcagataaatatttttaattatcattcactacaatgtttagcttttttaatccacataattttaataggtagtagtgacttccaaaattaggtttgccaaattacagtatcacatcaatgttcttaatatcct

SEQ ID NO: 609586 - DNA, 561 bp, Homo sapiens
atattgtctttttactaatcgaatgttgccttttccaaaactacctacagcctgcttggcccccgcatctkgtgcttataaagaccccagactcagctggtacaggggagaagaggctggacatcagggagaggtgacttggcttcagagatgatgccagatattagagagaggctacttgacttcagaggagaaaggcagagaggtagcttgactttaggggagagtgacatgcctttcctgtcgtctttccagctaccctctctgccgagagccactttcattacttactaaaattctccacattcaccatccttcaattcatctgcatgatctcattcttcttgggtactggacaagaatttgggatgcagcaagtgcaagtacccaaaaagactgttacactggccctttgccctcactggcagagagcagtcaccccatgtaacgaggcaaagatccactgagctgataatacatttctgtccgtgggcagtggagctaagataacattgtaaaacactctctggggccttggggtcacaggcactcccacctgga

SEQ ID NO: 609587 - DNA, 601 bp, Homo sapiens
tctttcccaaatgaggaccattgattttcttagggagtctcctggtgggatgcatatctgctatagtttcagctggctactttagagcactactaaggttgcttattcccagactcctttaaataagtagtgaggatgatcagggtaacagggtgtatttgttcttgcactgttataaagatatacccaagactgagtaatttagaaagaaaaaagtattaattggctcacagttctgtgggctgtacaggcttctgattctggagaggccttaggaaacttacaatcatggcagaagttgagggggaagcaggyacatctttatgaggccagcaggagagagaaagagagtgaagtgggaggtgctacatacttttaaacaatcagatctcatgagagctgtatcataagacagtactagagagatggcagcaagccattggaaaccacccccatgatccagtcacctcccaccaggccccacctccaacattaggaattataattcaacaagagctttgggtgaggacagggaactaaactatatcatagggttacttgtctcactttagtctctcgtgaccccaatactctgaagctt

SEQ ID NO: 609588 - DNA, 601 bp, Homo sapiens
tctttcccaaatgaggaccattgattttcttagggagtctcctggtgggatgcatatctgctatagtttcagctggctactttagagcactactaaggttgcttattcccagactcctttaaataagtagtgaggatgatcagggtaacagggtgtatttgttcttgcactgttataaagatatacccaagactgagtaatttagaaagaaaaaagtattaattggctcacagttctgtgggctgtacaggcttctgattctggagaggccttaggaaacttacaatcatggcagaagttgagggggaagcaggtacatctttatgaggccagcaggagagagaaagagagtgaagtgggaggtgctacatacttttaaacaatcagatctcatgagagctgtatcataagacagtactagagagatggcagcaagccattggaaaccacccccatgatccagtcayctcccaccaggccccacctccaacattaggaattataattcaacaagagctttgggtgaggacagggaactaaactatatcatagggttacttgtctcactttagtctctcgtgaccccaatactctgaagctt

SEQ ID NO: 609589 - DNA, 611 bp, Homo sapiens
taagtaagttatcctttcattgtatatgataaccagaagtcattgtgaaatttaaaaaaagactcaaaagttgtacctatgaggtattctgactaatacataattttagccaggatctggatgaaaaagaaactaagcagaaatttatcagtgtatgaacactgccagttctattaaatcacatagacttcaattttttctctctattctaaaaattcgaggtatctgtgaattttatcaggtagtgaagccattgcagagtatgactgtattcatcctttatgagtttcrttggaaaattccttgggttagccacttatggacctaatggtgcctgctgcatttgggtgtaattggcagggaataactagaaaatcatatattgggattggcaatagctaggaagagcattcaatgttaagattgcattaagtatgtttacatctcatatagatcatgtgatagaagttgtcattcagtgccttcatatctatgctagtcacccattaaggatatagcactttattatactgaaaccgttatattgattcaccatgggagtggtagggagtcgaataaattgtaagctggtcaagatttatatggcaata

SEQ ID NO: 609590 - DNA, 611 bp, Homo sapiens
taagtaagttatcctttcattgtatatgataaccagaagtcattgtgaaatttaaaaaaagactcaaaagttgtacctatgaggtattctgactaatacataattttagccaggatctggatgaaaaagaaactaagcagaaatttatcagtgtatgaacactgccagttctattaaatcacatagacttcaattttttctctctattctaaaaattcgaggtatctgtgaattttatcaggtagtgaagccattgcagagtatgactgtattcatcctttatgagtttcattggaaaattccttgggttagccacttatggacctaatggtgcctgctgcatttgggtgtaattggcagggaataactagaaaatcatatattgggattggcaatagctaggaagagcattcaatgttaagattgcattaagtatgtttacatctcatatagatcatgtgatagaagttgtcattcartgccttcatatctatgctagtcacccattaaggatatagcactttattatactgaaaccgttatattgattcaccatgggagtggtagggagtcgaataaattgtaagctggtcaagatttatatggcaata

SEQ ID NO: 609591 - DNA, 611 bp, Homo sapiens
taagtaagttatcctttcattgtatatgataaccagaagtcattgtgaaatttaaaaaaagactcaaaagttgtacctatgaggtattctgactaatacataattttagccaggatctggatgaaaaagaaactaagcagaaatttatcagtgtatgaacactgccagttctattaaatcacatagacttcaattttttctctctattctaaaaattcgaggtatctgtgaattttatcaggtagtgaagccattgcagagtatgactgtattcatcctttatgagtttcattggaaaattccttgggttagccacttatggacctaatggtgcctgctgcatttgggtgtaattggcagggaataactagaaaatcatatattgggattggcaatagctaggaagagcattcaatgttaagattgcattaagtatgtttacatctcatatagatcatgtgatagaagttgtcattcagtgccttcatatctatgctagtcacccattaaggatatagcactttattatactgaaacygttatattgattcaccatgggagtggtagggagtcgaataaattgtaagctggtcaagatttatatggcaata

SEQ ID NO: 609592 - DNA, 499 bp, Homo sapiens
tattggtgtcattattggttttcattgctcccagtttggggctaatactaaaatatgatgtgaacattcttatccatgtatttgggtgaacttatgattacatttgcgtatattattcatcttggggtggcactggtgattcacagatattttttygttcaatacttaaatcctgccaattgctttccaatgtagttgtataaatttacaatattaccagcaatgagtaaaattttcaatagcttcacaacattgcaaaccctgggtgttctctcccttttgctttttagtaaatgctagtattctatgaagatgtgttattgtggaaactaattttatgttccgcatgacaaataaggttgaacacttcatcactatattggtcacctagaaattgctctttttgaaattgccaattcaagattttgcccatttaaaaaaaatcaggttgtctcttttcattgatttgtaaaagttatttatatcctcactatatgac

SEQ ID NO: 609593 - DNA, 535 bp, Homo sapiens
agatgattgttttgtataaaatggctattttaatgatattaattctttcaacttatgaggatggggcatatttccatttgtttgtgtcctctttaatttatttcatcagtggtttgttgttattgtaaaagggattgccttcttgatttctttctcagctagcttattattggtgtatagaaacaccagctctcccctggatgtgcctaagaatgatttgctatttctaataaaaatgtatcaaattcacatatatttttaatagctaataccttcacactgaaaaatgaataaagagactatgtttctataaagaaataataatagaagcaatggagctgttgacatgggtcagactagttaaaattttattcatggcagaggatwtaatttgttgcaaacagacttcaaagtagttaaggttgtttttttttctaaatttaaaatcaggactactactaaataataaaggtttttgagtgatattttcattgtattcatttaattttcttgtaattgtatacctctaaatttt

SEQ ID NO: 609594 - DNA, 398 bp, Homo sapiens
ataagagtatgactttgggctatttgatttactttatcagagtcacagaatatttgagtttatataaactgtaaggtctcttctagctataaaattttgacctaatatttttaagattyattcttccttattagaagaaaaatatgaaattgcagtgatgtgtaaccaattgtgacaccgaaaatattggagtgaaaaattatttttctaagcaacacattaccattactactacacccatcttaatcccaaggaagagtatgtcacaatttgctacataacaggaatctaactagcttattaacaaatcattgtttttctcactcaaggatttgtaaataggctctctggctctgctaagcttgactggatggacctgactccaagatactggttga

SEQ ID NO: 609595 - DNA, 484 bp, Homo sapiens
ctaaatagaataccatagtcttctaacccttaataatgctatactcttctaaagtaataggaaaataaaactgttcaagaagaaataatattagcagtgtctccagccacaagaagtcagcaaagtgataaaatagaaagcgtactttttttttcctaactggcaccaaaatccttcctattaccaaaaayaatgagagtcatccttgatattacatgtgcccatattaagtctgtcaccaaattcagacctctgtctatataactttggaattaatcaacttgtctccattccttgacattactctattctcagctaccatcatccatcagactactgcagttgcctggtaactagtttttttttgttttgttttttccatcttctctgcaccctctctatattgtagtaacctatacaaccaactaatctttcaagactgttgattattacatcccagattataaatgaattaagctaagtc

SEQ ID NO: 609596 - DNA, 642 bp, Homo sapiens
gatagggaaacaaagtgcccaagaaaagaacaatgaatgaataaaatgtagtttatatatacaatggaatactgttgacccttacaaagaagaaaattctgtcttctttgcaacaacagggatgaacctagaaaatatttatgttaaatgaaataagccaggcatagaaagaaaaatcctgtatgatctcacctatatgtgaaatgtaaaaaagttgaatatcaaagaaacagagagtaatatggtggttaacctaatgctgggggtagagggactgggtagacatttgtcaaatgacacaaaatatcagttagtcaagaaaggttcaagatatcgattrcatatcttggtgactacagttaataacaatatattatatatttgaaaattgctaagagagtagattttaagtacttttactgtataaaataactatgtgagataataaatatgttaaggagtttgattcagccattacacaatgtatacatatatcaaaatatcatattatctacaccataaatatacacaatgtttattttcatttttcaatctaaaaaaaaaagacactaggggtcagggtaccaatcaagaaagaagattatagcagagcttaatctctgctttcatttgggttatgca

SEQ ID NO: 609597 - DNA, 432 bp, Homo sapiens
ttgtatacattgacaacaaacacacacacacacactcactatacccatatacataacacacaactcaaaaaaaaagagttgtaaccttttttaatttgctgatctcatcacagtcattcaagtaataaataactactgtcctaattytggtgaatgtcatgaaaatagtactaaaatataggcaagaaaatttctaaattataggtctatacgaggcagcacatgcttatactgacaatcttctcctgaaagttgctgtactaatctccattcctaatactaacatattcacattccagtcattttacatcttgctagcactgttatcactcactttatttttagccattaaagttggtgtacagtggtatctcagtgtggttttaatatgtattgccttaattactaaccatgtaaaactttttccacata

SEQ ID NO: 609598 - DNA, 432 bp, Homo sapiens
ttgtatacattgacaacaaacacacacacacacactcactatacccatatacataacacacaactcaaaaaaaaagagttgtaaccttttttaatttgctgatctcatcacagtcattcaagtaataaataactactgtcctaattctggtgaatgtcatgaaaatagtactaaaatataggcaagaaaatttctaaattataggtctatacgaggcagcacatgcttatactgacaatcttctcctgaaagttgctgtactaatctccattcctaayactaacatattcacattccagtcattttacatcttgctagcactgttatcactcactttatttttagccattaaagttggtgtacagtggtatctcagtgtggttttaatatgtattgccttaattactaaccatgtaaaactttttccacata

SEQ ID NO: 609599 - DNA, 432 bp, Homo sapiens
ttgtatacattgacaacaaacacacacacacacactcactatacccatatacataacacacaactcaaaaaaaaagagttgtaaccttttttaatttgctgatctcatcacagtcattcaagtaataaataactactgtcctaattctggtgaatgtcatgaaaatagtactaaaatataggcaagaaaatttctaaattataggtctatacgaggcagcacatgcttatactgacaatcttctcctgaaagttgctgtactaatctccattcctaatactaacatattcacattccagtcattttacatcttgctagcactgttatcactcactttatttttagccattaaagttggtgtacagtggtatctcartgtggttttaatatgtattgccttaattactaaccatgtaaaactttttccacata

SEQ ID NO: 609600 - DNA, 580 bp, Homo sapiens
ctgtgtggcatctcttaaacaacaattgaaagaggagtcaatgtctgccttagacattgaccctctagatcctatcttcgtgatgcctctccaggggcggkcaggaacagcacttcctttgccatggtgggctctcattcctccagccctgagcctcttccatatcaagctgggtcagggaagtgttcccttttcactctcaaacaacccctggtgctatctccaatggggtcgcatttgggttccaagctggcactctcctttacttccccaccagcccagggctgctttgccctctgagaactaatggatggaattggagagatggcttgggggtaccccctttcaatgataagtcaatgcaaggagtagtgtagctggttgttggaaaatccagatatgtttagaattgaatttatttaagttgggtgtaaccttttccttgacttgccacaatgttgcagtagttctgaaccatttttgtattcctaatgagaaggctcagatcttgagaaaggccagagaacatgcagatgagattactagatctgatcctggccatgtcatttaccaggcatct

SEQ ID NO: 609601 - DNA, 573 bp, Homo sapiens
aaattggaacgatacagagaagattagcgtggccccttaaataaatacatagaaacaaaagcagtaaagctgtgataaacacgccagtgccgatgtctgstggaactactcacaatagcaaagacatggaaccaacctaggtgcacaccaatggtgcattggataaaggtaatgtggtgcatatacactatgaaattctacacagctattaaaaagaatgaaatcgtgtccttttgtttgtttgttgagacgaagtcacctaggcgggagtctagtggcatgatcttggctcactgcaacctccacctcctgggttcgagcaattctcctgcctcagcctcctgagtagctgggattataggcacatgccaccacactcagctactttttttcattgttgttgtatttttagtagaaatggggtttcaccacattggccaggctggtctcaaactcctgagctcaggtgatctgcccacctcagcctcctaaagtgctgggattacaggcgtgagccaccgtgcccggccttgaaatcatgtcctttgcaacggcatggatgcagctggaggc

SEQ ID NO: 609602 - DNA, 573 bp, Homo sapiens
aaattggaacgatacagagaagattagcgtggccccttaaataaatacatagaaacaaaagcagtaaagctgtgataaacacgccagtgccgatgtctggtggaactactcacaatagcaaagacatggaaccaacctaggtgcacaccaatggtgcattggataaaggtaatgtggtgcatatacactatgaaattctacacagctattaaaaagaatgaaatcgtgtccttttgtttgtttgttgagacgaagtcacctaggcgggagtctagkggcatgatcttggctcactgcaacctccacctcctgggttcgagcaattctcctgcctcagcctcctgagtagctgggattataggcacatgccaccacactcagctactttttttcattgttgttgtatttttagtagaaatggggtttcaccacattggccaggctggtctcaaactcctgagctcaggtgatctgcccacctcagcctcctaaagtgctgggattacaggcgtgagccaccgtgcccggccttgaaatcatgtcctttgcaacggcatggatgcagctggaggc

SEQ ID NO: 609603 - DNA, 391 bp, Homo sapiens
acatgtgcactcagcaagtggaaattatcataagcctttcaaccttttaaggatttaattgctcccatgatctagtctaggcagaactgggaaatgacaaaggcagtaaagaacaatggagtgaaagctggagacagacctctccttcatccttcactgcatccawcctctcccttgccttgtagacaggggtaccttggcatgatcctgaatggagtgggacttgtgttctgtttatgctgtgactggcaaagggtaggttgtgggtgtgctagataagaaagatacttcactctggtcccgtctctggtccttggactagcccttcagaaacgacggagaacaggaattaaacgtctctgcttggggaaatttcagacataaacccctg

SEQ ID NO: 609604 - DNA, 454 bp, Homo sapiens
ccggatcactgcttcctgtgtttcagacctactgccagaattttattttttcaggggcaaaataaggaacatagggatttaaatgatttgtaacacgattactacagctgtccactgaaatccactgatcagaaaagctcacagtctcattgtgtgactgcaaacagcccaaatacccgcatccagccctgagcttcctacaagcttttatgcagatttttttgttttttccaacttcacgaaggaagaggtgactctatcaaggtaatatgagagccccatcccaattcttcagtatttgagttggaaaaaatctgcacagatgacacattatggagagttagtgagattggrtggtgaaatccctgggaacacaacactttgctagaacaatcggctcccactactgcactcttctgagcaagaatctctcctactgctttcctattatcag

SEQ ID NO: 609605 - DNA, 352 bp, Homo sapiens
tctcctactgctttcctattatcagccttttttcaggcccagacctctgggtcctggacctgctttctggagccacaaacataaggaggtaataaaaactgaaatggaaagccaatatttgcaaatataaagcggcatccttccttattctgccagaatcataacgagccaggcacctgtgcagagacccactctctcattaaaayatgagccaaagtgttctggaaatgatccttttctttcttgcagagatttgttaaatgaaatatgattccagcaatgtaattcactcaactcttattattcaaagatttcctgagcattataccagatacaacaaagttatactatg

SEQ ID NO: 609606 - DNA, 352 bp, Homo sapiens
tctcctactgctttcctattatcagccttttttcaggcccagacctctgggtcctggacctgctttctggagccacaaacataaggaggtaataaaaactgaaatggaaagccaatatttgcaaatataaagcggcatccttccttattctgccagaatcataacgagccaggcacctgtgcagagacccactctctcattaaaacatgagccaaagtgttctggaaatgatccttttctttcttgmagagatttgttaaatgaaatatgattccagcaatgtaattcactcaactcttattattcaaagatttcctgagcattataccagatacaacaaagttatactatg

SEQ ID NO: 609607 - DNA, 472 bp, Homo sapiens
ggactatgacggaaaagagaatggttccgtttattggctattgattagcttgagatatttttctctttacttactttaggatgtggttccaaaagcagtgaattcataaaattcagttcaacacacctgtattgaatactaattcgcgtaagatatcatggcagagtttattgtattgaatagttgctgtatagaagacattgtggcaaagcttcatttaaatctggaaaagatgatattatgccgaggtaatcatcaccagacttcccaaacctttaatatagtcctgcattccttaacagtgggaatatattccaagaaatgcattgttaastgatgttatcattgtgtgaacatggtaaaatgtactaacacaaacttagatgccataacctactacacacctaggccatatggtacagcctgctgttcctaagctgcacacctgcatatagcatgttagtgtactgaa

SEQ ID NO: 609608 - DNA, 472 bp, Homo sapiens
ggactatgacggaaaagagaatggttccgtttattggctattgattagcttgagatatttttctctttacttactttaggatgtggttccaaaagcagtgaattcataaaattcagttcaacacacctgtattgaatactaattcgcgtaagatatcatggcagagtttattgtattgaatagttgctgtatagaagacattgtggcaaagcttcatttaaatctggaaaagatgatattatgccgaggtaatcatcaccagacttcccaaacctttaatatagtcctgcattccttaacagtgggaatatattccaagaaatgcattgttaagtgatgttatcatygtgtgaacatggtaaaatgtactaacacaaacttagatgccataacctactacacacctaggccatatggtacagcctgctgttcctaagctgcacacctgcatatagcatgttagtgtactgaa

SEQ ID NO: 609609 - DNA, 501 bp, Homo sapiens
tggagcagggcaggactatgacggaaaagagaatggttccgtttattggctattgattagcttgagatatttttctctttacttactttaggatgtggttccaaaagcagtgaattcataaaattcagttcaacacacctgtattgaatactaattcgcgtaagatatcatggcagagtttattgtattgaatagttgctgtatagaagacattgtggcaaagcttcatttaaatctggaaaagatgatattatgccgaggtaatcatcaccagacttcccaaacctttaatatagtcctgcattccttaacagtgggaatatattccaagaaatgcattgttaagtgatgttatcattgtgtgaacatggtaaaatgtactaacacaaacttagatgccataacctactacacacctaggccatatggtacagcctgctgttcctaagctgcacacctgyatatagcatgttagtgtactgaatagtgtaggcaattgta

SEQ ID NO: 609610 - DNA, 490 bp, Homo sapiens
cttctcctgcccttcaactgggatttacacctcgaggccccttggttcccaggcctttggacacagactggaattgcactacccactctcctgagtctccagcttgcagatggcaggtcatggaacttctcagcctccataatagtgtaagtcaattcctcataataagtctcttcatgtatatgttaacttgactaagccactggctgttcagattaaacactacacatttttttwaataaatacatatatacacatctcctactgattctgtttctctgtcaaaccctgaataatacaaccccccattgctttactgttttgccttgatagtagagcaataaggcaaattgtatgacagtgagcagcagctgtgtctttcatctcaacatcactctgcctagcatatcaaagaggatttttacatttaaaaataattaggactttttttagataggtaaacgctcacatgatgaaaagtactaaaaag

SEQ ID NO: 609611 - DNA, 490 bp, Homo sapiens
cttctcctgcccttcaactgggatttacacctcgaggccccttggttcccaggcctttggacacagactggaattgcactacccactctcctgagtctccagcttgcagatggcaggtcatggaacttctcagcctccataatagtgtaagtcaattcctcataataagtctcttcatgtatatgttaacttgactaagccactggctgttcagattaaacactacacatttttttaaataaatacatatatacacatctcctactgattctgtttctctgtcaaaccctgaataatacaaccycccattgctttactgttttgccttgatagtagagcaataaggcaaattgtatgacagtgagcagcagctgtgtctttcatctcaacatcactctgcctagcatatcaaagaggatttttacatttaaaaataattaggactttttttagataggtaaacgctcacatgatgaaaagtactaaaaag

SEQ ID NO: 609612 - DNA, 568 bp, Homo sapiens
tgcccatgtgactcacatactgttctgcttgcacggtttaaagaacattctgggtttgggttttttttgttttttgtttttttttttttgagacatagtctctctctgycgcccaggctggagcgcaatggtgcaatccgtgctcactgcaacctccgccttccaggttcaagcaattctcctgcctcagcctcctgagtagctgggattacaggcgcacaccaccatgcatggctaatttttgtatttttagtagagacggggtttcaccatgttggccaggctggtttcgaactcctgacctcaagtgatccacccacctcagcctcccaacgtgctgggattacaggcatgccacagcatccggccttaaagaacattctgattcacagataagacgtagacacatgtttcctatcacatcatgcaatacttggataccactttgttaaagaactatgtcaccagttttattgtggggtccttgcaaacacaagtttgcttggcagaaaaatggagacactgatcatttgttgtaattgggtattaaacatcagtttgcattttt

SEQ ID NO: 609613 - DNA, 568 bp, Homo sapiens
tgcccatgtgactcacatactgttctgcttgcacggtttaaagaacattctgggtttgggttttttttgttttttgtttttttttttttgagacatagtctctctctgtcgcccaggctggagcgcaatggtgcaatccgtgctcactgcaacctccgccttccaggttcaagcaattctcctgcctcagcctcctgagtagctgggattacaggcgcacaccaccatgcatggctaatttttgtatttttagtagagacggggtttcaccatgttggccaggctggtttcgaactcctgacctcaagtgatccacccacctcagcctcccaacgtgctgggattacaggcatgccacagcatcyggccttaaagaacattctgattcacagataagacgtagacacatgtttcctatcacatcatgcaatacttggataccactttgttaaagaactatgtcaccagttttattgtggggtccttgcaaacacaagtttgcttggcagaaaaatggagacactgatcatttgttgtaattgggtattaaacatcagtttgcattttt

SEQ ID NO: 609614 - DNA, 530 bp, Homo sapiens
ttgagtgtcatccccaatggccccaggaaggaaaatggactctgttcttcactttcattactgttgagctgctgaattctcttgcaaaaaccatcaacaggcatttactaagcaaatgcccacagggaacccagcctgaaaagggcccttccaatttcatattygacaggcatgtgcagaggtaatgaaattattcagcagagcatcagattcactcagaggctaccaagccaagaaactgaaagcagaaacactggattctccctgtttgttgaacctttccctctaaaaccaacttattcagaaacacatcctttaaaaaaacaaaaggaaaaaccaaagcggtgaaacaatatcacttactggttggaagacatcactctgacatagtcattagtcttgcagagacctaacaccaggcagcttcacaaacacacagcaagtctgcagagttatattgatcagtaagagtaaacccaaactgcactaaatactctcatggccaagaggaaagcagatgctgttttcag

SEQ ID NO: 609615 - DNA, 487 bp, Homo sapiens
acccagtgcagcagcccaggcctacagcaagactgcatttgatccttcactgcctttaaaaaatctcactgtgccctgcagccagcatcatggagaagcagccccaagaccccctgaaragttagttcacctttctcctgaaccgtttaccctgacccatgtcgctcaccgacctgcgattttctattgggtctcccaccttttgaccgatcccccaattagcctcccaaaaaatggactttgttaagggttgaattgtgctccactgcaacttcatgtgatgaagtcctaaccccagtgcctcagcacgggaccttatttgaaagtagggtcgttatatgtaattagtcaagatgatgtcacactggaatagggtggtccccaatccagaatgactgtgtccttgtgaaaagaacaccaggtgaagaacagacacacagagcgctgcataaagattggggttctgctgccacaaaccaaggaattc

SEQ ID NO: 609616 - DNA, 473 bp, Homo sapiens
gaattcttcacgatcacccagtgcagcagcccaggcctacagcaagactgcatttgatccttcactgcctttaaaaaatctcactgtgccctgcagccagcatcatggagaagcagccccaagaccccctgaaaagttagttcacctttctcctgaaccgtttaccctgacccatgtcgctcaccgacctgcgattttctattgggtctcccaccttttgacygatcccccaattagcctcccaaaaaatggactttgttaagggttgaattgtgctccactgcaacttcatgtgatgaagtcctaaccccagtgcctcagcacgggaccttatttgaaagtagggtcgttatatgtaattagtcaagatgatgtcacactggaatagggtggtccccaatccagaatgactgtgtccttgtgaaaagaacaccaggtgaagaacagacacacagagcgctgcataaagattg

SEQ ID NO: 609617 - DNA, 600 bp, Homo sapiens
gtaaattatggctgtagcttagacttacaaaatgctagccatttgcagggtcacacaatagcaaagtgggaccagaacccaggctcccaactcctgattgtgtaaggtgcccagtgtggagtacttgtcctgaaacacacatttgcatgtcctgctagttaaattgagcatttgcaaataaatggaccagaatgctcattgtgttattatttacaatagtgaaaatttggaaacatttcagatggccagcactaagaaaatggtaaaataaatgatgatacatttgtactaagaatattttctaaatattawaaaattataattatgtatcatatacaaataattgcaattatatattttatataaatatttaaaaatcatttttggagaatatctaatgatctggtagaacactcccaatataatgttgagtgaaatcatatcagggtataaaactaaatgcagatagtatgatagcaattttgtttgatgtataaaataagaggagaaggaatacatcaaatattaacggtgacttttttgaagtggtaagattatgagttatttttgtctccttttgaaacttttctgtattttaca

SEQ ID NO: 609618 - DNA, 600 bp, Homo sapiens
gtaaattatggctgtagcttagacttacaaaatgctagccatttgcagggtcacacaatagcaaagtgggaccagaacccaggctcccaactcctgattgtgtaaggtgcccagtgtggagtacttgtcctgaaacacacatttgcatgtcctgctagttaaattgagcatttgcaaataaatggaccagaatgctcattgtgttattatttacaatagtgaaaatttggaaacatttcagatggccagcactaagaaaatggtaaaataaatgatgatacatttgtactaagaatattttctaaatattataaaattataattatgtatcatatacaaataattgcaattatatattttatataaatatttaaaaatcatttttggagaatatctaatgatctggtagaacactcccaatataatgttgagtgaaatcatatcagggtataaaactaaatgcagatagtatgatagcaattttgtttgatgtataaaataagagragaaggaatacatcaaatattaacggtgacttttttgaagtggtaagattatgagttatttttgtctccttttgaaacttttctgtattttaca

SEQ ID NO: 609619 - DNA, 545 bp, Homo sapiens
gattggggttctgctgccacaaaccaaggaattcctgaaagccaggagagaagcctggaacaggtccttcgccagtgccctcagaggttgcataaccctgtggacaccttgatcgtggacttggctgccagaacagtgagacaggacatttctgttgtttcagctgctccatttgtggcattttgttgcggcagccccagccagctagcacagcttgctgaccgggccttgcacttcgcgcccatcttgctggccaccctcactttcgtcccagcccttctgcctctggctactctgagtgatcagctcacctggccaggctgccacacccagatggtgtcctgtcccagcagcactgacatagaaatataacagagctgttgtcccactgacagaaatataacagagctgttgtccagttgctacttctgtgtttgatacccgagtgaccattcycctcagaggtaacttagggtgagcagggggttggggtgtggctcctcagggagcatctagggaccccccttcctgtgctccaccacttg

SEQ ID NO: 609620 - DNA, 539 bp, Homo sapiens
gaattctcgtgaacagtaattgccgaaaggaaagaaagaatggataagaatgggttcacggtttcagtgtcggtgacattactgagttcatgttagcaaaatcaggtcccttccaaacacaattatgtaaactatttgtattggattgaaaggggtcatattctgttacatacatgcagcattaaaaaatctaccatcatgtaaaaaaaaaaaatagtctggaaaaagtaagtctttctcaattttcctcaatcactcaaatttattttaaagtccaggtaaaaactctgaaactcatttacttctaataacatcatgggcgtatcatatcccttcctttcctacccccagtcagccctccaaacaaagtataaaaggaaacccttgcccccaagcaaaacaaaataatgttgagtggagagctcaacaattttttttaatggtgaaaacactggtaacattattttcacttcaatcacttaactcatctgaacgatgtcattgtttcacgratgctaagtgctcctgtggcttgagag

SEQ ID NO: 609621 - DNA, 592 bp, Homo sapiens
attcacctgagaggtgtgcagctgtgctgaaatcagttacaacgaatgaaatcacaagcaggtgggtgcccacgggcctgaccaccaaccacccagcatatgcccagagttcttggacacaaagggtctctgccctcaggaagcttcaaatggggctgagaagatgggcgtgtacatagagagcaattggagggcaggagaagaccgagggaaggcgagaatcccagctggatcttctctttgggttggaattttagggggcagtgagacagggagaaaggaaactcccacgggagcagggccccggcctcacgagccccaggagcagagagaagcagccagcagggtgcctgggtgtggaggtgaaaagacgtgcactttggcatcaactagactcgcatgaccctgggcaggtgacttcacctcactatgccctgcagttttctgcsgtaaaaagcaggatagtatctacctgtggaagcttgatctaataactaaaacaaaatcatatatgaacagggcctagaacataataggccctcaaccaagaatagctacttatttttagcagagacagtgtttcaccatgatg

SEQ ID NO: 609622 - DNA, 620 bp, Homo sapiens
gctttactagcattctgttgtataacataattttttaaacatgctgtgttttcacttaatgtacagtgaacgcatttctattagcatgacacagttttctaccaagtaatttgaatgtttccatagaatgatataaaatgaaaataccattgcttatttaaccaattctctttttgtcgacattccagaccatttccagttttactcctggaaacatgcttcgagggatagccccatgtatgtttgcccatgcctatgattttgctctaaaaaatcccagaagasgaataatttaatcagaatttcaaattgccctccactcactcttcacaaccacaccagccaaacatgtaaatgtcctcagtagacttgattccattctggtgtccattgcacagataagggaaaaggcagaatgatgttgatgactgtgttgggtgagaagttttgcttgcaggtcatactccagtggtggctttttgggggctcagtctgaccctagagggagaagagagactggtgaggtagaaaggctccaagcagaattggaaggaaggctgagaactaccttccctctcacttccatgcccatgagatttctcctagtccatgtgggagca

SEQ ID NO: 609623 - DNA, 434 bp, Homo sapiens
ttaatactgatgacaacattttgatgcagggatcatctgcaatttataggcaggacacttaaagagattatttaacttgctaaagtgcctattctaatcatcattgtatacctgagtacctatcactatgcctaacaaatagtttgtgttaagtaaatacttatttattgaatgtggactgtattagtctgttttcatgctgctgataaagacatatctgagactgggcaattttaaaaagaaagaggcttattggactcacagttccacatggcctggaggcctcacagtcataggggaaggtgaaaagcacatctcasatggaggcagacaagagaggagagcttgtgcagggaaactcccctttataaaaccatcagctctcatgagacttattcactattatgagaacagcacaagaaagacctgccccc

SEQ ID NO: 609624 - DNA, 434 bp, Homo sapiens
ttaatactgatgacaacattttgatgcagggatcatctgcaatttataggcaggacacttaaagagattatttaacttgctaaagtgcctattctaatcatcattgtatacctgagtacctatcactatgcctaacaaatagtttgtgttaagtaaatacttatttattgaatgtggactgtattagtctgttttcatgctgctgataaagacatatctgagactgggcaattttaaaaagaaagaggcttattggactcacagttccacatggcctggaggcctcacagtcataggggaaggtgaaaagcacatctcagatggaggcagacaagagaggagagcttgtgcagggaaactcccctttataaaaccatcagctctcatgaracttattcactattatgagaacagcacaagaaagacctgccccc

SEQ ID NO: 609625 - DNA, 569 bp, Homo sapiens
gtcactctgtcagaagcacagaacacaacctggggcttgcaagtgacatctgaagtggggagtcttgtgggactgagccctcaacctgtggaatccaacgctgtatcctagtagatagtgttagaattgaattgaattgaaatggattgaattaaaggatgcccagctgctgtgcatggacaaattgaccgcrtgctgcatggggaagtgccccatacatctggggtcagcagtgttgtgttgagagtaggaagaacactttggtttgtttttttcctatatctcttacaacatttttcatgtttttaagaattcactgttttgattaatgtttcttggaatgtagtccctggatgcatcagcatcccttgaaaacttgttagaaatgcaaattcttggtccttacctcagacctactgaatcagaaactctgagggtggaaaggagatggcaggaatttgtgtttgaataaacactccaggtgattctaatgcatgctggagttttagaactactgttctaggggaaaataaaaagggaaaacacaattctctgtgataaatgtcaaa

SEQ ID NO: 609626 - DNA, 590 bp, Homo sapiens
cacattttttgacattagtatagtctgagccagttgctgtgggcaaatggcagaatttctcttagggagagagctgctctttagtttgggggaaaaatacttgacggaattttgattatgcaaagaccacaaatataaaactaatctgaatgagagaggttcaaacaaagacggaggtaaaatttctctctctaacaaatgtgctggttattattggcacctccctgcccttataatgctcctccccactgctcgttctgtgcccatggaagctgacctctggggagggtactacccaggcttccccgccttgtggcttccagttgggttcagtcaatgggagacacctgcaggagaaaagcagaggcaaggagagagcggtgaatgtatttatcgcacactacctccaatccccaatccctgccggcccccaaggatccagtgttggctgcatttctctagagccccagctcctgatggggccctctcttctaccctggggccctctcttctacccttcagccctccccaggctctggcaacgytggtcaggcccaggagtgattccatccttccgccattgctaattc

SEQ ID NO: 609627 - DNA, 588 bp, Homo sapiens
cttatggcgaataaaggttgcctggtcatgaggacagaagtctgtcaggtgataaacattgtctctttcctggtacatatacccttactaatgaaaattgcctttctagacctacacgtcctttacagaagggagaacatatactttattttcagcagttgagggtaaagcacttctcttgcactggtggttcttaatttattttagctcaaaataatcaagatgacaaagtggcatgttttgggctgatgtgttctgaacactattttcaagcactaacctgagccccaaaatacttttcaggcactgtgtgttctgcccttgcctagggcatacttctcacctgtctcccgcttcaccaggtagcggcttgcacctgtcctccccatctctgagggggctctaagcccttcaggaagccattccaattatccacctgattttatctattcacaaacaatcaccaagtgccaagtgctcccttctgtgcttacagctcataacacccccccatgcatacttcacttatctgccccatgtccaccttctaccggtagactataracacataacacatgcctggcatgt

SEQ ID NO: 609628 - DNA, 588 bp, Homo sapiens
gggtaatttataaagaaaaagaggtttaatggactcacagttccacatggccggggaggcctcacaatyatggtggaaggcaaagaagaagcatggcatcaggcaagagagcttgtgtggggaaattctcatttataaaaccatcagatctcatgagacttattcactaccacaagaccggtatgggcaaaaccacccccataattcaatgatctccatctggtccctcccacaacagttgggaattatgagggctccaattcacgatgagatttggttggggacacagccaaagcatatcagaactgagaggcactgagggcctgctggagagcagggagtggacctcaccctggcttcctgtgggcactgcctcctcccttccccacattgctgctttgtgttctccagtccctcctttgtttctttgtattattcctgtgcatgtaatttcctggagaggggagatggggtttccagatctcagtaactctgcaccttgccagtcctcgcacacagaggccggtgctcagtccatgtcctctgatgagcgatgaggttaattacttgcagcccaaacacagcagc

SEQ ID NO: 609629 - DNA, 566 bp, Homo sapiens
ttttgtttatgatgtgaggtagaggtctaacttcattcttttgcatatggatattgggcctttgtttttaaaagtttagctttataatacccagggctrggttaccccagaggagggaggctctgagtgttggcagggaggtgcacccatccatggagcagtaggatttcccaagccagggaggatgaagagaagcagggcctgcacccacttgcaggaactgacttgggtggtgggaccttgatggagcataatcatataatttttgtcttttttgacttgcatatttaacttagcataatgttaaagcatatgcagtgtaatgctgtggggagttactgagggagagactggcacaaaggttgcacagctcttgaccccacaaggatcctgaggccgcgggttagggaaatggaacaggggcagggatttccctgaaggacagtggaacccctagagcctcttgttcaagggatgggtcactctcaaaggggagaagtaatggccaccaccccactggtggtggggccaggccaggtatgaaatgactgacaagaatgaaggag

SEQ ID NO: 609630 - DNA, 566 bp, Homo sapiens
ttttgtttatgatgtgaggtagaggtctaacttcattcttttgcatatggatattgggcctttgtttttaaaagtttagctttataatacccagggctaggttaccccagaggagggaggctctgagtgttggcagggaggtgcacccatccatggagcagtaggatttcccaagccagggaggatgaagagaagcagggcctgcacccacttgcaggaactgacttgggtggtgggaccttgatggagcataatcatataatttttgtcttttttgacttgcatatttaacttagcataatgttaaagcatatgcagtgtaatgctgtggggagttactgagggagagactggcacaaaggttgcacagctcttgaccccacaaggatcctgaggccgcgggytagggaaatggaacaggggcagggatttccctgaaggacagtggaacccctagagcctcttgttcaagggatgggtcactctcaaaggggagaagtaatggccaccaccccactggtggtggggccaggccaggtatgaaatgactgacaagaatgaaggag

SEQ ID NO: 609631 - DNA, 594 bp, Homo sapiens
caccttggtagacatttttcccctaaacgttttaaaacaaggcttctaaaattgtcttcaggaaattaaatttagagtattcataagaaaaagaagacttgatgctttatgcatccaagagtaaatgaaacacagggctatattaatatttaccaaatcagctgaaatccaactgcttagagaratgcttttcagtggctgactcgtgtttttaactacaatgatcctacttttctggcctctgcatatctgagtttgttaaagacagaaagccgatcccctgctttaagagctaaggttccaatcttattcaaatggtcatatccatctgtcctgatgtaagaaaactatatttacgaatatgctcatgttttccttcttatgagaaaaaaaatccctagcaatacataaaattcatattatgcttttattctcactttcatcatcaacattcagatttaattccatagacaagcttgcccatacttggtgtgtacgtgcttcaggtagcaaagagaatccatcagccctagggtctcaagtcctggctccttcctcaaggcacctatgtgactctgacaacgacttctgccc

SEQ ID NO: 609632 - DNA, 549 bp, Homo sapiens
tcttgtcactcagctttgagactttagccaaggttctgagagaacagatgcatccgttttgttgttggagactgatgtagacagcaaaagggctggtcttaccatccccgtgtgtgaagsgtatatagaaaagctccctagttttacttgggatgctgactttgtgcttgcaggctgaggataaaaagcaaccaacacacacacactctcacacacacacatacacttacacacttatgcagtcttactccacatttaccttctataaattggtcttcatttctttgtatcccaccaaatgactgattcattttccctgtcttgcttctccctgccaccctccaattccacacttccacttcctctctccaccccagggaaaagactctgctggtcttgagtcatcagcactgtgtgcatgtgtgtgtgcacacacatgtgtgttgtgactagtggggggcacatcttgtccgtgctggccacactcagaactccaggccagctcagtttccttgattattcacttcatccaacactttgctcagaact

SEQ ID NO: 609633 - DNA, 589 bp, Homo sapiens
caacactgggcttgaatgtaaccctacagcaggccccccatcccccacccaattccacatcccaagaggctggcatggcctgccatctcccctccccagccccactgtgtgatggtgcatttgctttgatgatggtaatattctgtcacttggtgaccccattcctgaggctgagctcctgagggcatcccagccccaaatccccaaggtctaggccacgttgagggcatcccagtatcagtgctcygtgatgccacataatagattctcctccaattctcatctagatctaaacacaccctccaccatctgcctgcaggagaaacaaaatatcttgaattctgctacttgcccagaattttcatctgctgacctctcttggatggttgcacggtccaaggtagaaactttcacctcttccccttgaaacttaagccaaggctgagccaagtcagccccaaaggttattttcttctgaacccttcctggtcctgcttggtcctccaggggtgagaacaccctcccggcgggcagaacctctccaacccaggtcccccctgaccaaggtaagaggggacaagacaaggag

SEQ ID NO: 609634 - DNA, 592 bp, Homo sapiens
agatctaaacacaccctccaccatctgcctgcaggagaaacaaaatatcttgaattctgctacttgcccagaattttcatctgctgacctctcttggatggttgcacggtscaaggtagaaactttcacctcttccccttgaaacttaagccaaggctgagccaagtcagccccaaaggttattttcttctgaacccttcctggtcctgcttggtcctccaggggtgagaacaccctcccggcgggcagaacctctccaacccaggtcccccctgaccaaggtaagaggggacaagacaaggaggactctctacctggcgagatcaggctttaagccagtttgctcctcctacctgcagaccccttgaaatgcagagcagagctcctctctgagagctgatgattgaggtggtggggtgatggggttgggtgggagcatgggcgggtccagcctcactcagtacacatgttgagtttagctaaaatagtcatgaaggctttacaaggctcagaaacaatgcagtggaaattgcccccagcctcatccttggtggtcccaagtatccatggtgataagaaagcctgaacccta

SEQ ID NO: 609635 - DNA, 580 bp, Homo sapiens
accctccaccatctgcctgcaggagaaacaaaatatcttgaattctgctacttgcccagaattttcatctgctgacctctcttggatggttgcacggtccaaggtagaaactttcacctcytccccttgaaacttaagccaaggctgagccaagtcagccccaaaggttattttcttctgaacccttcctggtcctgcttggtcctccaggggtgagaacaccctcccggcgggcagaacctctccaacccaggtcccccctgaccaaggtaagaggggacaagacaaggaggactctctacctggcgagatcaggctttaagccagtttgctcctcctacctgcagaccccttgaaatgcagagcagagctcctctctgagagctgatgattgaggtggtggggtgatggggttgggtgggagcatgggcgggtccagcctcactcagtacacatgttgagtttagctaaaatagtcatgaaggctttacaaggctcagaaacaatgcagtggaaattgcccccagcctcatccttggtggtcccaagtatccatggtgataagaaagcctgaacccta

SEQ ID NO: 609636 - DNA, 569 bp, Homo sapiens
gcctgcaggagaaacaaaatatcttgaattctgctacttgcccagaattttcatctgctgacctctcttggatggttgcacggtccaaggtagaaactttcacctcttccccttgaaacttaagccaaggctgagccaagtcagccccaaaggttattttcttctgaacccttcctggtcctgcttggtcctccaggggtgagaacaccctcccggcgggcagaacctctccaacccaggtcccccctgaccaaggtaagaggggacaagacaaggaggactctctacctggcgagatcaggctttaagccagtttgctcytcctacctgcagaccccttgaaatgcagagcagagctcctctctgagagctgatgattgaggtggtggggtgatggggttgggtgggagcatgggcgggtccagcctcactcagtacacatgttgagtttagctaaaatagtcatgaaggctttacaaggctcagaaacaatgcagtggaaattgcccccagcctcatccttggtggtcccaagtatccatggtgataagaaagcctgaaccctaccc

SEQ ID NO: 609637 - DNA, 541 bp, Homo sapiens
atatgaaccacactgttaaccaccttgatcttgttaatgtttgtaatatgctacatctaataactacagwataaacattattttcaaatccacataatgtatttaccataaaacaagttgcaatagatttaagaaaattgaaatcatacaaagtttactctctgaccacatgagattaaatttgaaatcagtaataatataatatctagggaaactcctaatatcttgaaattaaataatatacttgctaaataattcacaagttaaaagtgcatcatgtgtgtcctagagagggcatcaagtatgctgcatttgccaaatttaattggacacaaaagtctttttagtggagcatttcataagactagtgttttgtggagcacattcaggaaaactctcctagaatatgcccctgaaactgtggtgccttttcttttaagcagagattgaaattttaatcggtccacatagaagacattccatccatcacaaatatttacaaaattcatgttgatggagagacttcctccagcatgtaatc

SEQ ID NO: 609638 - DNA, 623 bp, Homo sapiens
tggttccaagtctttgctattgtgagtagtgccgcaataaacatgcgtgtgcatgagaacacaggttttgataataggagttttattacttagctcaagtaaggaggacactgggagtattctccaaagcagtttctccctgagggaaagtgacagagggcgttagggggtgatggagagcagagaggatgcggcatggcatgtagaggaggggtcccagctgtgcagatccagtgagttatcatgccaacacacaggttgcatgttttgatgatgaagctacagcttctcccaggatgaagactttagcacggtaaggagggaagatcacttgggttcatctgcaagtttccgggcgtctttcaggagctggcttaaaccaacaaggtgaccgcagggyttggggaagaacaggctgcagggcaagaggctgccaaacaggctgattgctcaagtggattaaatttttatagtccccagagatcctcccttgtctgcttatacttctagctgtgattcacccttccctgtgaccaggactgcactgcctgcaccctggagtgtctttgtgtcctatctcccttgtaggacatcactacctggcccccgaccctgcctttgct

SEQ ID NO: 609639 - DNA, 505 bp, Homo sapiens
tggattatggatttcagagaaagaccagagctgaagtctgctcccctcattgtgacaacaccatccacagagcagtgaaaaactcatgaaataaaccagtccctcctgcccatttgtcatttatctttattgctcagagaaaattcatggagaggagctcttgggctgaactgtcatcaagtttttgcagccgagtctgggttgatctgacaattatgcacatagacaagatcatttatgttcacttttttaratggaggaatgaagtgagctgatacataaaaaattatatccaaatgatagaatctgttaaagatgtattttctgtcttctattttaggcaggctgccctcaactccatgaacagcctccataattcatccactcgtttgattcctcctgacacatggccccaaaaatagttggtctttttgctttgactatgctgtgttttcaccaacagcaaccaggggagcgtctttgtgcaatgaggaattgttagtgg

SEQ ID NO: 609640 - DNA, 616 bp, Homo sapiens
gagaacccagaaagcccgggactaccccgaacactcacgggccccagccaagcagaatcaaaggcccacttacattctcattgtcctgattagtaactaaatcctcagacagtaaccaacagggagtttcagggatcttatttgacctgttcaaattgctgattttattagggtagttttcttgcttattagtcattaaatctccactaaaaaattggttacatcctgtctgtaaattttaagtgggctatgctcaccagactgtgctaaatttcaccctttcaagtgtttaaaaatttaagcagactgtccccttgaagattttctatttgccttttttcacmttttgctcttttttgagctccattttcacacaccctatcctgtcacaatctgaactgcattcaagctcaatgattcaaaggatcgaaaacacagagcattgcatttaaagtgtacaaaacttgaatatattttcatcagaaattaaattgagtgtatgttttcaaaagttatttttggcttaaaatatacaaaatcatctatgaaaatttaaaagctacgaattgtccaaagtgtaagtcaaatttatttaaataaagctgcaatgcttatt

SEQ ID NO: 609641 - DNA, 593 bp, Homo sapiens
gctaatggtacccacgtcataggacagtgcacacagcacagtgcttggcttataggaacctatgcagacaccagcactatctgttattatgaggttcccttggggccttaataaagatttgttgaataaatggattcattaagtagtaaataaaaataaaacaacaaaaaggagtacattaagaatgaatctctcccacatatcttctctgaatcccaataatgcacatttgcaggacagcccacagcagggatggacctggcttctcttgtctggtcgcctcagtgttcccgcctaccctgctccaccctcccctgacacagaggctgcctgtcacatgctctgtggtgctccgtgattgtcagttccagcctagaacactgtcctcccttcactcatggactgaaaacctgatttttccaggctcctttcaaatgccacctcatctgtgaaaaattctcagatcatcctcagtcaaatgtcatttgtaaaaataggctagaggaagtttrttgcttgtttgttttctgggctatgatacctccctgttgactcctggttcctcagcagtcctggggggctaggagcctgat

SEQ ID NO: 609642 - DNA, 509 bp, Homo sapiens
gagtggtggacatttgtcacaattccaacccctaatctctagctctcaaagacacaataacagagaacaaaaatgtctgctcctctttctcaacacacacaaaaaaygcacaactcattccccaaatacattcctgattgtcccctaggactgtctggcatagggaacccacaatgaagtttccggtttctaaaagttctctgggacctctcagtagggtccccagtctcccaggttcaacatgttcttcagtacgatcctgggactgaaataaaaccattcatcctagagagaggctgctaaggacattgggtgagtgacagacagaatgcctcctctgtgtttagtacaagagtcaccctttgtttaataaaaattgtgttccattccctggcagcatcgcctgtcttcattctgcataaaccacatacagagagctttttgtctgtaaagtccttcgtagaggtagagcacatgattacagttaagttcatttttactccatcact

SEQ ID NO: 609643 - DNA, 599 bp, Homo sapiens
tgagttctgctagttgctccacgagcaccttctgttgctccccatcctgagaaaccgcactctgtggacttggactctccaagccctcctatttcaagtttctcagtagtatggatcgtgttccttacttagcaattgcaccctccttgcttatttctgtcttttggatagacatcctaaactggatctactgaaattgtttgttcccacctcagcactgctatatctaatttacactgtacttataaaaagaataaatatttaagggaactcagaaaatggagctggagcagggcccctgtagtctataaaaacctagttgtcttctggagaccaaataattcactgcaatccactcacatgcctttgaagaggcttctcaccccttgtcaccagatgtctggcagtttgtgactggaactacccactccatgcctggatggctggatgtgaggaggacaggcctccctcctgcataatagcatccrgagagaaccccagaaaagcccattaaacatttatttaggtaaaatcactgtgtcattaacttatctccatacacacacagaaagggaactaaaatagattttaatggagca

SEQ ID NO: 609644 - DNA, 515 bp, Homo sapiens
agcccattaaacatttatttaggtaaaatcactgtgtcattaacttatctccatacacacacagaaagggaactaaaatagattttaatggagcaactaggagctttctaatttttcctcttttgtttgatgagcaatcaattcaagtgtgtgcactgggtacatgtgggggtacccgtaattggggagtgtgctgtattagagggtgttttgtgaacaccagttagtagaaaaaagaatacccaacatgcacacaccactttatgggtttgcaaagcatttccacacacattacctttactctttacttaacttctctgtctctcagtttgctgagctgtgaattgggataataatactttcctcatagtggtgagataccgtatagaaagctcctaacacagggcctgacacacggtaggtctttaaaaatgaggttagtgyttcctcattggatcctctattttccaatgtctccacactgttcctccatatcctctccaagccctggtcac

SEQ ID NO: 609645 - DNA, 562 bp, Homo sapiens
ttttaaattaataaataaataaatacaacaactatcaaccattctagacccactggcctagacccaaggaaaatgtattgttttcaactgacgatttgtatggaacatttagtgcacaacctgagatcaacaattccacttccaagaatttatcctaagacagtaatcagacaagtgtaaaatgatayaaatccaaagatatatgttataagcattgtttaataaaatgaaacgggggagtcttcaatgtctgtcaaagggaggttgacgaaatattatgcaactctttaaaatatctacatttatttacgtgaaaaagattcccatggcatattattgtgtgataaagcagactgtcattgtaaattgaagtatttaatgaatataaaattgtttgtgtattgaaatgtgcatggacattttttaaaaatctatatgactatcaaaatattaacagaaaaatattatatgatcacatttatatgagatatctagaataggtaaattcatagagacagaaagtagaattgaagttacccggggttgaggagatggggaaagg

SEQ ID NO: 609646 - DNA, 562 bp, Homo sapiens
ttttaaattaataaataaataaatacaacaactatcaaccattctagacccactggcctagacccaaggaaaatgtattgttttcaactgacgatttgtatggaacatttagtgcacaacctgagatcaacaattccacttccaagaatttatcctaagacagtaatcagacaagtgtaaaatgatacaaatccaaagatatatgttataagcattgtttaataaaatgaaaygggggagtcttcaatgtctgtcaaagggaggttgacgaaatattatgcaactctttaaaatatctacatttatttacgtgaaaaagattcccatggcatattattgtgtgataaagcagactgtcattgtaaattgaagtatttaatgaatataaaattgtttgtgtattgaaatgtgcatggacattttttaaaaatctatatgactatcaaaatattaacagaaaaatattatatgatcacatttatatgagatatctagaataggtaaattcatagagacagaaagtagaattgaagttacccggggttgaggagatggggaaagg

SEQ ID NO: 609647 - DNA, 562 bp, Homo sapiens
ttttaaattaataaataaataaatacaacaactatcaaccattctagacccactggcctagacccaaggaaaatgtattgttttcaactgacgatttgtatggaacatttagtgcacaacctgagatcaacaattccacttccaagaatttatcctaagacagtaatcagacaagtgtaaaatgatacaaatccaaagatatatgttataagcattgtttaataaaatgaaacgggggagtcttcaatgtctgtcaaagggaggttgaygaaatattatgcaactctttaaaatatctacatttatttacgtgaaaaagattcccatggcatattattgtgtgataaagcagactgtcattgtaaattgaagtatttaatgaatataaaattgtttgtgtattgaaatgtgcatggacattttttaaaaatctatatgactatcaaaatattaacagaaaaatattatatgatcacatttatatgagatatctagaataggtaaattcatagagacagaaagtagaattgaagttacccggggttgaggagatggggaaagg

SEQ ID NO: 609648 - DNA, 382 bp, Homo sapiens
atgtcaattatattttaatagagctaaaaaaatgacagccatcatgctattatttttaagttggaaatctcctgtgatgagamaagtgtatatgtgtgccataagaaaactctttggtcacagtagaagatagtgggtacccctaagtagaatttgatttttctatacttagcagggatgttagtgttaaaagttagaaaattatatacagtgttactgaagccaaagatagcacaagaagctgctttcctttgtttcaatcatttcatcttcccacctatatctttgatatattctttctgactcccattgcaacatatgtataaacttcccttctgtctctgagtcagctctgcttgcttgagttcaccatatcatgtat

SEQ ID NO: 609649 - DNA, 553 bp, Homo sapiens
tataatgacttcttttcctttgagaagatacctagtagtgggatggctggatcaaatggtagatctccatatagttttccatagaggttgtactaatttatattcctaccagtagaatatatgckttcccttctccctgcatccagggcaacatctcttgttttttgactttttaataatggtcattcttgcaggagtaaagtggtatctcattgtggttttactttgcatttctctgatgatcagtgatgttgaaagttttttcatatcgttattggccatttgtacatcttcttttgagaaatgtctattcaagttctttgcccactttttcatgggattatttgttttttcttgctgatttgtttgagttccttgtagattctggatactagtcctttgtcagatttgtagtttgcaaatattttctcccattctgtgtgttgtctgtttactctattatttcttttgctctatggaagtttcttagtttaattaggtcccattatttttctttttgttgcatttgcttttggggtcttagtcataaatt

SEQ ID NO: 609650 - DNA, 601 bp, Homo sapiens
atcattgaatgctgtggagagatgtggagtagcacgtcattatacagtatttccaccctatggatataatagataagaataacctcaagaacayagataatattaaaatgtagtaaaaataattaaaattatgagtgttgagcatttattaccttatttctagtataacttaattatttgtaagcttatacaattttatttgttatttctattttttatttatttttgagacagagtctccctctgtcgcccaggctggagtgcagtggcgagatctcggctcattgcaacctccatctcccaggttctaagcgattctcctgcctcagccgccagaatagctgggattacaggagcgcaccaccacgcccggctaattttgtatttttagtagagacggcgtttcaccatattggccaggctggtctcgaactcctgacctcaggtgatccacccaccttggcctctcaaagtgctgggattacaggcgtgagccaatgcacctggcctacaattttatttttaataatggctgtgttcaacaactggctggcaaaattctcagacgtttaacaattgactcctgagagttagtacaggt

SEQ ID NO: 609651 - DNA, 601 bp, Homo sapiens
atcattgaatgctgtggagagatgtggagtagcacgtcattatacagtatttccaccctatggatataatagataagaataacctcaagaacacagataatattaaaatgtagtaaaaataattaaaattatgagtgttgagcatttattaccttatttctagtataacttaattatttgtaagcttatacaattttatttgttatttctattttttatttatttttgagacagagtctccctctgtcgcccaggctggagtgcagtggygagatctcggctcattgcaacctccatctcccaggttctaagcgattctcctgcctcagccgccagaatagctgggattacaggagcgcaccaccacgcccggctaattttgtatttttagtagagacggcgtttcaccatattggccaggctggtctcgaactcctgacctcaggtgatccacccaccttggcctctcaaagtgctgggattacaggcgtgagccaatgcacctggcctacaattttatttttaataatggctgtgttcaacaactggctggcaaaattctcagacgtttaacaattgactcctgagagttagtacaggt

SEQ ID NO: 609652 - DNA, 530 bp, Homo sapiens
ttacagagataagacaataagacatagtatttgctttttcagaagctcacactccaytgggaatttttttttaaagatcattagtgactttgttaaaagttaaatgtaatgaacaccatacatgagattaaaaacaatactttttggaagataagcacttgattccagaatccaagagcaaacgtgacactgagtggtccctgctatagcatccatgtggaatgagtggaagagcgtgggctttggagatgggcagattcatgtccaaatcccggcttggccactgctttgtcctgtgatctctgtcaggttactctgagaataatgccttcctagtattgttgtgaaccctaaacaagaagatacttgacctaatgaaggcactcattgaaggttggtttcctctcttcctcttgtctttgggagaatcagaccagaatgctcactctgcagaccaccaggcaatatgccctgggaatagcaagagaagtagcacacgtaggaagccaggagcactcttctgagtgtgg

SEQ ID NO: 609653 - DNA, 584 bp, Homo sapiens
caaaacaaaacaaaaaagctttaagtttaccattgcggataatgtcttgtgtaataagaggcaattacacacttgtgccattgtcagaggccatttctatgcccaaagttgttcttccatcttgctaacagtcattcattgcttacaaggaattgcttgctatattagatgactttgtaaaggattgacctcagamtgttactgccagatgtgcacaaagccttccactgtatgtgtgaaaaataaatatcttctccattttctttcctaagccccagtttcccccgcctgacacaccagaacaaattgatggtcacctttggaaaggtgttggcatacagcttgttggagtggaagggcagctctcagttatctggttgaaacttctaactttaagatgataaaaacaaagtcccaagaaggtcctatccaactagggcccatagctagttattggatatacctgacccagcctggaagttattggtatattcacaaaactgaaactctatgcagtttttctgaccttgagctataaaatgccattcctctaaagggcgttcgatacattagccaaatttcag

SEQ ID NO: 609654 - DNA, 562 bp, Homo sapiens
  misc_feature 410, 411, 412, 413, 414, 415, 416, 417, 418, 419, 420, 421,422, 423, 424, 425, 426, 427, 428, 429, 430, 431, 432, 433,434, 435, 436, 437, 438, 439, 440, 441, 442, 443, 444, 445,446, 447, 448, 449, 450, 451, 452, 453, 454, 455, 456: n = A,T,C or G
  misc_feature 457, 458, 459, 460, 461, 462, 463, 464, 465, 466, 467, 468,469, 470, 471, 472, 473, 474, 475, 476, 477, 478, 479, 480,481, 482, 483, 484, 485, 486, 487, 488, 489, 490, 491, 492,493, 494, 495, 496, 497, 498, 499, 500, 501, 502, 503: n = A,T,C or G
  misc_feature 504, 505, 506, 507, 508, 509: n = A,T,C or G
acccagcctggaagttattggtatattcacaaaactgaaactctatgcagtttttctgaccttgagctataaaatgccattcctctaaagggcgttcgatacattagccaaatttcagcagttaatttacaastgagcaattttgattttcagatcttgttatcagggggaaacgtctggactttataaccacctggcctaaagcagtcaagtcactaatactcttttttcctttattaaatccacacttcagaacattgcattgggaggtcagaagtccctcttctctgcctggagctcagaagcacttgcagttgaggcaattcctgcctcagcctgctgaaccttgggggtgagaaatagaagactgcttcccaaactgagattattgttagcacaccaagtattannnnnnnnnnnnnnnnnnnnnnnnnnnnnnnnnnnnnnnnnnnnnnnnnnnnnnnnnnnnnnnnnnnnnnnnnnnnnnnnnnnnnnnnnnnnnnnnnnnntgcgcatgggcaagctgcctttacagacttggggcatcctttcccaaagatgt

SEQ ID NO: 609655 - DNA, 562 bp, Homo sapiens
  misc_feature 410, 411, 412, 413, 414, 415, 416, 417, 418, 419, 420, 421,422, 423, 424, 425, 426, 427, 428, 429, 430, 431, 432, 433,434, 435, 436, 437, 438, 439, 440, 441, 442, 443, 444, 445,446, 447, 448, 449, 450, 451, 452, 453, 454, 455, 456: n = A,T,C or G
  misc_feature 457, 458, 459, 460, 461, 462, 463, 464, 465, 466, 467, 468,469, 470, 471, 472, 473, 474, 475, 476, 477, 478, 479, 480,481, 482, 483, 484, 485, 486, 487, 488, 489, 490, 491, 492,493, 494, 495, 496, 497, 498, 499, 500, 501, 502, 503: n = A,T,C or G
  misc_feature 504, 505, 506, 507, 508, 509: n = A,T,C or G
acccagcctggaagttattggtatattcacaaaactgaaactctatgcagtttttctgaccttgagctataaaatgccattcctctaaagggcgttcgatacattagccaaatttcagcagttaatttacaagtragcaattttgattttcagatcttgttatcagggggaaacgtctggactttataaccacctggcctaaagcagtcaagtcactaatactcttttttcctttattaaatccacacttcagaacattgcattgggaggtcagaagtccctcttctctgcctggagctcagaagcacttgcagttgaggcaattcctgcctcagcctgctgaaccttgggggtgagaaatagaagactgcttcccaaactgagattattgttagcacaccaagtattannnnnnnnnnnnnnnnnnnnnnnnnnnnnnnnnnnnnnnnnnnnnnnnnnnnnnnnnnnnnnnnnnnnnnnnnnnnnnnnnnnnnnnnnnnnnnnnnnnntgcgcatgggcaagctgcctttacagacttggggcatcctttcccaaagatgt

SEQ ID NO: 609656 - DNA, 542 bp, Homo sapiens
tctctgtgctatgattttccggccctcaggaacccccagattcaacatctccatgatcccaaagtctcccaacttcacccctactaccactcagacatgttttttcccacataacttctctttcagtaggcaaataactagttaatctgagaaacaaaactggcgtctcccgaacttttgttgtttttcagccatcttcttaattttcactgtattcataaaccaccacttgcattgttgacctaatatttttatttaaattgactcactttttaaatgtaaataattgcyttaatttaattccaatcaatatctgtgaaattataggtttgatatgttgtttattttaatgtgtattaagactattaaaataaaaaatagtcattgatgtactactaaaattatcttctgttccaatggtggtatatttctgaaactttgcaaagcagtaaattaaattaaacccttgactgctattggcctagaaagtctcctcttctgaataagaattgcattttaatggaaaccttgtgtgtatatat

SEQ ID NO: 609657 - DNA, 628 bp, Homo sapiens
  misc_feature 13: n = A,T,C or G
aggggaccctttnatctagtgagtcagctttgtggaagctggttatgagagctgtccttatttccttttattaatgattagagttatacaatattttcataaacattttttwaagttatgttgggttttataagccacagttttaatgaccatattctacaatttattgaacagcttacacagtagagaaccaagtctttcctaaatttgcaaagcaattataacacattgtttgttaagttttataacatgatcatattttcatcttcttgtttttactagaaaattgagcttctcttggttttctatatagaaaaattcctatactagaatttcaggtcaattctattctcattggtcttggctgcaaaggtaaatctctttgtcacaatctgtccccattctcaaaaagataaagcagctcaggtcagattttgccacagtcaatgtttttaggaagcttgaatgatttagagcactccaaatcaaccttttttgattctgctatgtcattaaataggaaacatttcttacctattatgtgccaacctcaaacatactctcttaagacataagtttttctttttctttaaaattgtaaacaatgtcaacttaaagaatagtataa

SEQ ID NO: 609658 - DNA, 621 bp, Homo sapiens
gtaatgacaacatataaaagtataaagctcaaaagtataaaattatgtatctttgaacagatacacaaataagaaagataacataatcaaacataatcactagagaaaaccatcaaactccgaaaataaataagaagcaagaaagaaaagaacaaaggtatataaaataaccagaaaacaattaacaaatgtaagtcctcacctatcaataataactttgaatgtaaatggattaaattcccaagttaaaaaatatagattggctgaatgaataaaagacacagatccaactatatgctarctataagaaactcacttcacctatgacacacatattttctttgtctgaaagtataagggataaagccaggcatggtggaacattcctacagtcccagctaaaagggaggctgaggtgggaagattgcttgaacccaggagctcaaggctgcagtgagctatgattgtgccactgcactttagcctgggcaacagagcatgaccctgtctgaaaaaaagaaaaagaaaagaaagaaaatgaaggcatgaaaataggcattccacaaggcggaaaccaaaaatgagcagaagtagctacacttatatcaaataaaatggatt

SEQ ID NO: 609659 - DNA, 540 bp, Homo sapiens
tgaccctgtctgaaaaaaagaaaaagaaaagaaagaaaatgaaggcatgaaaataggcattccacaaggcggaaaccaaaaatgagcagaagtagctacacttatatcaaataaaatggattttaagtctaaaactatatttttaaaaagacagagaaggtcattatgtaataataaagagatcaactcagcaagaggataaagsaattgtaaatatatactcacataacagtaaagcacatatatatgtgtgtatatatatatatatgtagggggagatagacttcaatacaatcatagctggagactttcatacactactcacagcattggacaggtcatctagacagaaaatcaaaaaagaagcactcgatttagactgcactatagaccaaatggacctaacagacatttatagaacatgccatccaacacctgcagaatacacattcttctcatcagcacatggaacattctctagaatacaccatatgttaggccaaaaaaccaagtttcaacaaatttttaaaaactgaaatc

SEQ ID NO: 609660 - DNA, 603 bp, Homo sapiens
gctagctataagaaactcacttcacctatgacacacatattttctttgtctgaaagtataagggataaagccaggcatggtggaacattcctacagtcccagctaaaagggaggctgaggtgggaagattgcttgaacccaggagctcaaggctgcagtgagctatgattgtgccactgcactttagcctgggcaacagagcatgaccctgtctgaaaaaaagaaaaagaaaagaaagaaaatgaaggcatgaaaataggcattccacaaggcggaaaccaaaaatgagcagaagtagctacacttatatcaaataaaatggattttaagtctaaaactatatttttaaaaagacagagaaggtcattatgtaataataaagagatcaactcagcaagaggataaaggaatygtaaatatatactcacataacagtaaagcacatatatatgtgtgtatatatatatatatgtagggggagatagacttcaatacaatcatagctggagactttcatacactactcacagcattggacaggtcatctagacagaaaatcaaaaaagaagcactcgatttagactgcactatagaccaaatgga

SEQ ID NO: 609661 - DNA, 573 bp, Homo sapiens
gaaaactccataccaacgaattataaaacctagaggaaatgaatagattgctgacacatgcaacccatcaagacagaaccagaaagaaatagaaaacctaaacagaccaataacaagtaacaaggttgaagcagtaataaaacgtctctccaaaaaagaaaagccagaaccagatggcttcaatgctgtattctaacatttaaagaagaacaaacaycaattttcctaaaaatattccaaaaagctaaagagagggaatgattttatactcattctatgaggctaatattaccctaataccaaaaccagacaaagacacaccaacaaaaagaaaagtacaggccaaaattcctgataaaggtagatgcaaaaatccgcaaaacatatgccagcaaaccaaatccaacagcacatcaaggtatataccatgatcaagagggatgtatcccccaaatgcaaggatgattcaaaatatgcgagtcaataaatgtgatctatttcatcaacaaaatgaagaataaaaaccatagaatcatctcaatagatgtagaaacagcatttgataagactcaa

SEQ ID NO: 609662 - DNA, 561 bp, Homo sapiens
cttagatcacaaagaacagaagccaacaaagagaaaactaaaaaacctctacactttaaattcatcctacccacattttgactttttgtcatctcagtttacatatttttatattgtctgtgtcttacaagattgcatagctatcattagatttgatagatttgttttttagacttcatactaaagttatgagtggattgcagtcacaattacagtactagagaaatctgggtttgtccatgtatttacttttaccagtaggttttataccttcacatgttttctttttgcacattagtgttgtttttttcagactgaagaacttcctttagcatttcttataagaaaggtctggtagtagcggtgattaaattatctcagcttttgtttgtctggggaaacaccttatctctccttcacatttgaagaatagttttgctggatacagtatycttaaatagcagggtttttttctttttcaacacttgcaaaatggcatcttattccccctgactaatatggtttcctttgtaaagcctgttgccagaagaattggagccc

SEQ ID NO: 609663 - DNA, 583 bp, Homo sapiens
caattaaatttttcagtttggcaaatgtatttctcagatccatgatttctattgatttgtttttattacttcaatctctttgttaaatttataatgctaatatgtaataaatttatgaattgccttttcatgttatcttgatcactgagtttcctttaaaattgttawtatgaattcttggtcagagaactcatgtagcatcatcttgtcacagccaatcactggtttcttgttttgtgaggtcatgattttgtttgcttttgtttcttgcatacatacttttatattttcgcattgaagttttagttatttattccagttttctctgtcttgcttgctttcattttcattgggtctgtttgctcagagattctttataatttacctgttaaatattttcccccactaagtgaggaaaaatgatgctgctgctgcagtctttcctaaaaaggagacagcaacttagtgatttgactcagttctagtaaatgattggagcactgcccacctcacatggggggtagcttaaacggatattccagtagtgtgggatggctagttaagggtttgtgtccagaggaac

SEQ ID NO: 609664 - DNA, 512 bp, Homo sapiens
ttaaattgaatcactataattctctggtgttttttctccacaattcttggtactgaattatacaattgttacgtgtgttagaaagtggcttcctttcaagctccagggtaggataatgagcagacagaaatttgagcagccatttactttatatccaggtagaatatttttaaactttcctgtggacattgagaatcagaatcccatgctcgtaagaataaatttcataatcttgggtcaagattacagacaatagtcactgacagaggagaccaaacttcacatatttttcatttttctcctttctcactttgtgtatgaaaatgctacagtaagtaacgtcagctttaatcccagaccacccaatccattctgtagcctggatgaagtttctagacaaatgcaatcatgtcaatatccagtttaaaattatgcacagtcctcaagataaagtccaarttctttaacataaattcaaaatatttttccatttggcatctgcctagatcagt

SEQ ID NO: 609665 - DNA, 635 bp, Homo sapiens
aatgggattacatcaagttaataagcttctgaacagtcaaggaaacaacaaagtgaagagacagcttacagaatggaagaayatatttgcaaactatttaactggtgagggattaataaccagaatacataaggcactcaaacaattcaatagcaaaaataataattttatttttaaatgggcaaagatctgaatagacatttctcaaaagaagacatataaatggacaataggtatatgaaaaaatgttcaatattgctattcatcagggagatgcaaatcaaaactacagtgagatatctcactccagttaaaatggctattatcaaaaagacagaaaataacaaatgctatgagaatgcagagcaagggaaccacttttattctgtggtgagaatgtaaagtagtacaaccactacagaaaactgtatggaggttccttccaaaactaaaaatagaactaccatatgatccagtaattccactgctgggtatatatcccagaggaagaaaatcagtatattgaagaaatatctgcactttcatgtttattacagcaccattcacaacagccaagatacagaatcaacttatgtgtccatcagtgggtgaatgcataaaggaaaagtggtatt

SEQ ID NO: 609666 - DNA, 596 bp, Homo sapiens
catatatgcttctgctttcagtttgttgggatacattgctttggttgaagcatatgaggaaaacctggcttcacctagatacacccccacggttggaaaaggaagcattttaatagcctttcaggtgatacattattttttgatactatacgataacttagcaagtggtagtttcttaaaggttaattgcagtgaggaatctgaaaccatatgaatgaacattttggactgttacactaaagtttactggtgtattttatggttcaaattratcttttacccacataagatttcataacattatgcatcggtcaactggaaaatccagttatgtagctctgtacagtggaaaatccagttacgtagctctgtacagttgtccaattgtacaatggaaaactccactatatacttgagagagtagaaaataaaactaatgtcttagcattattatgaaaatagttttggactttgcatccccttaatgggtcagggtgtagtccatcaacagcttctgcaaacataaaggaccttttgactgtcgttttcctgaaaaataactcgaacgaacctaaaggtaaatgtaaaatgtactt

SEQ ID NO: 609667 - DNA, 578 bp, Homo sapiens
gccccttggttggatgaattctgagtcttggttttcagaattctctagtgggatcgagctctatctgcccatggtggtaatttgcttgataatgtgcatcctttattggctttcttgtcttctctgtctcatgtccactatttccagtgttttccgggascctttctcaaattcctggcacttgaattcttatctcagggtctgccattgtgtgaggctcagcacaatgcctagctagcacatagtaggcactcaattaattcatccttgacaggtcattgatcaatattgcagatgggatttctgccttgggagagaggtgacactatatgaccgtgaaggattcttgcaggtgcaaaagtcttcccacgtagaaatcaatgtctttccaactaggagacctagaaaaggagctgtgaggtggaaacatatgaaaaaaaaattttctcccctctgtgccaacgtgctttcatatgtgaaggaggaagcgaggctcacaggttggttatgaaatcattcaatttcaatttcttgagccagcatatcgccttttatggacactgcagcccagggtaatg

SEQ ID NO: 609668 - DNA, 579 bp, Homo sapiens
gaactaaacttttaaatatccctgcagctaaagccagaactggccccaaagctaagcatgggaagttcaaattgctgagcttgtagtggggygcatattagtccattaggaggtggctgggcaggtgcaggggcaggagatctggcaggtcacactatgagtaaccctgaagaagaacatcgatttcaagaagtaaatggagggagagacccctctggttaaaattgagacccatgatgaaagggacaccaagtttcctaaagcagaattggaacaaaagtaaatttaatttcctatttttaaaaatgggatcttagaaaaatgagagactaagataaaaaattcattgtatcctaaaccaaagaaacagtttctgggatgtatccatggctcatacttattttatgtgtttgtcatttcactgggtgaagatataagatgcaaagttatcaaagcagggcatgataaaattctgtaaagagaacaaaactctggattataaaactggactcaaaaagaatccagagaaacttaaaattaaaaacataaaaccatttatattagcaccaataaattaaa

SEQ ID NO: 609669 - DNA, 615 bp, Homo sapiens
gcagagctggcggccgctagcgacagccaccctgtgagggactttccccccaataccctaaccgctttcctgtccctaagggcccgctcccgccccggctccgtttctgtctctctgaggaagcccggcgcagcctaaccctcacagggccgcggagagggcgcgccaggcggggatttgcgccaggcccgcggcgcatgctcagtggttggggactgggcgggtaccccgggcggggagcctgactgaacggcggctctgctgattggtcgggctgctcacgccacgcccgttgccttccgatggacagttccttacctgccgggtcggcctccgcagagagyggtggtcttgaaaacccagttttgggagaatacctgccgcgcctcccgcccaaatacccagaggtttcatagccgccatcgctgcggtggaggaggccgcctgttgcgtcccaccccaccagaaagcctaacactggcctgaagcgtaatcttaaagtggtaggggaaaataccgatctagcgcagagagcaaaacacctccgttctgggtttaatgggcaggtctggaggtgaggtatgccgtccgcactcaataattacttgcaggatc

SEQ ID NO: 609670 - DNA, 615 bp, Homo sapiens
gcagagctggcggccgctagcgacagccaccctgtgagggactttccccccaataccctaaccgctttcctgtccctaagggcccgctcccgccccggctccgtttctgtctctctgaggaagcccggcgcagcctaaccctcacagggccgcggagagggcgcgccaggcggggatttgcgccaggcccgcggcgcatgctcagtggttggggactgggcgggtaccccgggcggggagcctgactgaacggcggctctgctgattggtcgggctgctcacgccacgcccgttgccttccgatggacagttccttacctgccgggtcggcctccgcagagagtggtggtcttgaaaacccagttttgggagaatacctgccgcgcctcccgcccaaatacccagaggtttcatagccgccatcrctgcggtggaggaggccgcctgttgcgtcccaccccaccagaaagcctaacactggcctgaagcgtaatcttaaagtggtaggggaaaataccgatctagcgcagagagcaaaacacctccgttctgggtttaatgggcaggtctggaggtgaggtatgccgtccgcactcaataattacttgcaggatc

SEQ ID NO: 609671 - DNA, 615 bp, Homo sapiens
gcagagctggcggccgctagcgacagccaccctgtgagggactttccccccaataccctaaccgctttcctgtccctaagggcccgctcccgccccggctccgtttctgtctctctgaggaagcccggcgcagcctaaccctcacagggccgcggagagggcgcgccaggcggggatttgcgccaggcccgcggcgcatgctcagtggttggggactgggcgggtaccccgggcggggagcctgactgaacggcggctctgctgattggtcgggctgctcacgccacgcccgttgccttccgatggacagttccttacctgccgggtcggcctccgcagagagtggtggtcttgaaaacccagttttgggagaatacctgccgcgcctcccgcccaaatacccagaggtttcatagccgccatcgctgcggtggaggaggccgcctgttgcgtcccaccccaccagaaagcctaacactggcctgaagcgtaatcttaaagtggtaggggaaaataccgatctagcrcagagagcaaaacacctccgttctgggtttaatgggcaggtctggaggtgaggtatgccgtccgcactcaataattacttgcaggatc

SEQ ID NO: 609672 - DNA, 433 bp, Homo sapiens
cttgctgcttggggcccctttgagcaataccccagggacactccacccagcaaatgcagctgctttctgcagcagcagctgaatccagatgccagtgcttgcaacaccagcagagccagtttcaccactcccagcccgccaccagctggccagcgcgtccttctcagaggtctggtcccagtcccctgggaccactcctmtaagtttcaaggttttgtttttgtttttgtttgagacagagtctcactttttttgcccatgctggagtgcagtggcatgatcttggctcactgcaacctccacctcccagattcaagcgattctcctgcctcagcctcccaggtagctgggattagaggcatgcaccgccacatcctgctaatttttgtatttttagtagagattaggtatcaccatgttggccaggctggtc

SEQ ID NO: 609673 - DNA, 579 bp, Homo sapiens
cacacacacccctcctccagtagttcccatgctaaaatggaaaggtgagggtattggctattgttcttactttgtacgggcagatattgttattcccatattgtgtcttgtcaccttgctaattttcagcccatagacttctatgcaccaargtgttcacacaaaactcacattctttctaaatgttttatgtggtagatgcccaccaacatgtctagcttcaaacattcttgtcatcttttactgttactttatctatgcatacctcattgaagtaacccactctcatacatacatttaattatttgtcttgacctaaaatggtaggatgttttaaattctgaaatttgctttttgaggcacagcttcctatttacttcactacctcactcactccccacatgcaccatgtctgcattgacctaagtggtatcaccatttctactgcctctgcttattctcttagcctataagccttgttttgatacagcatttatctagtatttggatatcagtatctagatcttagggtcaatcctttcagccactatttcaccactaacaatgccctcattccct

SEQ ID NO: 609674 - DNA, 579 bp, Homo sapiens
cacacacacccctcctccagtagttcccatgctaaaatggaaaggtgagggtattggctattgttcttactttgtacgggcagatattgttattcccatattgtgtcttgtcaccttgctaattttcagcccatagacttctatgcaccaaagtgttcacacaaaactcacattctttctaaatgttttatgtggtagatgcccaccaacatgtctagcttcaaacattcttgtcatcttttactgttactttatctatgcatacctcattgaagtaacccactctcatacatacatttaattatttgtcttgacctaaaatggtaggatgttttaaattctgaaatttgctttttgaggcacagcttcctatttacttcactacctcactcactccccacatgcaccatgtctgcattgacctaagtggtatcaccatttctactgcctctgcttattctcttagcctataagccttgtyttgatacagcatttatctagtatttggatatcagtatctagatcttagggtcaatcctttcagccactatttcaccactaacaatgccctcattccct

SEQ ID NO: 609675 - DNA, 465 bp, Homo sapiens
tggttacataggtaaacatgtgccatggtggtttgctgcacctatcaacctgtcatctaggttttaagccacattatttttatattatgtttataaaggagattacctacagaagctgccattcagaggacagactgctaggagttgaattgtgtcacccaaaaagatatattgaagtccttatccccagtacctgggaatgtgactttatttggcaatagcatctttgcagatgtaatcaagttaagattaaagtgggccctaattcaatatgattgatgtctttataagaagagaaratccatagacacccagggagaaggccatgcagcgacagaagcagagattagagtgatgccgttgcaagccaaggaacaccgaagactgaagaccacaaccagaagctaggacgagccaaagaatctgctaagagtctcagaagaagcctggcccagctgacaccct

SEQ ID NO: 609676 - DNA, 522 bp, Homo sapiens
agatttggggcctttccccattaatgcaagatctgttatttatttatttatttatttatttattttatttatttattttttgagacggagtttcactcttgttgcccaggctggagtgcactgctgcaatctcggctcaccacaacctctgcttcccaggttcaagcgattctcctgcctcagcctcggtagtagctgggattacaggcatrtgccaccatcctcggctaattttgtatttttagtagagacggggtttctccatgttggtcaggctggtctcgaactcctggcctcaggtgatccacccgcctcggcctccaaaaatgctgggattacaagtttgtttgtttgttttctgaattagagtctcgctctgtctcccaggccggagtgcagtagcgcaatcttgactcattgcaacctctgcctactgggttcaagcgattctcctgcctcagcctcccaagtagctgagattacaggcacccaccaccacgcctggccaatttttatattttt

SEQ ID NO: 609677 - DNA, 596 bp, Homo sapiens
aagctttctgaggcctcaccagtcatgctgaactgtgagtcatttaaacctctttcctttataaattacccagtcttgggtatacctttattaacagtgtgagaatggactaatacacaaggttttatgtatctattccttaaagagaccctttgttaatgatcaagtccgagattygtctccttcctgtcaaacataattcaccatcatttgctcctttactccttcccctcacgaagtcaaacaggtacaaacagaaggtcttttcctgaggtttcttttttactaggggttactatgagagctggctttcaggcaggaatgctacgtacagaaataggaggtttttggaaaattttatccctctgcatttttactgcagagaataacatctgatataactagatattgtaggcttttacctcttcccctctacatgcacctctgcctattttcttatgacttgagttaatatagctcagaggagtcttaaataaaggaataaaaatagcaaaatactttggaatttatatatctaaatgtatgtacacatacatacatatataaaatttaaaaacatatcttgtttttcaaag

SEQ ID NO: 609678 - DNA, 548 bp, Homo sapiens
ataactggggactagcattgtctgaaccaacaagagagacttccctgagtaagtggcctccaagtcaagcctgagggatgaattgagttaaagggatatcaagggcacatgctcaggattagggccaggaagagaggttttcttcaaatgatattacagccatgctgtagccacaagaaccattcagcaagatcatgtgtgctttgctccctcaagcccttttttcctgtatgtggactttgtccctgattgaaattctctccagattcagttaatgccacttcctcttttaagctttcactgactctaagaaaagttagacacccctgccctgtgtgcttgtgtgttactgacacatcaaaggtacttgttaaatattcattggatgttcagcaaataaatataacggcgccttattcagtaacactcttttgcttgtccaacccatcaccagactctgagctccctggagcagaggctgtgtcttgctcatcstctatcacgatgctggatttgtggcactttaaaaatgtttgttgaatgaatgc

SEQ ID NO: 609679 - DNA, 608 bp, Homo sapiens
tggggtagcatgttctgaaccccatcactggcaacaagagtcttccagttccagaaggcctggctaagtctccaggcacagttggttcttggatttcctctctttgctgagtaggtatttttgaaaaaacaaaacaaaacaaacaaaacaacaacaacaaaacacaacccctggggaagcccgagcacatctcagctgctgcctcacttatccaggcctggtttagctttctcctctgcccctgcctcacactgttgccttcagaaccagccagcagagatggaggctacaggggtttgggtacaayaaagtgatggggctagtgcctgtttgaatgagctgggaaaggtgaggacaaactgcagccttgactcctgaagttcatggattctgaagtcatcgttgccttcccctgcagggcagcttaagtctctctgcttagctcagtggttcccagccctgcctgcatgttagaatcaccagggaagcttttaaaccgcatgaaggaggagacatcaccttagaccagttaaaccaggtgctctgggggtgctgaggtcaggcactggtatttctaaaatgctccccatgtgatttgaaggtgcagc

SEQ ID NO: 609680 - DNA, 598 bp, Homo sapiens
cttaagtctctctgcttagctcagtggttcccagccctgcctgcatgttagaatcaccagggaagcttttaraccgcatgaaggaggagacatcaccttagaccagttaaaccaggtgctctgggggtgctgaggtcaggcactggtatttctaaaatgctccccatgtgatttgaaggtgcagccaggcttgaaaactattacttaactgcaattataatcatcaattattttaactactaatgatcaattattacggctcccccaccagcatgtattgacctgatagttagctctaagtaatcattgtctcaaactttttttttttggccactaattcttattaaagagtttcagtttgttattaagttttcccacacaaatatatttctatggcacagtagttcagaagatgtgatttctgagatgtattctctctgggggaaccatctatttgtaagagtacaggacgtggtttcctttactcatgtagagtccctacgctttgatgaatggagtcacttggtcgtttatggatatcttatagaccatatagatccaaccatagaataacaaaaaataaaagttttcctcctgt

SEQ ID NO: 609681 - DNA, 598 bp, Homo sapiens
cttaagtctctctgcttagctcagtggttcccagccctgcctgcatgttagaatcaccagggaagcttttaaaccgcatgaaggaggagacatcaccttagaccagttaaaccaggtgctctgggggtgctgaggtcaggcactggtatttctaaaatgctccccatgtgatttgaaggtgcagccaggcttgaaaactattacttaactgcaattataatcatcaattattttaactactaatgatcaattattacggctcccccaccagcatgtattgacctgatagttagctctaagtaatcattgtctcaaactttttttttttggccactaattcttattaaagagtttcagtttgttattaagttttcccacacaaatatatttctatggcacagtagttcagaagatgtgatttctgagatgtattctctctgggggaaccatctatttgtaagagtacaggacgtggtttcctttactcatgtagagtccctacrctttgatgaatggagtcacttggtcgtttatggatatcttatagaccatatagatccaaccatagaataacaaaaaataaaagttttcctcctgt

SEQ ID NO: 609682 - DNA, 483 bp, Homo sapiens
ctctctccagttcttcacagttagaataaaaaatttccttaccyagcaaagagacattcaaaatttatatttaagtgttaatcttgaaaccaaactgttttatcttccatgtatttgctttctttcctccaaagtatgtttactcattttgaaattcaaagtgtcataattagttttcacaaaaaaacttactgcctctgggtttttctttaaatttattgaggaagaaactgattactaaattgtcacactgataccttcatatatccttgttcaatcccccaccctgaaaatcacatttggatttttcaaacctgtcctacctgttcagttttctagttatggagatgcaatgatggtaatcatatatgatcgtgacagacaagaacactgttcataattatttctttcctctcctttcctaatatagtgtatagaatccagaaactattgacttagaccaaggactcaacttttgtcaaa

SEQ ID NO: 609683 - DNA, 483 bp, Homo sapiens
ctctctccagttcttcacagttagaataaaaaatttccttacctagcaaagagacattcaaaatttatatttaagtgttaatcttgaaaccaaactgttttatcttccatgtatttgctttctttcctccaaagtatgtttactcattttgaaattcaaagtgtcataattagttttcacaaaaaaacttactgcctctgggtttttctttaaatttattgaggaagaaactgattactaaattgtcacrctgataccttcatatatccttgttcaatcccccaccctgaaaatcacatttggatttttcaaacctgtcctacctgttcagttttctagttatggagatgcaatgatggtaatcatatatgatcgtgacagacaagaacactgttcataattatttctttcctctcctttcctaatatagtgtatagaatccagaaactattgacttagaccaaggactcaacttttgtcaaa

SEQ ID NO: 609684 - DNA, 483 bp, Homo sapiens
ctctctccagttcttcacagttagaataaaaaatttccttacctagcaaagagacattcaaaatttatatttaagtgttaatcttgaaaccaaactgttttatcttccatgtatttgctttctttcctccaaagtatgtttactcattttgaaattcaaagtgtcataattagttttcacaaaaaaacttactgcctctgggtttttctttaaatttattgaggaagaaactgattactaaattgtcacactgataccttcatatatccttgttcaatcccccaccctgaaaatcacatttggatttttcaaacctgtcctacctgttcagttttctagttatggagatgcaatgatggtaatcatatatgatcgygacagacaagaacactgttcataattatttctttcctctcctttcctaatatagtgtatagaatccagaaactattgacttagaccaaggactcaacttttgtcaaa

SEQ ID NO: 609685 - DNA, 614 bp, Homo sapiens
taccttcacacttacatatcacacttcacacttacrtatcaattttaatggtgcctctgagtcacaagtatcaatacacttgacgttattaccaacaagggactttccagccccaccttgcaaccagccaaatctagaaaacaaggataatgaggacatcatccatcacccctcctgcataatatgcagtgcccataacccccagcattctacccttaaagaacaaaactaaagtgttggctcagttctctaaccttctttaaaagcttatatatcaccatttggcatcttcaggtttgactcatacaggatattgtgttcttttcatgagcacacaatgagctaaggttctctcaagggtatagctatatgcttaggaaggaaagtttataagattttcttcttaactctactaattgaaaattagctttctcataaaaaaaattttggtttttccctaggggtgtagtacaattggaagatcagaaaacatcaagaacaaaatattagatggaatgtaaaactgtattaagagtggtttggaactcttgagaaacagtgggtgccttcagtccttgtgctattattgattggagtttgaggccaccgtctga

SEQ ID NO: 609686 - DNA, 614 bp, Homo sapiens
taccttcacacttacatatcacacttcacacttacatatcaattttaatggtgcctctgagtcacaagtatcaatacacttgacgttattaccaacaagggactttccagccccaccttgcaaccagccaaatctagaaaacaaggataatgaggacatcatccatcacccctcctgcataatatgcagtgcccataacccccagcattctacccttaaagaacaaaactaaagtgttggctcagttctctaaccttctttaaaagcttatatatcaccatttggcatcttcaggtttgactcatacaggatattgtgttcttttcatgagcacacaatgagctaagkttctctcaagggtatagctatatgcttaggaaggaaagtttataagattttcttcttaactctactaattgaaaattagctttctcataaaaaaaattttggtttttccctaggggtgtagtacaattggaagatcagaaaacatcaagaacaaaatattagatggaatgtaaaactgtattaagagtggtttggaactcttgagaaacagtgggtgccttcagtccttgtgctattattgattggagtttgaggccaccgtctga

SEQ ID NO: 609687 - DNA, 622 bp, Homo sapiens
tgggttaagcataacaggttgctttactcgagaagttcttaaagtctttaattcatatgtactttgtgaacatctaagagaaggatttaagttttatcaaacttatttaactacggcacacttagtttgggggttttcagtcacacaacaggcataccttggagatattgtgggtttgattttagaccgttacaataaagcaaatattgcggtaaaacaagtacataaatkttttaattttctagtgcatataaaagttatgtttatactatactgtagtctactatgtgtgcaatagcattatggctttaaaaacaatgtacatacctcaacttagaaatgctgtactgctaaaaattgctgaaactgacacatgaaatgagcaagtgttgttggaaaaaatggtgctgatggacttgcttgactcagggtggccacgaaattcaacttgttaaaaaacgcagtatttgcagagcacaataaagtgaagaacaataaaatgaggtacacctgtattattccataggccacccaatactgaagacagccaatactagttttttaatagaaatgtctccacctttaagcagataacacacaaagcaatatgagtttggagttt

SEQ ID NO: 609688 - DNA, 537 bp, Homo sapiens
ggcgggttagggaggagagaactgccctgcaaaaagtcagctggggctgggcacagtggctcacccttataatcccagcactttgggagtctgaggtgggtggatcacctgaggtcaggagttcsataccagcctggcccacatggtgaaaccccatctctactaaaaacaaacaaacaaaaaaattagccaggagtggtggccaatgcctgtaatcccagctacttgggaggctgaggcaagagaatcgcttgaaactgggaggcagaggttgcagtaagctgagactgcaccactgtactccagccaggacgacagagagaggctccatctcaaaaaaaaagaaaaaaaaaaaaaaaaagaagtcagctgggaggctgctatgattctggtacaaggtggtatattagtttcttagggctgctataacaaattatcacaaactgggaggcttatagcaacagaaatttattctctcacagttctggatttcagaggtctgaaatagaggtgtcaataggaccatgcttctgctaa

SEQ ID NO: 609689 - DNA, 537 bp, Homo sapiens
ggcgggttagggaggagagaactgccctgcaaaaagtcagctggggctgggcacagtggctcacccttataatcccagcactttgggagtctgaggtgggtggatcacctgaggtcaggagttccataccagcctggcccacatggtgaaaccccatctctactaaaaacaaacaaacaaaaaaattagccaggagtggtggccaatgcctgtaatcccagctacttgggaggctgaggcaagagaatcgcttgaaactgggaggcagaggttgcagtaagctgagactgcaccactgtactccagccaggaygacagagagaggctccatctcaaaaaaaaagaaaaaaaaaaaaaaaaagaagtcagctgggaggctgctatgattctggtacaaggtggtatattagtttcttagggctgctataacaaattatcacaaactgggaggcttatagcaacagaaatttattctctcacagttctggatttcagaggtctgaaatagaggtgtcaataggaccatgcttctgctaa

SEQ ID NO: 609690 - DNA, 475 bp, Homo sapiens
tcactgagcaggtttgcggcttcattcttgaagtcagtgagaccaagaacccaccaattctggacacaaaatctgtttgcctgtttagaggcatactayggggttacattagaagcccaccgagataatccaatacaatcttctgatctcaaaatccttcacttaatgacatctttggcaacttgaaataataatcacaggtgtctgacttttaaggtaagctaccacagacctgatatattggggacttttatcagcctatcacaggcggtaaagacttaggtagagcagatcatctaaccgggctggagctgtggccagcctggtgctctggtgtgtgctgggtcggcccagggctgataatggggtggggggaagcactcaccagtggctatttgccagctgtcatggctttacctgtaccttacaagtgtagctgaatacaatccctgattgtgggagaaaagagaatgag

SEQ ID NO: 609691 - DNA, 475 bp, Homo sapiens
tcactgagcaggtttgcggcttcattcttgaagtcagtgagaccaagaacccaccaattctggacacaaaatctgtttgcctgtttagaggcatactacggggttacattagaagcccaccgagataatccaatacaatcttctgatctcaaaatccttcacttaatgacatctttggcmacttgaaataataatcacaggtgtctgacttttaaggtaagctaccacagacctgatatattggggacttttatcagcctatcacaggcggtaaagacttaggtagagcagatcatctaaccgggctggagctgtggccagcctggtgctctggtgtgtgctgggtcggcccagggctgataatggggtggggggaagcactcaccagtggctatttgccagctgtcatggctttacctgtaccttacaagtgtagctgaatacaatccctgattgtgggagaaaagagaatgag

SEQ ID NO: 609692 - DNA, 597 bp, Homo sapiens
atttgttacagatgcttacctttgatttctcaagagaatagaaataaaagactgcagaaaatgccttgacctatattttccaaatccctgtctctagcaaatcccatacttccgccttcatagcagaaaacttcattggttctgttttttttttccttaagaaatatgtaayaaatcacagggcatcaggagtgtttaatatttagccaaacactttcataaaatgatctaaggttagaccagttgtatgatcaaggcaacaattccatcttccttgaatattctggaattcccttcacctccaagtatggccaccatctcctcctgacagcttatcctgattgaacagaaatcaggcattgggcaaaagaggcgccagcaagactcctggccctagttagttacttctcatgctccaaaagaggaaggtgggctgattgagttttgaccaaagcaagaaatgagaacgaggcagcatggccaggacaaggcacctttggacctcctattgccgggagagcaattgatcgaggagcccccaacgctgtgctctgaaatgcaactctgcgttttcctgcaggccacacttcccaaatg

SEQ ID NO: 609693 - DNA, 635 bp, Homo sapiens
aaactttctaagaggtctgaattatgcaaatcatctctttaaaaacttcctataagagacaaatacaactgcccagagaatgtttaatttgatacttatcaccatcagcatattttctattgatcaaatttataatactgaatatttarattgtttacatgtttgctgagcttatagttagggcactttatgtaatcttataattttttataaaccttggaacagtagcctttaggttaacactctagtttgtagtttgaggactgtatcaaaccttatttaatgccaaactctgttatatgttgttaatgggttaagcaggccctgtggcacagaagaaactgaaggaaacaaggaagtgaacatgtattaagcacttgtgcatgcttttgtaccatagttatttacacatcatgttttctaatcctcaccacaaccctgctttgtgatattatcttctctctttttccaggtgagagaactaagttgtgtgactccaaaagagcagaaaccaggaactggagaatggaggaccaaagatcagagaacaaacggtaatccagatgactgaaggatggatgttgtgccctctgccctttaggggatcacaagtctctgctgtgattgaagagggt

SEQ ID NO: 609694 - DNA, 556 bp, Homo sapiens
tttcttaacttctggcaccacaggcttatcttgtatttccctgccccagtctggaatcaacttctccaaagagcccttgtttctttgattttagaaaggtatttcaaaactaaaatctctgtgctactgggtcattgtccttaggcctcaaagcaagcagagttaggaaatactgtgtgtgtgtatactaacacatacacactcaatggtttatttttgcattaaaaaccacaaatttatattgacacctccagttccaatctaataccacaagattaatttcttttccctttcttatttgtagctttttttctccagcaatgaagtcttactcttctgatctaaaatacattcacatgtatrtagggtgtccaacctttcttgtttgccaggaactgagagggctcctgagacatgggactttctgttttaaaaccagggaagtccaggaaaatcaagatgagttgattgcttatttgcccaaactgtacattgcggggttgcagaattgctaacccattaccccaatgggaaacagatttgccaactagagtat

SEQ ID NO: 609695 - DNA, 443 bp, Homo sapiens
ctcattctttgttccagctgcatagtacttcattgtacggacataggtgaatgaacattcacctgtgtatgagcattcaggttgtttccagtattttactatcacaaatcatgctgcagtgccttaycttgtacttacatgttttttatattttgaaagtaaatcttcacagatttttagaattgggatcgctggatcaaaaggcaaatgcgtgtgtcattttgttagatattgaggcagtgaccttgaagtcaagctaacttgggttttaatacatactctgctacttcctagaaatgtggttaatctctaaacccagtctcatcaatcattacctggttgctcaaagtatggcccaaggaccagcagcatcacttgttcccgctgggaacttgttagaaatgcagaatcccaggaagccccagttctacagaatcagaatc

SEQ ID NO: 609696 - DNA, 437 bp, Homo sapiens
gttccagctgcatagtacttcattgtacggacataggtgaatgaacattcacctgtgtatgagcattcaggttgtttccagtattttactatcacaaatcatgctgcagtgccttatcttgtacttacatgttttttatattttgaaagtaaatcttcacagatttttagaattgrgatcgctggatcaaaaggcaaatgcgtgtgtcattttgttagatattgaggcagtgaccttgaagtcaagctaacttgggttttaatacatactctgctacttcctagaaatgtggttaatctctaaacccagtctcatcaatcattacctggttgctcaaagtatggcccaaggaccagcagcatcacttgttcccgctgggaacttgttagaaatgcagaatcccaggaagccccagttctacagaatcagaatctgca

SEQ ID NO: 609697 - DNA, 437 bp, Homo sapiens
gttccagctgcatagtacttcattgtacggacataggtgaatgaacattcacctgtgtatgagcattcaggttgtttccagtattttactatcacaaatcatgctgcagtgccttatcttgtacttacatgttttttatattttgaaagtaaatcttcacagatttttagaattgggatcgctggatcaaaaggcaaatgygtgtgtcattttgttagatattgaggcagtgaccttgaagtcaagctaacttgggttttaatacatactctgctacttcctagaaatgtggttaatctctaaacccagtctcatcaatcattacctggttgctcaaagtatggcccaaggaccagcagcatcacttgttcccgctgggaacttgttagaaatgcagaatcccaggaagccccagttctacagaatcagaatctgca

SEQ ID NO: 609698 - DNA, 424 bp, Homo sapiens
tagtacttcattgtacggacataggtgaatgaacattcacctgtgtatgagcattcaggttgtttccagtattttactatcacaaatcatgctgcagtgccttatcttgtacttacatgttttttatattttgaaagtaaatcttcacagatttttagaattgggatcgctggatcaaaaggcaaatgcktgtgtcattttgttagatattgaggcagtgaccttgaagtcaagctaacttgggttttaatacatactctgctacttcctagaaatgtggttaatctctaaacccagtctcatcaatcattacctggttgctcaaagtatggcccaaggaccagcagcatcacttgttcccgctgggaacttgttagaaatgcagaatcccaggaagccccagttctacagaatcagaatctgc

SEQ ID NO: 609699 - DNA, 585 bp, Homo sapiens
cattagttgttgccaaatttttgttgccttgaataatactagaatatctttgtgttgacagtttttctctactttggattgatttcttagaagtaaaattactaggtcacatgaatattgttgtgcctccatatgtattgtcaagtggatttccaaaaggttgaatgtcatttgtggtgttctcaacaatgagtaaggttacatcaatacacscccaccaacactgagcacttttttttcctaatttactattaaatttttcttaattttcttttcttttttttttctttcttaagacatggtctcaatatgtcacccaggctggagctcaatggtgcgatcacagcttactacagcctccctggggttaggtggtcctcatgcctctgcctcccaagtagctgggactacagtgtgttctcccaggcccagtcaatttttgtattttttgtagagatggggtttcgccatgtttcccaggctgattttgaactcctgagctcaagaaatccacctgcctcggcctcctaaactgctaggagtgagccaccaaacttggccaaaattgtcttagttttctgacag

SEQ ID NO: 609700 - DNA, 613 bp, Homo sapiens
atttaaataagtgtcctgggcaatttattgttgctaatgtcatgtcgataggtgttagacaagtataaaatagaatgttatagaaatagaatgtaatcatccttttttcccaagggtaactcagagtctcctgagataacacgtyatgttagcgtttatgtataagctactctttctttggaaatgtgttagaaaattaccatatggataatacttaaaatgttcttccttaagtgttttgagaaacaggagtcaaacaaacaccagcccctaagtccccctgccaccaggaactgagacagctcctggtggctcatctgaaactcctcttatcagcaacttactcaaaaatagctcaggatgaaaggtctttgtactatactggtaatttttctaaacattttaaattgtttcaaaattgtaaaagaagcagatatatatacacacacacacaaaataaacatgtagatacatattttaaaaacataaatgaggatgtgtgtcatactataacaagcctataacctgagtttttcacttaacattatgttataaacatcaccatattatatgcaacctgtttaaccggttcattgtaggtatataccataat

SEQ ID NO: 609701 - DNA, 613 bp, Homo sapiens
atttaaataagtgtcctgggcaatttattgttgctaatgtcatgtcgataggtgttagacaagtataaaatagaatgttatagaaatagaatgtaatcatccttttttcccaagggtaactcagagtctcctgagataacacgtcatgttagcgtttatgtataagctactctttctttggaaatgtgttagaaaattaccatatggataatacttaaaatgttcttccttaagtgttttgagaaacaggagtcaaacaaacaccagcccctaagtccccctgccaccaggaactgagacagctcctggtggctcatctgaaactcctcttatcagcaacttactcaaaaatagctcaggatgaaaggtctttgtactatactggtaatttttctaaacattttaaattgtttcaaaattgtaaaagaagcagatatatatacacacacacacaaaataaacatgtagatacatattttaaaaacataaatgaggatgtgtgtcatactatamcaagcctataacctgagtttttcacttaacattatgttataaacatcaccatattatatgcaacctgtttaaccggttcattgtaggtatataccataat

SEQ ID NO: 609702 - DNA, 585 bp, Homo sapiens
taaatgctacaaaccttcacaatcccttgtttgaacatttttctttttttttttttctttgagacagggtctggatgtcgcccaggttggagtgcagtgacatgatcatggcccactgcagccttgacctcctgggcttaagtgatcctcccacctaggcctccagagtggctgggactacagacacgtgccaccatatccaactaattatttttatttatttatttatttatttwtttttttttatggacagggtctcactatgttgcctagactggtcttgaactcctgtgctcaagcaatcctcccacctcagcctcccaaagtacagagattataggcatgaatcactatgcccaacccatttcttttgcatttagttttgcatttttctaagagatggggtcttgatatgttgtccaggttggtgtgtagtagctcttcctataggcaccatcatggtacactgcagcctccaatacttgacctcaagcaatcctccagcctcagcctcccaagtagctgggactacaggtgtgcaccaccacacccagcttcaatttgcaaattttgaatataaagctt

SEQ ID NO: 609703 - DNA, 491 bp, Homo sapiens
attagttagggtctgagtatctaaaaacaggatagtcattgtagggaatcagttacacagatggtgggagaactgagaagacaatagggaactgtgaggcaactgagacattagagatggaagccattaatacccataggctggaagaacaaagggaggaggtcatgttaccagagtgcagacactaggatagcccactgaaagctgaaattacagtgagccagcattcagcaggagttggagccacaggaaatacacagccatggcaaagagaggagaaaaaattaccttagcttcaccctttttcccatcttccagtctccctaccagtacctcccattggacaaacctaactgggaaacgtgagagcctgagaggtacaggctgtgggagtcgtccccttgtattatagagcagarctgggggaaagcaagaggtgaatcaaaaggcaaacaagccccaagccagcatagttgcattccctgttgaca

SEQ ID NO: 609704 - DNA, 594 bp, Homo sapiens
tcttggcaaaggggaagaaaggaggaaaggataattaaataaatgatcttagagtttataccaggggataagtacctaagaataaccaagaaaaaatatgaaaaagaaggttagtgaagggggtgaggacatgcttcaataattataagaacatacaataatctgctttaataaacattttattggcattgaacacaaaatgtaacaggacaacctgaaatttaaatccaattacatatgagaatttaatatatgataaggatggcattttatctaagtgggaaaataatgcattatttaataaatggtggtgatacaaataatctaagtggaagaaaattaaattagatctcyttgttttaccatatatgaagacaaatttcaggctaaatggctaaaagacttaaatgtagaatattaacaacttaaaattctgcaagaaaatttaggagacaatatgtggacaagattggaaaaacagatgacacaaaataaaaaatagagattttatcataaatttaaaacaattttatagcttaaaaacataagagtcgggcacagtggctcacgcctgtaatcccagcactttgggag

SEQ ID NO: 609705 - DNA, 619 bp, Homo sapiens
catctcattaatatggatatattagaggaatataagaaaattcctatgttccgcaattacacactgctgcattctatttttgaattaggtaactgggtcttctcgtggtttcactgaggcatgcctggccatggcctacatgaatcatctatgtcttcccattcaaattctccaggcccacwctcccgcaagtcagtgcttcaactttctcctaagagaccagctgaggatgtgaattcaactctttttaattcagaaattttggagatcaaactgtgcattttgtatttgactttctccacatttcaacagcaaaagataagatattcttataatgatcccaaggaagcctctggattttagcacatactttgaactgagaacttaggaatttgtgtaggtttttctttttattgaagctatccattacaattaggagaagccatctcatcccacagtcattgaactccctgtgtccttcgtattattcaatagaattgatctcttagttccccaaagcttggccttcaatgggcaattcagtctaggtgcacacaggtgacaatttgattaactggttctctagatcatgacaagaacccttaatcacaccagctgc

SEQ ID NO: 609706 - DNA, 313 bp, Homo sapiens
gccaagtaattaatgaacagaaagtccttctcagccttcaagatagacaagatcgataggcaattgcaggaaaaaagacatgaagaagacggtgaggagtagaatcaatgcaaggcaatttaagagacaaaataggaatgaagaacgaatgaaaggctcacagagaatattgacagaatatcggagagggaaaattacactaacacaatgaggccaatgtgcatgaagaaagctagaaagggggaaacagcagaagaaaactttcctagaaaaacatgaaaagaratcaactgatgcagaaaacgggacagaa

SEQ ID NO: 609707 - DNA, 418 bp, Homo sapiens
aaacctaaactcttgatttgtgggtgcctggagggaaaaagatgttttctacatgatayttacttccctctacatgttttcctacacatctgtggctttctgtaatctgttccatgtgcctgcggtgccttttctttccatctctacttagaaagttcctcatcctggttgggtgtggtggctcacacctgtaatcccagctccttgggaggccaaggcgggcggatcacttgagcccaggagtttgagactagcctgggcaacatagcgagaccttgtttctacaaaaaataaaaaacaattagctgggtgtggtggcaggaacctgtagtcccaactacatgggaggctaaggtgggaggatcactggacctgggaagccaaggctgcagtgagctatgattgcgcctctgcactc

SEQ ID NO: 609708 - DNA, 455 bp, Homo sapiens
catacacatttaaccagtagatttctgacaaagatgccaaggcaattcaatggggtaaagacaatctttccagcaaatgattctgaaagaattgtagtgtcatttacctaaaaaaaaaaaaaaagaaccctcaatctttatctcacagtatacactaaatttgactcaaaatgaatccttaaatgtaagagccaaaactataaaatttctgaaggaatacaatagataggagaatttagtgatcttgagtttggcaaagatttctttaaaagacatacagaatgcttaacccagccgtggtggctcacacctgtaatcccagctctttggaaggccgaggcaggaggatcacttgagcccaggagttgraggctacagtgagctgtgattgtgccactgaactttagcctgggtgacagagcaacactccatctctaaaaacaaaaaaagaaaag

SEQ ID NO: 609709 - DNA, 531 bp, Homo sapiens
caaatcggcatttaaaagctattattcaacagcacaaatctagaatcatatgagacacacacacatacatacaaatatgtgtgtgcctgtgcatttgtatatgtgcgtataaatatgtatggatatttatatcctgatgctcaaactcagaccttttgaagtagagtctcctggtatggaccctaacaatgtgtgtgtatgtgttcttgtttgttgttgctattgctcttcagttgatactgatgatcagcgaatttctacaactttccatctagcaggttttcaaatgtgttccaagaagccctaagtatgtgagtatctgtggagatatctgtggagtcatatatttggtactctggtaaataagatggttttatctcttttatattttatgtatatttacagattttgtgtaagatattgatygggaaaaaagtattttttaaagttaatattctattgattcagagaaacctggtaaactgaatgatgtttaaagtgtgtggtaggtgctgtaatggaccacacaga

SEQ ID NO: 609710 - DNA, 511 bp, Homo sapiens
actaggtgatatacagatgacacaaaccttggcaactgggatgattgcccaggcagattctccaaatttctgataattgggactgactgtggctaaaattgagtctatggctgagaaagtctttctaaataagaagtaaccaagagcatgaagctttctggtctcacatgtgttcctcattcactcaccactcatttatagttcccgtctttaaccaaatatttaattgtgtgctatctcctaagcattgtgctagacactggagatgcaaagatgcacaarctctctgctctcaggaagcacaccctctagatgagaagacaaacatatatctgaccataattccatgtaacgtgaatatccttagtaaattcaaaggcgttagaggtctcctgatgatgcaatagttcaggcaacttgacaaatagaaggggtggaaaagactccagtggtgaaactgagctgaactatgaaggaaaagaattatttagccttgcagaaaagaagggaa

SEQ ID NO: 609711 - DNA, 462 bp, Homo sapiens
tcccagcaatcctagtccctttgtgtggctggtgtatttggtgactatgcatgtggaaggtcttccactccctgtgaatacactccagttcttgagaggctatttaagtattcatcctttgtgtggttttgattttcctatgctggtagatattgttagcattttgattttctctttgcagagcactgctgtggctggtacagtggaggctggcactccaccttgatgctcactgtggggcttttgtgcagagtctgttatcctcaaagagccctytttaatgtttacagagaaggtgtgacctctagcagaatctcagagcttcacattttattagacacctaatgttctttctatacctactatttatatttatgtgcattggaatcctttggctatatagctgctatagaagagccaactgcattagcttgctcgggctgcagaataaaatatcacaga

SEQ ID NO: 609712 - DNA, 567 bp, Homo sapiens
acagttttgagtgagagggatttgagtggccagacgtcatataggggctttcctgaactctctccttcccagctgattgtgatagaatgtcttttttttttttttttttttttgagatggtgttttgctgttgttgcccaggctggagtacaatggtagggtcttaggtcactgcaacctctgcctcccgtgttcaagcaattctcctggctcwgcctcctgagtagctgggattacaggctcctgccaccacacccgaataatttttgtacttttagtagagacagggttttaccatgttggccaggctggtcgtgaactcctgacctcaggtgatccacctgccttggcctcccaaagtgctgagattacaggcgtaagccactgtacccagtctgatagaatgtctttttaaacagacaccctatcagtcagaacttggaggccatacagtgccccttcaaacaattatgggtatgaaaaatgaaaaatagcctcccccacactccctgctatattaatttaggatttggaaggaagctgggaggggctggtctagattttgtt

SEQ ID NO: 609713 - DNA, 564 bp, Homo sapiens
ccatggcggaaatttcatgacattcatatataaagcaaaagtgcgaggaatctcaaaatgtgttactgccccaaagacaaaaattataatcttactgttaatttttaaaatatttccagtgcctttaattttaattaaatgttaattttaattttcatgctttgctatagtcactattaatacagatttttattacctggttctcttgagcactatttttttttaattaatagttctttggtacaagttcttactctaattttacattagcacaaaaccagatgacaaagaaacytaaagcaggtttcctatttcacacataacaattacacactttagttctaacatccttataagtaggcactaagtaattgtcaatgaagatctgaaacattttcttggcttgctatttatttatttatccaattaattcatcaatttttttcatttttagtttttgaattaaaaattcattcatttttaatttctttccagaagttccaccaccaaccatactggagaacttactcaagaggagaagaaaaattctaagatgtcttggta

SEQ ID NO: 609714 - DNA, 537 bp, Homo sapiens
aatgaaataggacagtaacagcatgagagcaacagacagcgtaggttggtaacatttacacaggagtcttaatgttaaatccaatctcgactagtctttatttgccatttgttggaaatgtttaacaaatcttccaagtgagaaaaattttaaattatgtgtgaatgtgtgcacatgatatatgcatacataatacacatgtttatacaaacacaccacatgtatgtgtacttgtaaaactcgcgtatggtagaagtgactggatttatgattctctcttattscatctacagaaacaatgctgggctatcaggttaatgatataagtggagtgttttatatttggagtgtgccagaatgtcatatttattgggcttcagtggctagaatggtcagtagcggttgtagtattctcttggtcctctttccttagtcttacctgccactggagtgctttattttatttttttgagacaggatctcactctatcacccaggctggagtgtggtggcacaatcacagctcactgtagcctt

SEQ ID NO: 609715 - DNA, 579 bp, Homo sapiens
cactgcatattctaggctgtgaaaggtcattcccaaagggcaacagggagctgagtcatcagagaaggcctggaacacaggagaaatggaagagctgggagcctgagggcttaatgaagcttttcctccagccctggtgaaccccgaataagaactaagaacttagcatatgactcaccagaagctccagccctctcagtgcattagtctgttcccgcgttgctacgaactatacaacccaagcctggactaatctataaaggaaagagatttaattgactcacggttcagcatggccagggaggcctcaggaaacttacaatcaggacagaaggggaagcaaacacatccttcttcacagggtggcaaaaaggagaatgaatgagtactcagtgaagggggaacccccttagaaaaccaccagatctcatgagaactaactcactatcgggaggacaggaakggggaaactgcccccatgattcaattatctccagctcgtccctcccacaacacatggggattatgggaactacaatttaagatgagatttgggtgggaacatagccaaaccatatc

SEQ ID NO: 609716 - DNA, 497 bp, Homo sapiens
gtacgtttgtctcaccatgcatagcaggaagtagtttcagaaacacaaaattgtgmcactaacagttaataggccagaccaaaatgttttatgtctcagtgtcaataaacgacccttctgagaagtaagtttttagaaaatggcctgagatataaattggactatcaagatatttaggcttcacataattatgtgtcttcctacacattcaaagtggagaattatttttagttcaataattacattttgctttaactagtctagataatgctagaatttattgattttccattataatggcagtcaatttcacattcattgtattattctagccttattttaatcttgctttttacatattaatacactgatatcaaaaaaaagtttgcctcactgtttataagtaacagagacagaatttaagctcagagataactccaaagtttatttcgttccttttttctttctttcttcttctttttttgtttttgaaatgc

SEQ ID NO: 609717 - DNA, 606 bp, Homo sapiens
acactctttacttactataggtcagaaaccctgtacagggactcctaaaatgcagcatatgaggccagttccccaaggggtttttattggttctacaagtcaaaattgatttcttaaaggaaagcagaccattccagtcaaagcctttgcaaaaataagcagtttctccaattgtgttcattacaaatgaaaacagatttctattgcacttatgcaaataactatattgccataaattaagaatactcacaaatagtttccaagttgtggagaaattaggtagagagaaacaaaatgttccaatttttttttacaggaatactttactcaattgcttaaagttgtaaatagctsaaaataagttttcttgactctgaaaaacaaaacaaagaaccagcaacattttaagcacagttaaaaacttcctcagtttagtccatgcagttaatttctgtttgatattcatgaatatttcagctttccatgagagtcctgaaagttttttcctctattctaatgtcacaatttccaaaattatcagaaacctgcatttaagaacacctgttagagttctatagctgactataaaccaccttctaaagagga

SEQ ID NO: 609718 - DNA, 627 bp, Homo sapiens
tctctcctactgagacgcagcaggtaggtccacaggccaatccaactgggagttgaagtgtgagtgagggtgaggaggagccagcaggcttccagagggtcatcagggggagggagactcagagggagaagggcctggaggtcttcatccttttcacatggcgccacagccaggggccttcttttttgtcagggccacaactaggaaggaaggagggccttggcgcraaggggatcgggttaaaatggggcacgtgttgtgggtgctgttggaggtatctgagtcccagaaatgcctcaaaccacatcagagatatccagtgactcttgccaggagccttaaggcattatttggctagcttcaccaccttaagtgactgtgcaagcattctattcagaaggcacacaaagttatacttgccctgggacttaccttcaaagtatttccaaactttaaaaaaatgacaagttaacatttggccatggaagtgctcaaatatagctatcctctcaagtctattttcccaatcacagtatttttgtattctctttgcagagtgaaatataatctggtgaggaagatcaacacgtaggcctagaccaagatgaagtttacaaactcctgagc

SEQ ID NO: 609719 - DNA, 576 bp, Homo sapiens
atcatagacttatatgcttttggaagtagaagaagtggaacctcataaaactttttgctttttgaagatatgaacactgacccagcgagataagttacttccctaagattgcaaagttggcctgtatagctggtagtagacttcagagaggcttcttccaagtccccacttatcactccatgctccataaaagagaagaaggctttcatcttaaagctcattttaaatcatgaagtgggtaaaaggaaagtcagtctgtgtgtgtatgtctctctctccttttctctccattcattcatccttccatcatctaaattgcttagktaaattttctcgaagtgcacctgggcataaatttccttggatcataccagtcatattgccaatttatatggagatatccagtgatcatgtgactaccatgtctgtttacttataaatgttataaatgatgaaaatacagtaactacaagaattgcacatgcttttgtgtattttgttattcactcacagacttttcttcactttttgcatttatttaccttttgaaggattagaagttttaagatatgtgaa

SEQ ID NO: 609720 - DNA, 527 bp, Homo sapiens
gaaaactctaatacgtgtttggcagagccactaaccttctaggatcccacattctgggatcctgacccagccagtggtagcctccgagtaagaagagcaggaagaggaatagctggacttgcagcacaagtcatacaaaattttaaaattttttcctagggttttttccgccctcatttggcttcagaatcaagactgagtttgtgcatccagttttagatggaacattgaaaaacttgcagatatatgaggcagtggggraagcaacaaggattatggctaatctagtgactaagtcctaggagggaaggttgaagaagctggattcaacactcaatagagtgatggtactcctccaatatgccagggactgaaccatgctctggggagatggtggtgagtaatgcagtagaatcccctccttcacagaactgccttttagtggtagagacagacaagtgaataaatgattttaatgtagtgcattaatatttataaaatagattaagagcagaatgccatgagag

SEQ ID NO: 609721 - DNA, 527 bp, Homo sapiens
gaaaactctaatacgtgtttggcagagccactaaccttctaggatcccacattctgggatcctgacccagccagtggtagcctccgagtaagaagagcaggaagaggaatagctggacttgcagcacaagtcatacaaaattttaaaattttttcctagggttttttccgccctcatttggcttcagaatcaagactgagtttgtgcatccagttttagatggaacattgaaaaacttgcagatatatgaggcagtggggaaagcaacaaggattatggctaatctagtgactaagtcctaggagggaaggttgaagaagctggattcaacactcaatagagtgatggtactcctccaatatgccagggactgaaccatgctctggggagatggtggtgagtaatgcagtagaatcccctccttcacagaactgccttttagtggtagagacagacaagtgaataaatgattttaatgtastgcattaatatttataaaatagattaagagcagaatgccatgagag

SEQ ID NO: 609722 - DNA, 598 bp, Homo sapiens
ttccaaacaatgaacatggtttaacaatgagatgggaggccatgggttctggtaattgctgggagatttcaagtagaagtcgggacaggttcctgtcatgggtgctgtagaggatatgcstgcatggcatatggtcctggtgactttaaatgtctgcttaaatcctgagattctgttatggttgacatgactccacgtggcttcacccaaaaactgtctccaggccagcaataatgtactgttatttacctgaaactcttggcttgtcggatctgcacttcttgttctgaaatggaggtatttaaggaaacagagaggaaattaaggcattaaaatgtgcttttctctacccaaatcatatcaagtttatgttctatgtcttcccaccatggtgactctagcatgcagtgatgaggtcaggcactgcacccaagtttctcagctactgatttagtgtgctgtgctcacagtggtttattgtcttcaaatgataagatctaggtgaagcaggtattaacagcatataacacatgaagtttcttaactctggtttcctccagatgttgctgaaacaacataacataagccagatgaaata

SEQ ID NO: 609723 - DNA, 568 bp, Homo sapiens
aattacagcagaaagtactaatgccacatccttaaaaaagaaacaaaaagaaaggcaggaatgggtgggatgctatttcctttgcatctgtccctctgtgctgcaaagaagtgtactcctttcattttaaatattctcttggatctgggatatttggacttaagtaaaaccacatgtgggtcattagcccttcactccaggttgagttctactaaacccacccaagtttctttttgtggtcttccctccagatcatcctccatgtccttcctgcaggcttctgattttcaagcttgtgattttctggtgagcatctatttcaatggagcacgcgtcatgctcaggaccaagtgagggtcaggcatggcaccacctaagagacatcagatggcctgtagagatgtagctgcttataacacacacaatcacacactacactcaactctgtggagcctctgcttgacatgtgcatggaaacatggtccatttgcttttactttcagaaaaaggaatakcctgcaatggaaatacattcaaagctctacctcttgcagttaagaagcctgca

SEQ ID NO: 609724 - DNA, 525 bp, Homo sapiens
tttaatgtaaataatgacagttttgtttgttcctttccaattagtatatgtttatatttttctcttttcctgctgtgctggctagggcctccaagccaatattgaagaggaaaaagcagctatctttgtcttgtttctgacagaaaacagaaagatttggtagatacactttatcagattaaggatgtttccctctcttcccatgttaccgtttctttcatgagtgaatgttaatttttgaatgctttttttggcatctagtgagatcatwctttaaaaaatgttagtgtggagcattacaataatgatgtgtatgatgtattgttttataaattgtgggatttagcttgttaatacttttgtttagaatttcgtatctttgttcttaagtgggattgacttctattgccctttcttacattatccatgttttgttttgatgtagactataacatgtgtctctgtttacacaagatatacactgactactaacagtgattatgactgattggctaaattaaaggt

SEQ ID NO: 609725 - DNA, 584 bp, Homo sapiens
tgttgactgattatattttgactggaactcaaattcatcagcaccctgtctgaaacagccttgtgaagtttaagccttttagctataattatgggatgaaaggtgttccattctagttaaaagaatttcaggcatcagcagatgggaaggtagaggtgaaggtccactcagccacctctgaatgtgatcctgacttttttcggggggggtattttttcctacaataaatccctagctccattgtggagaataatgcaggggctggcagagataaagccagaccaaggattgtttagataagaacaggcagtgacttctagaaccttctagatcttgctcccaccttccctgcttgatcatagtcaaatcttgttcctcactacttcaatgaaatccctgacttgaactctttcgtttcaagttttcatgacatgtamtttacccattctgagggtattctggtagtttagtgattacttaatacttttttcctatcttaagctcctgtttctgtcatactgaaagcacatttggccattatctctacctcaggtgaagtaaaaaacagaaaatatgtcatgaat

SEQ ID NO: 609726 - DNA, 569 bp, Homo sapiens
aatcgataagtcttatcagaacatttttatgacttcagggaggttatcaccatcttaatatagtgatgaagacaaaagccagacctcaggagaggtcagaactgagtaatcaaattaacatctgttaggactgactcagtccagtcttcaaggtcaacatattcacaaatgtcaaaatgtctgaatgaagagatggtaatcattgaccctgaaaccttctggggcttggcaggaagctgtgggggagataaatagctttttgttgagatagcaaatgcatgtttggatacatacttccttatttctctcttttgaaataagaggaaatgccaaagccaagtctccattaaccacggtcctactggatggtgataaacagatccttgaggtcctgctttcccacaaccatcttctctggaattataattcagagctcttgacagatattatttrcctgttctttcttttacttattaaccctgaagagaaatgggaaagaggtgggcattccgaaaaagaaaaggggagagaggcatggctactcaatagagggatacaggtccaatttt

SEQ ID NO: 609727 - DNA, 633 bp, Homo sapiens
tggaggtttgagttctcgtgttaaatcttttaaagaagctctgatttttttgggagtgagagttagggcctatgaaaccccctttttttttaatggaagaatcaacaagtaccttactcatttgtcaaatgttggtgccaatcatggctgactggcaacttgtttttgtgcccattgagattgacttgacttttaactgggatatatgggcaaagatcatgtggtgatggccacttctctatactggccacaaaacaatgacaattatggaatatagttaaacggacattatagctcagctacatggctggtaggagaaaagagttttgctgctgcctacagattaaaataacccatagaaaatcacacaaaataattgtaatcagcagatagtaattggctatgtccatgagacttggccgtagtctagctggtttacctgggtatgtagcatgcagtagtgaaaaaagcagtaggactgggatgagaaacctgaattsaagtgcgaactctggcacttattaactgggtttaccttgaggaacttacttgacctgtctggttcctggttatttacctccttaacaacattgtcaggggtcctgcaggatttttctgaaggaaaatgttgcc

SEQ ID NO: 609728 - DNA, 413 bp, Homo sapiens
ttcttggcaaacaatttctactttttgtctctatgtgtctgtctcttctgaacatttcatttaaatggaatcatacactatggggccttttgtatttggcttctatcacttcacataatgttttcacatttcatccatgttttaacctgtagcgtacttcattccttttgatggctgagtgatatttcattgtgtgggtaaacattgtgtttatctgttcatctgttagacctttgggctgtccttattttttttttttttttggctattgcgaataacgttgttacaagttttcatgtacttttttttttttttttttttttttgkggacacatgttttcaattcccttgtgtatgcacctaggagtaaagttctgggtaatatggtaactctatatttaactttttaagga

SEQ ID NO: 609729 - DNA, 548 bp, Homo sapiens
ctttcacaactctttgtaacatctccagaaaccatgcttgtcttgaaatgctcatttctctgaatttgaattaacaacgtaacagctgagaacatggttgattggagaggacagcagatgagagttctgctctgtctgggtgtcctgatgtcargtgtgacagcaaaactgtcctgtcaccttcttttctcctcttctgttctgcacggttggcttgttgtgtgcacaaggccctcctcctttcagaaggcattgctctgacatcatgtataggaccagcaatgtcaaattcatgcagttgtgaaagattagaactgagagaagagtaggggtgaggtggtggggaaaccatcacgcgtgattactagcttcctcatacatatttcattaaactgcaggttggtggtcttccctgcttttcctttctgctgaccctccttggaaggtgaagaaaggttgtgcatgtgtgtgtgtgtgtgtgtgtgtgtgtgtctgagacaggattattacaaaagggattctgtcttagagttggctgaaggcacaca

SEQ ID NO: 609730 - DNA, 548 bp, Homo sapiens
ctttcacaactctttgtaacatctccagaaaccatgcttgtcttgaaatgctcatttctctgaatttgaattaacaacgtaacagctgagaacatggttgattggagaggacagcagatgagagttctgctctgtctgggtgtcctgatgtcaggtgtgacagcaaaactgtcctgtcaccttcttttctcctcttctgttctgcacggttggcttgttgtgtgcacaaggccctcctcctttcagaaggcattgctctgacatcatgtataggaccagcaatgtcaaattcatgcagttgtgaaagattagaactgagagaagagtaggggtgaggtggtggggaaaccatcacgcgtgattactagcttcctcatacatatttcattaaactgcargttggtggtcttccctgcttttcctttctgctgaccctccttggaaggtgaagaaaggttgtgcatgtgtgtgtgtgtgtgtgtgtgtgtgtgtctgagacaggattattacaaaagggattctgtcttagagttggctgaaggcacaca

SEQ ID NO: 609731 - DNA, 548 bp, Homo sapiens
ctttcacaactctttgtaacatctccagaaaccatgcttgtcttgaaatgctcatttctctgaatttgaattaacaacgtaacagctgagaacatggttgattggagaggacagcagatgagagttctgctctgtctgggtgtcctgatgtcaggtgtgacagcaaaactgtcctgtcaccttcttttctcctcttctgttctgcacggttggcttgttgtgtgcacaaggccctcctcctttcagaaggcattgctctgacatcatgtataggaccagcaatgtcaaattcatgcagttgtgaaagattagaactgagagaagagtaggggtgaggtggtggggaaaccatcacgcgtgattactagcttcctcatacatatttcattaaactgcaggttggtggtcttccctgcttttcctttctgctgaccctccttggaaggtgaagaaaggttgtgcatgtgtgtgtgtgtgtgtgtgtgtgtgtgtctgagacaggattattacaaaarggattctgtcttagagttggctgaaggcacaca

SEQ ID NO: 609732 - DNA, 579 bp, Homo sapiens
ctgccttgggcgtagtaggtctcaaaagcattgagggagggaggagacttggtgaactgcccatggggtgggagttatcttgggggaatgttcttagcagggagctraggaaactgcatcccatcctctactaactcttctgaggagaataaccttggaaaactgaagggatcatgtcagccagtaagggccaagaacagctggttgagtccactgaaggaaagcaaaaggggaaattataataataataataattattattgttgagacagagtcttgctctgtcaccaggctggagtgccgtggtgtgatcttggctcactgcaacctccacctcctcggttcaagtgattctcctgcctcagcctcctgaatagctgggactacaggtgcatgccaccacgcccagctaatttttgtatttttagtaaagacagggtttcaccgtgttggccaggatggtctccatctcctgacctcatgaactgcctgcctcggcctcccaaagtgttgggattacaggggtgagccactgcacctggccagaggaaactattatttttgaatacctactatatt

SEQ ID NO: 609733 - DNA, 579 bp, Homo sapiens
ctgccttgggcgtagtaggtctcaaaagcattgagggagggaggagacttggtgaactgcccatggggtgggagttatcttgggggaatgttcttagcagggagctgaggaaactgcatcccatcctctactaactcttctgaggagaataaccttggaaaactgaagggatcatgtcagccagtaagggccaagaacagctggttgagtccactgaaggaaagcaaaaggggaaattataataataataataattattattgttgagacagagtctygctctgtcaccaggctggagtgccgtggtgtgatcttggctcactgcaacctccacctcctcggttcaagtgattctcctgcctcagcctcctgaatagctgggactacaggtgcatgccaccacgcccagctaatttttgtatttttagtaaagacagggtttcaccgtgttggccaggatggtctccatctcctgacctcatgaactgcctgcctcggcctcccaaagtgttgggattacaggggtgagccactgcacctggccagaggaaactattatttttgaatacctactatatt

SEQ ID NO: 609734 - DNA, 579 bp, Homo sapiens
ctgccttgggcgtagtaggtctcaaaagcattgagggagggaggagacttggtgaactgcccatggggtgggagttatcttgggggaatgttcttagcagggagctgaggaaactgcatcccatcctctactaactcttctgaggagaataaccttggaaaactgaagggatcatgtcagccagtaagggccaagaacagctggttgagtccactgaaggaaagcaaaaggggaaattataataataataataattattattgttgagacagagtcttgctctgtcaccaggctggagtgccgtggtgtgatcttggctcactgcaacctccacctcctsggttcaagtgattctcctgcctcagcctcctgaatagctgggactacaggtgcatgccaccacgcccagctaatttttgtatttttagtaaagacagggtttcaccgtgttggccaggatggtctccatctcctgacctcatgaactgcctgcctcggcctcccaaagtgttgggattacaggggtgagccactgcacctggccagaggaaactattatttttgaatacctactatatt

SEQ ID NO: 609735 - DNA, 448 bp, Homo sapiens
tgctagccactgcacagaggagatggagacatggcctattcctggagacgctgggagtagtcttcctggcaaggtgtagttsacactctcggtgtctcacccatcacctcagcccttccagaatccactgcaaacgtttccctaccaaaccaagggcttcccgagtctctctgcatgagggcatcctctgtcttttttctttttttgagacagagtctccctctgtcacctaggctgaagggcagtgacatgatctcagttcaccgcaacctctgcctcctgggttcaagtaattcttctgccttagcctcccaagtagctgggattacaggtgcccaccaccatgcccagataactttttttgtatttttagtagagccagggtttcatcatgttggccaggctggttttgaactcatgacctcaagtgatccaccctcctcaggct

SEQ ID NO: 609736 - DNA, 564 bp, Homo sapiens
aaggaaactaacaaagggaatacagactaattctaaatctggtactctactttaacaggcaccacaacttaatataaaacatctacattttaattggcccaattactccccacgtggcactggcaacagcaattccacagagatcgtctcgttctaaatgagtgacttcacaggcagtttttctaaaatgatcctgatggggctaaaaatgatcatctttgatttctcactaaaaggaaattttaaaataagttttcattaacttgtcgaaacattttaaggaatrggaaggaaatatatcttttgctgcttaccttctataatctaataaataagtgggttttccataatggacagcaaaatctcagtaactgaaactaatataaatgtttttaattcaaaaagtgggggccaggttgaaatttacgttagtcagtcatttaattgcagagtttgaattaatattattaaaatacaaccaagacagttgaaaaatgtttaaaattccttaaagcattgacttttcaagtaaattggtagtatgtccaaagagtctatttacat

SEQ ID NO: 609737 - DNA, 599 bp, Homo sapiens
gccagtataagcagggattgtgaaaccagttcctgatttatttttcctggccccttcctcctagatcttgttccccctcatgccccctgaccgtccaagacttatcttcctactttaacccactgaaatgtccccatcctgaggcaaatgagataatgcttgtaaacattctgtataaactgaaaacgtaatatataattgctactattatcaccatcatctcatcttttgagggccaaattttctgtgtcttcccagttgagattctcactaaattaagaygtcattctattctgagagcagacaggttattccaactcccttccctttccctacttctactttctatccttccactgctctcctgtcccagctaacagctggaggtaccacacaggaaaatgacaagaatctgtgtgttctgatgccaggttaaaacgagaggtagactgaggctccccactcctcacatgccaagctggcagctaatgcccttcatgtaacacacagtagctcagggaataaacagtggagatatgtctagcactatacaaggctggcacagccaaaaccaattgtttttgaaggggtcatgtctc

SEQ ID NO: 609738 - DNA, 533 bp, Homo sapiens
gatttttgtgtgtgtacttggcaccttgcatgtctgcattaaatacatgcaggtgtgtgtgcaaatgcgttcaaattgtaggtgaaaaaaaccacaatcactctccctcccactcattaaaaaaggttggttgttttattttgtattattttttaagacggagtctcgctctgtcgcccaggctggagggcagtggcgcgatctcggctcactgcaagctccgcctcccagtttcacgccattctcctgcctcagcctccagactagctgggactcaggcgcccaccaccacgcctgactaatttttttttttgtatttttggtagagacggggtttcaccatgttagccaggatggtctcgatctcctgacctcgtgatccacccgcctcggcctcccaaagtgccrggattacaggcatgagccaccacacccggccaaggttggttgttttaaagatgaagagcactaaactgttaagggtacagaagaaaagagaattaaaagagcacagaaagaacaaaaatatttcc

SEQ ID NO: 609739 - DNA, 583 bp, Homo sapiens
ccactgatcaaatatgatcatttgaccatatcattggatttgcaaattaggctacctggtggaaattttcatcaattaagatagctaagtctgcaacagtaagataaaagcattttgttaaaaaaaaattgcagaagttatttgaattaaaaactaatacagtatttttattttctcaatcttttctgggtatacagggataaacaacatgcctctaaactgaagactaacrattaaatttatagggcaggacttggtcgctcatgcctataatcctagcactttgggaggcctaggaggacagatcacttgaggccaagagttcgagaccagcctggccaacagagcgaaaccctgtatctaccaaaaaaaaaaattataaatcattatttgatataatttcttaaagcccttttccataaattgaaaaagaaatgactataacaatatctgagtaatacgtaggatggtttcaatttcttagcttttagcaaaccaatcaagtgctgtgtaatttttggcatataacttgaaatgacttctaagaaatgaatgacaatgtggtaacaaacctcctagtccc

SEQ ID NO: 609740 - DNA, 597 bp, Homo sapiens
gcataaagacaaggtgtttgtgggctgtgcttataccttaaaatgggaagaggctgctggaaaagcaaatggcaattaggaatctgagtgagacttttccataagcttagagtttcaataaacctttgttccatgcaccacatgagatgctgcagtatgttccagcacacaaaggtgaagtgcccttcctgagcttttcaagttagtggaaggatcagtattacccagaaacctctggtctcagcaaagtgtattgagaaaataaagaagggagcacttaattgctcygggggtggggagtggtggtgcagaggggagtaaaggggtgggaatcccactttcttgatgaacaaggcacaggaaaaactggccaggatcaatagtgcagcaagcgtcaaagtacgaaaaactgggaaagagtttacagtggtgactcaagggacaagagcctggatttagggtgttaggattatcacaccaattctaactactctgccaccaaaccactttaacctaggctttagctctccaaatatattctctcatacctagagcctacgattaccacgtctaatggaaatataatttatggccggg

SEQ ID NO: 609741 - DNA, 597 bp, Homo sapiens
gcataaagacaaggtgtttgtgggctgtgcttataccttaaaatgggaagaggctgctggaaaagcaaatggcaattaggaatctgagtgagacttttccataagcttagagtttcaataaacctttgttccatgcaccacatgagatgctgcagtatgttccagcacacaaaggtgaagtgcccttcctgagcttttcaagttagtggaaggatcagtattacccagaaacctctggtctcagcaaagtgtattgagaaaataaagaagggagcacttaattgctccgggggtggggagtggtggtgcagaggggagtaaaggggtgggaatcccactttcttgatgaacaaggcacaggaaaaactggccaggatcaatagtgcagcaagcgtcaaagtacgaaaaactgggaaagagtttacagtggtgactcaagggacaagagcctggatttagggtgttaggattmtcacaccaattctaactactctgccaccaaaccactttaacctaggctttagctctccaaatatattctctcatacctagagcctacgattaccacgtctaatggaaatataatttatggccggg

SEQ ID NO: 609742 - DNA, 575 bp, Homo sapiens
tacagactgagccttggtcttcatatcctatataaaaaagatttttttttttcctgcagtaaaggtcaaatgaatttacaacagcactttagaggagaagaataaagatagttttatgacaactatagtatgttgctccaaaaatatatatagcattataatgaacaataatgctgatccaattcagtgtacatgtaaaaatgcttagttttttttttttttttaacctcctgttatttggatttggattaaaatcatttggattaaaaaagatttggattaatcttttggattaaaagcatttggatttttcaacaaatgccaaaaagacagtatgccgaataacatagttattgccgaatgagcacagaaaatcattttgcgcaagatgtgggaaggatgaggatgatgaaactacacaaggaaggacgggtatgtgggcaacagtgatgacagataactcactggtcagttgtacagctggawttacacaatactttttgaaaatgaccatttatggtgagcaacactccagctacaggaaatatgcgactcgtctgggacagatcaaacat

SEQ ID NO: 609743 - DNA, 588 bp, Homo sapiens
gctttcaactctcaattaattgggcatgcagaaagcttaaatcaaatcgccttatgacagccacaggtttgtacagagaggcttctaacaccgatgataaagctgtttggtagaaacatgcatgtacaccatacagtaactcttggtgcacttgctgaacaggctggaagaaacagctgcagcaaaaggaaagggaaacatgaaagccagagttgacaggccttgcccagggagtctaagcacaacccctcgggttctgatccccagagagtaatctcagtgtctgtcctgcatgaaagcaatgcaacttcaactgagcaggtgctgcaggsaaaaatggaagtgccatactcttttcttttagtctttgcagttaaggggactgagatgccagttaagacagacatcactgtgacaaccactaaggggttaaaatctttcctgatttatttaactatctaggctatctatggatgtacagctgagtaaagtgaatttctaaatcattaactttatcttttaaggctggatttcgttgcctttttaccttttgctaatgatatatctactttgcagcctggggaaaat

SEQ ID NO: 609744 - DNA, 620 bp, Homo sapiens
aatgtaatcagttgctcaaaaagaacttctatctgaattctgaaaacaaaacaaaactaaacccaaacctagaacacataaaggcacagaggctactggacggatttaaacaatgcagtctgtgccttggtctcctcacatatgaaatgggattaaaagtaactatctggtagagcaaagaaaatgaaagaaaaatactagtacctacactttgctgaggcctgamaatgagccaagtaggatgctaggtaatagatatgtattctgttcatctatacccaaatcaggcttgagatactattatcaaacccacttaagagatgggaaaactgaggtgcgtcaaagttgtctaatatcatgaagtgagtaattttcgaagccatgattcaaagaagcagtttgagttgagccctccactgagatgctcttcacagaaggcactcctgcctgctcacacccatccaaaccccatcaatgtcctctcctactttatttcccactattcttctgaaatccaggcctgaagagttaagagagtttcatatacctatctctttatacctattctcccaagcttagtaatggctcacattacatcctaactggattattttgatagg

SEQ ID NO: 609745 - DNA, 609 bp, Homo sapiens
tgcgtcaaagttgtctaatatcatgaagtgagtaattttcgaagccatgattcaaagaagcagtttgagttgagccctccactgagatgctcttcacagaaggcactcctgcctgctcacacccatccaaaccccatcaatgtcctctcctactttatttcccactattcttctgaaatccaggcctgaagagttaagagagtttcatatacctatctctttatacctattctcccaagcttagtaatggctcacattacatcctaactggattattttgataggtgctcattgttyccattcactcctttcaccccactcacattctgacgacattctggtgtcaaggtgctttttctaaagtgcacctctgaccacattacaactcctccctttaaaataaacctcagccgggcccagtgtctcatgcctgtaagttccagctacttccatattcagctgaggcaggagaactgcttgaaccccagaggcagaggttgcagtgagctgagatcatgccactttcccgagtgacagagtagactccatcttaaacaaaacaaaacaaacaaaacctcaacggtcccatttgctaaatgatttaagcat

SEQ ID NO: 609746 - DNA, 597 bp, Homo sapiens
agtccctttcccctggcaactactaatccactttatgttcccataatcttaccttttccagaatttcatatgcttggaacagtagcgtatgtatgtctttgggtctaacgtctttcattcttagcataatgcttttgaagagtcgtccatgttgtagtcggtagcttagttctttttattgtgcagtactattccattgtatagatatctcacaatttctttacccctaagacttgaacatctagaaaacctggtaaaatttatgatttaagttttgcatagcattgtttcatcaatttttaattcagcaattactgtttcattttacctaatggaatacttaagctaggtaggcttgaaatttggtaatttctctactttctayccaatctgtttctcttgctttgatatttgaattaacccagaaggaaaaagaatagaaaagtacaataggaaactgattatgaaaataaattgccaatgtggttatgatgaaataatttcttaagatagcacactgtgccaatctagacatgaaaaaataaacatatctcacaaacctctgattttgttttaggtagtcagcagtccctacag

SEQ ID NO: 609747 - DNA, 591 bp, Homo sapiens
cggctgcttatttcttaacaatttgactactggagcamataggccttagatccgtgctgcgtccagtgtttcttcctcacttccattcttggacagaaagaaagcagttgttttcctgtatgctgtgatgtgagttgtagcctgccatgaacacaggtgggctccttgttggactgagcttgaggtccctcgacagtctgattatcccaaagccccttatttggtttctcttccatctcttcacatctgttccttccctactatccctctttcccaataagggaaaccaatcaaccttattttactttgattttaaaactataaatcattgaagtgctttgatgtgggaaaggactcagataaaaccatttaaaccatgcatttgatcctacaacaaaaagttttaaaaagtcacttggcagagccatacaggaacagggtgccagatttctacaagtgataatcaccagttccaatgaagtaacaaaaggaagtctttttatttcaaatgtgtaggtgtaaatattttaagtcttttatactttttctgaacccagtaaaactggtttataagtctatattatttggtgt

SEQ ID NO: 609748 - DNA, 591 bp, Homo sapiens
cggctgcttatttcttaacaatttgactactggagcacataggccttagatccgtgctgcgtccagtgtttcttcctcacttccattcttggacagaaagaaagcagttgttttcctgtatgctgtgatgtgagttgtagcctgccatgaacacaggtgggctccttgttggactgagcttgaggtccctcgacagtctgattatcccaaagccccttatttggtttctcttccatctcttcacatctgttccttccctactatccctctttcccaataagggaaaccaatcaaccttattttactttgattttaaaactataaatcattgaagtgctttgatgtgggaaaggactcagataaaaccatttaaaccatgcatttgatcctacaacaaaaagttttaaaaagtcacttggcagagccatacaggaacagggtgccagatttctacaagtgataatcaccagttccaatgaagtaacaaaaggaagtctttttatttcaaatgtgtagrtgtaaatattttaagtcttttatactttttctgaacccagtaaaactggtttataagtctatattatttggtgt

SEQ ID NO: 609749 - DNA, 594 bp, Homo sapiens
gccaattctatctacatgatgaaggagggacatctgtgtttgacagttttcataggaatggacacccacatgcacgtactcacacatattctttatgtaaaayggtaggatgctaggagtgagccttacaaaggggggcacataactatcagagcttttttaaaaaagtaattcaagtaaatgccaaatacccacttaatcaaactagctgtgatgattcagaccatagggcagtgtttcagagagaattttacatccacaggttgaggagagacttttcccttgcaaaagcagtacagatcccttatgcctctcatcatgcttcccctagtgtaacatcctacataaagcacagtggctgaaaccggaaaattcagatgggtatactactactagctaatctagagactttattcaaatgttgctaattttcccactaatgtcttttttctggtctaggatcacacaattattttttattagtcccctctaatctggaaccattcttcattttttataaatctttcctgaactttacactttgaagagtactatctactgttttgtagaatgcccctcaattttggtttgcct

SEQ ID NO: 609750 - DNA, 426 bp, Homo sapiens
actgtctcctaattaacctacacgtttctcttctctccccatctgcatgaacattctctcttcttaagagatccacacggttgattgctatttgcttgactgaggttattttcaccctcctgtcagattctgcctactagagtagaaacagtggctgtccattctccttggttggacagctgactcctctgctatccaaattctcaatccctacttctccaacacygtgctctctagcttccctccttccaagtcctgcttaagttgttaacggctacttattctttggagttcaagtaccactcatttcccagggcagctgccctgtctcccattcaagacaagttccccactagacttctgtatcataattgatctgtcataatgcttagtacaggttgtgaatattatatttattggtgtgat

SEQ ID NO: 609751 - DNA, 617 bp, Homo sapiens
aggaataataacaacagaaacatattaacagtttcctttggcaaatttaacggaagtgaatgctgatgtgaacatagaaaaaataattacaaaaacatgaaaaatggaaacgacataaaagttaaaataaagggatatttctaacttttagactgatgaaagaaatgtctgaggccattaaatgcaaaaaagaaatacattctctttaaattattgtgtactgtttgacaaaatattccttgtttatctcttcttttcccctccacttaaaaaaaaaggaaaaaagaaaaaaaaaagacaacaaaacagtctgcaatgcacaccctaatggttttggctgcagactgaacttgagtaaatatcatcatttagtcagtatgttgtggtagctgaggctgccgatgtggttaaccagctcaggcaacatgtgtaaacatcggaaacaaaacaaaacaaaaaaggtttggagaatagtctctctcctctttctcactctcaattgcttggtttcaggcttgctttcatttctctctgacaaatcgtgtggggaaacacaaaacactraacattgagagatcctgctttaaaacccccttcttctggcttttcagaaagga

SEQ ID NO: 609752 - DNA, 504 bp, Homo sapiens
ggttagtttttttttttttaagtttccgcataatcattggggaatcttagcatttaacttgcaaacgcttctcagagttctgatacctgaggcggcatcacaagaacgttatctacaccagccccatcttggtaggactgaaaaaaaacaaacaaaccaagaacaacacaaagaaaatgcatgttaatgtggctgaatattcattagaaccctgcggcctggggctggaagcacagttaggctgtgtgtttaccaggccacccgaaaggcaagagggcataaggcacttagaaacagtggctcagctcaagcagtgttgtctttgaaaagttttcattttcccttgaatcagctacagtctsttacttaaggtcactgcagtttgcaatctttggcagaagacttcttccttttatggtagtggcagtctgacttttttttttttcccttttggaagtgttttcctctcaaactgccattatcttccaaacctgtttcatgtta

SEQ ID NO: 609753 - DNA, 606 bp, Homo sapiens
atccagtggctttttaatcttaatgaccttatttttcaggccaaaaatttccgttttgttctttatatcttctatttcctccttaaggctttctagcatttcatttgtttcaaaagtatctgcccttattgttggaggatttaaataatccttgctcttaaatgttttttctgataattccaacaccttcatcatctctgtactggcatctgtttttgttttccctcatgtaaaaggagattttcctagttcttcatagactgaaaaaatttggattgtttcttggacatactgaatattgtgttgtrttagttatctcttgctgcattacaaattactccaaaactcagttgcttgaaacaacatttattgtcccattgtttctttagtttgggcctagttgagtcctctgctgtggggtctctcaaagggctacaagcaatatgttgaccaaggatctgtgatcttatctaaaggcccaattcagctaaactggtggtcactggcagcatttagttccttgctggctgttgaactgaggacctcagttcctctctggctgttgactagaggccaccatcagttctttttgacatgagcctctct

SEQ ID NO: 609754 - DNA, 656 bp, Homo sapiens
tcgctgtgaccttgaactgaattcaagtgatccttccaagtagctagcactacagatgtgtgccatcacgtctggctaatttttcttattttttgtacaggtgggatctcaccatgttgcccaggctagtctcaaactcctaccctcaagttatcctcccatctcgacttcccaaagakctaggattacaggcataaaccactagacccccactccttccatgccaaccaaaaaaaggatatgttacatttcctaaactcatttatctgaggagacctttttcttgggactagcagtcaaaaaagcccttacaaattagaaatgcattttaaatatgcaagaaaatggcaaagtgtcttggtattccccaggcttagtcacttattctctgttctttagcaattcaaccaatggagtagaggctgtagttttctgtgggtgtcttacctaccttaccagaggtcagggtaacatagaccttagcttcctgaccttcctttgagtgttggttacattcgcttttttaaaacccacttagccattcatccagcccctaatgggatcagcgtttccatcaaaccaattgtggacagagagtttttagggcccttatttatgcttcttagattttctatgtatctcaggataagtgaact

SEQ ID NO: 609755 - DNA, 596 bp, Homo sapiens
tgatggttagttactagttgtgagacattagacaacccaataaccacctgtctcattcctgcaaaaggactttatttaggtataaagcaccaacagatagtagtagtgtrctcttaaaacagagtgatgggtgtgtcctattttgccactagaaatgcttttttcacatctgtattttaaaatgattaagggatgatcattattttccctccctcatgcctcctgctccatccaccctgaaaaactaaattctttggccaaaatttgcaagcgcatatagaagattggttagcataactcagacttgcatttatgactgtatgggcaaggacaaagtagactctgtaattgtttagtcatatatgagctatatatatacttcaagtgagtgaaatgttttgttcattctagattttttttatttatgtgttttgggtttggaacccttagaaaatcaaagaaaaaaattgtttgttcttgctatcagctttcatatggttcccgagacaagtgctatacatttagaaaattaaaagggtaaacattaaataagaatgcaggagttggcaagaagtcaaatgaattggatgttcatt

SEQ ID NO: 609756 - DNA, 567 bp, Homo sapiens
gtgtcctaaacagaatcatgactagggagaaaatgtagactccgaattctttatcttagtaaaagaagcacagaaccacattagatatgggttctggtatcattatggtgtttttgttttgttttgttttgtttttttgtttttaatgaaacattctaaagggctgggtgcagtggctcacgcttgtaatcccagcactttgggaggctgaggcgggcggatcacctgaggtcaggagttagagaccagcctgtccaacatggcgaaaccctgtctctactaaaaatacaaagattagccgggcatggtggtgggcacctgtaatcccagctacttgagaggctgaggcaggagaatcacttgaacccaggaggtggagaytgtagtaagccaagatcacaccattgcatttcagcctgggcaacaagagtgaaactccatcttaaaaaaaaaaaaaagaaaaagaaaaagaaaaaagaaaacaaaacattttgtagtaggagcctgcctagtccagggtagtgtaacactcctaagagtctcagccatttcctacgttaggatcag

SEQ ID NO: 609757 - DNA, 607 bp, Homo sapiens
ggctggtcgttcccttgctcttctcttgatggtgaataagtctctccagatctgatgggtttatcaggggtttccgcttttgcttcttcctcattttctcttgcggctgccatgttagaagtgcctctcacctcccaccatgattctgaggcctccccagccatgtggaactgtaagtccaattaaacctttttttcttcacagtctctggtatgtctttatcagcagcatgaaaatggactaatacagtgagctttcactctaacaatggggagaaaggtctttgatttggaggggttcctacttgaattgtattaaattagacatttgcatttgagcattattggaagaatagaaagatccgtgtattgttttcttgcagaaaaatttttygagggaaggagaaacagtattgttaagtaagaagtaaggaacttaataacttgatcaagttcttgtaactaatcagtggcagatacacgagggctcttgttctactgccggtagttttgagtagtaagttctgctgcctcctcaagttttgttaacattcttttgagtcacctgaacatatgtatgaaatttttagagggtaagaaacttttta

SEQ ID NO: 609758 - DNA, 562 bp, Homo sapiens
gcaaatatttgagagcctaatgtgtcattaaatgtttctgaggaatatatgtttgctgaaaagctgaaaattagggttagtgtaagcatcactcataataatctcatgaagagaatcttgcagatgacattgcccaagcatagtactgggaggataataaaaggtgtgcgcatttatttgggtgtcagaagattaagtacagggtgtgcttcagtattaattcttcctgccccaacctaaacatttaaccaaataaagaaggaacatcaagtcccacagaactaggaatgatactactattctgatttcaagaagtataattactgtcctaacacttagaaatgaccagaatttaatacccaggtcttcattttcctctgacttcattttcctctggctgaaacaggagtgacagaggccaggatcatcagaggcagatggatccctatggcaggttgttttgactcttctaagttctttgcattaaaacarcattcctcaaacacattagcctcccagcacgggggtggaaacaacaaagcaggaagcctgctggagcctt

SEQ ID NO: 609759 - DNA, 586 bp, Homo sapiens
atatctcagaggaccgaaatttatacgaaggcagatttcagcccagtggaaggaaagacatagaacagttcgagccatgaaacaatgaaatgaactacctsagactgtgatgagccagatacagctgggttttttttcctgcctgactactcctgtcatctgtttgcaggatatggaaagatgcaggggcccgctcaagtctttttctaaggagaaattttagttcctaagcacctaaaaaaagacatgctgagaagttcaaattgggggccaggtacccccaccggaggagactatcccctttgttctatgagttgcttctaaagtaggagccaaaggaagtttccctccaggcctactctgaggatgcctgtccttttgaaagcattcaagaaaaaacacctcttgattcaggatcatgatacaaagaaatagagatatcaaatttttgataaaaaagaaaattctataatgttaaaactgaaatgaaatataattatatatgtttccccatgaatatttttaaactttttttagggttataaggaaatagtctagatatattaaatgtctaaatgaagttctt

SEQ ID NO: 609760 - DNA, 603 bp, Homo sapiens
actgtgcattctgttagtgcagttaaaaattacagttctctcagaactttaaagcaaatgctacatcagtcaagattgggtgtctttgtttatctttggtatcaaagacccagagaatttggagaaacatcacacagcttgaaaagttattyagacaagctataatatcacatgactgccccctgagtggtaagacattgcccagtggatctgaaaacacttttaagtacttaatcatcatcgtatcttttttaaattttttatttcttatttatttatttttgagacagagtctcgctgtgttgcccaggctggagtgcagtggcacaatctcggctcactgcaacctccgcctcctgggttcgagtgattctcctgcctcagcctcccaagtagctgggactacaggagtacaccaccacacccggctaatttttgtaattttagtagagacagagtttcaccatattggtcaggctggtctcgaactcctaacctcaggtgatccacctgcctcagcctcccaaagtgctgggattacgcatgagccaccacgcccggtcccatcatcgtatcttcatgagatagtcaggaatggaattt

SEQ ID NO: 609761 - DNA, 648 bp, Homo sapiens
tgtgtgaatgaaatcaaggaaaggcattaaagaaattatttgttaggaagcagaagcaagagtttgtttactttcatactaaagagaacactrccagcatttgtgaactgcatgcacatgagaagtgagcaggcttccagctcagtggcaggtgcaagatgatgttagaaacaaaataactcttatacttgaataaattcacaagaaggttgtgagtccctgacacagtaggtatgtaaaaccacgtagctgacatcaaggcctgttgcacttttgtaacctccttgaatcactggagcgagcagtccctggtgatgcagcgtgttgcagggctctgtgccttgatagggagttgcacctgtgatacccgaaacctccttacaaactccccccgccaccccccaccacgttgtcctggatcattggaatgcaggcgctggattgaaacgtttattcatagtagattaagagtctaagtatctgtgaggcctcacttaggaggctcttagaggattaataaaatatttacaaaataacctatgcaattgcttcattttaaagatatttgcctcttatcacagcataaatcctcattcaagtggcttctctgttctgtgaaggaagttctgtacttgttcttctggagaa

SEQ ID NO: 609762 - DNA, 648 bp, Homo sapiens
tgtgtgaatgaaatcaaggaaaggcattaaagaaattatttgttaggaagcagaagcaagagtttgtttactttcatactaaagagaacactaccagcatttgtgaactgcatgcacatgagaagtgagcaggcttccagctcagtggcaggtgcaagatgatgttagaaacaaaataactcttatacttgaataaattcacaagaaggttgtgagtccctgacacagtaggtatgtaaaaccacgtagctgacatcaaggcctgttgcacttttgtaacctccttgaatcactggagcgagcagtccctggtgatgcagcgtgttgcagggctctgtgccttgatagggagttgcacctgtgatacccgaaacctccttacaaactccccccgccaccccccaccacgttgtcctggatcattggaatgcaggcgctggattgaaacgtttattcatagtagattaagagtctaagtatctgtgaggcctcacttaggaggctcttagaggattaataaaatatttacaaaataacctatgcaattgcttcattttaaagatatttgsctcttatcacagcataaatcctcattcaagtggcttctctgttctgtgaaggaagttctgtacttgttcttctggagaa

SEQ ID NO: 609763 - DNA, 552 bp, Homo sapiens
acggtgcatgtatttgctcattgttctctcctcgtgctggacttgagctgaaatgtggtttcagggcttcatgtgtgcactgagtgatggagtaattaagtgaggtaaatgcatatgaagtgcttgttcccttggtgcccggcacatagtgagtgcttagtaaacagtagttgttacttttcattggagccaaaygtatatcacacctccctttctgtaatacatatttatgatagcccattagttaagtctgaaggtcagtgtgttcttgccatagggctgtaggaaatgttttttgtacacttctacatgtagttggcggattgttttttaaaaatgctacctacattgttttcctctccctaaattatctcatgactctagcagattgctataaataagtagggtatatcatatttgtaggccaagaattgacaacccagtttcagacaacaatgaagattttctaccctatttgaatacaaaatcaaaaccaagatatttgttaatatcccaatattgatttttgttattagaagtaaattttagaag

SEQ ID NO: 609764 - DNA, 552 bp, Homo sapiens
acggtgcatgtatttgctcattgttctctcctcgtgctggacttgagctgaaatgtggtttcagggcttcatgtgtgcactgagtgatggagtaattaagtgaggtaaatgcatatgaagtgcttgttcccttggtgcccggcacatagtgagtgcttagtaaacagtagttgttacttttcattggagccaaatrtatatcacacctccctttctgtaatacatatttatgatagcccattagttaagtctgaaggtcagtgtgttcttgccatagggctgtaggaaatgttttttgtacacttctacatgtagttggcggattgttttttaaaaatgctacctacattgttttcctctccctaaattatctcatgactctagcagattgctataaataagtagggtatatcatatttgtaggccaagaattgacaacccagtttcagacaacaatgaagattttctaccctatttgaatacaaaatcaaaaccaagatatttgttaatatcccaatattgatttttgttattagaagtaaattttagaag

SEQ ID NO: 609765 - DNA, 552 bp, Homo sapiens
atttcctcacctgatgaaagagtggctcattgcttctacactgtaaataatatgctttatgccgaacacgcgctttccttctgggaatctggaattttggtccatgctaggcaaagcatgcctacgtgaccactcccacaaaaactgtgggcactgagttgcaaatgagcttcccttgtagacagcacctcacacctgttgtcacaatttaatgctggagaaattacatgcatcctatgtgactcctctgggagcaccactggaagcgtgcacttggtttcccctggagtttgctccatgcatgttgccctgtgctgatgctgctttgtatcccatcactgtagtgagtcttaggtgtgcgtatgaccacgtgctgagtcctgtgagtctcgcaatcctgggactgatcttagggacctggacccccaacacaggtccctaagtaagttagtccccccaaaactaacttacataagattccatatgagsagaaaagtcagaaattcagaaggtgtgcctgaaaattttttctattgacaccccttgttccat

SEQ ID NO: 609766 - DNA, 514 bp, Homo sapiens
tattgacaccccttgttccatatgatcttcttcctaaggactacttcattttgtcattgagtttagtcagtgaatatttttggaatataatgtaatcaggtaggcacttcttgcatatttacatattactgcaaattcatttattgttctccactaccattagaactgagggataaaggagagagacataacacaatgttcgttctctttgtctctctctctccccaccacatatactcacacattttccctgctttctactaytgaataattagaaaccagtactaactagaattcttcttactgataaagtgacagttgaccctcatatggaaattctttatgagttaacaaattaaaataaaaattacctgaaattagagttaaattttttgatgttttttacaatattccaccactgtcccacttcttggatatttatctagaatatgtctttccctaccctaccgacagataatttgctagagtttttcatgtctatctccattttcaa

SEQ ID NO: 609767 - DNA, 514 bp, Homo sapiens
tattgacaccccttgttccatatgatcttcttcctaaggactacttcattttgtcattgagtttagtcagtgaatatttttggaatataatgtaatcaggtaggcacttcttgcatatttacatattactgcaaattcatttattgttctccactaccattagaactgagggataaaggagagagacataacacaatgttcgttctctttgtctctctctctccccaccacatatactcacacattttccctgctttctactattgaataattagaaaccagtactaactagaattcttcttactgataaagtgacarttgaccctcatatggaaattctttatgagttaacaaattaaaataaaaattacctgaaattagagttaaattttttgatgttttttacaatattccaccactgtcccacttcttggatatttatctagaatatgtctttccctaccctaccgacagataatttgctagagtttttcatgtctatctccattttcaa

SEQ ID NO: 609768 - DNA, 444 bp, Homo sapiens
gagaactactgtcttcagccctttcctgggtagaagccctcctgcttcgagttcattaaacacggggctcccccctcagccccatcaccttgcctgggaggggaaccatctctggaagtacatttgcatttcacctctaggcatgggctgaagacctactagctcttccccccaacccccaagccctcgtcctatattagtttagagctttgattgtacctttattgtcagmtctatttatttacttttcttttttggtggccattgatccttcagtgggctaactcacccaggctggaagcaaacttaatttgggagagtccaattttatcaaatgtatcacagaatctgtttttgagctaaaatgaaactacggctataattcaccaaaagttagttagcgttctgtcctgcagttattgcaaaccaagttgcctgccagat

SEQ ID NO: 609769 - DNA, 444 bp, Homo sapiens
gagaactactgtcttcagccctttcctgggtagaagccctcctgcttcgagttcattaaacacggggctcccccctcagccccatcaccttgcctgggaggggaaccatctctggaagtacatttgcatttcacctctaggcatgggctgaagacctactagctcttccccccaacccccaagccctcgtcctatattagtttagagctttgattgtacctttattgtcagctctatttatttacttttcttttttggtggccattgatccttcagtgggctaactcacccaggctggaagcaaacttaatttgggagagtccaattttatcaaatgtatcacagmatctgtttttgagctaaaatgaaactacggctataattcaccaaaagttagttagcgttctgtcctgcagttattgcaaaccaagttgcctgccagat

SEQ ID NO: 609770 - DNA, 650 bp, Homo sapiens
atttaaggttaatattgttatgtgtgaatttgatcctgtcattatgatgctagctggttattttgtatttcaacttttattttagcttcaaggggcacatttgcaggattattaaaggaatacagtgtgtggtgcagaggtttatggtacaattgatcccgtcacccaggtagtgtgcacagaacccaataggtggtctttaaccctggcctccttccctacctccctcccttatagtccctagtgtctactgttgccatttttgtgtccatatgcacccagtgtttagctcccacttataagtgagaatatgcggtgtttgtttttctgtttctgcattaatttgctgaagataatgacctccagctgcatccatgttgctgtaaaggacatgacttccttctttttaggactgcatagtattccatggtatacatcaaccatgtcatctaatttttatatgctttagctctgtcacatgtctctccaaaagtaatgaccacagagccacaagtgaggtattcaaagaggacaagaaacacattgcttaatatttcaraattattacactgccattgatttttaaaatgtcttgtttggaatagcacctatgtctcactatttaaaacagccttaattggggcatccct

SEQ ID NO: 609771 - DNA, 445 bp, Homo sapiens
cattcttgcaggagtaaggtggtattacattgtggttttgatttgcatttccctgatgattagtgatgttgagcattattttcatatgtttgttggctgtttgtatatgttctttttagaaatgtctattcatgtcctttgcctatttttgatgggattatttccttttttccttgcagatttgtttgagttccttgtagattctggataccagtcctttgycggatgcatagtttacaaatattttcacccactctgtggattttctgtttactttgctgattatttcttttgtggtgcaggagctttttagtgtaattagatccaatttattattattattattatttgcatttgcttttggggtcttattcatgaatactttgcctaaggcaatgtgcggaagagttttcccaatgttatcttctagaatttttatggtttc

SEQ ID NO: 609772 - DNA, 445 bp, Homo sapiens
cattcttgcaggagtaaggtggtattacattgtggttttgatttgcatttccctgatgattagtgatgttgagcattattttcatatgtttgttggctgtttgtatatgttctttttagaaatgtctattcatgtcctttgcctatttttgatgggattatttccttttttccttgcagatttgtttgagttccttgtagattctggataccagtcctttgccggatgcatagtttrcaaatattttcacccactctgtggattttctgtttactttgctgattatttcttttgtggtgcaggagctttttagtgtaattagatccaatttattattattattattatttgcatttgcttttggggtcttattcatgaatactttgcctaaggcaatgtgcggaagagttttcccaatgttatcttctagaatttttatggtttc

SEQ ID NO: 609773 - DNA, 445 bp, Homo sapiens
cattcttgcaggagtaaggtggtattacattgtggttttgatttgcatttccctgatgattagtgatgttgagcattattttcatatgtttgttggctgtttgtatatgttctttttagaaatgtctattcatgtcctttgcctatttttgatgggattatttccttttttccttgcagatttgtttgagttccttgtagattctggataccagtcctttgccggatgcatagtttacaaatattttcacccactctgtggattttctgtttactttgctgattatttcttttgtggtgcaggagctttttagtgtaattagatccaatttattattattattattatttgcatttgcttttggggtcttattcatgaatwctttgcctaaggcaatgtgcggaagagttttcccaatgttatcttctagaatttttatggtttc

SEQ ID NO: 609774 - DNA, 368 bp, Homo sapiens
agggttccatttaaaaaaaaaatctcagaagacatcaaaaagttctgacaaaacaacatgttgatgatttaagtgtaaatatgtcagagacatatggtttctattattcatgaaataacacrtgggtttaaaaatcaaggggaaaagtgtttggtaaaacacattgaggacttggctaaatgttttttaaaggccagttctgaagcctcaagggggaaacacactgaggggaacaaatccaggctcccagcccctcccttgtttgtctcttttcttgatcagagatggcacatgtgttgtcaccagagcactgatgcatctgccaccacagtgacatttatccagcaaattgtgttttgatggacaag

SEQ ID NO: 609775 - DNA, 508 bp, Homo sapiens
ttttttgttggtcggttttgttttttatttattgattgattttttaattgagatggagtctccctctgtcacccaggctggagtgcagtggcacratctcgcctcactgcaacctctgccttccaagttcatgccattctcctgcctcagcctcctgagcagctgagactacaggtgactgccaccacgcccagctaattttttgtatttttaatggagacggggtttcaccgtgttagccaggatggtctcgatctcctgacctcatgatctgcctggctcggcctcccaaagtgctgggattacaggtgtgagccactgcgcctggtcacatttgtgtatcttaatgctgggtttgatgaagaagtggagaaacgggactgagcaaagcgggtatgatctaatggtaataaactgggtggaacttagcaggtcctgtttgttcagattctgtgttcccgtctcttcagagagaaggatgcgcctttcctacgtttagagggaaggt

SEQ ID NO: 609776 - DNA, 567 bp, Homo sapiens
ggcaaactaaaaagtttgccttaccacacttcctcttaccaactcactgcttaaaaatttagctaaattaattctgtcgcttttaaatacttttgtggatttatttctattttctgattacaaaacattaacaatattttttagaaaatttgaacagttcagaaaagtataaaagaagaaaattcaattaacagctgccatatttgaagaattactatgtgcaatgaccatactgtttgatatattttaatatttatcctctttaattttggcagcagtccaggaggtagatcctaatattagtcccatttcacatgaaacaatgaagccaaagtgtatgtaagggaacacaataagtgatggacttcagagtcaaagtcagtcattcactccacagcataacaactatgccagcatagttccycaaatcattcataaatcaactgtctcccatcatagagcaaaagcacacactattaagatattgtgggttccaatatttccttccaattgtatattcacacacacacacacacacacacaacttacatatgcacaaacgtacat

SEQ ID NO: 609777 - DNA, 605 bp, Homo sapiens
tgttctatttgtctatatgcctgttcttgtgtcagtwctacactgttttgattactgtagctttgtagtaggtttgaaattaggaagtaggagtcctcaagttttttttttcaagattgttttggctatttggggtgtgttgaaatttcacgtgaaatttaggatggttttttcctatttctgaaaaaagagttattaggattttgacagggatcaaaattgaatttgtaaatcaagggtagttactgtcatcttaacaatgttaagtcttccagtctgtgaacatggaatgtctttccatttattttggtcttcttttatttctttcagcaatgttttgtacaggtcttttagtgtacaagtcttgtgcttccttggttaaatttttctcaagtatcaatcagtataatctaccacattagtagaatgaagaaaaaaaagaactcactacagtctgtcctttgtatctatgagttccacatctgcagatcaaaaatatttggaaaaaaaaataaaaggtaatacaaatttattccttaatcaaggaccagaggaaaaaaaatacaacatttaaaaatagagtataacaactgtttgcatagtat

SEQ ID NO: 609778 - DNA, 337 bp, Homo sapiens
tgagaaggctgcgggccagcagcaggccagtacaatgcgctgcagcataatttgtcaggccaaccttcaaaccatattttggcagttcatatgcatatgccgcacagactatcatatccccctctataagggcataagcaatctgacaaatgatatctctgttacacaaattatcatcctgtatttgtgtgttttgtatttatttttatcctgtatcacyaagcgtttccaagcatagtaatcagttttaccctctcgtcatcttctaaatttcacttggtatctcttaaagcaggccttattcttaacaactttaacaaaccccatcctgcagaag

SEQ ID NO: 609779 - DNA, 610 bp, Homo sapiens
actctaaaatgtatgtgtaactacaagagacatgaaaagccaaaacaatttttctgttttttttttttgagacagagtctcgctcygtcgcccaggctggagtgcagtggcgtgatctcagctcactgcaacctccgcctcccgggtgcaagcaattgtctgcctcagcctcccgagtagctgggattacaggtgcccgtcactgcgcaaagctaatttttgtatttttagtagagatggggtttcaccatgttggccaggctggtctcgaactcctgacctcaggcaatccgcccgccttggcctcccaaagtgctgggattacaggtgtcagccactgtgcccagccaaacttctgatttaatataaagctaaattaaccaagacagtgtgatattggcctaaggataaacatacggatttgtggaatagaaaagtccaaaaatagactcaaaaacattggtcaaatgacttcccacaaaagtgccaaggtaaatcaatccaaaaaaaaaatcttcaataaatgttactgatacaactggacatccatatacaaaaagatttattttacactacatacagaaacttgaaatggatcatcaacttaagc

SEQ ID NO: 609780 - DNA, 663 bp, Homo sapiens
gaagtttgatggtgtttttgtgactaaaaatatgccacaggaacttaactcttacttctatcaatttaaacttatrgtaaaattggtttcattatatgtcatttcacctaaagtcacaatttccaagaacatatcaacaacatttagtgaggacttattatacagccatacaataaaatactgagtagccattaaaaagggtgcaacaggtctatatccattgacacagaaagatgtctacgcagttgaatgaaaaaaagcaagaacagtatctatgattcctacacacatatataaatctccatacaccatgtatagctatatacactcatagaaaaaagtctggaaagatatatatgttaaacttttaaaactggttatctttggagaatggtaatgacaaagacttttactttctattttattcatttctgtattgtaaaattgaatgtattacttttataatcataaaaaacaaattatttctaaaaatacgataacacaaaaagaattttaaaagaaaataaaagaccttaacccaagtagaaacccttaatagtggtaagtataatcttccatatagacacgaagtatggctatattttaatatgataactatgagaataaaatatttattgaaaaaaagaataagattcttacaat

SEQ ID NO: 609781 - DNA, 620 bp, Homo sapiens
ctctgtatttaactactaatttgtgggaaatatgaggggtaaaggaacatgttaaataccataacaaggattcaatcagccaaatccaaaatgtggaaaattatcctggaacaataacctatttttttcaacaaataaatagcatgggaaaggagcacagggggtatgagttaagaaaggggattattggctgggtgcagtggctcatgcctataatcccagcactttgggaggcggaggcgggtggatcacttgaaatcaggagcttgagaccagcttggccaacatggcaaaaccctgtcgctactaaaaacacaaaataagccaaggctggtggtgcatgcctataatcccagctactcgggaggctgaagcaggaaaatcgcttgaacccaggagacggacgatgcagtgagccaagatcacgccactgcactccagcctgggcaacaagggcaaaactccatttcaaaaagaaaaaaaaaggtggggggaggtgattaaggttaagaaaaacttaagaaayatataaactaaatgaaatgtgtaactcttagttggatgatttaaacaaatcagtgtaaaaagacacttaaagaataagagaagtctgaacacag

SEQ ID NO: 609782 - DNA, 587 bp, Homo sapiens
ttcattcttcatttggaattcactcataagggaaaatgttcaattaaacaaaacttgtagagaactaagaaaaattctaagaaaagcaactgtttttcttagaggacaattaaaaacctaaaaatttatctcattaaatgaatgtgttaaatttaaaaatagattccatttgttatttgggaaatagttgcttctggatattaatgtttaatggctaatgaataagtacctgaaacctattaaaagcattcttttgagacctgaattattatgtaaaacraaagtaagcagaaagtttgggtaatatttagtgtgcttgatagtattctcttgaaaatagtaaaaggcaatttctatctcacaatgtgttcattcacaaatgttttctcagggccgagcaaagtcttggtctcacagaatttaactgtgaatagcctcagaattttcctacctcccgagagcctgcattctagtggcagaagatggtgtaattacagactacataaatgctctcagtaaaataagtatgattatgcagttgaatgtaatgaggaggcctaatctgataggattgtcgtttagccaca

SEQ ID NO: 609783 - DNA, 561 bp, Homo sapiens
ttggttcctttgatttaaagacacacacatatacatatagagtgtttgcaatgwtcaaggcacctttgtacaatatttcaagtcaatataatctattatataatttaatctccacaacaaatggatgagataaacacattttatacttattttgctaaatcactagattcgggtaatcttcccacagctgtgtctgtggattttttaaaaataaatacaaaggtttaaggaggaacagtccactttgaattaattccttatatagcttctgaagacatgcctctgaattcttccttcttgatgtgacttagatacattttctaacctcttaaataaatattttctttttaaaaaatgtttattttttattttgctttaagttccaggatacatgtgcagaatgtgcaggtttgttacataggtatacatgtgccattgtggtttgctgcacctatcaaccgatcatctaggttttaagccccgcatgcattaggtatttgtcctaatgctctccctccccttgggccccaccacccgacaggccctgttgtgtgatgttcc

SEQ ID NO: 609784 - DNA, 561 bp, Homo sapiens
ttggttcctttgatttaaagacacacacatatacatatagagtgtttgcaatgatcaaggcacctttgtacaatatttcaagtcaatataatctattatataatttaatctccacaacaaatggatgagataaacacattttatacttattttgctaaatcactagattcgggtaatcttcccacagctgtrtctgtggattttttaaaaataaatacaaaggtttaaggaggaacagtccactttgaattaattccttatatagcttctgaagacatgcctctgaattcttccttcttgatgtgacttagatacattttctaacctcttaaataaatattttctttttaaaaaatgtttattttttattttgctttaagttccaggatacatgtgcagaatgtgcaggtttgttacataggtatacatgtgccattgtggtttgctgcacctatcaaccgatcatctaggttttaagccccgcatgcattaggtatttgtcctaatgctctccctccccttgggccccaccacccgacaggccctgttgtgtgatgttcc

SEQ ID NO: 609785 - DNA, 485 bp, Homo sapiens
tttaaaaaacccagacacctaagatcttatataatcaaactctaactactacttgctggtgacatttctggatccacaagcatcattatttgaccgctctgatttatgtaactggtctaacttcagattttatctctgtaggcctctgggaatacttttagagattcacagtgaaaaatcagagtcaactcatgaatttctactttattgcataaaaacaaggggactataaaatgtgttcaaagggtataggatggaaatatacagaaatatagatcacacataacctgaatcagttgattcatctaaattatagtaatatctaaacaattgatgttacattgacgatccctttatttttatttttatttttttgagacaaagtcttgctctcatgcccaggctggagtgcagtggcrcgatcttggctccctgcaacctctgcctcccaggtaggagtgagtctcctgcctcagtttcccaag

SEQ ID NO: 609786 - DNA, 557 bp, Homo sapiens
gaagagaaaactaaaataataatattaattgaatattatgagaagagccaagcagatggtttttgaatggtcaagaattgtgaagggtctgatattttaccctacttacaagctaacaagttagcctgctacagttctatgaatgctggtagaatatgagtctcttgggtcagagacaaaagatagtttattacagcaatagcagtagcyagaatgtcagcatttgcactggttccccaagctccaattcccacaaagtgacataaagaggctcaggtgacatctgcacatggagtaggctgtattacagaagaaaaaaaactgaagttagtgaaaccaagccttttaaaatgaacactaatagagcctattctttgctccagagggagatactgtctccatctttcaaggctgtttactataggaatactgaagaaatagccgggaacaaaagcggtcagtgcttaactctcaagacatgcagaaatgcatgagacctatggagaactgtcttctaatgatatactacctgtttcatactcccgtcctatttgatg

SEQ ID NO: 609787 - DNA, 410 bp, Homo sapiens
aatccttatacaacacttgatccagtgctggatgcaaatagttatttgctagacagatttctttttgtgatagtaaaatatgatccttagataccagaaaaactaatactgctttggtaatagcttgactgtattctaaaggattccttttmgtattgataaatataattcatttatggagtatccaatatcacatactataatcctctgatgttttgatattaggaatgatttcaaatggagtgaccaagataatttgtggaatttgacagataaggttagagtattaatgttagattcaaacagagttacgtggccaaaagatgaagtgtggaaacctggtggaaaagctgaagtcagcaaggtgttgtaacagctctgatcatagctttagcaagcaagccacaagg

SEQ ID NO: 609788 - DNA, 574 bp, Homo sapiens
tgcctctgcttttcaaagtgctgggattataagcatgagccaccacgcctagcctggtttgttaaaatcatactttattgtaaattttcccaaaagttttttttttaattccaaattaccagaagtaaatattgaaaatactattctcatctactatttgctaakgtacagacatgttcttacagttttaaaatattataagttctgctctactcagttaagtttatttcactaaatgtgtccatgtattattagagtccacttttttttttttttttttaacagatcctcactctgttccccaggctggagtgcagtggcgtgatcttggctcactgcagcccttgcctcccaggttcaagcgattttcctgcctcagcctcctgagtagctgggatttcaggcatgcgccaccaaactcggctaacttttgtatttttagtagaggcggggtttcattatgttggccagggtggtctcaaactactgacctcaagtgatctgcccacctcagcctcctaatgtgctgggattacaggtatgagccactgtgcctagcctatagtctatgttt

SEQ ID NO: 609789 - DNA, 361 bp, Homo sapiens
atgactttacaatccagtggactgttagtatatttcactctattgacagtaacatttgaagataaaatgtygtggcttatccttattttctacaagaaataaggagtacataatacagaaaaaacccagcatccttcaggtgacttgttcctctttcctgtgtctttccagcctactttgagtggtttcatgccattgctgacctctgtttacctcactaacctctggttattttcagctctcttttttttcaactgtatgtccaattctctctattatttaagtgttagaaatggtttctgttttcctcattaagatattaacagattccgtgttctataaaagatacataggatatttc

SEQ ID NO: 609790 - DNA, 458 bp, Homo sapiens
tctcttttttttcaactgtatgtccaattctctctattatttaagtgttaraaatggtttctgttttcctcattaagatattaacagattccgtgttctataaaagatacataggatatttctctatgtggttatctaacttgattgggagacaaaaggcaaagtaggtggcaaccagaaagtgagaataatattctgaagatatcatttacccataataataaaaaaactctagtaataatcaaatatcaaatgttaagaatactttgctccaaaacatgtaatattgagatatctctgtgctatgttactgggctagataaatattttagtttctaggtttttaaaaagatttttccacacaaaatcagtatgtagggttcatgataataattatagtttttaacagcattccttttgttatgccaaattgatttgtatgtcttttccagcatact

SEQ ID NO: 609791 - DNA, 458 bp, Homo sapiens
tctcttttttttcaactgtatgtccaattctctctattatttaagtgttagaaatggtttctgttttcctcattaagatattaacagattcygtgttctataaaagatacataggatatttctctatgtggttatctaacttgattgggagacaaaaggcaaagtaggtggcaaccagaaagtgagaataatattctgaagatatcatttacccataataataaaaaaactctagtaataatcaaatatcaaatgttaagaatactttgctccaaaacatgtaatattgagatatctctgtgctatgttactgggctagataaatattttagtttctaggtttttaaaaagatttttccacacaaaatcagtatgtagggttcatgataataattatagtttttaacagcattccttttgttatgccaaattgatttgtatgtcttttccagcatact

SEQ ID NO: 609792 - DNA, 458 bp, Homo sapiens
tctcttttttttcaactgtatgtccaattctctctattatttaagtgttagaaatggtttctgttttcctcattaagatattaacagattccgtkttctataaaagatacataggatatttctctatgtggttatctaacttgattgggagacaaaaggcaaagtaggtggcaaccagaaagtgagaataatattctgaagatatcatttacccataataataaaaaaactctagtaataatcaaatatcaaatgttaagaatactttgctccaaaacatgtaatattgagatatctctgtgctatgttactgggctagataaatattttagtttctaggtttttaaaaagatttttccacacaaaatcagtatgtagggttcatgataataattatagtttttaacagcattccttttgttatgccaaattgatttgtatgtcttttccagcatact

SEQ ID NO: 609793 - DNA, 458 bp, Homo sapiens
tctcttttttttcaactgtatgtccaattctctctattatttaagtgttagaaatggtttctgttttcctcattaagatattaacagattccgtgttctataaaagatacataggatatttctctatgtggttatctaacttgattgggagacaaaaggcaaagtaggtggcaaccagaaagtgagaataatattctgaagatatcatttacccataataataaaaaaactctagtaataatcaaatatcaaatgttaagaatactttgctccaaaacatgtaatattgagatatctytgtgctatgttactgggctagataaatattttagtttctaggtttttaaaaagatttttccacacaaaatcagtatgtagggttcatgataataattatagtttttaacagcattccttttgttatgccaaattgatttgtatgtcttttccagcatact

SEQ ID NO: 609794 - DNA, 474 bp, Homo sapiens
tggggttcctggcaactctttctttaagttcttccttatcctgggatgtgtcttttctaattccagaagtttaaatacataaaagccttcaaacttgattttacttcaataaacgtgaaattatgttgtttctaccacctccagtataataatcatcytgcttggcaaatcagtaaagatttttaaaattgatactcttcaaggttagcgaagctgtggaagaacctggactctcatgtaccacgagatcaacacatcctcttgaaaggccccatgcactataaacctcagaagtgaacatatattttaacctacttcttaaaatttatacttaggaaataatcacacactttttaaagtagtttggtataaacttttcattgcagcattatttatattagttaaaatgttagagtaacctaaatattttaaactatggtttggaaataatctactagtaggaaaaagatgtgt

SEQ ID NO: 609795 - DNA, 474 bp, Homo sapiens
tggggttcctggcaactctttctttaagttcttccttatcctgggatgtgtcttttctaattccagaagtttaaatacataaaagccttcaaacttgattttacttcaataaacgtgaaattatgttgtttctaccacctccagtataataatcatcttgcttggcaaatcagtaaagattttwaaaattgatactcttcaaggttagcgaagctgtggaagaacctggactctcatgtaccacgagatcaacacatcctcttgaaaggccccatgcactataaacctcagaagtgaacatatattttaacctacttcttaaaatttatacttaggaaataatcacacactttttaaagtagtttggtataaacttttcattgcagcattatttatattagttaaaatgttagagtaacctaaatattttaaactatggtttggaaataatctactagtaggaaaaagatgtgt

SEQ ID NO: 609796 - DNA, 474 bp, Homo sapiens
tggggttcctggcaactctttctttaagttcttccttatcctgggatgtgtcttttctaattccagaagtttaaatacataaaagccttcaaacttgattttacttcaataaacgtgaaattatgttgtttctaccacctccagtataataatcatcttgcttggcaaatcagtaaagatttttaaaattgatactcttcaaggttagcgaagctgtggaagaacctggactctcatgtaccacgagatcaacacatcctcttgaaaggccccatgcactataaacctcagaagtgaacatatattttaacctacttcttaaaatttatacttaggaaataatcacacactttttaaagyagtttggtataaacttttcattgcagcattatttatattagttaaaatgttagagtaacctaaatattttaaactatggtttggaaataatctactagtaggaaaaagatgtgt

SEQ ID NO: 609797 - DNA, 518 bp, Homo sapiens
aaaacaggtgtaaaattcaccaactctaggtgaaggaaattaaacccttttaaagtccatatgtttagaaatatagctcaactacaacaacgctactggagcctatgagcgatctataagtgtgtgctttcattttacttctaatctcacaaaataattattcctagcaattgatagtttattccaaaaagaagcctgactttggccctctcactgacctggaagaatttttgatgacatgtgtgttaaatgtgtgattgaggtgaagtagggatgaatagccagagctggttaaaaggataakcatccaaaataatactgacctaggaaagctttaggtcaaacctgccatatagaaatactacaaatataactatttgttaatataagtactgttgcattattaattttataaaaatcttcaaatgttcaaatgtgtaaattcaatatggataccaggatggcttatgaacagcacatgagaaaacaacttcatgatgtaattaactcagtgagtc

SEQ ID NO: 609798 - DNA, 583 bp, Homo sapiens
agtgcaattgctggatcatttggtaagagtatgattcgtttgtgagaaaccaccaaactgttttccaaagtggttgtactattttccattcctaatagcaatgaagaagagttcttgttgctccacatccttatcaacttttggtgttttcagtgttctcaattttggccattctcatacatgtgtagtggtatcttattgttgttttaatttgcatttccctaatgaaatacgatgtgcagcattttttttcatatccttactcgtcatctgtataacttctttggtggcatatctgttaagttcttattgttgagttttaagagttctttgtaaatgttttttaaataaagtatattctctgactgttttcatcaataacagtaactcacctttattgataagtgtttattgtttgttagacagtagatattcaaggcacatctatccaaaagtgggatgatctacatctctataaatcagcctcaatgakttgacatttcaataagatacatttgcatggaaaaaaacttcaacatattctttgggagttttgtaaactgagcagtttggttttataact

SEQ ID NO: 609799 - DNA, 598 bp, Homo sapiens
gggaataacacacaccatggcctgttgggggatgaggggcgaggggagagaaattagaggacaggtcaataggtgcagcaaaccaccatgccacatgtatacctatgtaacaaacctgcatgttctgcacatgtatcccagaacttaaagttaaaaaaaaagaatttagggcttttaaacatttttattatatattgtcaaactacagttatatgtatttatgggatacaagtgatgacataatttttaaatacaayacggaataattaaattaagctaattaacatactcatcacctcaaatatttaatatttttgtgataagaacatttgaaatgtactctcttagcaaatttaaagtgcacagtattcaattattagctattttcaccatgttgtgcaatagatctcgaaaacaaacaaacaaacaaaaaaacagttattccttttatctaattggggttttgtgccctttgtctttcctctaccccttctcacagcaacctctggtaaccaccattcaactctctgatgctatgaaagcaattgttttagattccacacataactgagaacaagcagtttttgtctttctgtgc

SEQ ID NO: 609800 - DNA, 598 bp, Homo sapiens
gggaataacacacaccatggcctgttgggggatgaggggcgaggggagagaaattagaggacaggtcaataggtgcagcaaaccaccatgccacatgtatacctatgtaacaaacctgcatgttctgcacatgtatcccagaacttaaagttaaaaaaaaagaatttagggcttttaaacatttttattatatattgtcaaactacagttatatgtatttatgggatacaagtgatgacataatttttaaatacaatacggaataattaaattaagctaattaacatactcatcacctcaaatatttaatatttttgtgataagaacatttgaaatgtactctcttagcaaatttaaagtgcacagtattcaattattagctattttcaccatgttgtgcaatagatctcgaaaacaaacaaacaaacaaaaaaacagttattccttttatctaattggggttttgtgccctttgtctttcctctaccccttctcacagcaacctctggtaaccaccattcaactctctgatgctatgaaascaattgttttagattccacacataactgagaacaagcagtttttgtctttctgtgc

SEQ ID NO: 609801 - DNA, 575 bp, Homo sapiens
gttttcttttctttttgatgtcctactaaggctttcatattagyggaatgctgggcttattgaaggagtttgaaagtatcccctcatctttgactttttggaaaagttaattgagaactggtattattaatagttcttctttcagtgtttggtagaattcagtagctaagccatcaggtcctgagcttttctttgatgagagatattttattatggatttaatttctttatgccttattaatatgttcaggttttctatttcttcatgatttaattttggtagattgtatggatttaggaatttacccatttcatctaggttattcaacttgttgatgaataattgtacatagtagtctcatgattactcacatttctgtaatatcagttatagtatctcctctttcagttctgattttattaatctgaatcttctctcatttttttcttagtctacataatagtcaattttgtttatctttccaaaaaacaaactcttagttttgttcatcttttctactgcttagcttggctctgctacatttatttgtgctctgatctttattgttttcttt

SEQ ID NO: 609802 - DNA, 575 bp, Homo sapiens
gttttcttttctttttgatgtcctactaaggctttcatattagcggaatgctgggcttattgaaggagtttgaaagtatyccctcatctttgactttttggaaaagttaattgagaactggtattattaatagttcttctttcagtgtttggtagaattcagtagctaagccatcaggtcctgagcttttctttgatgagagatattttattatggatttaatttctttatgccttattaatatgttcaggttttctatttcttcatgatttaattttggtagattgtatggatttaggaatttacccatttcatctaggttattcaacttgttgatgaataattgtacatagtagtctcatgattactcacatttctgtaatatcagttatagtatctcctctttcagttctgattttattaatctgaatcttctctcatttttttcttagtctacataatagtcaattttgtttatctttccaaaaaacaaactcttagttttgttcatcttttctactgcttagcttggctctgctacatttatttgtgctctgatctttattgttttcttt

SEQ ID NO: 609803 - DNA, 575 bp, Homo sapiens
gttttcttttctttttgatgtcctactaaggctttcatattagcggaatgctgggcttattgaaggagtttgaaagtatcccctcayctttgactttttggaaaagttaattgagaactggtattattaatagttcttctttcagtgtttggtagaattcagtagctaagccatcaggtcctgagcttttctttgatgagagatattttattatggatttaatttctttatgccttattaatatgttcaggttttctatttcttcatgatttaattttggtagattgtatggatttaggaatttacccatttcatctaggttattcaacttgttgatgaataattgtacatagtagtctcatgattactcacatttctgtaatatcagttatagtatctcctctttcagttctgattttattaatctgaatcttctctcatttttttcttagtctacataatagtcaattttgtttatctttccaaaaaacaaactcttagttttgttcatcttttctactgcttagcttggctctgctacatttatttgtgctctgatctttattgttttcttt

SEQ ID NO: 609804 - DNA, 573 bp, Homo sapiens
ctcactgtataagcatagttttagcaaaaatttttgaccagatattgtactaggtattgaagataggaagaaaattggaatattctcagttgagtatttctgatttgtcttttgcctcttcaatcatttaatttgtaaaggcttctgctccagagcagctgccctgggacaccaagaagacgctgggtctccttcagggatccagggttgcttggatgctgggagccgacctgcattcgctgaaggaagtggagcccagacctcatgacagataattccagcaaaaccagtacctcgcctactgaaaaattaccttcactcatcatctaccttgcttaaactcatcggacatttctcagttttctactccccggtgtgctttaagctttgctataaagcatcaacatctatcatcaccctaacttcttaaatcaattttagtgcctattaaaagttgccatcaaaaaagactatagttaataacaaygtgttgcatatttgaaaattgctaccaaggcagattttgagtgttttcaccacaaaacctatgtgagatgatacatatgttaatta

SEQ ID NO: 609805 - DNA, 629 bp, Homo sapiens
tagtatctcctctttcagttctgattttattaatctgaatcttctctcatttttttcttagtctacataatagtcaattttgtttatctttccaaaaaacaaactcttagttttgttcatcttttctactgcttagcttggctctgctacatttatttgtgctctgatctttattgttttctttcttttacttagtttgttctccttttgctagttccttaaggtgtaacataggttgtttatttgggatctttcttcttgtttgatgtaggtatttattgctataaacttccctcttagacctgcttttggtgcattttataagtttggtatattgtattaccatttttatttatttcaagacattttaaaatctgtcttttaatttcttcctatatcctttgtttatgyagaaacatgtttaatttccacatatttgtgaatgtttcaaaattcttattattgattgctactctctttgtggttggaaaagatacttgatgtaatatcagtcttttaaaataagttatgacttgttttgtggcctaacgtagtttttcatagtgcggtatgtttcaaacctttgtgtgtgtgtgtgtgtgtgtgtgtctcctatagatttttgctta

SEQ ID NO: 609806 - DNA, 552 bp, Homo sapiens
cttaaggtgtaacataggttgtttatttgggatctttcttcttgtttgatgtaggtatttattgctataaacttccctcttagacctgcttttggtgcattttataagtttggtatattgtattaccatttttatttatttcaagacattttaaaatctgtcttttaatttcttcctatatcctttgtttatgcagaaacatgtttaatttccacatatttgtgaatgtttcaaaattcttattattgattgctastctctttgtggttggaaaagatacttgatgtaatatcagtcttttaaaataagttatgacttgttttgtggcctaacgtagtttttcatagtgcggtatgtttcaaacctttgtgtgtgtgtgtgtgtgtgtgtgtctcctatagatttttgcttatgattaataaagatcacattaaatatctcactcttataacagctgataaaaacttaactttgattgcatacaactctacaactttatttcccccacactgtgtgtgtttctgatgtctgaacttacctcattttgtaata

SEQ ID NO: 609807 - DNA, 573 bp, Homo sapiens
ctcactgtataagcatagttttagcaaaaatttttgaccagatattgtactaggtattgaagataggaagaaaattggaatattctcagttgagtatttctgatttgtcttttgcctcttcaatcatttaatttgtaaaggcttctgctccagagcagctgccctgggacaccaagaagacgctgggtctccttcagggatccagggttgcttggatgctgggagccgacctgcattcgctgaaggaagtggagcccagacctcatgacagataattccagcaaaaccagtacctcgcctactgaaaaattaccttcactcatcatctaccttgcttaaactcatcggacatttctcagttttctactccccggtgtgctttaagctttgctataaagcatcaacatctatcatcaccctaacttcttaaatcaattttagtgcctattaaaagttgccatcaaaaaagactatagttaataacaatgtgttgcatatttgaaaattgctaccaaggcagattttgagtgttttcaccacaaaacctaygtgagatgatacatatgttaatta

SEQ ID NO: 609808 - DNA, 552 bp, Homo sapiens
cttaaggtgtaacataggttgtttatttgggatctttcttcttgtttgatgtaggtatttattgctataaacttccctcttagacctgcttttggtgcattttataagtttggtatattgtattaccatttttatttatttcaagacattttaaaatctgtcttttaatttcttcctatatcctttgtttatgcagaaacatgtttaatttccacatatttgtgaatgtttcaaaattcttattattgattgctactctctttgtggttggaaaagatacttgatgtaatatcagtcttttaaaataagttatgacttgttttgtggcctaacgtagtttttcatagtgcggtatgtttcaaacctttgtgtgtgtgtgtgtgtgtgtgtgtctcctatagatttttgcttatgattaataaagatcacattaaatatctcactcttataacmgctgataaaaacttaactttgattgcatacaactctacaactttatttcccccacactgtgtgtgtttctgatgtctgaacttacctcattttgtaata

SEQ ID NO: 609809 - DNA, 527 bp, Homo sapiens
tattcttaattatcagggttctttgctcttcagcatttttaatatatcatcccacttttggctgaccttcagagtttcttctgagaaatatgctgatacttatattgggactttttgttttgtgacatatttcttatctcttactgttctcagaattttttctgtctttgaattttgatagttttattattatgtatcatggcaaactcttctttgggttgaatttaatttgagacatctgtgcttcctgtacctagatactggcttgtttgctcagattagaaagtttccagcgattgttttctaaggattttctggccttttttctctttcttctccttgaattcccattatgtgtaggttaggtctcttaatagtgttcatgattactgcagactgtctttattttttaattatttttttcttgttgcttccytaattggttaattttaaatgttctgtattcaagctcattgagtctttcttcaggttaataaagcctgctattgatgttttctgctgcattt

SEQ ID NO: 609810 - DNA, 689 bp, Homo sapiens
cttggcttatctgattttgattcctgacttcagtacagctgtttctccatgtgcatgctgcagaaaagcgcaagaaggtgggtgtggttgccatgaattgcatcactcagctatccttctgcagggatcataaatagctgatgctgtaggcactgccactctggacccaccatcacaattactcagcagtgatgctcctcacaagctgttcccagccaacaactaaacatgacaggtagttcctataaagatgtaagactctgctgagtcactttcatccaaggacccttcactggactggctaagcctcacttaaaactgtgctgtagtgtgagactctcgctattgaatccattttcctttcttctctcstttcataggtataggcctgtgtcatggtctgaatgaactctgcactgggttctgcacccaccccaatcaatctctcgtctaatcctgtcttggaatctgcatatagacagatctgtgggaactcgctttgcttcccataagttcatcaaaagacatcacatctgaatagaatgcaaggtctctgatgaataataaaaactaacttatgttcaaaatatgaattatagaattttcaagaaatgaaattttatcatagtccaataaacacaccataattaaagtaacaaggaattggccaacaaagtacctttaataag

SEQ ID NO: 609811 - DNA, 515 bp, Homo sapiens
atcatatcccagtggaaatgatgcttaacccatgtgcagggaactgtgacagggatcatacaaggggaattttaaaaattcatttagtcagtcarccttgaaaactttttattttttgtttggctacatccagcatgtaagtgtattagtccattttcacactgctataaagaactacctgggactaggtaatttataaagagaagaggtttaattgaatcacagttctgcatggctggggaggtctcaggaaacttacaatcagggtggaaggtgaaggggaagcgggcaccttcttcacaaggcggcaggagagagagagagtgaggagggaagtgccaagaacttttaaaccatgagatctcctgggagctcactcactattatgagaaaatcacaggggaaaccacccccatgagccaatcatttcccaccaggtccctccctcaatatgtaggaattgtaattcaagatgagatttgggtggggacacagagccaaaccatatcagtaag

SEQ ID NO: 609812 - DNA, 537 bp, Homo sapiens
taaatgattcataatgttatcttaattttcaccttattgattatagtaagttttctttatttgaaccataaaaataaattgtatgtgactgttatgaagaaataaataaaaatttggcatgtcccacttttaatgataaaagttgtgaacaacatttgcattcaatatttataccacattattttgttgttgaaaacagtcattgcttttccttaacaaatgcaaattatttatgttgattcttgtgccatcaaaagacgtcctgggctgttcaggtttttatacactatcagcagatgtttgtgataacatttcattattaaataaatgtcttttaaaattttttttgcaatctagaatatttatgttcattatatttaaaaggaatgtttacaattatttaaatattgtcaccaattcttcctgggtttttwaagtgtttttatagatgaaaacaccccacctgtgagcccttcctgcattcttgctagttttcaaccttttaatgaactgtacattttagtatcagtgtctcaa

SEQ ID NO: 609813 - DNA, 513 bp, Homo sapiens
ctctatcacccaggctacagtgcagtggcacaatctcagctcactgcaacctctacctcctgggttcaagagattcttctgcctcagcctcccgagtagctgggattacaggcatgcaccactacgcccagctaatttttgcgtttttagtagagtcggggtttcaccatgttgactaggctggtctcgaactyctgacttcaagtgatctgcccgccttggcctcccaaagtgctggtattacaggcgtgagcccccgtgcctggccaatgttgctcttttctttccaattttatttgaccttaatttccttttttcctatggtgctaaccagtacgtttttcagaagtggggctcataggtacctttgcttcttcttctcatttgccaccatcctcagcactttcccatgataatttacatctcaaaatgcactaaaccatcatgattgtaattatatttagatgacttgctttacagggagcttttcactagcaaacgcaggtgaaaggt

SEQ ID NO: 609814 - DNA, 513 bp, Homo sapiens
ctctatcacccaggctacagtgcagtggcacaatctcagctcactgcaacctctacctcctgggttcaagagattcttctgcctcagcctcccgagtagctgggattacaggcatgcaccactacgcccagctaatttttgcgtttttagtagagtcggggtttcaccatgttgactaggctggtctcgaactcctgacttcaagtgatctkcccgccttggcctcccaaagtgctggtattacaggcgtgagcccccgtgcctggccaatgttgctcttttctttccaattttatttgaccttaatttccttttttcctatggtgctaaccagtacgtttttcagaagtggggctcataggtacctttgcttcttcttctcatttgccaccatcctcagcactttcccatgataatttacatctcaaaatgcactaaaccatcatgattgtaattatatttagatgacttgctttacagggagcttttcactagcaaacgcaggtgaaaggt

SEQ ID NO: 609815 - DNA, 644 bp, Homo sapiens
tggttgcaaaggttacagcagatcagctattgctggctagcctccaaattggtctctaatttgaggttgatcggggtttatcgattacagaacaggctcctctagagggatatgaagcaccgccaggtcctttgagttttaagctgtggctcgtagtgttctggcgagcagttttgttgatttaactgttgaggtttagggctaagcatagtggggtatctaatcccagtttgggtcttagctattgygtgttcagatatgttaaagccactttcgtagtttattttgtatcaactggagttttttacaactcaggtctctgttgactgttgcaaaatggttcagatacaaactctctaacacattgtttccctttttttgtttaccagaaacacaggattcaattcaatacttttatttacttcattaaaatgaaaataggttgaaaaagaggtaatgtaaataatagctaacatttattgagtggttactatgcaccaagcactgtgatttatatacacaactcatataaatgaaattgtaacaacatacacagggagtaggaactattactgtctttattccacagctgaagaaaatgaagcttagagattttaaataccttgcccaaagtcaaacacagc

SEQ ID NO: 609816 - DNA, 644 bp, Homo sapiens
tggttgcaaaggttacagcagatcagctattgctggctagcctccaaattggtctctaatttgaggttgatcggggtttatcgattacagaacaggctcctctagagggatatgaagcaccgccaggtcctttgagttttaagctgtggctcgtagtgttctggcgagcagttttgttgatttaactgttgaggtttagggctaagcatagtggggtatctaatcccagtttgggtcttagctattgtgtgttcagatatgttaaagccactttcgtagtttattttgtatcaactggagttttttacaactcaggtctctgttgactgytgcaaaatggttcagatacaaactctctaacacattgtttccctttttttgtttaccagaaacacaggattcaattcaatacttttatttacttcattaaaatgaaaataggttgaaaaagaggtaatgtaaataatagctaacatttattgagtggttactatgcaccaagcactgtgatttatatacacaactcatataaatgaaattgtaacaacatacacagggagtaggaactattactgtctttattccacagctgaagaaaatgaagcttagagattttaaataccttgcccaaagtcaaacacagc

SEQ ID NO: 609817 - DNA, 644 bp, Homo sapiens
tggttgcaaaggttacagcagatcagctattgctggctagcctccaaattggtctctaatttgaggttgatcggggtttatcgattacagaacaggctcctctagagggatatgaagcaccgccaggtcctttgagttttaagctgtggctcgtagtgttctggcgagcagttttgttgatttaactgttgaggtttagggctaagcatagtggggtatctaatcccagtttgggtcttagctattgtgtgttcagatatgttaaagccactttcgtagtttattttgtatcaactggagttttttacaactcaggtctctgttgactgttgcaaaatggttcagatacaaactctctaayacattgtttccctttttttgtttaccagaaacacaggattcaattcaatacttttatttacttcattaaaatgaaaataggttgaaaaagaggtaatgtaaataatagctaacatttattgagtggttactatgcaccaagcactgtgatttatatacacaactcatataaatgaaattgtaacaacatacacagggagtaggaactattactgtctttattccacagctgaagaaaatgaagcttagagattttaaataccttgcccaaagtcaaacacagc

SEQ ID NO: 609818 - DNA, 644 bp, Homo sapiens
tggttgcaaaggttacagcagatcagctattgctggctagcctccaaattggtctctaatttgaggttgatcggggtttatcgattacagaacaggctcctctagagggatatgaagcaccgccaggtcctttgagttttaagctgtggctcgtagtgttctggcgagcagttttgttgatttaactgttgaggtttagggctaagcatagtggggtatctaatcccagtttgggtcttagctattgtgtgttcagatatgttaaagccactttcgtagtttattttgtatcaactggagttttttacaactcaggtctctgttgactgttgcaaaatggttcagatacaaactctctaacacattgtttccctttttttgtttaccagaaacacaggattcaattcaatacttttatttacttcattaaaatgaaaataggttgaaaaagaggtaatgtaaataatagctaacatttattgagtggttactatgcaccaagcactgtgatttatatacacarctcatataaatgaaattgtaacaacatacacagggagtaggaactattactgtctttattccacagctgaagaaaatgaagcttagagattttaaataccttgcccaaagtcaaacacagc

SEQ ID NO: 609819 - DNA, 609 bp, Homo sapiens
tcctattcttccttcattgtatttattttttaaagctgatttctatacacagttctttcactagccagtctgatcccacaacttaataaaaacttctcactacaaaaatattcagaaacatccatataatccattaatttatgatcatttttgattatttaaaagacatgtcattaaaagtcaaactactagtgttaacataaaataaaaatgatacaattttcaatatgattaaagaaatacaagggaataaagaagcagaaaccaatrgcagcccaggtgttgttataactttttagtgctttatgagacaccacagattagttgtatctttattttcccttacagttatcctagagttcattgatcatttgtcaatttacacactcctttagactgaagtttgattttcctttagaactgcctttattcttttccgttcatacactaggaaattgttgagactataattgttttatttctaaagaccaatacttggctttggtacatttattaattcagtaacttcttagtgagcatgttctaatcatgagattcagacaaatcctcctagactctacatccttttgagatattctccttttgacc

SEQ ID NO: 609820 - DNA, 560 bp, Homo sapiens
atccatgtccctgcaaaggacataatttcattctttttaatggctgtatagtattccatggtgtatatgcaccacattttctttatccagtctctcaatgattggcatttagggtgatttcatgtctttattattgtgagtagtkctgcaatgaacagacacatgcatgtgtctttataatagaatgatttatattcctatatttatatttggcccttggcctatagtttgacaacccctggtgtaaaacatttagacttaaggtaattattgatgtttttggattaaaaactgccaacttgctagctgttttctatttgccttgtctgttctttatttctttttccccttgtcttctttgaattaattgggtatttttaaatattcattttacttcctctattgatttgttattcacaccttaaatatttttagtgttggatctaggctttacaaatatgtatctctaacttattgcagtctaactttaaatagtaatttatcacctcatgtaaagtgtgagaacctttaaatggcatacctccagttgccctcctttt

SEQ ID NO: 609821 - DNA, 576 bp, Homo sapiens
attagatctgtaacttactgctctggattttaattctctcttggttttctagcccygaagatttcctttactttgctgcagatcataatagacatttaaaaatgtttattatattttatctagaatttctaaagattttcaacttatatagttttcaacgttggcaaacacaaataagtaaattgaatcttctaagtcctttgatttgatttccatgtgactaaggactatggcagctgcctaggcctgtgtctcccaatatttcctcaaaaaatgacacagaaaaacaggaaagaaaaataagattacacaaaactatacactcaggcataacctaactataaaatactcaaatatcaaaataacagtaagtaaaaaataaataataaaaatttaaaagttatagtgaagaatctctgttcctgccctacattcactccatgcaacatttattgatcagcaatggcaggttgagataaaacagtgagaaaagtgagctagaaaaagcctaatattgatctgaaaacactatcagaataagcaactccactgtaagactgaaaatactaaatatgg

SEQ ID NO: 609822 - DNA, 576 bp, Homo sapiens
attagatctgtaacttactgctctggattttaattctctcttggttttctagccctgaagatttcctttactttgctgcagatcataatagacatttaaaaatgtttattatattttatctagaatttctaaagattttcaacttatatagttttcaacgttgrcaaacacaaataagtaaattgaatcttctaagtcctttgatttgatttccatgtgactaaggactatggcagctgcctaggcctgtgtctcccaatatttcctcaaaaaatgacacagaaaaacaggaaagaaaaataagattacacaaaactatacactcaggcataacctaactataaaatactcaaatatcaaaataacagtaagtaaaaaataaataataaaaatttaaaagttatagtgaagaatctctgttcctgccctacattcactccatgcaacatttattgatcagcaatggcaggttgagataaaacagtgagaaaagtgagctagaaaaagcctaatattgatctgaaaacactatcagaataagcaactccactgtaagactgaaaatactaaatatgg

SEQ ID NO: 609823 - DNA, 552 bp, Homo sapiens
cttcaatctgaaagaaaagggtgctaatgtgcaacaagcaattatctgaaggtatgaaactcaatggtaaaagtcagcagacaggaaaattcagagcactctaacactgcaattgtggtgtgcaaaccactcatatctttagtataaagatgaaaaggcaaatctattaaaaaataataattttaaagagataggcaatataaaaagacaaattgagrcaacaaaacgtgaaaatgcaggaggaaatgagttaaagtgtagggatttttagtttgttctttgcttgtttattttcttttctttgtgatcaaagttaatttgttatcagtttaaaataacttgttataggatgtgttttttaggtttcctggtaaccacaaagcaaaaatctgtaataaatacactgaaaaccaacacatagaccaaggagacagaatagggaatctagaaataaatctatgcatttacagccaattcattttcaacaaaggcactaagaacatacatttgaaaaaggatagtctcctttataaatggttctgggaaaactgg

SEQ ID NO: 609824 - DNA, 604 bp, Homo sapiens
tgagcttaactcatccattaattatttttttcagttttcctgagaaagtaagatccaagtatatgctgtatacttaagtgatgttgagtggttaaaaataaagaaatggacggacaacattttgcttatccatgtattcgtcagtggacactggattgcttctatgtttttgctattgtgaataatgctatgaacacaggggtataaatgcctcttcaaaaccctgctttcagttattttgggtgtatacccagaagtgtaattgctgggtcatacagtaattctattttttattttttgaggcaccaccatactgtcttctgcagtggctgcaccattttacattcccatcaacagtgcacaagaattccaatttctctrcatcctccccagtactcactatttttttaatagtctgaattggactactcaggtgcgtcatataagtggaatcacacagtatttgtccttctgtgattgatttatttcacttagcataatatctgcaagggtcatcactgttttactatgtgtcagaattttatttctttttaaggccaagtaatttgcaaattatatatctgattagagattaatattcaga

SEQ ID NO: 609825 - DNA, 585 bp, Homo sapiens
atgacattgaacaaacagaaagacattacttattcttagatagatccactcaacattgtaaaactgccagttattttctaaattactttacaaatgtaaagcaatcccaataaaaacataaactcaaggaaaggaaattagacatgttaccaaaaatataatcagggaaacatggaaaaagaaaagctaaaaaaactaaaagagggaagtgtgtcccagaggttaaaatacactctgaataacacactgtggtgctggccccttagtagaggactgtgctgcatggcccagacaggacagtcacatacagaaaaactttgtgtgtaatacgtgtggctttgcaaatcatgggacaaagatggacttttaaaaaaatggttcagggataactgggtagccattcataaaaatataaaattaggaacacctcacaccatgctcagagataaactccaaatggatccaagagctaaygtagcagatgaagtcctataaatactggaggaaaacaaattcttctttagcctcagtgtggagaaagactttctaactcagaaagtcaaaagctaaaggcagtcagagatt

SEQ ID NO: 609826 - DNA, 518 bp, Homo sapiens
gaggctgaaaatgccactggaaacgaagatgtcaccaatacgaccgataaaaaagctttgtcctgggctcttggtttctcacccagcagccgcgctgtccctctttctcrctcacagagctgggttttggcaatgtgtgcccccagtgaggccccctgcagccgggtgggctacaggcctgtaaggtaggaggagtctaccagctctgcgaggaatttgctcctcctgataaaaggggaaccagtgtccaggcctgcacccccgcctcctgccctgggagtggacgaggtgtctggcactgtggacaccatccttgatcatgaggcacgagcttgaggagaggccaggacaacctcagggacatggccttgtattgcggagctgccggaccagagctgcgtgccacctgcctcttagccgcgggtgccccaggatcccagccaaggggctgggcgctgccactcaggctctgtcctctggggccagtgattggacagaagcaccaatcttaggaattc

SEQ ID NO: 609827 - DNA, 518 bp, Homo sapiens
gaggctgaaaatgccactggaaacgaagatgtcaccaatacgaccgataaaaaagctttgtcctgggctcttggtttctcacccagcagccgcgctgtccctctttctcactcacagagctgggttttggcaatgtgtgcccccagtgaggccccctgcagccgggtgggctacaggcctgtaaggtaggaggagtctaccagctctgcgaggaatttgctcctcctgataaaaggggaaccagtgtccaggcctgcacccccgcctcctgccctgggagtggacgaggtgtctggcactgtggacaccatccttgatcatgaggcacgagcttgaggagaggccaggacaacctcagggasatggccttgtattgcggagctgccggaccagagctgcgtgccacctgcctcttagccgcgggtgccccaggatcccagccaaggggctgggcgctgccactcaggctctgtcctctggggccagtgattggacagaagcaccaatcttaggaattc

SEQ ID NO: 609828 - DNA, 547 bp, Homo sapiens
atgggggcaggcagaggataggattcagctgaccagccctaagaagtgagccctcctggggcactgtctgaacttcctggccaactctggcttcggttgccccattgttactggggatcacccccgtccatggtggatgggctgtctctgcaactctccatctctaacaactgtacccacagtccctgacctgtcccagtgtgacccastccactccatgcccgaagccgggagtggcctcctggggacccaaactcctcaagttgcagacaccctgggattccctgaggcgggtggatggtggcccagctgtgaggaggcgcgttcctgctcggagagcagtcatggctttgggggccaaagagaggcggggggccgagccaccccagggtgagctgcccagggcgaaaggctgccttgacccttccacgggcctccctaccctcggggagattggtcagggctagaaaaacgctttaggtagagatgaagccagcaggtggaacaaggttaggaagctctttgttttaaaaccaagtctaactgc

SEQ ID NO: 609829 - DNA, 539 bp, Homo sapiens
gattattttctgtctttttatgctgctattgatcccatctagtgatttttagaatttcagatattgtatttttagatttaaaatatccatttggttcttttttttaaattttctactgtttgctgaaacctttaatttgttgagactttctatttcttcatttgtttcaagagtgtttgtaaatgtttgttgaagcatttttatgatcactgctttaacacccttgtcagataattctcatgtctgtgttattttggtgttggtctctgttagttgtcttttcttgttccatttgagattttcctagttcttgatatgacaagtgatttttgatggaaacctgggcagtttgtgtgtcatattgtaagactctgcattttacctgcatcttgccatttagyaggtttctctgaccctgggtgagggcaggtgccatcgtgtcactgtcacgctgggagtggaagtccagcttccctctctgccctcattgatactggcacggtggggctcctctgcacggctggcagcaggtggagcag

SEQ ID NO: 609830 - DNA, 405 bp, Homo sapiens
gtccctgacctcgaacttggctttcaaagcacaacccttcaaccctctttgggcccagcccctcctctgtgacttccctggtagcagcattgctggtgtgtggccatggggcaggaccctccctaggtycatgccgactcaacctgccctgccagacctcacttctcaggctcagcttctccacttagagccaaagcttaggctgcacctgcccagggtggctccttggctgtgcctgcctctctgtgtgctcacttcccctttacccaccctctgaaggtttggtccaaaatcaactgataaaaggcagattgatcagagaaaaggcacgtgcagttcatgactgggcctgggggaaattgcagtgatttcccaaatgtgttgcacagtgcagaggctgatgtg

SEQ ID NO: 609831 - DNA, 405 bp, Homo sapiens
gtccctgacctcgaacttggctttcaaagcacaacccttcaaccctctttgggcccagcccctcctctgtgacttccctggtagcagcattgctggtgtgtggccatggggcaggaccctccctaggtccatgcygactcaacctgccctgccagacctcacttctcaggctcagcttctccacttagagccaaagcttaggctgcacctgcccagggtggctccttggctgtgcctgcctctctgtgtgctcacttcccctttacccaccctctgaaggtttggtccaaaatcaactgataaaaggcagattgatcagagaaaaggcacgtgcagttcatgactgggcctgggggaaattgcagtgatttcccaaatgtgttgcacagtgcagaggctgatgtg

SEQ ID NO: 609832 - DNA, 598 bp, Homo sapiens
tagtggttaatatgctgcttcttgcaaaggcatattacaacttataatcttcctttatggrtgtatgttgttagtgcttaatcaggcatgtgaatgtattcaggtgttaaaccattctattagctgggaaattgcactattatttgctgagctgtttatgttatattgttgttggctctctgagtttctctttctctccaagcttatcttactctggtctctgcaatctgtataattgtcttctttacttttgtctttagaaagctttaaatagagatactgggaacgattaactgtgtcagaatcacaaagttctgctgctttacagattaattgtagagacattatgccgatgctttaaaaggcagaaagaacctggatgcagaatggagggtcacagcaggatcgtggccaatgacacttcctgcccaggaagtgtccacaggaggagtctttgaagactagcaagaaaatgcagggcaccttcctggatgcatcaaccttgacctcagtggtctataatagccctgcagtccagaggtcccgctactagaaattctaagtgttggagacaaaagtgaaatgccaagggggaatg

SEQ ID NO: 609833 - DNA, 598 bp, Homo sapiens
tagtggttaatatgctgcttcttgcaaaggcatattacaacttataatcttcctttatggatgtatgttgttagtgcttaatcaggcatgtgaatgtattcaggtgttaaaccattctattagctgggaaattgcactattatttgctgagctgtttatgttatattgttgttggctctctgagtttctctttctctccaagcttatcttactctggtctctgcaatctgtataattgtcttctttacttttgtctttagaaagctttaaatagagatactgggaacgattaactgtgtcagaatcacaaagttctgctgctttacagattaattgtagagacattatgccgatgctttaaaaggcagaaagaacctggatgcagaatggagggtcacagcaggatcgtggccaatgacacttcctgcccaggaagtgtccacaggaggagtctttgaagactagcaagaaaatgcagggcaccttcctggatgcatcaaccttgacctcartggtctataatagccctgcagtccagaggtcccgctactagaaattctaagtgttggagacaaaagtgaaatgccaagggggaatg

SEQ ID NO: 609834 - DNA, 626 bp, Homo sapiens
ttaaaaaatgaaaataaaataaaaacaaacctgggaatcctaaatgtctgggttacgtggccatctttaagattctaaaatcatgagttgaaagaaaatgactatattcacacatggctctaacagttgtatatattgaatagtctgaaaaaatatattttttctggtacttgaccatttcagttactcaccactgttaccaacaggcctgggtaacagcctcttctgagtggacttctaagactgtggtcatggaaatgcagctcagggaccactgtgtgacaagcagagtggaagcgggaggtgtgggcaccattcgccctggtggtttgctccatgaaagggggatagtgctggctcatgacaaagaaragaaaactggtgcgacaccccatggttaacgtgacggcacgtggctaatgaacacttaatgatccctcgcctgcacgtttctgtcacccatttgagaatgtcacttgttttatacttagccctacagtgcgggattagcttcttgctaaagtgaattagtcaaggttctttagaaatcagaacaaaagtgctagaagatgtgtacagatatgaagagactgaacatgtacacactggttcagataatgtataat

SEQ ID NO: 609835 - DNA, 371 bp, Homo sapiens
gtttcccagtgagcttcagtgaggaagagacatgactttcatcgttctgacctttaaggcgaagtccttgaccagcagcctcacacccacctgggggcctgtttgggatacagagtctcaggcctgcccggggcctgctgagtgtgaagctgtgatttcacaagatgcccaggaggtgctgtgctcattaacctgtcctcgaaggcacctccagcaggacttggagcaggtgcacagtcggcactggccaacggctggcaagagggtggtgcyggagagtggaaaacctggacccgatcctgaaacaaaccaagaaaccaacagaaaccgcacgtgggccaatcagcagggggaagccaccgccccagaat

SEQ ID NO: 609836 - DNA, 371 bp, Homo sapiens
gtttcccagtgagcttcagtgaggaagagacatgactttcatcgttctgacctttaaggcgaagtccttgaccagcagcctcacacccacctgggggcctgtttgggatacagagtctcaggcctgcccggggcctgctgagtgtgaagctgtgatttcacaagatgcccaggaggtgctgtgctcattaacctgtcctcgaaggcacctccagcaggacttggagcaggtgcacagtcggcactggccaacggctggcaagagggtggtgctggagagtggaaaacctggacccgatcctgaaacaaaccaagaaaccaacagaaaccgcacgtgggccaatcagcagggggragccaccgccccagaat

SEQ ID NO: 609837 - DNA, 484 bp, Homo sapiens
cagcctcctgcagagctggaggtaagaaactcgtgctgtcatatgccacctggcgtgtggcactttgttacgacagccacaggtggggggcgaggaccatctgctgaggaagcttcatttataccgggagggatgcgtggaaactgaacagccccgcatcatcccccgccgcccccacccctttctagccccagtcagtctagggaataacaaaaacctgtgattctaaagcatcttccaaaccagtaacgggcctcakagagagagatggggacagtcaggaaacttagtcatattagtcataattctaaagaaaattatcttcctgtttgttttcaaaaataccagttttcttcaaatatgaatataagcctgatcaattggttcattatattgaaatgttcagttacgtacaataattataattaagcactgaaatccaactcaaaccaatctatttaaatgaacccgaacctacgagaaa

SEQ ID NO: 609838 - DNA, 636 bp, Homo sapiens
tcaccatgttggccaggctggtcttgaactcttgacctcaggtgatatgcccgccccggcctcccaaagtgctgggattacaggtgagagccaccacacccagacttcaactgatttttgacaaaggtgcaaaggcaattcaatggaaaaggattatgctttcaataaatattgctgtaatgattgaatgatcagacttattttttttacttgtttacttgtttttatttgtttacttgcttttattgtttgtkttttgctttttgtttaggggaagatttttgttttgttttgttttgtggggggggttgggagaggagatttgggtattttgttctgttttgtttctagaaacctagcaccgaaaatgtgatgacctggctgaagttcaaaagatgaaaatgtgatgaccgggctggagttcaaaagacaggtgaaggaagatttgcaattatttcagcaagaagataaaaggtctgtattaatttcaacatgtgtttttgtgatagaatacatagcatttcatgacctattggttgaggagaaggaagtgaagggagaagactaacttgtgacttaggaacctattttttgatagtataataaataaaatagggcattcagaggcaagaaggg

SEQ ID NO: 609839 - DNA, 636 bp, Homo sapiens
tcaccatgttggccaggctggtcttgaactcttgacctcaggtgatatgcccgccccggcctcccaaagtgctgggattacaggtgagagccaccacacccagacttcaactgatttttgacaaaggtgcaaaggcaattcaatggaaaaggattatgctttcaataaatattgctgtaatgattgaatgatcagacttattttttttacttgtttacttgtttttatttgtttacttgcttttattgtttgtgttttgctttttgtttaggggaagatttttgttttgttttgttttgtggggggggttgggagaggagatttgggtattttgttctgttttgtttctagaaacctarcaccgaaaatgtgatgacctggctgaagttcaaaagatgaaaatgtgatgaccgggctggagttcaaaagacaggtgaaggaagatttgcaattatttcagcaagaagataaaaggtctgtattaatttcaacatgtgtttttgtgatagaatacatagcatttcatgacctattggttgaggagaaggaagtgaagggagaagactaacttgtgacttaggaacctattttttgatagtataataaataaaatagggcattcagaggcaagaaggg

SEQ ID NO: 609840 - DNA, 539 bp, Homo sapiens
cttggccacccctccaggaatgtgagacattgccacaggctcctggaagcctttttggaaatgccctccctgaaggggtttcatcaatggcaagaaaccaaattggctctagagtctgatggaaatattgtattcgggccttagatggtgtcaagactatgctctgttctgggctggtaaccagcatggagaaatgccaccattggacwttggctaggaaatgagttcaagagataataaagtgcaaaaacaaaaagtgaaaagatgtattttttttaaacatttatttattcatttatctgtagagataagttctccctatattgcccaggctggtcacaaactcctggacccaagcaatcctcccacctcggcctcccaaagtgctgggattacaggcatgaaccatatgcccagccatatatatttttttttttgagatagagtctggctctgtcacccaggctggaatccagtgactcaatctcagctcactgcagcctccactcccaggctgaagccatcctccagtagctggg

SEQ ID NO: 609841 - DNA, 591 bp, Homo sapiens
ttattaactacagtcaccttactgtgaaatagagtaccagaacttatttctgctatctatttgtaattctgtacccattaaccaatctctccccattccccacttcctcctattttccccagcctctgttaactactattctactccatacttctatgagattagctttttaatattctgcaaatgagtgacatcatgtagtatttgtctttctgtgcttggcttatttgatttaacatattattgtccatgttcatccatgccaccacaaataacaggacttcattctttcttatggatgagtagtattccattgtgtattcatgccacattttctttattaattcatccattgatggatacttcagttgaccctatatcttagctattgtgaatagtgctgaaaaaaawaataataaaaagccataggagtgcagatatctccttgacatactgattccatttcctttggataaatgcccagtagtgagactgctaaatcacatggttatttcactttttaaattttttgaagaacttccgtaatgttttccataatggctggactaatttacactcccactcgtgtgt

SEQ ID NO: 609842 - DNA, 621 bp, Homo sapiens
agaaattttagaagaattttgagtattccgtgttatctgatttgtatttaaaatagactgtggatcctagaacaagtgtaaaagcaaaaggctgttgaaaaaaaatccaggtaggagaagatagtagcttggaccagtatggggtgatgaaggtcctgagagtggtcagattctacacatatctggaattaaagcatacagatttgctgatgatttggtttgcaagaggagtcaaggatgatgccaagttcaaaataattgcccgttttgtagatggcaaagccaaaatgaatattctctttcaaaagtaatcttatatcccagggwtctctaagccgagaacattggtaaacaaaactcacagattctgcaatctggaatgggaaaaatttcatcttcatctttataaatttagcattactgtaattataaaggtagacaacaaaccactgtagaattaacaatgtctgtagctttatcaccaatagaattcacatacgtattcatattaccttatatttggtgcagatatctgaaaatgtcatttatactcatcactacttcccaataattactaccaattatatctgctgccagaccttatgatttaatatgttcatt

SEQ ID NO: 609843 - DNA, 621 bp, Homo sapiens
agaaattttagaagaattttgagtattccgtgttatctgatttgtatttaaaatagactgtggatcctagaacaagtgtaaaagcaaaaggctgttgaaaaaaaatccaggtaggagaagatagtagcttggaccagtatggggtgatgaaggtcctgagagtggtcagattctacacatatctggaattaaagcatacagatttgctgatgatttggtttgcaagaggagtcaaggatgatgccaagttcaaaataattgcccgttttgtagatggcaaagccaaaatgaatattctctttcaaaagtaatcttatatcccagggttctctaagccgagaacattggtaaacaaaactcacagattctgcaatctggaatgggaaaaatttcatcttcatctttataaatttagcattactgtaattataaaggtagacaacaaaccactgtagaattaacaatgtctgtagctttatcaccaatagaattcacatacrtattcatattaccttatatttggtgcagatatctgaaaatgtcatttatactcatcactacttcccaataattactaccaattatatctgctgccagaccttatgatttaatatgttcatt

SEQ ID NO: 609844 - DNA, 627 bp, Homo sapiens
gcctgggtcacaaattgaatcaagtcccatgggagtggctcttggttgatcaaccagtaggtcagctcaaagtccaccttggaccccagcatattagtaacattctttgcattttataaaggaaaacattgtcagatttcaaagaacttgaaaagcatatcaagatattgtttaataaataggtgacacaaactcatgtgatatatactttttttcagaaataaagcaatacatgccaaatgaatacttaatttcataatgatggtatgtcatcatagttatactttatatgttggatatctatattatatataattatacataactgtagttagacatctaactggacttttgtttttcaaattttattttggaatcaagggcacctgtaggtttgttacaaagctatattgcatgatattgaggtttggggtgtgattgaactggtcacccaggaagtgaccatagtatccaataggtagtgtttagctcttgcctccctccttctctagtaatccccagtatctaytgtttcccatctttatatccatgtgtgcccaatggttagctcccacctataagtgagactatgtgatatttagttttctgtttctgcactagttcact

SEQ ID NO: 609845 - DNA, 622 bp, Homo sapiens
taagagatgcctacctacttaaaagtatttagcaacatatttgcctgctaggctgtttttaatttcaaggaggaagggttgtggttacctgatttgttgttatcagcttcagtcgcttgagtactctcttagagttctcacaacgggactaaattggaaatgtaaccaacaggtgatccattaaggacttgagagcagttaagtcttcctttgggatgtatacttttacagccaataagcctggccttactagctcctagtcagtttgcttgccaataataaagcctcataatgtaacagagtgacacccagtagagccactcctcttaggtttccaccgtcaatattgactctagaaagcctcttaaaaaggcatgggattcactattctgttagaaayccttatgggactcagaaagaagatgactgccatgtcttagttagcttggcacaggttcttgaagataatactacttttaaaaacacttttaaattatttcctgaaataaaagagagtcactaaatggctttaaaatttgtgttcagtaatattaatcatctggcatcataatgtatacacatggccagacagttatctctatgatttatgtcctaaccaatt

SEQ ID NO: 609846 - DNA, 456 bp, Homo sapiens
agatgaatgcttttacatcttgaaaccttaattattgtggtgggagggtgaagattatttgtttttagtccttttgggctgctataacaaagtattatagattgaatggcttgtaaatgacagaaacttatgtctcacagttctggaggctagaagtctaagatcagggtgtcagcatggttgggttctggtgaaagtcctcttccaggttgcatgctgccaacttctcattgtgtcctcatgtggcagaaagcagacagaagaagcaagctctctcatgacccttttaagggcactartaccattgatgagggctccattctcgtgacctcatctaatgctatactcctaacaccgtcacacaggggcataggatttaatatatgaaattggcagaacacaagcatgcaagccatgacagatttattacttcatacctctctattctcgattttc

SEQ ID NO: 609847 - DNA, 397 bp, Homo sapiens
agatggatagtcattctacaagggggacactaatatctctatatctagatacgagaaacagatacttttttaaatgtcttctcaaaagcaggtgaagtgagaagaagaatgcaatagacatttatctatgtactctgattagaamatacttaaaccaaagtgataacaaaaatcattacttgtatttctttgcaaaaaatctggaatagaaaaatggcaggagaatacagacaaaattcttgattttcaaatagggaaatgggagtacactctgtatagacaaacaaatttaatgccaatcccttccaagaacctcaaatggattattaaaaactttgaaagaaaactgatgcatgtcctctgttaatgtctttggtttacgtctctgaggacagaa

SEQ ID NO: 609848 - DNA, 397 bp, Homo sapiens
agatggatagtcattctacaagggggacactaatatctctatatctagatacgagaaacagatacttttttaaatgtcttctcaaaagcaggtgaagtgagaagaagaatgcaatagacatttatctatgtactctgattagaacatacttaaaccaaagtgataacaaaaatcattacttgtatttctttgcaaaaaatctggaatagaaaaatggcaggagaatacagacaaaattcttgattttcaaatagggaaatgggagtacactctgtatagacaaacaaatttaatgccaatcccttccaagaacctcaartggattattaaaaactttgaaagaaaactgatgcatgtcctctgttaatgtctttggtttacgtctctgaggacagaa

SEQ ID NO: 609849 - DNA, 556 bp, Homo sapiens
ggtttctgcacagattatagtgtaatgaaaaatacctattaacctgcttctctaataatttaatatctggtttcctgataccatattaatgcaaatcctacaactataactaaatgagagaactatttagagtagataagtaagttactggttagaggaaagttttaaaacaatgtcttccaaataaggcatcatttttccttatatcttaagtaccaacagatgaatagttattgcacaaggaaaactagctaattcctcctttgatagactttcttttaagactagtagatctgctgatttctatatcaggataacctggagatcattttcaaccaatcagagacaaacttttctccatgatcaataagtatttcttgactgaaagagtgaaggctggctgggtgccgtggtggctcacgcctgtaatcccagcactttgggasgccaaggcaggcaaatcacctaaggtcaggagttcgagaccagcctggccaacatggtgaaatcctgtctctacaaaaatgcaaaaaaaaaaaaaagccagtcatgatgg

SEQ ID NO: 609850 - DNA, 599 bp, Homo sapiens
taattgctcaattatatattaaatacattctaaatattttcactatgtctgtgatacagatcagatgttaaatttatttctacataaggatgagtttcacacttaaagatttcctaaactgctgacttatcatgtaattctgaaggactttatgccttttctaaagcatgtactttgacgtagaatctcatacatagccagactttatattgtttttggattttcacaaatcgtttagtaagatkttctctgccaaaatatattgcattcataatcttaaatccatgaggtacactttattcaacagaataaaaaccaactattttgtcaccattgagtcagtgtaactgattaacacattgttctcattgaaacatatggctagctcataattaactgaaaataattcagtggccttgtctggctttaaatcaagtaatgttctacttgaggcagccatggctgacataatttactatgttagttatattgtagtttaaatcatatcagttcatttcctctctggtattattctttcccatcaagttctatttctttagctatagaatgcctctaagccacatctgtgttggtctaag

SEQ ID NO: 609851 - DNA, 599 bp, Homo sapiens
taattgctcaattatatattaaatacattctaaatattttcactatgtctgtgatacagatcagatgttaaatttatttctacataaggatgagtttcacacttaaagatttcctaaactgctgacttatcatgtaattctgaaggactttatgccttttctaaagcatgtactttgacgtagaatctcatacatagccagactttatattgtttttggattttcacaaatcgtttagtaagatgttctctgccaaaatatattgcattcataatcttaaatccatgaggtacactttattcaacagaataaaaaccaactattttgtcaccattgagtcagtgtaactgattaacacattgttctcattgaaacatatggctagctcataattaactgaaaataattcagtggccttgtctggctttaaatcaagtaatgttctacttgaggcagccatggctgacataatttactatgttagttatattgtagtttaaatcatatcagttcatttcctctctgrtattattctttcccatcaagttctatttctttagctatagaatgcctctaagccacatctgtgttggtctaag

SEQ ID NO: 609852 - DNA, 591 bp, Homo sapiens
ttattaactacagtcaccttactgtgaaatagagtaccagaacttatttctgctatctatttgtaattctgtacccattaaccaatctctccccattccccacttcctcctattttccccagcctctgttaactactattctactccatacttctatgagattagctttttaatattctgcaaatgagtgacatcatgtagtatttgwctttctgtgcttggcttatttgatttaacatattattgtccatgttcatccatgccaccacaaataacaggacttcattctttcttatggatgagtagtattccattgtgtattcatgccacattttctttattaattcatccattgatggatacttcagttgaccctatatcttagctattgtgaatagtgctgaaaaaaaaaataataaaaagccataggagtgcagatatctccttgacatactgattccatttcctttggataaatgcccagtagtgagactgctaaatcacatggttatttcactttttaaattttttgaagaacttccgtaatgttttccataatggctggactaatttacactcccactcgtgtgt

SEQ ID NO: 609853 - DNA, 611 bp, Homo sapiens
catctctaaaaataaaaaatgaaatagaaaaaaaaagagtagaaaaaagaaaccagaatgttcatatggattcatcttttgagtaaagattaattttgtaactacaggtagatacatgaggatctaatgatcatttctaccttcaccccagcaataataaggttcacaatctgtggccctctgtgtcaactccctttctttaaaagtattttacaggcagtggaagtacacagtgtccttcagaagttggatacagatcaaaataatttgtctgaaaagaaacacattcataagggagcccaggctttgaaggaagactgataagctacaaaagctttgtgcaggatggtccccatttctggtggtcagtgaaagcctccagagacacagagagttcacagaaaatgtggaaggggatgggggttggaatagaggaaatcttccaagctttcccaaaactgtacccacttgtgggtacaacagggcagcaatattttaaagcaagaatgaaaattacaaatactactgttacaagtcagattgtgactcttgttttatcaacacaaacygagccaattaatggggctacattcatactagaaatcccaatg

SEQ ID NO: 609854 - DNA, 369 bp, Homo sapiens
cacacatacaacatcttgatcacttcacatattgagtaaatgtggtatttaacaaaatgagttacaagtaatgttaaagaaaaagaaatggcagaaaaagcaagtgagccttttggtttacttaaccaggctaaaaggctattcacagaaaagtgcccttttggaaatatagcaatcccggcccctgaggagactcaaggaagacaatgtgaagagatcaaaggcatttcaccctgacctgtacccatttcaccaaaaggttcattccatccacttttagtgatcagaaagaagcaaagccctggagccacctcaagacacacagsctgactacctctgcacaatgcaaaaagctctctggccagatga

SEQ ID NO: 609855 - DNA, 606 bp, Homo sapiens
ttgctgctacctgctactccccattctccatgcagactctttggtgcagcagaagcagctgtgctttttccttcaatataccccagcagtcagaaaactgccttctgatccccactgggacctctacttttgcccacatatggagagctagagcacagacttgcctgacccagccctcacctggctttgcccctcaatcctaccctggtagcttaataaaaagaacagaaacttttcggagctctatagccccaccaattgcctgagacaccagagtacttcccctgggtacataaggcaaagcayaaatcctaccaccaccacagctggtactcttttgcaagcaccaccttctggttggaggccaactgacataggagattagcatcttcaggcagaagaagacaacatgcaggaaggagaaaagtcatgtgtgacctcagcaatcactattgcctgcaacaccctggctaaccaagagatcctgagtctgtccatgtgaccagttcatctactactacaaccagtacttgagaaaaccaacacactaaggcttttcatgaccaaggaatctcacagcactcccctgccatccccatcagaact

SEQ ID NO: 609856 - DNA, 591 bp, Homo sapiens
taattacaaggcacccaaggttgcagagacctgcctatagattcactgaaaaaaaggtaagaaaagaaacaaaaagttattgaaacttttggggaatagagtaatctaagaccaacttttgcttaaagtaacttcaagaaacagctacactagataaatttcacattcaraaagttttcatcacttccaatctgcctatcaaggtagcctttaaaaactgtgtctgaatttctataattatttggcctgttttcttctgagaacacaattactacagcatgtagggatttgaaatgcaactcattaataactttgcagcatgttaattactctctttgaaaatttaagttaatgaaggagaaaatgtggggttttctttttaaggagtttaatcccctgtcttcctgtgcatataatacagagggactctgtgtatcatttttattttatttaatcacggttgttttgaatccatcctgagcagagacaaatgggcagaaaaaggactgtggatggtagagttctgctagaccatttgttacctaatagcacttgttttatcctgcatgaaggataacatatttaaaacaa

SEQ ID NO: 609857 - DNA, 528 bp, Homo sapiens
aacatattagatatatattattttgcatatcagtataaacattaatatatatttatatagttctattccacagtgatgaagttttacaaggatggagcaagaagtgccagaattaaaatttcaaagtgatcagtataattgattagtaattaagttgcagaaaatatggatagtaactggcaacataatgctctaattattcctattagtttttcaaagaatggcaacaactaaatatgcttctgagtgtctcccctactattttgtcttttttaccaaattgagttctttaagggtttcaattacctattaaacrtctgcactttgattttctgcaaaagcctgaaattcactgaggtcccaaactgaacacttttttcaacacttctgtgccctgtttctcctaattctcctttgcctgcattgcttgtctctgaaataagtgtccaccttgcagcccaaggaagagtccttaacttttgttccactttccctctaccaccaatatttaatttattgctaagcctt

SEQ ID NO: 609858 - DNA, 528 bp, Homo sapiens
aacatattagatatatattattttgcatatcagtataaacattaatatatatttatatagttctattccacagtgatgaagttttacaaggatggagcaagaagtgccagaattaaaatttcaaagtgatcagtataattgattagtaattaagttgcagaaaatatggatagtaactggcaacataatgctctaattattcctattagtttttcaaagaatggcaacaactaaatatgcttctgagtgtctcccctactattttgtcttttttaccaaattgagttctttaagggtttcaattacctattaaacgtctgcactttgattttctgcaaaagcctgaaattcactgaggtcccaaactgaacacttttttcaacacttctgtgccctgtttctcctaattctcctttgcctgcattgcttgtctctgaaataastgtccaccttgcagcccaaggaagagtccttaacttttgttccactttccctctaccaccaatatttaatttattgctaagcctt

SEQ ID NO: 609859 - DNA, 539 bp, Homo sapiens
ctgtgtctcatagattttggtacgatatgtttccattctcatttgtctcagaaaatttaaaatgtccctcttaattttctttaacctttaccttgcactatatacaaaaattaagtcaaaatggattaaaaacctacataagagatctaaaactataaaatgcttagtaaaatgcataccaataaatcttcatgagcttggatttggcagtggattcttatggattcttagatatgacaccaaaaggataagtgacaaaagaaaaataataaattgggcttcttcaaaattaaaagcatggaaagactctatcaagacagtgaaaagacaacccatagaatgggggaaaatatttataattatatatctgattaatccctgatatccatactatgcaaagaactcttacaactcaacaacaaaaagacaatctaatttttaaaaaatcayagaggacttgaacagctaattctccatagaagatatgcaaatgctttgggaggctgaggcaggaggatcacttgaggccagggagacca

SEQ ID NO: 609860 - DNA, 539 bp, Homo sapiens
ctgtgtctcatagattttggtacgatatgtttccattctcatttgtctcagaaaatttaaaatgtccctcttaattttctttaacctttaccttgcactatatacaaaaattaagtcaaaatggattaaaaacctacataagagatctaaaactataaaatgcttagtaaaatgcataccaataaatcttcatgagcttggatttggcagtggattcttatggattcttagatatgacaccaaaaggataagtgacaaaagaaaaataataaattgggcttcttcaaaattaaaagcatggaaagactctatcaagacagtgaaaagacaacccatagaatgggggaaaatatttataattatatatctgattaatccctgatatccatactatgcaaagaactcttacaactcaacaacaaaaagacaatctaatttttaaaaaatcacagaggacttgaacagctaattctccatagaagatatgcaaakgctttgggaggctgaggcaggaggatcacttgaggccagggagacca

SEQ ID NO: 609861 - DNA, 520 bp, Homo sapiens
ataaacacaagctgataactagtgtctgtgagttcctgaattgattcttcattgagtatacttcaaagatgcaggaccatgtctgtctgcaatcacctttagaaaggctgtcttgctgcagagggatgccataagacacttaaagttctctttccagctgatccccgaacttactttactaatgcagcgggtgtaacagcaacaggctttgaartgcaaagccttccttcagttatgcgctcattaaaaactaacatgctctcgtaaaaatccaagaattgtaatgggaaagattttatacgaagagggcaacaaaaccccagattgccctagatccttgtcctttcacttgtttgcctggcacctgctggagatgcagaccaacttactgaactttagacatggcactctgtaaaagtaactaggaccttggagaactttcctgctgacttactcttagatgactatttccattctgttgtttatgtcatttgcttgttcatatatggtcattaacaca

SEQ ID NO: 609862 - DNA, 520 bp, Homo sapiens
ataaacacaagctgataactagtgtctgtgagttcctgaattgattcttcattgagtatacttcaaagatgcaggaccatgtctgtctgcaatcacctttagaaaggctgtcttgctgcagagggatgccataagacacttaaagttctctttccagctgatccccgaacttactttactaatgcagcgggtgtaacagcaacaggctttgaagtgcaaagccttccttcagttatgcgctcattaaaaactaacmtgctctcgtaaaaatccaagaattgtaatgggaaagattttatacgaagagggcaacaaaaccccagattgccctagatccttgtcctttcacttgtttgcctggcacctgctggagatgcagaccaacttactgaactttagacatggcactctgtaaaagtaactaggaccttggagaactttcctgctgacttactcttagatgactatttccattctgttgtttatgtcatttgcttgttcatatatggtcattaacaca

SEQ ID NO: 609863 - DNA, 520 bp, Homo sapiens
ataaacacaagctgataactagtgtctgtgagttcctgaattgattcttcattgagtatacttcaaagatgcaggaccatgtctgtctgcaatcacctttagaaaggctgtcttgctgcagagggatgccataagacacttaaagttctctttccagctgatccccgaacttactttactaatgcagcgggtgtaacagcaacaggctttgaagtgcaaagccttccttcagttatgcgctcattaaaaactaacatgctctcgtaaaaatccaagaaytgtaatgggaaagattttatacgaagagggcaacaaaaccccagattgccctagatccttgtcctttcacttgtttgcctggcacctgctggagatgcagaccaacttactgaactttagacatggcactctgtaaaagtaactaggaccttggagaactttcctgctgacttactcttagatgactatttccattctgttgtttatgtcatttgcttgttcatatatggtcattaacaca

SEQ ID NO: 609864 - DNA, 520 bp, Homo sapiens
ataaacacaagctgataactagtgtctgtgagttcctgaattgattcttcattgagtatacttcaaagatgcaggaccatgtctgtctgcaatcacctttagaaaggctgtcttgctgcagagggatgccataagacacttaaagttctctttccagctgatccccgaacttactttactaatgcagcgggtgtaacagcaacaggctttgaagtgcaaagccttccttcagttatgcgctcattaaaaactaacatgctctcgtaaaaatccaagaattgtaatgggaaagattttatacgaagagggcaacaaaaccccagattgccctagatccttgtcctttcacttgtttgcctggcacctgctggagatgcagaccaacttactgaactttagacatggcactctgtaaaagtaactaggaccttggagaactttcytgctgacttactcttagatgactatttccattctgttgtttatgtcatttgcttgttcatatatggtcattaacaca

SEQ ID NO: 609865 - DNA, 414 bp, Homo sapiens
aaaacataaatgtttaaaaatacagtataacaccaatttacatagcatttacattgcattaagtattataagtaatctaaagatgattttaaagtatatggtaggatgtacgtagattatatgcaattttatattatggacttaagcatctgaggattatggtgtggcgggggcggggggagggcctggaatcaagccctcacagataattgactttgtgataaattgcttttgctgaagtgagtttaccaataatgacacaatgttatttgacagtcctgagcataaatgaaaaaaaaaatgttgttggtacttaatattctgatcacaatttaaacattttcttgacttccttgcagacagctracccctccattgtgtccttgagacttcttgtctccatgcagacttagg

SEQ ID NO: 609866 - DNA, 423 bp, Homo sapiens
ttcacttggctctctcattcttgcttgtgtgcygccatgtaagatgtgcctttcaccttccaccatgattatgaggcctccccagccacgtggagctgtgagtccattaaacctttttctttacaaattactcagccttgggtatgtctttatcagcagcgtgagaacagactaatacacacagtaaaccactcccttctggaaataaccttcagtcgttccccaggcatctcactctccttccctcccttcactctgaccattcccctcaagtccccgtagctgggtcttctcctactgctttctagtaagcatggactctaaggactgcatccttggcctacttatttcatcacttaccacagtttccctgggtgacctcttaaactgcagtatatttagttcctgaatttaagaatggca

SEQ ID NO: 609867 - DNA, 349 bp, Homo sapiens
gacaggaggcagaactcaggtggtaatgctcgctcgcctgctgctctgtgtggctgggttcataacaggccacggactcatagggtcctgtcctacaggaaattgcagagcattgttgaagtctgtaacttctttaggaggatrttaatggtctttgacttaagaacatagtaaatagcagattggtgagtactttgtaacaatgagtaataattgtaggagtgtctaaatttcagtttttcgtagcttatctatagccatttcttcagaggtggtattgaatatcttagcaagaacttgtatgtttcatctatgatgcggttagaaggaagagagatgccaaagaaaa

SEQ ID NO: 609868 - DNA, 530 bp, Homo sapiens
tacgttgccatgcacagcatggcaataatgaaatggtgctattgatggcttttggcatttgcaattttaaggtaaataaaaatgcattggctaatgtctgtctcatctatttattaatacaataataaattgtgtgtaagttttattttttcataccatagtttggggtttttcacattgaacctaagttctgaataaaaatgtgtgatttgcagatgccactgtaccattttcatcttttagtgtgctgcctacttttcactttagaaaaaaaaaaaatgaaatcaactctcttttctttgattcttcaggcttaattggaatggagcactcatgctcaaattaaggggctttcacttaactattctgcttcatttaagaaaaaaaaaaggccttgttagctaagctaagacatggtatttgtgaatccataactagcaaagcatccatcacacagctgcaaaacacaataggtattttggtatasttatatctgtcttagggatctgcagtgtgtgaaaagaagaggc

SEQ ID NO: 609869 - DNA, 358 bp, Homo sapiens
agttaacttctttgaaatataagcatagactgtaaataaatctcaagtttgaacatctctgatgaagaaaggaggcattagttcacttaatgtaattttttgcagatagaccttcctttggagggtataatcaatccaactgttcacaacaaccatctcagtcaggattgcatggcaggcattgtgccaagtatttttttctcagattaatctcacttaaactctttacaaacctccctatgaggttgacactattatcatctccattttgcacatgaagaaagggagattcagagaacaaaagtaaacaaagctaaggtcagttrtctagaaagaaggaaatctgggcgttaaatcc

SEQ ID NO: 609870 - DNA, 542 bp, Homo sapiens
tagctccagaagagagagagagaaatcacctttcctctgccttttttgttttatgtagaccctcaatggattggatagagtccacctacattggcgagaggagatctttcttactcagtccattgaatcaaatgctatcctcttccagaaagaccctcacagacatattcagaaataaggctttatcagctatcctttttttaaattaattaatttatttatttttgaggtggagtctcgctctgtcacccaggctggagtgcagtggcgcgatctcagctcacagcaagctccgcctcccgggttcatgccattctcctgccttagcctcccaagtagctgggagtacaggtgccmgccaccacggccggctaattttttttttgtatttttagtagagacggggtttcaccatgttagccaggatggtctcgatctcctgacctcatgatccacccgcctcggcctcccaaagtgctgggattacaggcgtgagccaccgtgcccggtgggctttatcagctatcttaacccagtaaagt

SEQ ID NO: 609871 - DNA, 575 bp, Homo sapiens
tgatcaatatttaaataatatgaaaataaatattttaaataaccatactgtcagtagaaaaacgtatgaaagaccacacttttattaaattcataaattttcttgggaagcttgttgtaaaataatgtaatagaaaacccaattacttataattatttggcccaaaatatgcagtaactttcctgcgaaaaggtctaagtatgccaatatttgacaaaatgtacatttactgctatttatgcaaaaacatagttgaaaaccgttataaactgcttatcatatctgtatrccaatttatgctgtggcatgtcactctatgccagttctgttcactagaactttctcaaatgctggatatgttttattattatactgtccagaatggtagcccttagtcataagtatcacctcagcatctgaaatgtgactgtgtaacagagaaattcaattatatgtttatttaagtagagtaaatttaagtttaaatagcaacttatgtccactggctattatactagatggtacaactctagaatattagcttaattttcagtcactttattaataaatgttgt

SEQ ID NO: 609872 - DNA, 575 bp, Homo sapiens
tgatcaatatttaaataatatgaaaataaatattttaaataaccatactgtcagtagaaaaacgtatgaaagaccacacttttattaaattcataaattttcttgggaagcttgttgtaaaataatgtaatagaaaacccaattacttataattatttggcccaaaatatgcagtaactttcctgcgaaaaggtctaagtatgccaatatttgacaaaatgtacatttactgctatttatgcaaaaacatagttgaaaaccgttataaactgcttatcatatctgtatgccaatttatgctgtggcatgtcactctatgccagttctgttcactagaactttctcaaatgctggatatgttttattattatactgtccagaatggtagcccttagtcataagtatcacctcagcatctgaaatgtgactgtgtaacagagaaattcaattatatgtttatttaagtagagtaaatttaagttwaaatagcaacttatgtccactggctattatactagatggtacaactctagaatattagcttaattttcagtcactttattaataaatgttgt

SEQ ID NO: 609873 - DNA, 603 bp, Homo sapiens
tttcttctctaatctctgtaaataaaaggaattttaaaaagaggaatacatcttcataaggagattaatttgcaaaccaaagtgtaaaaactcctactcactgatgaggccagctttaccttgataacaagattttttaaaaaaagacatcacaagaaagaaaaaactatatgccactatttttatgaatatagaggtgtaaatcttttaaaatagtaccaaactgaatccagcaacataaaaagaggattttatgtcatgatcaagtgagatttactccagaaagcaaggtttgtttaacataaactaatcgaytaattaatgtaacacatatgaaaagaatgaataataaaaatcacaagatgtacttaatagatgcagaaatagcatctgaaaaaaaatacaacacccttccatgacaaaaacacacaaaacaaactgaaatagaaaagggtacctccctaatttcataaagagcattacaagaaatcctcagctaaggtcataccaaatggtgaaagactaactgctttctccctaataagagcaacaagacaaggatgtttgctcttgtcatttgtagtcaacattgcactgaagttt

SEQ ID NO: 609874 - DNA, 584 bp, Homo sapiens
ttgatgtggagtattttttcatatgcttatttgttatctttttatcttctttggttactcatggttttaaaatcccatgcttcaaaatagataaattaggaatgtgttcctttctgatacgaaaataaagggtttaccaagtagagaattacagagagtacaaataaacaaacagatgcttttacaaatatattaatatagtctgtcagagaacaatgaattcttgaagttgtttgggcaacaaaactgaagtttctttgtgagtcttatmaaacaaatttctgctatcatgtggctatttctcagatggaaaaagcttcttcttgactaaatatgaacagtcagtttgtcatctaagtttgaaataactgaaaaaaaaaaacgtatttaggttcaagtctgtgagtattatcagatattgagtacaaaaaattctataaagtaaaactctaaaatcatatgatatctagagttttagtggcaaaatatatttctttgatataataaggaacataaaataatgccatattcccaaatatattttctttattttctttaatactttagaaatcacctccctcaca

SEQ ID NO: 609875 - DNA, 489 bp, Homo sapiens
gcaacaccatttgcaatttcaaaaatatggaaccatcccaaatgctcaccaatcaacgagtggataaataaaactttttatataaatatatacacacacacacaccatggaatactactcagccataaaaaggaacaaaataatggcattcaaagcaacstggatggaattggagatgagtattctaagtgaagtaactcaggattggaaaaccaaacattccatgttctcactcacaagtgggagcaaagcttatgcctttatgaggacacaaaggcataagaattatacagtggactttgggaactcaggggaaagggttgaaggggggatgagggataaaagactacacattgagtggagtgtacactgcttgggtgataggtacatcaaaacctcagaaataaccgctaaataaattcaagtaaccaaacaccacttgttccccaaaaacctattgaaataataattttataaagatacagagtg

SEQ ID NO: 609876 - DNA, 493 bp, Homo sapiens
tgggaggagctacgggaggtgggcaggagccacctggtcagggaacacttcggagctcagggtgaggactgtggacttcattgcaaggtrtgagacatgcactggaggcttccgtgcagcggagggatgcctactcagtggtgtgctggagcgggctcatgggagcttctgagagcctcttggcacgtctcttcccagctccttattcagtgaaatcatgttgataagtggcttgatctgggttgcagacagttacagattctcctcgatttatcaggacacaatctgatcaacccattgtaagtgaaaaatatcatcagtcaaaactgcatttaacaccatctaaacccttcctaaagtcaaaagatcataagtcaaaccatcataagcccaggactgtctatatttataacacaggagtttatagcagatgctactcttcccctagagagctagttgttaaatgtttaccagcacaccactggaacaaact

SEQ ID NO: 609877 - DNA, 493 bp, Homo sapiens
tgggaggagctacgggaggtgggcaggagccacctggtcagggaacacttcggagctcagggtgaggactgtggacttcattgcaaggtgtgagacatgcactggaggcttccgtgcagcggagggatgcctactcagtggtgtgctggagcgggctcatgggagcttctgagagcctcttggcacgtctcttcccagctccttattcagtgaaatcatgttgataagtggcttgatctgggttgcagacagttacagattctcctcgatttatcaggacacaatctgatcaacccattgtaagtgaaaaatatcatcagtcaaaactgcatttaacaccatctaaacccttcctaaagtcaaaagatcataagtcaaaccatcataagcccaggactgtctatatttataacacaggagtttatagcagatgctactcttcccctagagagcyagttgttaaatgtttaccagcacaccactggaacaaact

SEQ ID NO: 609878 - DNA, 497 bp, Homo sapiens
tgatccatagccagagtgctttggggatacagtgaaattctctacaataagaaatcatggattaatgtccacaggttcattgtgatgagcttcattatctcagggctgcaaacatatttgaccttcctactgtaagccatattcatttccacacgaagcatgtkctcccctgctgagacaaccaaggcgatggaggtgtggggggaatatcctattgcccaactctggcatagagtctccaagccagacacactacttcttgccttcacacccgtgacctggaaaagttcaaacaagtgtggggcatcctgcaaaccacatgagagatgctgtatggcccacagggtaactggccctgggcatgaaacagtgagagctggtaagcatgaggcacggtgaacatgggagggcactcagaacagccaactgccagagaagatctattagatgagcaaaaaagaaaatgaaaacgaggaatcgtatagaatgtaacatca

SEQ ID NO: 609879 - DNA, 568 bp, Homo sapiens
tttcttgactcaatggatgttactaataattagaagaaaacatttattatatatctcctatgcatctgacaatttatactcacatagayaatgaagagatcattactgtcctccaaaattgatgctctccttccacaggggcaaggttgttgctagaaggcagctgcccaattagggattagatctcccagtctcacctgcaactaggctgagccacatggctgttccttgtcaatgggatgtgactagaagtaatgtgtatcagttctataccaatacatttaaggagtatgccttattcttactctctctttccacttctcttgaagggacataaaccacgagatcatagaggacagcagagctaccagatagaaggagcctgggtctctacctcaccaagtggagggaagccaggagcactgttcaggacacactggcctgttcaaggagcaagagagaacctactatgttaacccattgaaatttggggggttatttgttagagcatctagccctgcttaatctagtacataaatcttgcaagagaggtattttagattttaaa

SEQ ID NO: 609880 - DNA, 587 bp, Homo sapiens
taaacagttcctttaattctcaattcttgtaaatctatagagttcgcatttatgccatatccacctctgctttgaaaacatacctggggattttcaccccacctccctcttccacatacactcatgcacaagcacaagaatgcacgmgtttaactgccttcaaatgagagctccaggcccaggagaacggtctgacttagaaagcaccttgccataatttctttccctgtatcaccctgagtgaatgcaatgccaggagacaaataaagtcccaaaccaaaccacccagggatttcgaagctttcttcactccctctggcttttcctcctctttggtgatatcaaagccaattcaggccccactcagttctgtccatatggagcttctgtcaatgggtgggggtggcaagaagaagcctttcaggaaacagaaaccatcccaacaccaatgtcttacatctggaacacagtgtatattcaatatatatctgttgagtgaaccaatggtgcatctcaatatagaaaaaagacagagtgcatacatgagaaaaaattccctcccacccaaggcacaatcccaactcagc

SEQ ID NO: 609881 - DNA, 589 bp, Homo sapiens
actgaattaatgaattggtgagtgaatgagtgaacaaacaagccatttaaggaagaaatcagctggaactctgatccactctctacacatcaaaccatgctatgctgacagttaaagtgacatgccttctttaccacagagcagggagtctcatcccaagcccacagagagaagtctcaggatggacacattgggcccctgtccccttcaactcacatgtgaagccccacctttgagagtgaacatttgcctgatcatacctccctgagctcatcccacactgcctcacggggactaaaggaacctgcaaccacagagccttagaaccatggggcccttggggttgtgaagtaactgccagtatggggaaaagtcagtgaaagaaggaacttggagccaggagatgtggtctcaagtcctggatctagtgcctgctagcaattcatgtgccctctctgatcctcggtttcttcatctgtaaaatgaggctagcaaggtcttttctatggcattwtgaggacaagatgaagcaatgtacataaatgcgctttctaaaccatgcacaccctcaacttataggccaaagaac

SEQ ID NO: 609882 - DNA, 666 bp, Homo sapiens
cagagccgcatccagacaagcacggggaccaccgcctctggggagctccgcgagctcttcggagaggcagcagcagcagcccgccgctgtgaactgttgaatctaaatgcaacctctgcgaagctccattcctcaagaaggaaaaaaaaaaaaaagaaaaaagaaaaaaaaagcgggtggtagggcttgggggtgcccagtttctggaggaaaatatttttttcaaaatgccagtgtgtggtggtgttcagggaccagagaggagaggggtggagtaggctgctcttcaaacatagctcctcttctggcagacgcaccacctagttcagggagagaggcaggcaccggcccgctaggtaacagtttggtgatttattggttgggggaaggggtgggaaggaggggaaaatgaaaacaaaagaactttaaaaaaaaataaacaaagacgaggacggggttacgatgacatgctttataacgccagcccctgcaagtccatctaagaaattccaccgcgaagacttgggtctttatatctgccagcagagacgcatccaraggttggagaaagagggagggaggtggggagagcgatattgaggttcctgcgtaaaccgcaatgcccaaaatctcaaaataagaagtcgatccaagcgaaaagggaca

SEQ ID NO: 609883 - DNA, 402 bp, Homo sapiens
ttcactagaatttgagaaccatctccttgctttctgaatctgatctttcgtttcctaaaaaggctcgatcacttcaggcaagatatttttgggagctgctggtaaggacttaccaatgatcacttttctaagtgaactgccattagctaagcactcacgtaccatctgagggggcagaaagtaattgcccattaatgcactgctgtttctcacccacttccttcctcaaatcttcccctgtgctgtgtccggcactcttactaacctctccattaggaacatctagtttcaagtcttagargactgtgtgtatttcccagggactattttatgctttcctattttattctctttgtaaaagtcattcaaggattcagtactagaaagatggcagaataagaa

SEQ ID NO: 609884 - DNA, 388 bp, Homo sapiens
atacctagaaacgggtcaaactagaattcaaactcagggctggcagaatccaagattcagactcatcttattaagctaaattaattttcattaatggaagcagtagtacatttttagccatgcatccctttctgcaaaagaaatactactctaagtrtaaatgaattaaacagatgaaggcggagagttacttgattcaactaggagctgaacccaagctccttcctcctgagggaactccatggatgggtttgaataaaaatgtcctgaggtttctgtaaaggtcttcagttctccccagctgaagtctctctatgttcaacaggtgatgaaggtccttggtaggttgtaatttgttgtcttgctgaaccacatatttgaatttcaa

SEQ ID NO: 609885 - DNA, 635 bp, Homo sapiens
tttttgaccttgccttgagcagatgaaagactagttctggaatacaaggtgaactggggcattgattcagtgactggggcaagtagttcaggacagtgacctggttaattgaaaggagccaaagatcagtttttattgtggtaacaactgggtgaattttttacgagcacagcaggtaaaaagacaaggcatccaaacttttctccctattgccctgaacagaccctccacacttgctcccaaggctcttctcacgttatcctctcaagaggaagyctccccaaacctctccacattattgaatcctctcatccttcaattccttatcagtgtttgtccttgtccttggagctctccctgagcactccactcctcaaaaattgctcctccccttcactctggacttttgtgcccaccagtggttgtcttagctttagatttcaaggatgagccaaatttcaaaagaaaccaatataatgtggccaactttctatttttttaagtatgggctttcaaccaccactatttatgctccaacatctcataaaagaaagggcattttagcactaaaatgttggaaggatataatctcagaaaatcctattaaataaatgtagccttatgaaataatcaca

SEQ ID NO: 609886 - DNA, 574 bp, Homo sapiens
tcctgaccactcacaagagtaaaatgcaacatctgtgctaggccaccacagctgtggtccttgatcccaccatgaagcccttggattcataacaaaagtaatgaggtactatctaatgagtgtctactgtatgccaagctctttccctgcacgctctcccaccctttcaaccacccatcaaggtaggtatcatttcccctctgcactgtgagaaccctgaggcaagagaagttaagcaaccaacacagtaaagtgagaaagagagcagtaacctatacccagtctctgtctgcagagcctgtgttctccctgctgtggatctggtgggtgaccagcctatcaggggctaagggctcaagagctactggcaatcaaacagattttgcaaagcatacaactgaaatacgtgagtttgtctcagcaccagaattcctctggagcccacagctctctatcatcaaccacaccagcagctgggactagatttatcagggtcagctctccttgctagaccttctgtccagttggcttctgggcctctgtccactgygggattctgccaccaacccctaca

SEQ ID NO: 609887 - DNA, 613 bp, Homo sapiens
cagaaactgtttgttaaaatctgtatcctttacagagcctagagctaagctttgcacctatactgtaggtgctcaataaatatttaagaaraggagaaaggcttaggcctaggtttcacaatttgtgagtcaggaaattatcactaaattctaggcagttctcagcaagggaaactacagaaatgctaacttgtaatgtcactgtatgattaggaaacaaaattatttcctttgcccctgggccctttgtctttaatctctaactcatgcctactggatacatccaggcaaactgtagcctttaaaaaaagtaacttaatggacaaaggattgttttaatgaacgtacaatttctgagaacaaaggaattattagatccaactacttgagatgcactggtttcagaaaaacactgccacaaagtgtccaaatacaagtccatcaagatttgaagacactaaaactgtccagctgatggtcacagggtcagcaacaatgcatgtctgggaaaggatccaagctggtaaatgtttatactcgttcttccagtgtctggagtgccaggaatctagaaaaaggtggtagggtgttggggcagaaacgaaacagattg

SEQ ID NO: 609888 - DNA, 613 bp, Homo sapiens
cagaaactgtttgttaaaatctgtatcctttacagagcctagagctaagctttgcacctatactgtaggtgctcaataaatatttaagaagaggagaaaggcttaggcctaggtttcacaatttgtgagtcaggaaattatcactaaattctaggcagttctcagcmagggaaactacagaaatgctaacttgtaatgtcactgtatgattaggaaacaaaattatttcctttgcccctgggccctttgtctttaatctctaactcatgcctactggatacatccaggcaaactgtagcctttaaaaaaagtaacttaatggacaaaggattgttttaatgaacgtacaatttctgagaacaaaggaattattagatccaactacttgagatgcactggtttcagaaaaacactgccacaaagtgtccaaatacaagtccatcaagatttgaagacactaaaactgtccagctgatggtcacagggtcagcaacaatgcatgtctgggaaaggatccaagctggtaaatgtttatactcgttcttccagtgtctggagtgccaggaatctagaaaaaggtggtagggtgttggggcagaaacgaaacagattg
